(19) United States
(12) Patent Application Publication
(10) Pub. No.: US 2003/0077808 A1
(43) Pub. Date: Apr. 24, 2003

(54) Nucleic acids, proteins, and antibodies

(76) Inventors: Craig A. Rosen, Laytonsville, MD (US); Steven M. Ruben, Olney, MD (US); Steven C. Barash, Rockville, MD (US)

Correspondence Address: HUMAN GENOME SCIENCES INC, 9410 KEY WEST AVENUE, ROCKVILLE, MD, 20850

(21) Appl. No.: 09/764,891

(22) Filed: Jan. 17, 2001

Related U.S. Application Data
(60) Provisional application No. 60/179,065, filed on Jan. 31, 2000.
(60) Provisional application No. 60/180,628, filed on Feb. 4, 2000.
(60) Provisional application No. 60/214,886, filed on Jun. 28, 2000.
(60) Provisional application No. 60/217,487, filed on Jul. 11, 2000.
(60) Provisional application No. 60/225,758, filed on Aug. 14, 2000.
(60) Provisional application No. 60/220,963, filed on Jul. 26, 2000.
(60) Provisional application No. 60/217,496, filed on Jul. 11, 2000.
(60) Provisional application No. 60/225,447, filed on Aug. 14, 2000.
(60) Provisional application No. 60/218,290, filed on Jul. 14, 2000.
(60) Provisional application No. 60/225,757, filed on Aug. 14, 2000.
(60) Provisional application No. 60/226,868, filed on Aug. 22, 2000.
(60) Provisional application No. 60/216,647, filed on Jul. 7, 2000.
(60) Provisional application No. 60/225,267, filed on Aug. 14, 2000.
(60) Provisional application No. 60/216,880, filed on Jul. 7, 2000.
(60) Provisional application No. 60/225,270, filed on Aug. 14, 2000.
(60) Provisional application No. 60/251,869, filed on Dec. 8, 2000.
(60) Provisional application No. 60/235,834, filed on Sep. 27, 2000.
(60) Provisional application No. 60/234,274, filed on Sep. 21, 2000.
(60) Provisional application No. 60/234,223, filed on Sep. 21, 2000.
(60) Provisional application No. 60/228,924, filed on Aug. 30, 2000.
(60) Provisional application No. 60/224,518, filed on Aug. 14, 2000.
(60) Provisional application No. 60/236,369, filed on Sep. 29, 2000.
(60) Provisional application No. 60/224,519, filed on Aug. 14, 2000.
(60) Provisional application No. 60/220,964, filed on Jul. 26, 2000.
(60) Provisional application No. 60/241,809, filed on Oct. 20, 2000.
(60) Provisional application No. 60/249,299, filed on Nov. 17, 2000.
(60) Provisional application No. 60/236,327, filed on Sep. 29, 2000.
(60) Provisional application No. 60/241,785, filed on Oct. 20, 2000.
(60) Provisional application No. 60/244,617, filed on Nov. 1, 2000.
(60) Provisional application No. 60/225,268, filed on Aug. 14, 2000.
(60) Provisional application No. 60/236,368, filed on Sep. 29, 2000.
(60) Provisional application No. 60/251,856, filed on Dec. 8, 2000.
(60) Provisional application No. 60/251,868, filed on Dec. 8, 2000.
(60) Provisional application No. 60/229,344, filed on Sep. 1, 2000.
(60) Provisional application No. 60/234,997, filed on Sep. 25, 2000.
(60) Provisional application No. 60/229,343, filed on Sep. 1, 2000.
(60) Provisional application No. 60/229,345, filed on Sep. 1, 2000.
(60) Provisional application No. 60/229,287, filed on Sep. 1, 2000.
(60) Provisional application No. 60/229,513, filed on Sep. 5, 2000.
(60) Provisional application No. 60/231,413, filed on Sep. 8, 2000.
(60) Provisional application No. 60/229,509, filed on Sep. 5, 2000.
(60) Provisional application No. 60/236,367, filed on Sep. 29, 2000.
(60) Provisional application No. 60/237,039, filed on Oct. 2, 2000.
(60) Provisional application No. 60/237,038, filed on Oct. 2, 2000.
(60) Provisional application No. 60/236,370, filed on Sep. 29, 2000.
(60) Provisional application No. 60/236,802, filed on Oct. 2, 2000.
(60) Provisional application No. 60/237,037, filed on Oct. 2, 2000.
(60) Provisional application No. 60/237,040, filed on Oct. 2, 2000.
(60) Provisional application No. 60/240,960, filed on Oct. 20, 2000.
(60) Provisional application No. 60/239,935, filed on Oct. 13, 2000.
(60) Provisional application No. 60/239,937, filed on Oct. 13, 2000.
(60) Provisional application No. 60/241,787, filed on Oct. 20, 2000.
(60) Provisional application No. 60/246,474, filed on Nov. 8, 2000.
(60) Provisional application No. 60/246,532, filed on Nov. 8, 2000.
(60) Provisional application No. 60/249,216, filed on Nov. 17, 2000.
(60) Provisional application No. 60/249,210, filed on Nov. 17, 2000.
(60) Provisional application No. 60/226,681, filed on Aug. 22, 2000.
(60) Provisional application No. 60/225,759, filed on Aug. 14, 2000.
(60) Provisional application No. 60/225,213, filed on Aug. 14, 2000.
(60) Provisional application No. 60/227,182, filed on Aug. 22, 2000.
(60) Provisional application No. 60/225,214, filed on Aug. 14, 2000.
(60) Provisional application No. 60/235,836, filed on Sep. 27, 2000.
(60) Provisional application No. 60/230,438, filed on Sep. 6, 2000.
(60) Provisional application No. 60/215,135, filed on Jun. 30, 2000.
(60) Provisional application No. 60/225,266, filed on Aug. 14, 2000.
(60) Provisional application No. 60/249,218, filed on Nov. 17, 2000.
(60) Provisional application No. 60/249,208, filed on Nov. 17, 2000.
(60) Provisional application No. 60/249,213, filed on Nov. 17, 2000.
(60) Provisional application No. 60/249,212, filed on Nov. 17, 2000.
(60) Provisional application No. 60/249,207, filed on Nov. 17, 2000.
(60) Provisional application No. 60/249,245, filed on Nov. 17, 2000.
(60) Provisional application No. 60/249,244, filed on Nov. 17, 2000.
(60) Provisional application No. 60/249,217, filed on Nov. 17, 2000.
(60) Provisional application No. 60/249,211, filed on Nov. 17, 2000.
(60) Provisional application No. 60/249,215, filed on Nov. 17, 2000.
(60) Provisional application No. 60/249,264, filed on Nov. 17, 2000.
(60) Provisional application No. 60/249,214, filed on Nov. 17, 2000.
(60) Provisional application No. 60/249,297, filed on Nov. 17, 2000.
(60) Provisional application No. 60/232,400, filed on Sep. 14, 2000.
(60) Provisional application No. 60/231,242, filed on Sep. 8, 2000.
(60) Provisional application No. 60/232,081, filed on Sep. 8, 2000.
(60) Provisional application No. 60/232,080, filed on Sep. 8, 2000.
(60) Provisional application No. 60/231,414, filed on Sep. 8, 2000.
(60) Provisional application No. 60/231,244, filed on Sep. 8, 2000.
(60) Provisional application No. 60/233,064, filed on Sep. 14, 2000.
(60) Provisional application No. 60/233,063, filed on Sep. 14, 2000.
(60) Provisional application No. 60/232,397, filed on Sep. 14, 2000.
(60) Provisional application No. 60/232,399, filed on Sep. 14, 2000.
(60) Provisional application No. 60/232,401, filed on Sep. 14, 2000.
(60) Provisional application No. 60/241,808, filed on Oct. 20, 2000.
(60) Provisional application No. 60/241,826, filed on Oct. 20, 2000.
(60) Provisional application No. 60/241,786, filed on Oct. 20, 2000.
(60) Provisional application No. 60/241,221, filed on Oct. 20, 2000.
(60) Provisional application No. 60/246,475, filed on Nov. 8, 2000.
(60) Provisional application No. 60/231,243, filed on Sep. 8, 2000.
(60) Provisional application No. 60/233,065, filed on Sep. 14, 2000.
(60) Provisional application No. 60/232,398, filed on Sep. 14, 2000.
(60) Provisional application No. 60/234,998, filed on Sep. 25, 2000.
(60) Provisional application No. 60/246,477, filed on Nov. 8, 2000.
(60) Provisional application No. 60/246,528, filed on Nov. 8, 2000.
(60) Provisional application No. 60/246,525, filed on Nov. 8, 2000.
(60) Provisional application No. 60/246,476, filed on Nov. 8, 2000.
(60) Provisional application No. 60/246,526, filed on Nov. 8, 2000.
(60) Provisional application No. 60/249,209, filed on Nov. 17, 2000.
(60) Provisional application No. 60/246,527, filed on Nov. 8, 2000.
(60) Provisional application No. 60/246,523, filed on Nov. 8, 2000.
(60) Provisional application No. 60/246,524, filed on Nov. 8, 2000.
(60) Provisional application No. 60/246,478, filed on Nov. 8, 2000.
(60) Provisional application No. 60/246,609, filed on Nov. 8, 2000.
(60) Provisional application No. 60/246,613, filed on Nov. 8, 2000.
(60) Provisional application No. 60/249,300, filed on Nov. 17, 2000.
(60) Provisional application No. 60/249,265, filed on Nov. 17, 2000.
(60) Provisional application No. 60/246,610, filed on Nov. 8, 2000.
(60) Provisional application No. 60/246,611, filed on Nov. 8, 2000.
(60) Provisional application No. 60/230,437, filed on Sep. 6, 2000.
(60) Provisional application No. 60/251,990, filed on Dec. 8, 2000.
(60) Provisional application No. 60/251,988, filed on Dec. 5, 2000.
(60) Provisional application No. 60/251,030, filed on Dec. 5, 2000.
(60) Provisional application No. 60/251,479, filed on Dec. 6, 2000.
(60) Provisional application No. 60/256,719, filed on Dec. 5, 2000.
(60) Provisional application No. 60/250,160, filed on Dec. 1, 2000.
(60) Provisional application No. 60/251,989, filed on Dec. 8, 2000.
(60) Provisional application No. 60/250,391, filed on Dec. 1, 2000.
(60) Provisional application No. 60/254,097, filed on Dec. 11, 2000.
(60) Provisional application No. 60/231,968, filed on Sep. 12, 2000.
(60) Provisional application No. 60/226,279, filed on Aug. 18, 2000.
(60) Provisional application No. 60/186,350, filed on Mar. 2, 2000.
(60) Provisional application No. 60/184,664, filed on Feb. 24, 2000.
(60) Provisional application No. 60/189,874, filed on Mar. 16, 2000.
(60) Provisional application No. 60/198,123, filed on Apr. 18, 2000.
(60) Provisional application No. 60/227,009, filed on Aug. 23, 2000.
(60) Provisional application No. 60/235,484, filed on Sep. 26, 2000.
(60) Provisional application No. 60/190,076, filed on Mar. 17, 2000.
(60) Provisional application No. 60/209,467, filed on Jun. 7, 2000.
(60) Provisional application No. 60/205,515, filed on May 19, 2000.
(60) Provisional application No. 60/259,678, filed on Jan. 5, 2001.

(51) Int. Cl. C12N 9/64; C07K 14/575; C07H 21/04; C12P 21/02; C12N 5/06

(52) U.S. Cl. 435/226; 435/325; 435/320.1; 435/69.1; 435/69.4; 530/399; 536/23.1

(57) ABSTRACT

The present invention relates to novel reproductive system related polynucleotides and the polypeptides encoded by these polynucleotides herein collectively known as “reproductive system related antigens,” and the use of such reproductive system related antigens for detecting disorders of the reproductive system, particularly the presence of cancers and cancer metastases. More specifically, isolated reproductive system associated nucleic acid molecules are provided encoding novel reproductive system associated polypeptides. Novel reproductive system related polypeptides and antibodies that bind to these polypeptides are provided. Also provided are vectors, host cells, and recombinant and synthetic methods for producing human reproductive system associated polynucleotides and/or polypeptides. The invention further relates to diagnostic and therapeutic methods useful for diagnosing, treating, preventing and/or prognosing disorders related to the reproductive system, including reproductive system cancers, and therapeutic methods for treating such disorders. The invention further relates to screening methods for identifying agonists and antagonists of polynucleotides and polypeptides of the invention. The present invention further relates to methods and/or compositions for inhibiting the production and function of the polypeptides of the present invention.

[0001] This application refers to a “Sequence Listing” listed below, which is provided as an electronic document on two identical compact discs (CD-R), labeled “Copy 1” and “Copy 2.” These compact discs each contain the following files, which are hereby incorporated in their entirety herein:

| Document | File Name | Size in bytes | Date of Creation |
|---|---|---|---|
| Sequence Listing | PC006_seqList.txt | 20,399,935 | 01/15/2001 |
| V Viewer Setup File | SetupDLL.exe | 695,808 | 12/19/2000 |
| V Viewer Help File Controller | v.cnt | 7,984 | 01/05/2001 |
| V Viewer Program File | v.exe | 753,664 | 12/19/2000 |
| V Viewer Help File | v.hlp | 447,766 | 01/05/2001 |

[0002] The Sequence Listing may be viewed on an IBM-PC machine running the MS-Windows operating system by using the V viewer software, licensed by HGS, Inc., included on the compact discs (see World Wide Web URL: http://www.fileviewer.com).

### FIELD OF THE INVENTION

[0003] The present invention relates to novel reproductive system related polynucleotides, the polypeptides encoded by these polynucleotides herein collectively referred to as “reproductive system antigens,” and antibodies that immunospecifically bind these polypeptides, and the use of such reproductive system polynucleotides, antigens, and antibodies for detecting, treating, preventing and/or prognosing disorders of the reproductive system, including, but not limited to, the presence of cancer and cancer metastases. More specifically, isolated reproductive system nucleic acid molecules are provided encoding novel reproductive system polypeptides. Novel reproductive system polypeptides and antibodies that bind to these polypeptides are provided. Also provided are vectors, host cells, and recombinant and synthetic methods for producing human reproductive system polynucleotides, polypeptides, and/or antibodies. The invention further relates to diagnostic and therapeutic methods useful for diagnosing, treating, preventing and/or prognosing disorders related to the reproductive system, including cancers of the reproductive system, and therapeutic methods for treating such disorders. The invention further relates to screening methods for identifying agonists and antagonists of polynucleotides and polypeptides of the invention. The invention further relates to methods and/or compositions for inhibiting or promoting the production and/or function of the polypeptides of the invention.

### BACKGROUND OF THE INVENTION

[0004] The human reproductive system enables continuation of the species. Human beings reproduce sexually, require the involvement of both a male and a female. Reproduction involves the coalition of sex cells. A new human being begins its development after a sex cell (sperm), created by the male unites with a sex cell (ovum) created by the female. Both the male and female reproductive systems function through the complex interaction of several organs. Diseases or malfunctions of these organs can impair reproduction or cause infertility.

[0005] The Male Reproductive System

[0006] Male reproductive functions can be divided into three major subdivisions; spermatogenesis (the formation and maturation of sperm), performance of the male sexual act (arousal, erection, and ejaculation), and regulation of male sexual functions by the various hormones (mainly testosterone). Associated with these reproductive functions are the effects of the male sex hormones on the accessory sexual organs, cellular metabolism, growth, and on several other bodily functions. The onset of sexual maturation and these reproductive functions in males occurs at puberty, which, in humans, typically begins around age thirteen.

[0007] The male reproductive system is composed of the testes, a pair of organs contained in the scrotum which include the seminiferous tubules and epididymus; secretory glands, such as the prostate gland, seminal vesicles, bulbourethral glands, and urethral glands; tubular passageways, such as the vas deferens and urethra; and the penis, which functions in performance of the sexual act and sperm transmission.

[0008] Common disorders of the male reproductive system include infections, cancers, and inflammations of the above listed components, which are described in greater detail below.

[0009] Disorders of the Testes

[0010] The two primary functions of the testes are 1) production of testosterone and 2) production of sperm. Testosterone produced in the testes is released into the blood stream, where it travels to and acts on a wide range of tissues and organs within the male body. Disorders resulting from testosterone deficiency are manifested in the male reproductive system typically by symptoms of hypogonadism, which is the failure to go through puberty. Specifically, erectile function is impaired, and libido and sperm production are decreased or absent.

[0011] Known dysfunctions of sperm production include aspermia (the failure to produce an ejaculate), asthenospermia (the production of an ejaculate in which less than 50% of spermatozoa are motile), azoospermia (the production of an ejaculate devoid of spermatozoa), oligospermia (production of an ejaculate containing less than 20×100 spermatozoa per milliliter of semen), and teratospermia (the production of an ejaculate in which more than 50% of the spermatozoa are of abnormal shape), all of which result in impaired fertility. Improper sperm formation may result from a variety of factors, including congenital defects, genetic abnormalities, injury, and infection. For example, contraction of the mumps virus early in male adolescence can infect the testicles, leading to permanent complications in sperm production.

[0012] Sperm formation may also be impaired by disorders of the epididymus, the labyrinthine tube system located in each testis where sperm mature. Common disorders include infections (e.g., Neisseria gonorrhoea, Pseudomonas, Enterobacteriaceae, and Chlamydia trachomatis), cyst formation or other obstructions, and enlargement of the spermatoceles (liquid filled cavities in the epididymus).

[0013] During fetal development, the testes mature within the abdominal cavity and descend through the inguinal canal into the scrotum prior to birth. It is well known that the testicles reside in the scrotum because it is cooler than other places within the body cavity, and even minor temperature differences can have a dramatic influence on the ability of the testicle to make sperm. An undescended testicle, sometimes called a cryptorchid testicle, is a fairly common problem in male babies. Typically, testicles undescended at birth will move into the scrotum within the first year of life, however in a small percentage of cases this migration does not occur. Early correction of this problem is crucial in preserving the fertility of the male, as the testicles begin to loose the ability to make sperm very early in life in they are not properly stored in the scrotum. Additionally, undescended testicles have a much higher rate of developing testicular cancer than testicles that descended spontaneously. Testicular cancer is the most common solid tumor in males aged 18 to 35. It typically is extremely aggressive and spreads early. A tumor of the testicle often shows itself by a fast enlargement of the testicle. Bringing the testes into the scrotum will allow for easier and more accurate examination of the testes, hopefully resulting in earlier detection of tumors. Further, undescended testicles are also associated with a greater risk of hernia.

[0014] Disorders of the scrotal pouch commonly involve the small amount of fluid lining the pouch that allows for small movements and cushioning of the testicles. Several causes, such as testicular torsion, trauma, or tumors, may lead to an increase in the amount of liquid, causing the scrotal pouch to bulge. While this condition is harmless, it may cause irritation and discomfort if the bulge becomes too large.

[0015] Another harmless, yet irritating disease of the testes is varicocele, a disorder of the small vein that run the blood from the testicle back toward the heart. Small valves are present in these veins to prevent blood from flowing back toward the testicles. Sometimes, these valves malfunction, causing backflow and subsequent enlargement of the small vessel network in the scrotal sac. This gives rise to dull pain and an uncomfortable “bag of worms” feeling around the scrotum. There is currently considerable debate as to whether this phenomenon also contributes to decreased fertility.

[0016] Disorders of the Vas Deferens and Seminal Vesicles

[0017] In the vas deferens, the sperm become mixed with a viscous, alkaline fluid from the seminal vesicles that constitutes 60% of semen. This fluid contains the components for generating sperm motility and the enzymes necessary for fertilization of the egg within the female reproductive system. Disorders of the vas deferens and seminal vesicles are unusual, however a congenital defect where the vas deferens is absent is known to be associated with mutations in the CFTR gene, and a defect in seminal vesicle function is associated with the hydatid disease of the urogenital system.

[0018] Disorders of the Prostate Gland

[0019] Disorders of the prostate gland are typically manifested by enlargement of the gland, leading to such symptoms as impaired urinary flow, infertility, and pain. For example, benign prostatic hyperplasia is the non-cancerous growth of the prostate gland, a condition that is fairly common in men over sixty. Prostate cancer, too, is extremely prevalent and is now the second most common type of cancer in males. Although men of any age can develop prostate cancer, it is found most frequently in men over age 50. Types of prostate cancers include, but not limited to, adenocarcinomas, transitional cell carcinomas, ductal carcinomas, and squamous cell carcinomas. The prostate is subject to infections or inflammation, which may also result in enlargement of the prostate, such as acute bacterial prostatitis, chronic bacterial prostatitis, and nonbacterial prostatitis.

[0020] Disorders of the Penis and Urethra

[0021] During sexual activity, the penis becomes rigid and erect, enabling penetration and deposition of sperm. An erection results from complex interaction of neurologic, vascular, hormonal, and psychologic actions. Several types of infections and inflammatory disorders can effect the penis and its function. Balanoposthitis is a generalized inflammation of the head of the penis (glans penis) and foreskin, commonly caused by a yeast or bacterial infection beneath the foreskin of an uncircumcised penis. Symptoms include pain, itching, redness, and swelling and can ultimately lead to a narrowing (stricture) of the urethra. Other infectious and inflammatory disorders, such as balanitis xerotica obliterans (a hardening of the tip of the penis which ultimately blocks urine and semen flow), phimosis (the shrinking or tightening of the foreskin), paraphimosis (inability of the retracted foreskin to be pulled back over the head of the penis), and Erythroplasia of Queyrat (an infection causing a clearly defined reddish, velvety area on the skin of the penis). If left untreated, many of these infections may become cancerous.

[0022] Other infections can lead to penile growths, such as the small painless sores associated with syphilis, tiny blisters from the herpes simplex virus, firm nodules from genital warts, and dimpled growths (molluscum contagiosum) from an unknown virus. Small sores and growths are also associated with skin cancers (e.g., squamous cell carcinoma, Bowen's disease, and Paget's disease) that can occur anywhere on the penis.

[0023] The causes of the two major erectile disorders are not well understood. Priapism is a painful, persistant erection unaccompanied by sexual desire or excitement. In most cases, priapism is believed to stem from habitual drug use, but is had also been associated with blood disorders (e.g., blood clots, leukemia, or sickle cell disease), tumors in the pelvis or spine, and infection of the genitals. Peyronie's disease is manifested as a fibrous thickening of tissue that causes the penis to develop contractures so that the shape of an erection is distorted. The curvature of the erect penis can make sexual penetration difficult or impossible and may make erections extremely painful. Current therapies include corticosteroid injections, ultrasound treatments, or, more commonly, surgery, which may lead to impotence.

[0024] Impotence, or erectile dysfunction, is the consistent or recurrent inability to attain and maintain a penile erection rigid enough for satisfactory sexual intercourse. Erectile dysfunction relates only to the erectile capability of the penis, excluding problems of libido, ejaculation, and orgasm. It is now accepted that the majority of cases have a physical and not a psychogenic root. Physical causes include anatomic deformations (e.g., malformed genitalia or penile injury), diabetes mellitus, coronary disease, hypertension, atherosclerosis, high cholesterol levels, multiple sclerosis, stroke, lower spine diseases, and rectal or prostate surgery.

[0025] The Female Reproductive System

[0026] The female reproductive system is comprised of both external and internal organs. The external organs function in permitting sperm to enter the body and protecting the internal genital organs from infection and injury. The internal organs form a pathway (the genital tract) for reproduction, beginning at the ovaries, through the fallopian tubes (oviducts) and uterus, to the birth canal (vagina).

[0027] The sexual and reproductive functions in the female can be divided into two major phases: first, preparation of the body for conception, and second, the gestation and parturition. Gestation and parturition only occur if an ovum becomes fertilized. If fertilization does not occur, the reproductive system undergoes a cycle to ensure frequent readiness for conception and fertilization.

[0028] Common disorders of the female reproductive system include infections, cancers, and inflammations of the organs, which are described in greater detail below.

[0029] Disorders of the Uterus

[0030] Disorders of the uterus include absent bleeding (amenorrhea) and abnormal bleeding. Amenorrhea is normal only before puberty, during pregnancy, while breastfeeding, and after menopause. The absence of menses at other times is considered aberrant and may be indicative of problems in the brain, pituitary gland, thyroid gland, adrenal glands, ovaries, or virtually any other part of the reproductive tract. For example, the hypothalamus signals the pituitary gland to release hormones that cause the ovaries to release eggs. Inappropriately low levels of hypothalamic hormones prevent egg release, halting the menstrual cycle. The same is true for the thyroid and adrenal glands. To illustrate, in Cushing's syndrome, excess production of cortisol by the adrenal glands causes periods to be absent or irregular. The absence of periods can also be caused by growths (e.g., hydatidiform moles) or scarring of the uterine lining due to infection or surgery (e.g., Asherman's syndrome).

[0031] Some women do not undergo puberty at all—consequently their periods never start. Causes include a birth defect in which the uterus or fallopian tubes develop abnormally and chromosomal disorders. For example, in Turner's syndrome, the female was formed from a zygote containing only one X chromosome and shows reproductive abnormalities, such as amenorrhea and chronically immature breasts, labia, vagina.

[0032] Premature menopause is also a condition resulting in amenorrhea. Menopause is considered abnormal when it occurs in women under the age of forty. Causes of premature menopause include genetic (usually chromosomal) abnormalities and autoimmune disorders in which antibodies damage the ovaries. Estrogen replacement therapy can prevent or reverse the symptoms of menopause, however the chance of conceiving a child remains less than ten percent.

[0033] Uterine bleeding is considered abnormal when it is atypically heavy, light, frequent, or irregular. Moreover, bleeding before puberty or after menopause is almost always abnormal. Uterine polyps, fibroids (noncancerous growths of muscle and fibrous tissues), and cancers are common causes of abnormal uterine bleeding and usually can be surgically removed. Cancers of the uterus include adenocarcinomas (cancers arising from the endometrial lining), leiomyosarcomas (cancers of the uterine smooth muscle), and sarcomas (cancers arising from the stroma).

[0034] Aberrant bleeding resulting from hormonal irregularities (commonly referred to a dysfunctional uterine bleeding) occurs most frequently at the beginning and end of the reproductive years and typically results from sustained levels of estrogen. For example, in polycystic ovary syndrome the overproduction of luteinizing hormone stimulates the production of large amounts of androgens—some of which are converted to estrogen-which, without sufficient progesterone to counteract its effects, induces abnormal uterine bleeding.

[0035] Endometriosis is a disorder of the uterus in which patches of endometrial tissue, which normally is found only in the uterine lining, grow outside the uterus. Because the misplaced tissue responds to the same hormone that the uterus responds to, it may bleed during the menstrual period, causing cramps, pain, irritation, and the formation of scar tissue. As the disease progresses, adhesions may form and block the functioning of organs.

[0036] Disorders of uterine contraction include, for example, dysmenorrhea and pre-term labor. During a normal period, the uterus undergoes mild contractions in order to aid in blood flow. Dysmenorrhea results when the contractions become inappropriately strong, inhibiting blood flow to the uterus. This deprives uterine muscle of oxygen, causing severe abdominal pain, as well as nausea, vomiting, diarrhea, headaches, weakness, and/or fainting. Sever cases of dysmenorrhea can significantly disrupt a womans life, leading to heavy work/school absenteeism and cases of pain killer addiction. Pre-term labor is also aserious problem, resulting in a dramatic rise in associated infant morbidity and mortality (83% of infant deaths occur in gestations less than 37 weeks). Therapies for extending the length of pregnancy beyond 32 weeks, and preferably beyond 36 weeks, could significantly reduce the incidence of neonatal morbidity and virtually eliminate a major cause of neonatal mortality.

[0037] Disorders of the Ovary

[0038] Anovulation (the absence of egg release by the ovaries) is a serious condition leading to infertility. The exact etiology of anovulation, especially in women with otherwise normal menstrual cycles, is unclear, however several potential causes are under study, including: impaired follicular development (probably due to low or absent estrogen production or binding), normal follicular development with lack of egg release (probably due to progesterone deficiency), or insufficient production of gonadotropin-releasing hormone from the hypothalamus. Current treatments include clomiphene injections or hormonal therapy, although both can lead to serious side effects such as ovarian cancer and ovarian hyperstimulation syndrome.

[0039] Anovulation is also associated with polycyctic ovary syndrome (also known as Stein-Leventhal syndrome). This syndrome is and endocrine disorder characterized by an elevated level of male hormones (androgens). Other than anovulation, symptoms include growth of male-patterned body hair (hirsutism), excessive acne, irregular or absent menses, excessive bleeding, and obesity. Usually, the ovaries appear enlarged and may contain many follicular cysts.

[0040] Ovarian cancer develops most often in women between the ages of 50 and 70. It is the third most common cancer of the female reproductive system, but more women die of ovarian cancers than of any other. Ovaries include a variety of cell types, each of which may give rise to a distinct type of cancer, including, but not limited to, ovarian epithelial cancer, ovarian germ cell tumors, ovarian papillary serous adenocarcinoma, ovarian mucinous adenocarcinoma, ovarian Krukenberg tumor, malignant mixed Mullerian tumors, and ovarian low malignant tumors.

[0041] Other disorders of the ovaries also include, but are not limited to, inflammatory disorders, such as oophoritis (e.g., caused by viral or bacterial infection), ovarian cysts, and autoimmune disorders (e.g., premature ovarian failure and autoimmune oophoritis).

[0042] Disorders of the Vagina and Vulva

[0043] The vagina and vulva are self-cleaning. Secretions and discharges flow downward through the vagina and vulva, flushing out dead cells and other substances. Despite this cleaning mechanism, infections and inflammation are a common problem. The most common vaginal infections are bacterial vaginitis, candida vaginitis (e.g., yeast infections), trichomonas vaginitis, and vulvitis. Vaginal or vulvar itching, irritation, and abnormal discharge characterize all.

[0044] Cancer of the vagina is extremely rare, accounting for only two percent of all gynecological cancers, and occurs primarily in women over the age of 50. The severity of the disease depends on the type of cancer and its exact location. Varieties include, for example, squamous cell carcinoma and clear cell adenocarcinoma. Once cancer appears in the vagina, it easily spreads to surrounding tissues. Vulvar cancer is equally unusual as vaginal, and is predominantly manifested as a form of skin cancer, e.g. squamous cell carcinomas and basal cell carcinomas. Other vulvar cancers include Paget's disease, cancer of Bartholin's gland, and melanomas. Unlike cancer of the vagina, vulvar cancers typically grow slowly and infrequently metastasize.

[0045] Disorders of the Breast

[0046] Disorders of the breast typically involve the formation of lesions within breast tissue. While many of these lesions are benign in nature, they may lead to cancer if left untreated.

[0047] Benign breast lesions include, for example, cysts, which are non-cancerous, fluid-filled sacs that forma mass within breast tissue. The cause of breast cysts is unknown, though injury may be involved, and their main symptom is pain. While considered harmless, a professional should drain cysts and the fluid examined because cancer of the cyst wall, although quite rare, is possible.

[0048] Other benign breast lesions include fibrous breast lumps (fibroadenomas), breast infection (mastitis), intraductal papilloma, and abscesses. Fibrous breast lumps are small, solid lumps of glandular tissue. These lumps usually appear in young women, often in teenagers, and are easy to remove. Intraductal papilloma are small lumps located within a milk duct, often causing inappropriate discharge from the nipple. Breast abscesses are collections of pus in breast tissue that develop from breast infections that go untreated.

[0049] Breast cancer is the most common cancer among women, other than skin cancer and is the second leading cause of cancer death in women, after lung cancer. The American Cancer Society predicts that there will be about 182,800 new cases of invasive breast cancer in the year 2000 among women in this country and about 40,800 deaths from the disease. Breast cancer also occurs among men, although much less often. It is generally believed that this malignancy arises from a multi step process involving mutations in a relatively small number of genes, perhaps 10 or less. These mutations result in significant changes in the growth and differentiation of breast tissue that allow it to grow independent of normal cellular controls, to metastasize, and to escape immune surveillance. The genetic heterogeneity of most breast cancers suggests that they arise by a variety of initiating events and that the characteristics of individual cancers are due to the collective pattern of genetic changes that accumulate.

[0050] The discovery of new human reproductive system associated polynucleotides, the polypeptides encoded by them, and antibodies that immunospecifically bind these polypeptides, satisfies a need in the art by providing new compositions which are useful in the diagnosis, treatment, prevention and/or prognosis of disorders of the reproductive system, including, but not limited to, disorders of the male reproductive system including, for example, testicular disorders (e.g., hypogonadism, infection (e.g, Neisseria gonorrhoea, Enterobacteriaceae, and/or as described in the “Reproductive System Disorders” section below), asthenospermia, teatospermia, cryptorchid testicle, testicular cancers, varicocele, and/or as described in the “Reproductive System Disorders” section below), prostate disorders (e.g., prostate cancers, benign prostatic hyperplasia, and/or as described in the “Reproductive System Disorders” section below), disorders of the penis (e.g., balanoposthitis, phimosis, genital warts, skin cancer, priapism, Peyronie's disease, erectile dysfunction, and/or as described in the “Reproductive System Disorders” section below); and disorders of the female reproductive system including, for example, disorders of the uterus (e.g., Cushing's syndrome, Asherman's syndrome, Turner's syndrome, premature menopause, uterine cancers, endometriosis, and/or as described in the “Reproductive System Disorders” section below), ovarian disorders (e.g., anovulation, polycystic ovary syndrome, ovarian cancers, and/or as described in the “Reproductive System Disorders” section below), vaginal and vulvar disorders (e.g., vulvitis, vaginal infections, Paget's disease, cancers of the vagina and vulva, and/or as described in the “Reproductive System Disorders” section below), and breast disorders (e.g., breast cancers, fibroadenomas, intraductal papillomas, and/or as described in the “Reproductive System Disorders” section below).

### SUMMARY OF THE INVENTION

[0051] The present invention relates to novel reproductive system related polynucleotides, the polypeptides encoded by these polynucleotides herein collectively referred to as “reproductive system antigens,” and antibodies that immunospecifically bind these polypeptides, and the use of such reproductive system polynucleotides, antigens, and antibodies for detecting, treating, preventing and/or prognosing disorders of the reproductive system, including, but not limited to, the presence of cancer and cancer metastases. More specifically, isolated reproductive system nucleic acid molecules are provided encoding novel reproductive system polypeptides. Novel reproductive system polypeptides and antibodies that bind to these polypeptides are provided. Also provided are vectors, host cells, and recombinant and synthetic methods for producing human reproductive system polynucleotides, polypeptides, and/or antibodies. The invention further relates to diagnostic and therapeutic methods useful for diagnosing, treating, preventing and/or prognosing disorders related to the reproductive system, including cancers of the reproductive system, and therapeutic methods for treating such disorders. The invention further relates to screening methods for identifying agonists and antagonists of polynucleotides and polypeptides of the invention. The invention further relates to methods and/or compositions for inhibiting or promoting the production and/or function of the polypeptides of the invention.

### DETAILED DESCRIPTION

[0052] Tables

[0053] Table 1A summarizes some of the polynucleotides encompassed by the invention (including cDNA clones related to the sequences (Clone ID NO: Z), contig sequences (contig identifier (Contig ID:) and contig nucleotide sequence identifier (SEQ ID NO: X)) and further summarizes certain characteristics of these polynucleotides and the polypeptides encoded thereby. The first column provides a unique clone identifier, “Clone ID NO: Z”, for a cDNA plasmid related to each reproductive system associated contig sequence disclosed in Table 1A. The second column provides a unique contig identifier, “Contig ID:” for each of the contig sequences disclosed in Table 1A. The third column provides the sequence identifier, “SEQ ID NO: X”, for each of the contig polynucleotide sequences disclosed in Table 1A. The fourth column, “ORF (From-To)”, provides the location (i.e., nucleotide position numbers) within the polynucleotide sequence of SEQ ID NO: X that delineate the preferred open reading frame (ORF) shown in the sequence listing and referenced in Table 1A as SEQ ID NO: Y (column 5). Column 6 lists residues comprising predicted epitopes contained in the polypeptides encoded by each of the preferred ORFs (SEQ ID NO: Y). Identification of potential immunogenic regions was performed according to the method of Jameson and Wolf (CABIOS, 4:181-186 (1988)); specifically, the Genetics Computer Group (GCG) implementation of this algorithm, embodied in the program PEPTIDESTRUCTURE (Wisconsin Package v10.0, Genetics Computer Group (GCG), Madison, Wis.). This method returns a measure of the probability that a given residue is found on the surface of the protein. Regions where the antigenic index score is greater than 0.9 over at least 6 amino acids are indicated in Table 1A as “Predicted Epitopes.” In particular embodiments, reproductive system associated polypeptides of the invention comprise, or alternatively consist of, one, two, three, four, five or more of the predicted epitopes described in Table 1A. It will be appreciated that depending on the analytical criteria used to predict antigenic determinants, the exact address of the determinant may vary slightly. Column 7, “Tissue Distribution” shows the expression profile of tissue, cells, and/or cell line libraries which express the polynucleotides of the invention. The first number in column 7 (preceding the colon), represents the tissue/cell source identifier code corresponding to the code and description provided in Table 4. Expression of these polynucleotides was not observed in the other tissues and/or cell libraries tested. For those identifier codes in which the first two letters are not “AR”, the second number in column 7 (following the colon), represents the number of times a sequence corresponding to the reference polynucleotide sequence (e.g., SEQ ID NO: X) was identified in the tissue/cell source. Those tissue/cell source identifier codes in which the first two letters are “AR” designate information generated using DNA array technology. Utilizing this technology, cDNAs were amplified by PCR and then transferred, in duplicate, onto the array. Gene expression was assayed through hybridization of first strand cDNA probes to the DNA array. cDNA probes were generated from total RNA extracted from a variety of different tissues and cell lines. Probe synthesis was performed in the presence of ³³P dCTP, using oligo(dT) to prime reverse transcription. After hybridization, high stringency washing conditions were employed to remove non-specific hybrids from the array. The remaining signal, emanating from each gene target, was measured using a Phosphorimager. Gene expression was reported as Phosphor Stimulating Luminescence (PSL) which reflects the level of phosphor signal generated from the probe hybridized to each of the gene targets represented on the array. A local background signal subtraction was performed before the total signal generated from each array was used to normalize gene expression between the different hybridizations. The value presented after “[array code]:” represents the mean of the duplicate values, following background subtraction and probe normalization. One of skill in the art could routinely use this information to identify normal and/or diseased tissue(s) which show a predominant expression pattern of the corresponding polynucleotide of the invention or to identify polynucleotides which show predominant and/or specific tissue and/or cell expression. Column 8, “Cytologic Band,” provides the chromosomal location of polynucleotides corresponding to SEQ ID NO: X. Chromosomal location was determined by finding exact matches to EST and cDNA sequences contained in the NCBI (National Center for Biotechnology Information) UniGene database. Given a presumptive chromosomal location, disease locus association was determined by comparison with the Morbid Map, derived from Online Mendelian Inheritance in Man (Online Mendelian Inheritance in Man, OMIM™. McKusick-Nathans Institute for Genetic Medicine, Johns Hopkins University (Baltimore, Md.) and National Center for Biotechnology Information, National Library of Medicine (Bethesda, Md.) 2000. World Wide Web URL: http://www.ncbi.nhn.nih.gov/omim/). If the putative chromosomal location of the Query overlapped with the chromosomal location of a Morbid Map entry, an OMIM identification number is provided in Table 1A, column 9 labeled “OMIM Disease Reference(s)”. A key to the OMIM reference identification numbers is provided in Table 5.

[0054] Table 1B summarizes additional polynucleotides encompassed by the invention (including cDNA clones related to the sequences (Clone ID NO: Z), contig sequences (contig identifier (Contig ID:) contig nucleotide sequence identifiers (SEQ ID NO: X)), and genomic sequences (SEQ ID NO: B). The first column provides a unique clone identifier, “Clone ID NO: Z”, for a cDNA clone related to each contig sequence. The second column provides the sequence identifier, “SEQ ID NO: X”, for each contig sequence. The third column provides a unique contig identifier, “Contig ID:” for each contig sequence. The fourth column, provides a BAC identifier “BAC ID NO: A” for the BAC clone referenced in the corresponding row of the table. The fifth column provides the nucleotide sequence identifier, “SEQ ID NO: B” for a fragment of the BAC clone identified in column four of the corresponding row of the table. The sixth column, “Exon From-To”, provides the location (i.e., nucleotide position numbers) within the polynucleotide sequence of SEQ ID NO: B which delineate certain polynucleotides of the invention that are also exemplary members of polynucleotide sequences that encode polypeptides of the invention (e.g., polypeptides containing amino acid sequences encoded by the polynucleotide sequences delineated in column six, and fragments and variants thereof).

[0055] Table 2 summarizes homology and features of some of the polypeptides of the invention. The first column provides a unique clone identifier, “Clone ID NO: Z”, corresponding to a cDNA disclosed in Table 1A. The second column provides the unique contig identifier, “Contig ID:” corresponding to contigs in Table 1A and allowing for correlation with the information in Table 1A. The third column provides the sequence identifier, “SEQ ID NO: X”, for the contig polynucleotide sequences. The fourth column provides the analysis method by which the homology/identity disclosed in the row was determined. Comparisons were made between polypeptides encoded by the polynucleotides of the invention and either a non-redundant protein database (herein referred to as “NR”), or a database of protein families (herein referred to as “PFAM”) as further described below. The fifth column provides a description of PFAM/NR hits having significant matches to a polypeptide of the invention. Column six provides the accession number of the PFAM/NR hit disclosed in the fifth column. Column seven, “Score/Percent Identity”, provides a quality score or the percent identity, of the hit disclosed in column five. Columns 8 and 9, “NT From” and “NT To” respectively, delineate the polynucleotides in “SEQ ID NO: X” that encode a polypeptide having a significant match to the PFAM/NR database as disclosed in the fifth column. In specific embodiments, polypeptides of the invention comprise, or alternatively consist of, an amino acid sequence encoded by the polynucleotides in SEQ ID NO: X as delineated in columns 8 and 9, or fragments or variants thereof.

[0056] Table 3 provides polynucleotide sequences that may be disclaimed according to certain embodiments of the invention. The first column provides a unique clone identifier, “Clone ID NO: Z”, for a cDNA clone related to reproductive system associated contig sequences disclosed in Table 1A. The second column provides the sequence identifier, “SEQ ID NO: X”, for contig polynucleotide sequences disclosed in Table 1A. The third column provides the unique contig identifier, “Contig ID”, for contigs disclosed in Table 1A. The fourth column provides a unique integer ‘a’ where ‘a’ is any integer between 1 and the final nucleotide minus 15 of SEQ ID NO: X, represented as “Range of a”, and the fifth column provides a unique integer ‘b’ where ‘b’ is any integer between 15 and the final nucleotide of SEQ ID NO: X, represented as “Range of b”, where both a and b correspond to the positions of nucleotide residues shown in SEQ ID NO: X, and where b is greater than or equal to a +14. For each of the polynucleotides shown as SEQ ID NO: X, the uniquely defined integers can be substituted into the general formula of a−b, and used to describe polynucleotides which may be preferably excluded from the invention. In certain embodiments, preferably excluded from the polynucleotides of the invention (including polynucleotide fragments and variants as described herein and diagnostic and/or therapeutic uses based on these polynucleotides) are at least one, two, three, four, five, ten, or more of the polynucleotide sequence(s) having the accession number(s) disclosed in the sixth column of this Table (including for example, published sequence in connection with a particular BAC clone). In further embodiments, preferably excluded from the invention are the specific polynucleotide sequence(s) contained in the clones corresponding to at least one, two, three, four, five, ten, or more of the available material having the accession numbers identified in the sixth column of this Table (including for example, the actual sequence contained in an identified BAC clone).

[0057] Table 4 provides a key to the tissue/cell source identifier code disclosed in Table 1A, column 7. Column 1 provides the key to the tissue/cell source identifier code disclosed in Table 1A, Column 7. Columns 2-5 provide a description of the tissue or cell source. Codes corresponding to diseased tissues are indicated in column 6 with the word “disease”. The use of the word “disease” in column 6 is non-limiting. The tissue or cell source may be specific (e.g. a neoplasm), or may be disease-associated (e.g., a tissue sample from a normal portion of a diseased organ). Furthermore, tissues and/or cells lacking the “disease” designation may still be derived from sources directly or indirectly involved in a disease state or disorder, and therefore may have a further utility in that disease state or disorder. In numerous cases where the tissue/cell source is a library, column 7 identifies the vector used to generate the library.

[0058] Table 5 provides a key to the OMIM™ reference identification numbers disclosed in Table 1A, column 9. OMIM reference identification numbers (Column 1) were derived from Online Mendelian Inheritance in Man (Online Mendelian Inheritance in Man, OMIM™. McKusick-Nathans Institute for Genetic Medicine, Johns Hopkins University (Baltimore, Md.) and National Center for Biotechnology Information, National Library of Medicine, (Bethesda, Md.) 2000. World Wide Web URL: http://www.ncbi.nlm.nih.gov/omim/). Column 2 provides diseases associated with the cytologic band disclosed in Table 1A, column 8, as determined from the Morbid Map database.

[0059] Table 6 summarizes ATCC Deposits, Deposit dates, and ATCC designation numbers of deposits made with the ATCC in connection with the present application.

[0060] Table 7 shows the cDNA libraries sequenced, tissue source description, vector information and ATCC designation numbers relating to these cDNA libraries.

[0061] Table 8 provides a physical characterization of clones encompassed by the invention. The first column provides the unique clone identifier, “Clone ID NO: Z”, for certain cDNA clones of the invention, as described in Table 1A. The second column provides the size of the cDNA insert contained in the corresponding cDNA clone.

[0062] Definitions

[0063] The following definitions are provided to facilitate understanding of certain terms used throughout this specification.

[0064] In the present invention, “isolated” refers to material removed from its original environment (e.g., the natural environment if it is naturally occurring), and thus is altered “by the hand of man” from its natural state. For example, an isolated polynucleotide could be part of a vector or a composition of matter, or could be contained within a cell, and still be “isolated” because that vector, composition of matter, or particular cell is not the original environment of the polynucleotide. The term “isolated” does not refer to genomic or cDNA libraries, whole cell total or MRNA preparations, genomic DNA preparations (including those separated by electrophoresis and transferred onto blots), sheared whole cell genomic DNA preparations or other compositions where the art demonstrates no distinguishing features of the polynucleotide sequences of the present invention.

[0065] As used herein, a “polynucleotide” refers to a molecule having a nucleic acid sequence encoding SEQ ID NO: Y or a fragment or variant thereof, a nucleic acid sequence contained in SEQ ID NO: X (as described in column 3 of Table 1A) or the complement thereof, a cDNA sequence contained in Clone ID NO: Z (as described in column 1 of Table 1A and contained within a library deposited with the ATCC); a nucleotide sequence encoding the polypeptide encoded by a nucleotide sequence in SEQ ID NO: B as defined in column 6 of Table 1B or a fragment or variant thereof; or a nucleotide coding sequence in SEQ ID NO: B as defined in column 6 of Table 1B or the complement thereof. For example, the polynucleotide can contain the nucleotide sequence of the fill length cDNA sequence, including the 5′ and 3′ untranslated sequences, the coding region, as well as fragments, epitopes, domains, and variants of the nucleic acid sequence. Moreover, as used herein, a “polypeptide” refers to a molecule having an amino acid sequence encoded by a polynucleotide of the invention as broadly defined (obviously excluding poly-Phenylalanine or poly-Lysine peptide sequences which result from translation of a polyA tail of a sequence corresponding to a cDNA).

[0066] As used herein, a “reproductive system antigen” refers collectively to any polynucleotide disclosed herein (e.g., a nucleic acid sequence contained in SEQ ID NO: X or the complement therof, or cDNA sequence contained in Clone ID NO: Z, or a nucleotide sequence encoding the polypeptide encoded by a nucleotide sequence in SEQ ID NO: B as defined in column 6 of Table 1B, or a nucleotide coding sequence in SEQ ID NO: B as defined in column 6 of Table 1B or the complement thereof and fragments or variants thereof as described herein) or any polypeptide disclosed herein (e.g., an amino acid sequence contained in SEQ ID NO: Y, an amino acid sequence encoded by SEQ ID NO: X, or the complement thereof, an amino acid sequence encoded by the cDNA sequence contained in Clone ID NO: Z, an amino acid sequence encoded by SEQ ID NO: B, or the complement thereof, and fragments or variants thereof as described herein). These reproductive system antigens have been determined to be predominantly expressed in reproductive system tissues, including normal or diseased tissues (as shown in Table 1A column 7 and Table 4).

[0067] In the present invention, “SEQ ID NO: X” was often generated by overlapping sequences contained in multiple clones (contig analysis). A representative clone containing all or most of the sequence for SEQ ID NO: X is deposited at Human Genome Sciences, Inc. (HGS) in a catalogued and archived library. As shown, for example, in column 1 of Table 1A, each clone is identified by a cDNA Clone ID (identifier generally referred to herein as Clone ID NO: Z). Each Clone ID is unique to an individual clone and the Clone ID is all the information needed to retrieve a given clone from the HGS library. Furthermore, certain clones disclosed in this application have been deposited with the ATCC on Oct. 5, 2000, having the ATCC designation numbers PTA 2574 and PTA 2575; and on Jan. 5, 2001, having the depositor reference numbers TS-1, TS-2, AC-1, and AC-2. In addition to the individual cDNA clone deposits, most of the cDNA libraries from which the clones were derived were deposited at the American Type Culture Collection (hereinafter “ATCC”). Table 7 provides a list of the deposited cDNA libraries. One can use the Clone ID NO: Z to determine the library source by reference to Tables 6 and 7. Table 7 lists the deposited cDNA libraries by name and links each library to an ATCC Deposit. Library names contain four characters, for example, “HTWE.” The name of a cDNA clone (Clone ID NO: Z) isolated from that library begins with the same four characters, for example “HTWEP07”. As mentioned below, Table 1A correlates the Clone ID NO: Z names with SEQ ID NO: X. Thus, starting with an SEQ ID NO: X, one can use Tables 1A, 6 and 7 to determine the corresponding Clone ID NO: Z, which library it came from and which ATCC deposit the library is contained in. Furthermore, it is possible to retrieve a given cDNA clone from the source library by techniques known in the art and described elsewhere herein. The ATCC is located at 10801 University Boulevard, Manassas, Va. 20110-2209, USA. The ATCC deposits were made pursuant to the terms of the Budapest Treaty on the international recognition of the deposit of microorganisms for the purposes of patent procedure.

[0068] In specific embodiments, the polynucleotides of the invention are at least 15, at least 30, at least 50, at least 100, at least 125, at least 500, or at least 1000 continuous nucleotides but are less than or equal to 300 kb, 200 kb, 100 kb, 50 kb, 15 kb, 10 kb, 7.5 kb, 5 kb, 2.5 kb, 2.0 kb, or 1 kb, in length. In a further embodiment, polynucleotides of the invention comprise a portion of the coding sequences, as disclosed herein, but do not comprise all or a portion of any intron. In another embodiment, the polynucleotides comprising coding sequences do not contain coding sequences of a genomic flanking gene (i.e., 5′ or 3′ to the gene of interest in the genome). In other embodiments, the polynucleotides of the invention do not contain the coding sequence of more than 1000, 500, 250, 100, 50, 25, 20, 15, 10, 5, 4, 3, 2, or 1 genomic flanking gene(s).

[0069] A “polynucleotide” of the present invention also includes those polynucleotides capable of hybridizing, under stringent hybridization conditions, to sequences contained in SEQ ID NO: X, or the complement thereof (e.g., the complement of any one, two, three, four, or more of the polynucleotide fragments described herein), the polynucleotide sequence delineated in columns 8 and 9 of Table 2 or the complement thereof, and/or cDNA sequences contained in Clone ID NO: Z (e.g., the complement of any one, two, three, four, or more of the polynucleotide fragments, or the cDNA clone within the pool of cDNA clones deposited with the ATCC, described herein) and/or the polynucleotide sequence delineated in column 6 of Table 1B or the complement thereof. “Stringent hybridization conditions” refers to an overnight incubation at 42 degree C. in a solution comprising 50% formamide, 5×SSC (750 mM NaCl, 75 mM trisodium citrate), 50 mM sodium phosphate (pH 7.6), 5×Denhardt's solution, 10% dextran sulfate, and 20 μg/ml denatured, sheared salmon sperm DNA, followed by washing the filters in 0.1×SSC at about 65 degree C.

[0070] Also contemplated are nucleic acid molecules that hybridize to the polynucleotides of the present invention at lower stringency hybridization conditions. Changes in the stringency of hybridization and signal detection are primarily accomplished through the manipulation of formamide concentration (lower percentages of formamide result in lowered stringency), salt conditions, or temperature. For example, lower stringency conditions include an overnight incubation at 37 degree C. in a solution comprising 6×SSPE (20×SSPE=3M NaCl; 0.2M NaH₂PO₄; 0.02M EDTA, pH 7.4), 0.5% SDS, 30% formamide, 100 ug/ml salmon sperm blocking DNA; followed by washes at 50 degree C. with 1×SSPE, 0.1% SDS. In addition, to achieve even lower stringency, washes performed following stringent hybridization can be done at higher salt concentrations (e.g. 5×SSC).

[0071] Note that variations in the above conditions may be accomplished through the inclusion and/or substitution of alternate blocking reagents used to suppress background in hybridization experiments. Typical blocking reagents include Denhardt's reagent, BLOTTO, heparin, denatured salmon sperm DNA, and commercially available proprietary formulations. The inclusion of specific blocking reagents may require modification of the hybridization conditions described above, due to problems with compatibility.

[0072] Of course, a polynucleotide which hybridizes only to polyA+ sequences (such as any 3′ terminal polyA+ tract of a cDNA shown in the sequence listing), or to a complementary stretch of T (or U) residues, would not be included in the definition of “polynucleotide,” since such a polynucleotide would hybridize to any nucleic acid molecule containing a poly (A) stretch or the complement thereof (e.g., practically any double-stranded cDNA clone generated using oligo dT as a primer).

[0073] The polynucleotide of the present invention can be composed of any polyribonucleotide or polydeoxribonucleotide, which may be unmodified RNA or DNA or modified RNA or DNA. For example, polynucleotides can be composed of single- and double-stranded DNA, DNA that is a mixture of single- and double-stranded regions, single- and double-stranded RNA, and RNA that is mixture of single- and double-stranded regions, hybrid molecules comprising DNA and RNA that may be single-stranded or, more typically, double-stranded or a mixture of single- and double-stranded regions. In addition, the polynucleotide can be composed of triple-stranded regions comprising RNA or DNA or both RNA and DNA. A polynucleotide may also contain one or more modified bases or DNA or RNA backbones modified for stability or for other reasons. “Modified” bases include, for example, tritylated bases and unusual bases such as inosine. A variety of modifications can be made to DNA and RNA; thus, “polynucleotide” embraces chemically, enzymatically, or metabolically modified forms.

[0074] The polypeptide of the present invention can be composed of amino acids joined to each other by peptide bonds or modified peptide bonds, i.e., peptide isosteres, and may contain amino acids other than the 20 gene-encoded amino acids. The polypeptides may be modified by either natural processes, such as posttranslational processing, or by chemical modification techniques which are well known in the art. Such modifications are well described in basic texts and in more detailed monographs, as well as in a voluminous research literature. Modifications can occur anywhere in a polypeptide, including the peptide backbone, the amino acid side-chains and the amino or carboxyl termini. It will be appreciated that the same type of modification may be present in the same or varying degrees at several sites in a given polypeptide. Also, a given polypeptide may contain many types of modifications. Polypeptides may be branched, for example, as a result of ubiquitination, and they may be cyclic, with or without branching. Cyclic, branched, and branched cyclic polypeptides may result from posttranslation natural processes or may be made by synthetic methods. Modifications include acetylation, acylation, ADP-ribosylation, amidation, covalent attachment of flavin, covalent attachment of a heme moiety, covalent attachment of a nucleotide or nucleotide derivative, covalent attachment of a lipid or lipid derivative, covalent attachment of phosphotidylinositol, cross-linking, cyclization, disulfide bond formation, demethylation, formation of covalent cross-links, formation of cysteine, formation of pyroglutamate, formylation, gamma-carboxylation, glycosylation, GPI anchor formation, hydroxylation, iodination, methylation, myristoylation, oxidation, pegylation, proteolytic processing, phosphorylation, prenylation, racemization, selenoylation, sulfation, transfer-RNA mediated addition of amino acids to proteins such as arginylation, and ubiquitination. (See, for instance, PROTEINS—STRUCTURE AND MOLECULAR PROPERTIES, 2nd Ed., T. E. Creighton, W. H. Freeman and Company, New York (1993); POSTTRANSLATIONAL COVALENT MODIFICATION OF PROTEINS, B. C. Johnson, Ed., Academic Press, New York, pgs. 1-12 (1983); Seifter et al., Meth. Enzymol. 182:626-646 (1990); Rattan et al., Ann. N.Y. Acad. Sci. 663:48-62 (1992).)

[0075] “SEQ ID NO: X” refers to a polynucleotide sequence described, for example, in Tables 1A or 2, while “SEQ ID NO: Y” refers to a polypeptide sequence described in column 5 of Table 1A. SEQ ID NO: X is identified by an integer specified in column 3 of Table 1A. The polypeptide sequence SEQ ID NO: Y is a translated open reading frame (ORF) encoded by polynucleotide SEQ ID NO: X. “Clone ID NO: Z” refers to a cDNA clone described in column 1 of Table 1A.

[0076] “A polypeptide having biological activity” refers to a polypeptide exhibiting activity similar to, but not necessarily identical to, an activity of a polypeptide of the present invention, including mature forms, as measured in a particular biological assay, with or without dose dependency. In the case where dose dependency does exist, it need not be identical to that of the polypeptide, but rather substantially similar to the dose-dependence in a given activity as compared to the polypeptide of the present invention (i.e., the candidate polypeptide will exhibit greater activity or not more than about 25-fold less and, preferably, not more than about tenfold less activity, and most preferably, not more than about three-fold less activity relative to the polypeptide of the present invention).

[0077] Table 1A summarizes some of the reproductive system associated polynucleotides encompassed by the invention (including contig sequences (SEQ ID NO: X) and clones (Clone ID NO: Z) and further summarizes certain characteristics of these polynucleotides and the polypeptides encoded thereby.

[0078] Polynucleotides and Polypeptides

TABLE 1A

| | | | AA | | | Tissue Distribution | | |
|---|---|---|---|---|---|---|---|---|
| | | | | SEQ | | Library code: count | | OMIM |
| Clone ID | Contig | SEQ ID | ORF | ID | | (see Table IV for | Cytologic | Disease |
| NO: Z | ID: | NO: X | (From-To) | NO: Y | Predicted Epitopes | Library Codes) | Band | Reference(s): |
| H7MCE35 | 928554 | 11 | 71-3 | 2698 | | S0286: 1 and S0284: 1. | | |
| H7MDC49 | 722780 | 12 | 125-3 | 2699 | | S0284: 2 and L0758: 1. | | |
| H7MDD72 | 847688 | 13 | 100-510 | 2700 | Glu-9 to Gly-22, | AR054: 6, AR050: 2, | | |
| | | | | | Lys-50 to Lys-69, | AR051: 1, AR089: 1, | | |
| | | | | | Gly-91 to Arg-107, | AR061: 0 | | |
| | | | | | Pro-113 to Ile-129, | S0284: 2 | | |
| | | | | | Tyr-131 to Gln-137. | | | |
| | 887805 | 2651 | 3-824 | 5338 | | | | |
| HAOSH55 | 952380 | 14 | 2-355 | 2701 | Pro-17 to Glu-28, | L0770: 3, H0686: 1, | | |
| | | | | | Gly-86 to Ser-92. | H0634: 1, L0761: 1, | | |
| | | | | | | L0772: 1, L0764: 1, | | |
| | | | | | | L0805: 1, L0786: 1 and | | |
| | | | | | | L0779: 1. | | |
| HAQAK73 | 764671 | 15 | 449-661 | 2702 | Glu-16 to Pro-21, | H0295: 2 and L0748: 2. | | |
| | | | | | Leu-28 to Asp-34, | | | |
| | | | | | Glu-39 to Ser-56, | | | |
| | | | | | Glu-59 to Gly-67. | | | |
| HAQAM17 | 664979 | 16 | 1-198 | 2703 | | H0295: 1 and H0435: 1. | | |
| HAQBF84 | 783259 | 17 | 2-70 | 2704 | | H0295: 2 | | |
| HAQBJ71 | 839982 | 18 | 17-367 | 2705 | Ala-55 to Phe-72. | H0295: 3 and H0294: 1. | | |
| HAQBQ50 | 522004 | 19 | 3-59 | 2706 | | H0295: 2 | | |
| HAQBS37 | 847519 | 20 | 159-437 | 2707 | | H0295: 2, L0649: 1, | | |
| | | | | | | L0663: 1, H0435: 1 and | | |
| | | | | | | H0670: 1. | | |
| HAUBD69 | 529711 | 21 | 3-134 | 2708 | | H0294: 2 and H0435: 1. | | |
| HAUBU10 | 968339 | 22 | 209-337 | 2709 | | H0294: 2 | | |
| HBCJS08 | 957826 | 23 | 228-374 | 2710 | Val-17 to Thr-27. | H0664: 2 | | |
| HBCPD14 | 963634 | 24 | 15-140 | 2711 | | H0663: 1 and S0152: 1. | | |
| HBCQJ03 | 922401 | 25 | 138-1 | 2712 | Arg-1 to Trp-15. | H0663: 2 | | |
| HBCQS90 | 951787 | 26 | 3-317 | 2713 | Glu-24 to Lys-29, | H0663: 2, L0758: 2, | | |
| | | | | | Lys-35 to Gln-40. | L0748: 1 and L0591: 1. | | |
| HBCQS93 | 930682 | 27 | 390-575 | 2714 | Gly-1 to Gly-6, | L0749: 2, H0663: 1, | | |
| | | | | | Gly-41 to Pro-46. | H0662: 1 and L0438: 1. | | |
| HBGBD28 | 525846 | 28 | 3-185 | 2715 | Asn-37 to Gly-44. | H0181: 2 | | |
| HBGBF56 | 957870 | 29 | 2-184 | 2716 | Pro-31 to Glu-36. | H0181: 1 and H0617: 1. | | |
| HBGBG42 | 922396 | 30 | 1-420 | 2717 | | H0662: 2, H0181: 2, | | |
| | | | | | | L0766: 2, L0455: 1, | | |
| | | | | | | L0740: 1, L0779: 1 and | | |
| | | | | | | L0362: 1. | | |
| HBGBH43 | 524532 | 31 | 1-195 | 2718 | | H0553: 2, H0181: 2, | | |
| | | | | | | L0743: 2, L0639: 1, | | |
| | | | | | | L0787: 1, L0790: 1, | | |
| | | | | | | L0747: 1, L0780: 1, | | |
| | | | | | | L0752: 1 and L0755: 1. | | |
| HBGBS07 | 954299 | 32 | 1-324 | 2719 | Val-57 to Leu-66, | H0181: 2 | 1q21 | 104770, |
| | | | | | Val-79 to Gly-84. | | | 107670, |
| | | | | | | | | 110700, |
| | | | | | | | | 135940, |
| | | | | | | | | 145001, |
| | | | | | | | | 146790, |
| | | | | | | | | 152445, |
| | | | | | | | | 152445, |
| | | | | | | | | 159001, |
| | | | | | | | | 174000, |
| | | | | | | | | 179755, |
| | | | | | | | | 182860, |
| | | | | | | | | 182860, |
| | | | | | | | | 182860, |
| | | | | | | | | 191315, |
| | | | | | | | | 230800, |
| | | | | | | | | 230800, |
| | | | | | | | | 266200, |
| | | | | | | | | 600897, |
| | | | | | | | | 601105, |
| | | | | | | | | 601412, |
| | | | | | | | | 601652, |
| | | | | | | | | 602491 |
| HBGBT79 | 525352 | 33 | 109-306 | 2720 | Arg-7 to Trp-17. H0181: 2 | | | |
| HBGBW60 | 954916 | 34 | 52-492 | 2721 | | H0617: 2 and H0181: 1. | | |
| HBGBW72 | 524956 | 35 | 31-156 | 2722 | Glu-1 to Gly-9. | H0181: 2 and H0617: 1. | | |
| HBGDA44 | 525618 | 36 | 163-507 | 2723 | Thr-1 to Pro-6. | H0181: 2 | | |
| HBGDE85 | 524875 | 37 | 1-132 | 2724 | Pro-6 to Leu-12. | H0181: 2 | | |
| HBGDS13 | 971696 | 38 | 122-259 | 2725 | | H0181: 1 and H0617: 1. | | |
| HBGDT43 | 974223 | 39 | 2-220 | 2726 | Trp-8 to Gln-20. | H0181: 3 | | |
| HBGFA62 | 954306 | 40 | 3-302 | 2727 | Gln-19 to Glu-24, | L0040: 1, H0188: 1, | | |
| | | | | | Arg-29 to Pro-35, | H0606: 1, L0762: 1, | | |
| | | | | | Ser-47 to Ser-56, | L0803: 1, L0774: 1 and | | |
| | | | | | Pro-58 to Ser-64. | L0509: 1. | | |
| HBGMD05 | 870189 | 41 | 266-589 | 2728 | Thr-1 to Ser-6, | H0617: 2 | | |
| | | | | | Thr-23 to Pro-30. | | | |
| HBGMD62 | 933763 | 42 | 84-329 | 2729 | Leu-36 to Asn-42. | H0617: 3 | | |
| HBGMF10 | 966132 | 43 | 162-434 | 2730 | Pro-13 to Ser-19, | L0764: 2, L0783: 2, | | |
| | | | | | Pro-60 to Ala-76, | H0182: 1, H0617: 1, | | |
| | | | | | Asp-78 to Gly-85. | H0616: 1, L0765: 1, | | |
| | | | | | | L0375: 1, L0659: 1, | | |
| | | | | | | L0809: 1, L0663: 1, | | |
| | | | | | | L0731: 1 and L0361: 1. | | |
| HBGMG29 | 845194 | 44 | 22-279 | 2731 | Arg-71 to Arg-76. | H0617: 2 | | |
| HBGMZ39 | 947112 | 45 | 575-3 | 2732 | Arg-37 to Phe-48, | AR089: 15, AR061: 10 | | |
| | | | | | Asp-55 to Asp-63, | H0617: 8, L0763: 2, | | |
| | | | | | Gly-73 to Ala-80, | L0754: 2, H0483: 1 and | | |
| | | | | | Gln-147 to Trp-154, | L0743: 1. | | |
| | | | | | Val-176 to Lys-191. | | | |
| HBGNA08 | 958257 | 46 | 82-162 | 2733 | | H0617: 2 | | |
| HBGND09 | 848219 | 47 | 1-522 | 2734 | Gly-1 to Arg-8, | H0617: 2, L0758: 2, | | |
| | | | | | Gly-17 to Vla-25, | H0181: 1, L0521: 1, | | |
| | | | | | Gln-27 to Gln-32, | L0661: 1 and L0779: 1. | | |
| | | | | | Ala-56 to Gly-64, | | | |
| | | | | | Glu-121 to Thr-129, | | | |
| | | | | | Arg-156 to Asp-174. | | | |
| HBGNJ14 | 914594 | 48 | 1-330 | 2735 | Gly-3 to Thr-15, | H0617: 3 | | |
| | | | | | Pro-49 to Ser-54, | | | |
| | | | | | Pro-56 to His-63, | | | |
| | | | | | Gly-81 to Pro-87, | | | |
| | | | | | Pro-92 to Thr-98. | | | |
| HBGNM13 | 912730 | 49 | 12-197 | 2736 | | H0617: 2 | | |
| HBGNO07 | 952212 | 50 | 2-358 | 2737 | Glu-14 to Cys-20, | H0181: 1 and H0617: 1. | | |
| | | | | | Glu-22 to His-32, | | | |
| | | | | | Asp-39 to Thr-52, | | | |
| | | | | | Lys-92 to Asp-101. | | | |
| HBGNQ31 | 887152 | 51 | 2-268 | 2738 | Cys-7 to Gly-12, | AR054: 129, AR051: | | |
| | | | | | Ser-19 to Thr-26, | 118, AR050: 110 | | |
| | | | | | Ala-31 to Leu-36, | H0617: 4 and L0770: 2. | | |
| | | | | | Ser-47 to Ser-57, | | | |
| | | | | | Glu-75 to Phe-83. | | | |
| HBGNW29 | 969396 | 52 | 24-263 | 2739 | Gly-58 to Pro-69. | H0617: 2, H0663: 1 | | |
| | | | | | | and H0181: 1. | | |
| HBGOB07 | 883111 | 53 | 10-420 | 2740 | Thr-21 to Lys-27, | H0617: 2, L0439: 2, | | |
| | | | | | Cys-33 to Pro-38, | L0771: 1, L0766: 1, | | |
| | | | | | Lys-68 to Trp-103, | L0779: 1 and L0752: 1. | | |
| | | | | | Pro-118 to Val-124, | | | |
| | | | | | Pro-129 to Lys-137. | | | |
| HBGOJ28 | 967261 | 54 | 195-599 | 2741 | Leu-30 to Thr-56, | H0617: 2 | | |
| | | | | | Arg-61 to Thr-71. | | | |
| HBGOK53 | 848156 | 55 | 13-278 | 2742 | | H0617: 2 | | |
| HBGOL08 | 958290 | 56 | 1-369 | 2743 | | L0041: 2, H0617: 2, | | |
| | | | | | | L0659: 1, L0438: 1 and | | |
| | | | | | | L0601: 1. | | |
| HBGPE04 | 926876 | 57 | 1-219 | 2744 | Gly-22 to Ala-31, | H0617: 2 | | |
| | | | | | Arg-58 to Trp-73. | | | |
| HBGPH02 | 918513 | 58 | 158-340 | 2745 | Leu-14 to Pro-20, | H0617: 2, L0780: 1, | | |
| | | | | | Ser-49 to Ile-55. | L0752: 1 and L0594: 1. | | |
| HBGPK33 | 973425 | 59 | 14-274 | 2746 | | H0617: 4 | | |
| HBGPV05 | 930706 | 60 | 2-205 | 2747 | Pro-13 to Arg-26. | H0617: 3 | | |
| HBGQG66 | 954302 | 61 | 1-309 | 2748 | Met-3 to Asn-8, | H0181: 1 and H0617: 1. | | |
| | | | | | Ala-11 to Pro-39. | | | |
| HBGSD40 | 923142 | 62 | 3-413 | 2749 | Arg-4 to His-10, | L0777: 3, H0617: 2, | | |
| | | | | | Pro-14 to Thr-20, | L0731: 2, H0606: 1, | | |
| | | | | | Glu-28 to Arg-35, | L0769: 1, L0803: 1, | | |
| | | | | | Thr-40 to Ser-56, | L0743: 1, L0744: 1, | | |
| | | | | | Thr-61 to Ser-75, | L0750: 1 and L0779: 1. | | |
| | | | | | Pro-93 to Arg-102, | | | |
| | | | | | Asp-118 to Arg-124. | | | |
| HBGTK11 | 965509 | 63 | 1-273 | 2750 | Pro-70 to Arg-78. | H0617: 3 | | |
| HBGTL01 | 914573 | 64 | 13-561 | 2751 | Pro-28 to Trp-34. | L0794: 3, H0617: 2, | | |
| | | | | | | L0750: 1 and L0758: 1. | | |
| HBGTR84 | 886529 | 65 | 3-581 | 2752 | Asp-43 to Arg-49, | AR051: 23, AR050: 17, | | |
| | | | | | Glu-55 to Asp-64, | AR054: 16 | | |
| | | | | | Glu-75 to Arg-81, | H0617: 4 | | |
| | | | | | Leu-89 to Gly-98, | | | |
| | | | | | Leu-110 to Lys-115, | | | |
| | | | | | Asn-131 to Thr-141, | | | |
| | | | | | Asn-152 to Lys-160. | | | |
| HBNAB01 | 966536 | 66 | 1-138 | 2753 | Ser-8 to Leu-20. | H0253: 1 and H0188: 1. | 17p13.1 | 191170, |
| | | | | | | | | 191170 |
| HBNAF14 | 660800 | 67 | 86-271 | 2754 | | H0618: 1 and H0188: 1. | | |
| HBNAI17 | 655514 | 68 | 1-231 | 2755 | | H0188: 2 | | |
| HBNAN41 | 655842 | 69 | 123-302 | 2756 | Asn-3 to Ser-15, | H0188: 2 | | |
| | | | | | Lys-21 to Asn-30. | | | |
| HBNAW92 | 524954 | 70 | 2-226 | 2757 | Gly-21 to Pro-27. | H0188: 2 | | |
| HBNAX71 | 530843 | 71 | 1-87 | 2758 | | H0188: 2 | | |
| HBNAY58 | 558193 | 72 | 245-400 | 2759 | Leu-14 to Thr-20. | H0188: 2 and L0603: 1. | | |
| HBNBT52 | 524869 | 73 | 201-380 | 2760 | Gln-48 to Pro-56. | H0188: 2 | | |
| HBZAJ09 | 655769 | 74 | 1-330 | 2761 | Phe-13 to Phe-18, | S0188: 2 | | |
| | | | | | Gly-23 to Arg-38. | | | |
| HBZSH16 | 655619 | 75 | 93-212 | 2762 | Ser-1 to Ser-11. | S0190: 2 | | |
| HBZSH71 | 760418 | 76 | 116-301 | 2763 | Thr-29 to Arg-34. | S0190: 2 | | |
| HBZSI73 | 655737 | 77 | 2-352 | 2764 | | S0190: 2 | | |
| HBZSK17 | 664013 | 78 | 111-383 | 3765 | Val-3 to Lys-9. | H0059: 1 and S0190: 1. | 22q11.2-q13.2 | 123620, |
| | | | | | | | | 138720, |
| | | | | | | | | 145410, |
| | | | | | | | | 188826, |
| | | | | | | | | 231950, |
| | | | | | | | | 239500, |
| | | | | | | | | 275350, |
| | | | | | | | | 600850 |
| HCBMV01 | 914333 | 79 | 322-119 | 2766 | Ser-1 to Met-6. | H0661: 1 and H0553: 1. | | |
| HCBNW02 | 950897 | 80 | 183-521 | 2767 | | H0661: 2 | | |
| HCBNW07 | 951820 | 81 | 8-130 | 2768 | Lys-28 to Phe-34. | L0770: 3, L0776: 3, | | |
| | | | | | | H0686: 1, H0661: 1, | | |
| | | | | | | L0021: 1, L0761: 1, | | |
| | | | | | | L0766: 1, L0659: 1, | | |
| | | | | | | L0647: 1, L0752: 1 and | | |
| | | | | | | L0605: 1. | | |
| HCBOG03 | 922351 | 82 | 2-283 | 2769 | Lys-33 to Arg-38. | H0661: 2 | | |
| HCDMB01 | 915613 | 83 | 3-125 | 2770 | | S0398: 2 | | |
| HCDMB16 | 835781 | 84 | 2-181 | 2771 | | S0398: 2 | | |
| HCDMB60 | 726339 | 85 | 22-120 | 2772 | Thr-6 to Leu-12, | S0398: 2 | | |
| | | | | | Tyr-19 to Lys-28. | | | |
| HCDMC01 | 915239 | 86 | 2-901 | 2773 | Ser-10 to Gly-23. | L0758: 13, H0253: 4, | | |
| | | | | | | H0618: 3, H0038: 1, | | |
| | | | | | | L0779: 1 and S0398: 1. | | |
| HCDMD23 | 676799 | 87 | 2-184 | 2774 | | S0398: 2 | | |
| HCHAD40 | 923764 | 88 | 78-269 | 2775 | Lys-29 to Arg-34. | H0483: 2 | 13 | |
| HCHAR16 | 675465 | 89 | 3-134 | 2776 | Cys-1 to Pro-10, | H0483: 2 | | |
| | | | | | Thr-19 to Glu-28, | | | |
| | | | | | Arg-36 to Asn-44. | | | |
| HCHAR43 | 715128 | 90 | 1-366 | 2777 | Ser-24 to Gly-29, | H0483: 2 | Xp22.3 | 300077, |
| | | | | | Asn-47 to Pro-53, | | | 300500, |
| | | | | | Pro-74 to Gly-79. | | | 300650, |
| | | | | | | | | 301200, |
| | | | | | | | | 302350, |
| | | | | | | | | 302950, |
| | | | | | | | | 308700, |
| | | | | | | | | 311200, |
| | | | | | | | | 312040 |
| HCHAR67 | 665184 | 91 | 1-318 | 2778 | Phe-24 to Gln-30, | H0483: 1 and H0550: 1. | | |
| | | | | | Gln-32 to Leu-42. | | | |
| HCHBQ03 | 923763 | 92 | 190-459 | 2779 | Asp-1 to Phe-21. | H0483: 4 and H0484: 1. | 13 | |
| HCHML32 | 668518 | 93 | 35-343 | 2780 | | H0484: 2 | | |
| HCHND96 | 880585 | 94 | 144-455 | 2781 | Glu-13 to Ser-21, | H0616: 7, L0758: 5, | | |
| | | | | | Asp-67 to Asp-73. | H0484: 1, H0040: 1, | | |
| | | | | | | L0768: 1, L0774: 1 and | | |
| | | | | | | L0775: 1. | | |
| HCHOA76 | 740102 | 95 | 1-321 | 2782 | Leu-26 to Cys-39, | H0484: 2 | | |
| | | | | | Cys-41 to Lys-50, | | | |
| | | | | | Gly-87 to Glu-93. | | | |
| HCHOD89 | 954866 | 96 | 2-214 | 2783 | Glu-11 to Gly-17, | H0484: 1 and H0483: 1. | | |
| | | | | | Arg-25 to Ser-36. | | | |
| HCHPO55 | 717671 | 97 | 1-129 | 2784 | Gly-1 to Gly-14. | H0484: 1 and H0483: 1. | | |
| HCHQB06 | 934941 | 98 | 3-455 | 2785 | Pro-13 to Gly-20, | H0484: 2, L0803: 1 | | |
| | | | | | Ser-29 to Ala-45, | and L0758: 1. | | |
| | | | | | Ser-66 to Ala-72, | | | |
| | | | | | Phe-74 to Trp-87, | | | |
| | | | | | Pro-102 to Arg-107. | | | |
| HCMSE07 | 927904 | 99 | 522-896 | 2786 | Ala-2 to Lys-10, | AR089: 42, AR061: 34 | | |
| | | | | | Glu-70 to Glu-76. | H0651: 154, L0731: 9, | | |
| | | | | | | L0777: 6, L0803: 4, | | |
| | | | | | | L0775: 3, H0196: 2, | | |
| | | | | | | H0163: 2, L0662: 2, | | |
| | | | | | | L0805: 2, L0783: 2, | | |
| | | | | | | L0438: 2, L0740: 2, | | |
| | | | | | | L0759: 2, H0170: 1, | | |
| | | | | | | S0444: 1, H0592: 1, | | |
| | | | | | | H0632: 1, L0471: 1, | | |
| | | | | | | H0399: 1, H0615: 1, | | |
| | | | | | | H0040: 1, S0294: 1, | | |
| | | | | | | H0647: 1, L0598: 1, | | |
| | | | | | | L0763: 1, L0638: 1, | | |
| | | | | | | L0637: 1, L0642: 1, | | |
| | | | | | | L0374: 1, L0767: 1, | | |
| | | | | | | L0768: 1, L0794: 1, | | |
| | | | | | | L0804: 1, L0774: 1, | | |
| | | | | | | L0375: 1, L0776: 1, | | |
| | | | | | | L0606: 1, L0659: 1, | | |
| | | | | | | L0809: 1, L0647: 1, | | |
| | | | | | | L0789: 1, L0791: 1, | | |
| | | | | | | L0666: 1, L0663: 1, | | |
| | | | | | | L0664: 1, L0665: 1, | | |
| | | | | | | H0659: 1, H0658: 1, | | |
| | | | | | | H0672: 1, S0328: 1, | | |
| | | | | | | H0539: 1, S0380: 1, | | |
| | | | | | | L0439: 1, L0779: 1, | | |
| | | | | | | L0594: 1, L0361: 1, | | |
| | | | | | | S0026: 1, S0242: 1 and | | |
| | | | | | | S0460: 1. | | |
| HCOMZ41 | 932878 | 100 | 120-296 | 2787 | Arg-1 to Pro-10, | L0768: 2, H0150: 1 | | |
| | | | | | Ile-21 to Gly-34. | and H0670: 1. | | |
| HCOOG04 | 925748 | 101 | 68-3 | 788 | Tyr-10 to Cys-17. | H0670: 2 | | |
| HCOOI07 | 951665 | 102 | 75-458 | 2789 | Ser-40 to Gly-45, | H0670: 2 | | |
| | | | | | Pro-55 to Asp-67. | | | |
| HCOOM77 | 969161 | 103 | 83-283 | 2790 | | H0670: 2 | | |
| HCOOX10 | 961595 | 104 | 1-471 | 2791 | Val-19 to Trp-24, | H0059: 1, L0803: 1 | | |
| | | | | | Lys-70 to Lys-78, | and H0670: 1. | | |
| | | | | | Ser-83 to Leu-100, | | | |
| | | | | | Val-112 to Trp-117, | | | |
| | | | | | Thr-119 to Lys-125, | | | |
| | | | | | Cys-133 to Pro-143. | | | |
| HCOOZ11 | 965306 | 105 | 89-592 | 2792 | Asp-43 to Glu-48. | AR089: 15, AR061: 5 | 22q13.1-q13.2 | 103050, |
| | | | | | | H0662: 2, H0670: 1, | 103050, | |
| | | | | | | L0756: 1 and L0759: 1. | | 124030, |
| | | | | | | | | 124030, |
| | | | | | | | | 138981, |
| | | | | | | | | 182380, |
| | | | | | | | | 188826, |
| | | | | | | | | 190040, |
| | | | | | | | | 190040, |
| | | | | | | | | 190040 |
| HCOPP18 | 954332 | 106 | 259-585 | 2793 | Gly-11 to Ser-16. | H0169: 2, L0809: 1, | | |
| | | | | | | H0670: 1 and L0599: 1, | | |
| HCOQE11 | 965299 | 107 | 409-684 | 2794 | Gln-20 to Tyr-25, | H0670: 4, L0776: 2, | | |
| | | | | | Asp-73 to Ser-79. | L0666: 2, L0759: 2, | | |
| | | | | | | H0661: 1, L0717: 1, | | |
| | | | | | | L0664: 1, L0779: 1, | | |
| | | | | | | L0777: 1, L0752: 1 and | | |
| | | | | | | L0755: 1. | | |
| HCOQH12 | 969151 | 108 | 292-564 | 2795 | Ala-52 to Lys-58, | H0670: 2 and L0366: 1. | | |
| | | | | | Gly-72 to Arg-79. | | | |
| HCOQQ07 | 951658 | 109 | 187-429 | 2796 | | H0670: 2 | | |
| HE8SG46 | 961388 | 110 | 1335-1553 | 2797 | Glu-40 to Asn-46. | H0683: 122, L0740: 6, | | |
| | | | | | | L0747: 5, L0438: 4, | | |
| | | | | | | L0439: 4, L0756: 3, | | |
| | | | | | | H0156: 2, L0521: 2, | | |
| | | | | | | H0658: 2, L0754: 2, | | |
| | | | | | | L0750: 2, L0779: 2, | | |
| | | | | | | L0777: 2, L0731: 2, | | |
| | | | | | | L0759: 2, H0171: 1, | | |
| | | | | | | H0486: 1, H0244: 1, | | |
| | | | | | | H0427: 1, H0310: 1, | | |
| | | | | | | H0052: 1, H0263: 1, | | |
| | | | | | | H0596: 1, L0163: 1, | | |
| | | | | | | H0051: 1, H0328: 1, | | |
| | | | | | | S0112: 1, L0768: 1, | | |
| | | | | | | L0803: 1, L0774: 1, | | |
| | | | | | | L0527: 1, L0517: 1, | | |
| | | | | | | L0783: 1, L0666: 1, | | |
| | | | | | | L0663: 1, H0670: 1, | | |
| | | | | | | H0648: 1, S0152: 1, | | |
| | | | | | | S0146: 1, H0478: 1, | | |
| | | | | | | L0752: 1, L0758: 1 and | | |
| | | | | | | S0412: 1. | | |
| HEAAA42 | 963100 | 111 | 3-272 | 2798 | | AR061: 8, AR089: 5 | | |
| | | | | | | H0038: 4, H0616: 3, | | |
| | | | | | | L0747: 3, L0663: 2, | | |
| | | | | | | L0758: 2, H0369: 1, | | |
| | | | | | | H0428: 1, L0769: 1, | | |
| | | | | | | L0542: 1, L0809: 1, | | |
| | | | | | | L0666: 1, L0665: 1, | | |
| | | | | | | L0743: 1, L0777: 1, | | |
| | | | | | | L0731: 1 and S0456: 1. | | |
| HEAAB77 | 574510 | 112 | 1-360 | 2799 | Glu-7 to Arg-24. | H0369: 2 | | |
| HEAAK46 | 574232 | 113 | 69-188 | 2800 | His-33 to Val-39. | H0369: 2 and H0664: 1. | | |
| HEAAM16 | 574008 | 114 | 114-221 | 2801 | | H0369: 2 | | |
| HEAAM52 | 960579 | 115 | 2-154 | 2802 | | H0369: 1 and H0040: 1. | | |
| HEAAN18 | 932383 | 116 | 78-227 | 2803 | | H0369: 2 | | |
| HEAAQ66 | 653242 | 117 | 168-401 | 2804 | | H0369: 2 | | |
| HEAAT36 | 531348 | 118 | 114-488 | 2805 | Phe-71 to Gln-78, | L0748: 3, H0369: 1 | | |
| | | | | | Lys-87 to His-95. | and H0031: 1. | | |
| HEAAT60 | 733632 | 119 | 121-471 | 2806 | Gly-12 to Ile-18. | H0369: 2 | | |
| HEAAV10 | 968200 | 120 | 99-236 | 2807 | | H0369: 2 | | |
| HEAAV33 | 574508 | 121 | 219-449 | 2808 | Asp-25 to Glu-30, | H0369: 2 and L0747: 1. | | |
| | | | | | Leu-39 to Val-48. | | | |
| HEDAE67 | 752875 | 122 | 1-147 | 2809 | Ser-5 to Tyr-19, | H0534: 4 and H0533: 3. | | |
| | | | | | Arg-22 to Thr-32. | | | |
| HEEAD64 | 741305 | 123 | 1-159 | 2810 | Glu-21 to Lys-30, | H0549: 2 | | |
| | | | | | Gly-33 to Ser-39. | | | |
| HEEAH07 | 851219 | 124 | 1-150 | 2811 | Pro-44 to Phe-50. | H0549: 2 | | |
| HEEAJ58 | 785121 | 125 | 246-1 | 2812 | Lys-25 to Gly-34, | H0549: 2 | | |
| | | | | | Pro-42 to Trp-57. | | | |
| | | | | | Lys-71 to Asp-82. | | | |
| HEEAJ76 | 887321 | 126 | 3-332 | 2813 | | AR054: 10, AR051: 9, | | |
| | | | | | | AR050: 8 | | |
| | | | | | | H0549: 2 | | |
| HEEAK22 | 673904 | 127 | 140-253 | 2814 | Gly-24 to Leu-30. | H0549: 2 | | |
| HEEAK84 | 780838 | 128 | 167-283 | 2815 | Glu-12 to Gln-19. | H0549: 2 | | |
| HEEAL31 | 887312 | 129 | 3-203 | 2816 | Val-19 to Ser-25, | H0369: 2 and H0549: 2. | | |
| | | | | | Arg-39 to Ser-60. | | | |
| HEEAN24 | 676721 | 130 | 1-147 | 2817 | | H0549: 2 | | |
| HEEAS58 | 735620 | 131 | 3-278 | 2818 | Ala-76 to Gly-84. | H0549: 2 | | |
| HEEAU79 | 706935 | 132 | 1-228 | 2819 | Ala-17 to Gly-30, | H0549: 2 and L0600:1. | | |
| | | | | | Arg-39 to Trp-46. | | | |
| HEEAW01 | 851213 | 133 | 55-195 | 2820 | Lys-12 to Trp-17. | H0549: 2 | | |
| HEEAW13 | 656299 | 134 | 28-168 | 2821 | Phe-27 to Trp-32. | H0549: 2 | | |
| HEGAA24 | 676716 | 135 | 1-204 | 2822 | Gly-1 to Glu-10, | H0550: 2 | | |
| | | | | | Gly-41 to Val-47. | | | |
| HEGAA73 | 767284 | 136 | 150-425 | 2823 | Ser-52 to Trp-58. | H0550: 2 | | |
| HEGAB84 | 823900 | 137 | 1-351 | 2824 | Ile-30 to Gly-36, | AR089: 13, AR061: 8 | | |
| | | | | | Thr-67 to Thr-72. | H0618: 2 and H0550: 1. | | |
| HEGAC69 | 754344 | 138 | 281-475 | 2825 | Ser-48 to Lys-54. | H0550: 2 and L0750: 1. | | |
| HEGAC95 | 965183 | 139 | 113-355 | 2826 | | H0550: 1 and H0328:1. | | |
| HEGAI82 | 955291 | 140 | 1-330 | 2827 | Ala-51 to Glu-60, | H0550: 1, H0644: 1 | | |
| | | | | | Pro-88 to Ser-104. | and L0659: 1. | | |
| HEGAK04 | 887299 | 141 | 54-305 | 2828 | Ala-29 to Lys-51, | AR054: 16, AR051: 5, | | |
| | | | | | Arg-69 to His-75. | AR050: 3 | | |
| | | | | | | H0550: 2 and L0749: 1. | | |
| HEGAO83 | 780837 | 142 | 3-326 | 2829 | Lys-1 to Ser-52. | AR089: 9, AR061: 7 | | |
| | | | | | | H0550: 1 and H0253: 1. | | |
| HEGAP06 | 934705 | 143 | 3-254 | 2830 | Asn-4 to Asn-10, | L0754: 4, L0776: 2, | | |
| | | | | | Gly-14 to Asp-21, | L0743: 2, L0750: 2, | | |
| | | | | | Leu-26 to Gly-39. | L0779: 2, H0550: 1, | | |
| | | | | | | L0769: 1 and H0658: 1. | | |
| HEGAP31 | 697419 | 144 | 59-319 | 2831 | Gly-1 to Gly-10, | H0550: 2 | | |
| | | | | | Glu-46 to Ser-52, | | | |
| | | | | | Pro-61 to Pro-67, | | | |
| | | | | | Arg-69 to Asp-75, | | | |
| | | | | | Ser-82 to Ser-87. | | | |
| HEGAP36 | 706951 | 145 | 117-239 | 2832 | Tyr-36 to Thr-41. | H0550: 2 | | |
| HEGAR53 | 719387 | 146 | 462-644 | 2833 | Val-1 to Leu-6, | H0550: 1, H0212: 1, | | |
| | | | | | Arg-13 to Phe-18. | L0745: 1 and L0746: 1. | | |
| HEGAY32 | 699906 | 147 | 1-195 | 2834 | Leu-22 to Ser-28, | H0550: 2 | | |
| | | | | | Lys-36 to Lys-43, | | | |
| | | | | | His-56 to Pro-65. | | | |
| HEGAY52 | 726316 | 148 | 1-204 | 2835 | His-32 to Trp-37, | H0550: 2 | | |
| | | | | | Pro-39 to Thr-53. | | | |
| HEGAZ61 | 950033 | 149 | 12-560 | 2836 | Leu-45 to Lys-50, | AR050: 66, AR054: 55, | | |
| | | | | | Gln-55 to Glu-74, | AR051: 37, AR089: 11, | | |
| | | | | | Thr-114 to Ile-119. | AR061: 6 | | |
| | | | | | | H0549: 1 and H0550: 1. | | |
| HEPAA44 | 509456 | 150 | 91-204 | 2837 | Ala-6 to Gln-12. | H0150: 2 | | |
| HEPAB70 | 557149 | 151 | 90-353 | 2838 | Ser-7 to Asp-20, | H0150: 2 | | |
| | | | | | Thr-30 to Phe-41, | | | |
| | | | | | Gly-55 to Gly-61. | | | |
| HEPAD09 | 888726 | 152 | 3-176 | 2839 | Ala-20 to Gln-36, | AR050: 154, AR051: | 16q24.3 | 155555, |
| | | | | | Pro-38 to Asn-50. | 146, AR054: 141 | | 155555, |
| | | | | | | H0150: 3 | | 227650, |
| | | | | | | | | 253000, |
| | | | | | | | | 602783 |
| HEPAD40 | 509002 | 153 | 132-257 | 2840 | | H0150: 2 | | |
| HEPAD82 | 509452 | 154 | 3-113 | 2841 | Ile-14 to Leu-22. | H0150: 3 and L0763: 1. | | |
| HEPAJ70 | 586843 | 155 | 1-75 | 2842 | His-1 to Thr-9. | H0150: 2 | 9q34.2-q34.3 | 120215, |
| | | | | | | | | 120215, |
| | | | | | | | | 190198 |
| HEPAK01 | 518331 | 156 | 73-309 | 2843 | Asn-1 to Lys-7, | H0150: 2 | | |
| | | | | | Leu-27 to His-32, | | | |
| | | | | | Arg-34 to Pro-50. | | | |
| HEPAK41 | 925146 | 157 | 284-583 | 2844 | Pro-4 to Arg-13, | H0549: 1, H0150: 1, | | |
| | | | | | Val-34 to Asp-40. | L0761: 1 and L0764: 1. | | |
| HEPAM29 | 508706 | 158 | 2-154 | 2845 | Ser-9 to Leu-20, | H0150: 2 | | |
| | | | | | Thr-38 to Thr-44. | | | |
| HEPAN19 | 508694 | 159 | 250-360 | 2846 | Leu-13 to Lys-21. | L0758; 3, H0150: 2, | | |
| | | | | | | L0803: 1 and L0779: 1. | | |
| HEPAP02 | 926914 | 160 | 3-167 | 2847 | | H0150: 2 | 2p12 | 147200, |
| | | | | | | | | 178640, |
| | | | | | | | | 216900 |
| HEPAP12 | 968771 | 161 | 105-284 | 2848 | | H0150: 2 | | |
| HEPAS44 | 884083 | 162 | 3-260 | 2849 | | H0150: 2, L0369: 1 | | |
| | | | | | | and L0532: 1. | | |
| HEPBA39 | 919875 | 163 | 3-518 | 2850 | His-1 to Met-10. | AR061: 44, AR089: 13 | | |
| | | | | | | H0150: 10, H0549: 5, | | |
| | | | | | | H0176: 1, L0790: 1 and | | |
| | | | | | | L0779: 1. | | |
| HEPBB24 | 508684 | 164 | 42-179 | 2851 | | H0150: 3 | | |
| HEPBB60 | 855597 | 165 | 72-323 | 2852 | | H0150: 4 | | |
| HEPBG26 | 967921 | 166 | 4-204 | 2853 | | H0150: 2 | | |
| HEPBG35 | 508686 | 167 | 92-229 | 2854 | Asp-15 to Gly-21, | H0150: 1 and L0717: 1. | | |
| | | | | | Gln-32 to Lys-45. | | | |
| HEPBH28 | 508673 | 168 | 171-290 | 2855 | Glu-7 to Gln-12. | H0150: 2, L0809: 1, | | |
| | | | | | | L0731: 1 and L0758: 1. | | |
| HEPBH38 | 707524 | 169 | 99-257 | 2856 | | H0150: 2 | | |
| HEPBH45 | 508696 | 170 | 193-312 | 2857 | | H0150: 3 | | |
| HEPBO69 | 888697 | 171 | 112-216 | 2858 | | H0150: 5 | | |
| HEPBQ47 | 713836 | 172 | 91-291 | 2859 | Pro-4 to Ser-12. | H0150: 2 | | |
| HEPBQ69 | 888693 | 173 | 272-460 | 2860 | His-25 to Ile-31. | AR050: 7, AR054: 1 | | |
| | | | | | | H0150: 3 | | |
| HEPBS10 | 968665 | 174 | 123-296 | 2861 | Ala-1 to Asp-7. | H0150: 2 | | |
| HEPBX43 | 715685 | 175 | 2-445 | 2862 | Pro-12 to Gly-22. | H0549: 2 and H0150: 2. | | |
| HEPCD36 | 523670 | 176 | 37-297 | 2863 | Asp-18 to Thr-28. | H0150: 2 and H0165: 1. | | |
| HEPCE25 | 529343 | 177 | 2-121 | 2864 | | H0150: 2 | | |
| HEPCO59 | 761094 | 178 | 19-117 | 2865 | | H0150: 2 | | |
| HEPCT32 | 947081 | 179 | 227-685 | 2866 | Ser-20 to Lys-30, | AR051: 15, AR054: 2, | | |
| | | | | | Ala-43 to Ser-45, | AR050: 0 | | |
| | | | | | Ser-65 to Thr-72, | H0150: 4, H0038: 3, | | |
| | | | | | Thr-112 to Thr-118, | L0758: 3 and L0779: 2. | | |
| | | | | | Ala-139 to Arg-147. | | | |
| HEPCU32 | 931824 | 180 | 448-975 | 2867 | Arg-57 to Arg-64, | AR051: 9, AR054: 8, | | |
| | | | | | Arg-106 to Arg-116, | AR050: 1, AR061: 0, | | |
| | | | | | Gln-128 to Pro-135. | AR089: 0 | | |
| | | | | | | H0150: 2, H0270: 1, | | |
| | | | | | | H0032: 1, H0212: 1 and | | |
| | | | | | | L0779: 1. | | |
| | 946975 | 2652 | 345-872 | 5339 | Arg-57 to Arg-64, | | | |
| | | | | | Arg-106 to Arg-116, | | | |
| | | | | | Gln-128 to Pro-135. | | | |
| HEQAE65 | 911438 | 181 | 2-160 | 2868 | Pro-11 to Gly-16, | AR089: 1, AR061: 0 | | |
| | | | | | Gln-37 to Gln-43. | H0544: 1 and H0435: 1. | | |
| HEQAH70 | 699690 | 182 | 1-186 | 2869 | | H0544: 1 and H0038: 1. | 5p13 | 108962 |
| | | | | | | | | 120940, |
| | | | | | | | | 217050, |
| | | | | | | | | 217050, |
| | | | | | | | | 217070, |
| | | | | | | | | 245050, |
| | | | | | | | | 600837, |
| | | | | | | | | 600946, |
| | | | | | | | | 600946, |
| | | | | | | | | 600946 |
| HEQAO76 | 769973 | 183 | 86-436 | 2870 | Ser-3 to Phe-65, | H0544: 2 | 7 | |
| | | | | | Glu-78 tp Ala-91, | | | |
| | | | | | Ala-95 to Ser-116. | | | |
| HEQAZ52 | 727051 | 184 | 10-180 | 2871 | | H0544: 2 and L0748: 2. | | |
| HEQBA41 | 712243 | 185 | 80-529 | 2872 | Pro-1 to Glu-15, | H0544: 1 and H0038: 1. | | |
| | | | | | Pro-29 to Val-35. | | | |
| HETAD29 | 509311 | 186 | 3-89 | 2873 | Asn-13 to Cys-19. | H0046: 2 | | |
| HETAF20 | 509308 | 187 | 61-273 | 2874 | Pro-22 to Gln-32. | H0046: 3 | | |
| HETAF49 | 509306 | 188 | 63-362 | 2875 | Lys-1 to Val-24, | H0046: 2 and L0748:2. | | |
| | | | | | Val-27 to Leu-32. | | | |
| HETAF89 | 509300 | 189 | 3-248 | 2876 | | H0046: 2 | | |
| HETAH16 | 942612 | 190 | 1-348 | 2877 | Asn-1 to Gly-13, | H0046: 3 | | |
| | | | | | Val-23 to Ser-28, | | | |
| | | | | | Ala-52 to Thr-63, | | | |
| | | | | | Asp-75 to Thr-80. | | | |
| HETAH66 | 799665 | 191 | 161-364 | 2878 | Lys-14 to Pro-22. | H0046: 6 | | |
| HETAH67 | 535390 | 192 | 128-226 | 2879 | | H0046: 4 | | |
| HETAJ26 | 508994 | 193 | 3-164 | 2880 | Ser-20 to Pro-25. | H0046: 2 | | |
| HETAK75 | 518156 | 194 | 3-290 | 2881 | | H0046: 2 | | |
| HETAN20 | 535359 | 195 | 2-202 | 2882 | | H0046: 4 | | |
| HETAP59 | 509118 | 196 | 162-305 | 2883 | Gln-15 to Ser-21. | H0046: 3 | | |
| HETAP94 | 960392 | 197 | 17-136 | 2884 | Pro-13 to Gln-22, | H0046: 5 | | |
| | | | | | Arg-24 to Cys-30, | | | |
| | | | | | Thr-35 to Lys-40. | | | |
| HETAR06 | 960839 | 198 | 2-313 | 2885 | Ile-18 to Gln-23, | H0046: 3 | | |
| | | | | | Ser-36 to Ser-41. | | | |
| HETAR60 | 934444 | 199 | 1-162 | 2886 | | H0046: 3 | | |
| HETAT83 | 918730 | 200 | 634-801 | 2887 | | H0046: 58 and H0616: 1. | | |
| HETAZ13 | 536192 | 201 | 156-275 | 2888 | Arg-35 to Glu-40. | H0046: 1 and S0004: 1. | | |
| HETBA01 | 509189 | 202 | 33-203 | 2889 | | H0046: 2 | | |
| HETBF45 | 508655 | 203 | 1-138 | 2890 | | H0046: 2 | | |
| HETBH48 | 720853 | 204 | 81-257 | 2891 | Asp-11 to Gln-18, | H0046: 3 | | |
| | | | | | Pro-38 to Ser-43. | | | |
| HETBR25 | 509099 | 205 | 3-311 | 2892 | Phe-1 to Ser-6, | H0046: 2 andL0741: 1. | | |
| | | | | | Arg-26 to Lys-31, | | | |
| | | | | | Arg-54 to Ser-59. | | | |
| HETBW39 | 523046 | 206 | 3-125 | 2893 | Thr-3 to Thr-9, | H0046: 2 | | |
| | | | | | Ala-24 to Cys-29. | | | |
| HETCE12 | 971505 | 207 | 354-647 | 2894 | | H0046: 5, L0748: 2 | | |
| | | | | | | and L0527: 1. | | |
| HETCE55 | 508666 | 208 | 143-307 | 2895 | Gly-20 to Gly-27. | H0046: 3 and L0748: 1. | | |
| HETCG63 | 841924 | 209 | 542-1249 | 2896 | Asn-1 to Ile-20, | H0046: 68, S0013: 2, | | |
| | | | | | Tyr-29 to Lys-41, | H0369: 1, H0431: 1, | | |
| | | | | | Thr-68 to Gln-74, | H0013: 1, H0156: 1 and | | |
| | | | | | Asp-88 to Tyr-101, | S0014: 1. | | |
| | | | | | Lys-108 to Cys-116, | | | |
| | | | | | Thr-136 to Thr-145, | | | |
| | | | | | Thr-158 to Cys-171, | | | |
| | | | | | Ser-183 to Pro-188. | | | |
| HETCH92 | 921390 | 210 | 121-204 | 2897 | | H0046: 2 | | |
| HETCL55 | 522829 | 211 | 31-201 | 2898 | Ala-32 to Pro-57. | H0046: 2 | | |
| HETDA81 | 525412 | 212 | 119-361 | 2899 | Thr-56 to Pro-62, | H0046: 2 and H0648: 1. | | |
| | | | | | Asp-76 to Gly-81. | | | |
| HETDD18 | 509110 | 213 | 149-283 | 2900 | His-3 to Asn-10. | H0046: 3 | | |
| HETDE67 | 883018 | 214 | 107-364 | 2901 | Lys-25 to Asn-35. | H0046: 1 and H0615: 1. | | |
| HETDE86 | 855509 | 215 | 54-398 | 2902 | Tyr-1 to Ala-9. | H0046: 3 and L0617: 1. | 22q11.2 | 123620, |
| | | | | | | | | 138720, |
| | | | | | | | | 145410, |
| | | | | | | | | 231950, |
| | | | | | | | | 239500, |
| | | | | | | | | 275350, |
| | | | | | | | | 600850 |
| HETDG67 | 960870 | 216 | 446-652 | 2903 | | H0046: 10 and S0152: 1. | | |
| HETDI03 | 925489 | 217 | 1-159 | 2904 | Asn-1 to Arg-14. | H0046: 2 | | |
| HETDL92 | 508990 | 218 | 146-274 | 2905 | | H0046: 2 | | |
| HETDN90 | 695021 | 219 | 131-235 | 2906 | Leu-1 to Ser-6. | H0046: 2 | | |
| HETDP21 | 525407 | 220 | 116-295 | 2907 | | H0031: 2 and H0046: 1. | | |
| HETDT15 | 600714 | 221 | 191-397 | 2908 | | H0046: 2 and L0756: 1. | | |
| HETDW59 | 827093 | 222 | 180-281 | 2909 | | H0046: 2 | | |
| HETEB68 | 917400 | 223 | 39-248 | 2910 | His-7 to Thr-22. | H0046: 9 | | |
| HETEQ16 | 952297 | 224 | 1-273 | 2911 | Arg-1 to Ile-29. | H0046: 5 | | |
| HETEZ43 | 529591 | 225 | 189-359 | 2912 | Asn-8 to Trp-15, | H0046: 2 | Xq26.1 | 300123, |
| | | | | | Leu-20 to Ser-32. | | | 301201, |
| | | | | | | | | 301845, |
| | | | | | | | | 301900, |
| | | | | | | | | 304340, |
| | | | | | | | | 307150, |
| | | | | | | | | 307700, |
| | | | | | | | | 308000, |
| | | | | | | | | 308000, |
| | | | | | | | | 309000, |
| | | | | | | | | 310490, |
| | | | | | | | | 313850 |
| HETFA40 | 523112 | 226 | 195-476 | 2913 | Asn-1 to Asp-10, | H0046: 3 | | |
| | | | | | Asp-25 to Gly-30, | | | |
| | | | | | Asp-45 to Asp-56. | | | |
| HETFC82 | 799658 | 227 | 1-543 | 2914 | | H0046: 5 and L0665: 1. | | |
| HETFE48 | 974351 | 228 | 283-510 | 2915 | | H0046: 14 | | |
| HETFG29 | 795274 | 229 | 275-643 | 2916 | Ala-22 to Tyr-27, | H0046: 3, H0618: 1, | | |
| | | | | | Val-58 to Arg-75, | H0038: 1 and H0616: 1. | | |
| | | | | | Ala-82 to Gly-88, | | | |
| | | | | | Pro-97 to Gln-102, | | | |
| | | | | | Val-109 to Asp-117. | | | |
| HETFI24 | 954104 | 230 | 430-1149 | 2917 | Arg-1 to Lys-6, | H0046: 53, H0616: 1 | | |
| | | | | | Glu-8 to Ser-15, | and L0664: 1. | | |
| | | | | | Leu-17 to Leu-24, | | | |
| | | | | | Gln-26 to Gln-46, | | | |
| | | | | | Ala-58 to Gln-63, | | | |
| | | | | | Gln-68 to Leu-74, | | | |
| | | | | | Lys-82 to Arg-95, | | | |
| | | | | | Glu-101 to Pro-107, | | | |
| | | | | | Leu-139 to Lys-147, | | | |
| | | | | | Glu-176 to Leu-186, | | | |
| | | | | | Arg-208 to Ile-215. | | | |
| HETFI81 | 523398 | 231 | 66-239 | 2918 | | H0046: 2 | | |
| HETFL39 | 973697 | 232 | 208-405 | 2919 | Gln-42 to Gly-48. | H0046: 2 | | |
| HETFM43 | 973702 | 233 | 88-339 | 2920 | Lys-6 to His-12, | H0046: 9 | | |
| | | | | | Gly-20 to Gly-40, | | | |
| | | | | | Gly-55 to Glu-69. | | | |
| HETGH30 | 527929 | 234 | 2-127 | 2921 | Asn-9 to Gly-17. | H0046: 2 | | |
| HETGI40 | 505383 | 235 | 1-63 | 2922 | Gly-6 to Asn-21. | H0046: 2 | | |
| HETGL62 | 523372 | 236 | 2-154 | 2923 | | H0046: 2 and L0771: 1. | | |
| HETGL74 | 947978 | 237 | 3-581 | 2924 | | AR050: 47, AR051: 46, | | |
| | | | | | | AR054: 39, AR089: 4, | | |
| | | | | | | AR061: 2 | | |
| | | | | | | H0046: 4 | | |
| HETGN20 | 927789 | 238 | 7-567 | 2925 | | H0046: 2 and L0519: 2. | | |
| HETGQ76 | 542486 | 239 | 23-190 | 2926 | Pro-4 to Lys-11. | H0046: 2 | | |
| HETGD09 | 969632 | 240 | 11-109 | 2927 | | H0046: 2 | | |
| HETHD30 | 935175 | 241 | 151-441 | 2928 | Arg-1 to Pro-7, | H0046: 9 | | |
| | | | | | Pro-13 to Ser-18, | | | |
| | | | | | Ala-51 to Ser-64, | | | |
| | | | | | Asn-92 to Lys-97. | | | |
| HETHE56 | 974348 | 242 | 101-259 | 2929 | | H0046: 4 | | |
| HETHH49 | 967737 | 243 | 490-639 | 2930 | | H0046: 4 | | |
| HETHO63 | 745503 | 244 | 90-428 | 2931 | | H0046: 1, H0032: 1 | | |
| | | | | | | and L0740: 1. | | |
| HETHO78 | 963592 | 245 | 475-660 | 2932 | Ser-12 to Val-20. | H0046: 5 | | |
| HETHR24 | 851412 | 246 | 24-461 | 2933 | Pro-1 to Arg-7, | AR089: 1, AR061: 0 | | |
| | | | | | Thr-18 to Thr-29, | H0046: 2 | | |
| | | | | | Arg-35 to Ser-50, | | | |
| | | | | | His-87 to CyS-92. | | | |
| HETHT53 | 974555 | 247 | 302-439 | 2934 | | H0046: 3 | | |
| HETIF01 | 966185 | 248 | 47-223 | 2935 | | H0046: 3 | | |
| HETIG71 | 974359 | 249 | 262-411 | 2936 | Ser-3 to Pro-10. | H0046: 3 | | |
| HETIJ84 | 766589 | 250 | 1-363 | 2937 | Ala-60 to Lys-67, | H0046: 14 | | |
| | | | | | Gln-71 to Gly-76. | | | |
| HETIJ85 | 883991 | 251 | 1-135 | 2938 | Glu-7 to Glu-12. | H0046: 2 | | |
| HETIQ89 | 764951 | 252 | 81-245 | 2939 | Ile-3 to His-12. | H0046: 2 | | |
| HETIU60 | 739804 | 253 | 458-646 | 2940 | | H0046: 3 | | |
| HETIY84 | 935947 | 254 | 62-166 | 2941 | Arg-16 to Asn-21. | H0046: 2 | | |
| HETJD30 | 974558 | 255 | 252-503 | 2942 | Pro-49 to Thr-57. | H0046: 18 | | |
| HETJD86 | 909130 | 256 | 3-215 | 2943 | Pro-14 to Pro-19, | H0046: 5 and L0766: 1. | | |
| | | | | | Cys-3 to Ser-40. | | | |
| HETHG63 | 950017 | 257 | 94-462 | 2944 | Val-10 to Asp-15. | AR061: 4, AR089: 2 | | |
| | | | | | | H0046: 2 and H0616: 1. | | |
| HETJI32 | 806435 | 258 | 262-552 | 2945 | | L0375: 3, H0046: 2, | | |
| | | | | | | L0774: 1 and L0789: 1. | | |
| HETJK67 | 751072 | 259 | 173-433 | 2946 | Ser-1 to Thr-7. | H0046: 2 | | |
| HETJN51 | 767932 | 260 | 26-274 | 2947 | | H0046: 2 | | |
| HETJT95 | 789310 | 261 | 222-413 | 2948 | Lys-8 to Thr-23. | H0046: 3 | | |
| HETJX04 | 927120 | 262 | 3-704 | 2949 | Asp-11 to Val-21, | AR089: 4, AR061: 2 | | |
| | | | | | Pro-27 to Thr-43, | H0046: 1, H0032: 1, | | |
| | | | | | Trp-92 to Lys-97, | H0040: 1 and L0565: 1. | | |
| | | | | | Pro-136 to Gly-149, | | | |
| | | | | | Met-182 to Val-193, | | | |
| | | | | | Thr-197 to Asn-203. | | | |
| HETJY11 | 966194 | 263 | 254-481 | 2950 | | H0046: 4 and L0774: 1. | | |
| HETKA38 | 894600 | 264 | 3-308 | 2951 | Val-50 to Arg-63, | H0046: 3 and H0616: 1. | | |
| | | | | | Asp-75 to Trp-89, | | | |
| | | | | | Pro-92 to Arg-98. | | | |
| HETKG67 | 974355 | 265 | 321-527 | 2952 | | H0046: 11 | 17 | |
| HETKH01 | 915320 | 266 | 20-226 | 2953 | | H0046: 3 | | |
| HETKH92 | 790910 | 267 | 1-210 | 2954 | Pro-1 to Gly-14, | H0046: 2 | | |
| | | | | | Gly-17 to Ser-23, | | | |
| | | | | | Ser-25 to Arg-34. | | | |
| HETKM55 | 974362 | 268 | 31-267 | 2955 | Ser-12 to Arg-18, | H0046: 17 | | |
| | | | | | Gln-69 to Met-74. | | | |
| HETKQ65 | 855449 | 269 | 3-353 | 2956 | Leu-33 to His-38, | H0046: 3 | | |
| | | | | | Pro-56 to Glu-61, | | | |
| | | | | | Pro-11 to Leu-117. | | | |
| HETKV26 | 910030 | 270 | 2-664 | 2957 | Asp-12 to Trp-20. | AR061: 1, AR089: 0 | | |
| | | | | | H0046: 2 | | | |
| HETKX91 | 789797 | 271 | 150-254 | 2958 | Leu-22 to Arg-28. | H0046: 2 | | |
| HETKZ65 | 941045 | 272 | 3-620 | 2959 | Gln-1 to Glu-20. | H0046: 2 | | |
| HETLB04 | 920894 | 273 | 518-1333 | 2960 | Glu-1 to Gly-6, | H0046: 6 and H0616: 1. | | |
| | | | | | Val-21 to Asp-27. | | | |
| HETLH89 | 786458 | 274 | 2-250 | 2961 | Cys-22 to Asp-27. | H0046: 2 | | |
| HETLM46 | 974361 | 275 | 111-314 | 2962 | His-1 to Leu-8, | H0046: 3 | | |
| | | | | | Lys-10 to Leu-17, | | | |
| | | | | | Met-44 to Cys-49. | | | |
| HJMAE34 | 957079 | 276 | 3-305 | 2963 | | H0545: 2 | | |
| HJMAZ84 | 919847 | 277 | 39-335 | 2964 | | H0545: 2 | | |
| HJMBT23 | 858254 | 278 | 610-155 | 2965 | Asp-53 to Gln-59, | H0545: 2, L0766: 1, | | |
| | | | | | Asp-122 to Leu-128. | L0775: 1, L0383: 1, | | |
| | | | | | | L0742: 1 and L0747: 1. | | |
| HLMNG77 | 675752 | 279 | 103-252 | 2966 | Arg-11 to Ser-19. | H0618: 6, L0758: 3, | | |
| | | | | | | H0484: 1, H0255: 1, | | |
| | | | | | | H0549: 1, H0253: 1, | | |
| | | | | | | H0616: 1, L0794: 1, | | |
| | | | | | | L0774: 1 and L0779: 1. | | |
| HLWAB50 | 856552 | 280 | 167-367 | 2967 | Tyr-23 to Ser-30. | H0553: 2 | | |
| HLWAD08 | 958554 | 281 | 146-295 | 2968 | Asn-34 to Leu-40. | H0553: 2, L0441: 1 | | |
| | | | | | | and H0672: 1. | | |
| HLWAG51 | 964389 | 282 | 588-989 | 2969 | Ser-84 to Ile-92, | L0754: 20, L0748: 10, | | |
| | | | | | Glu-104 to Gly-111. | L0749: 10, H0553: 8, | | |
| | | | | | | L0755: 8, H0031: 7, | | |
| | | | | | | H0644: 6, H0030: 2, | | |
| | | | | | | L0142: 1, L0771: 1, | | |
| | | | | | | L0759: 1 and H0008: 1. | | |
| HLWAH41 | 944774 | 283 | 13-771 | 2970 | Arg-9 to Val-17, | AR061: 2, AR089: 2 | | |
| | | | | | Pro-25 to Gly-30. | L0748: 6, L0752: 5, | | |
| | | | | | | H0553: 2, L0754: 2, | | |
| | | | | | | L0749: 1 and L0780: 1. | | |
| | 948953 | 2653 | 687-286 | 5340 | Gly-1 to Ser-6, | | | |
| | | | | | Phe-12 to Trp-25, | | | |
| | | | | | Ala-31 to Gly-42, | | | |
| | | | | | Met-44 to Gln-49. | | | |
| HLWAI13 | 920690 | 284 | 158-376 | 2971 | | L0754: 2, H0553: 1, | | |
| | | | | | | H0670: 1 and L0749: 1. | | |
| HLWAJ64 | 746460 | 285 | 381-145 | 2972 | | H0553: 2 | | |
| HLWAK69 | 694216 | 286 | 118-333 | 2973 | Asn-12 to Ala-18, | H0553: 1, H0435: 1 | | |
| | | | | | Gly-61 to Ser-70. | and L0748: 1. | | |
| HLWAK94 | 715727 | 287 | 330-175 | 2974 | | H0553: 2, L0536: 2, | | |
| | | | | | | L0754: 2 and H0030: 1. | | |
| HLWAR77 | 947484 | 288 | 1287-292 | 2975 | Gln-97 to Pro-114, | AR050: 21, AR054: 9, | | |
| | | | | | Trp-117 to Lys-129, | AR051: 3, AR089: 1, | | |
| | | | | | Thr-166 to Gln-173, | AR061: 1 | | |
| | | | | | Ser-178 to Lys-183, | H0553: 4 and L0759: 2. | | |
| | | | | | Glu-250 to Phe-256, | | | |
| | | | | | Ser-295 to His-301, | | | |
| | | | | | Tyr-307 to Gln-316, | | | |
| | | | | | Glu-322 to Ser-330. | | | |
| HLWAR78 | 723330 | 289 | 430-2 | 2976 | Ser-20 to Gly-27, | H0553: 2, H0030: 1 | | |
| | | | | | Gln-29 to Arg-41, | and L0755: 1. | | |
| | | | | | Ser-46 to Pro-53. | | | |
| HLWAU18 | 666273 | 290 | 4-390 | 2977 | Arg-112 to Ser-117. | H0553: 2 | | |
| HLWBA11 | 966796 | 291 | 192-350 | 2978 | | H0553: 2 | | |
| HLWBA25 | 677944 | 292 | 1-192 | 2979 | Lys-28 to Arg-39. | H0553: 2, L0005: 1, | | |
| | | | | | | L0143: 1, L0749: 1 and | | |
| | | | | | | L0755: 1. | | |
| HLWBE31 | 934562 | 293 | 1-150 | 2980 | Val-2 to Pro-8, | H0553: 2 | | |
| | | | | | Arg-21 to Trp-29, | | | |
| | | | | | Thr-41 to Arg-50. | | | |
| HLWBE92 | 791362 | 294 | 252-1 | 2981 | Leu-6 to Gln-11, | H0030: 1 and H0553: 1. | | |
| | | | | | Arg-46 to Asp-52, | | | |
| | | | | | Glu-68 to Pro-73. | | | |
| HLWBJ02 | 919639 | 295 | 90-380 | 2982 | Ala-3 to Trp-10. | H0553: 2 | | |
| HLWBK40 | 711000 | 296 | 78-224 | 2983 | | H0553: 3 | | |
| HLWBN49 | 713600 | 297 | 847-1067 | 2984 | Arg-11 to His-20, | L0748: 14, H0553: 4, | | |
| | | | | | Pro-23 to Gly-31. | L0754: 4, H0644: 3, | | |
| | | | | | | H0031: 2, L0005: 1, | | |
| | | | | | | L0774: 1, S0454: 1, | | |
| | | | | | | L0749: 1 and L0780: 1. | | |
| HLWBO68 | 529323 | 298 | 119-199 | 2985 | Gly-1 to Glu-6, | H0328: 2 and H0553: 1. | | |
| HLWBQ84 | 782938 | 299 | 3-263 | 2986 | Lys-1 to Lys-41, | AR089: 1, AR061: 0 | | |
| | | | | | Pro-75 to Ser-86. | H0553: 2 | | |
| HLWBQ86 | 703465 | 300 | 109-279 | 2987 | Met-36 to Lys-41. | H0553: 3 | | |
| HLWBS14 | 925300 | 301 | 272-48 | 2988 | Ala-37 to Glu-48. | H0328: 1 and H0553: 1. | | |
| HLWBS43 | 774175 | 302 | 2-268 | 2989 | Glu-57 to Gly-66. | H0553: 2 | | |
| HLWBZ74 | 679215 | 303 | 184-2 | 2990 | Asn-7 to Cys-15. | H0030: 1, H0553: 1 | | |
| | | | | | | and L0754: 1. | | |
| HLWCA67 | 577929 | 304 | 114-848 | 2991 | Pro-26 to Ser-39, | H0031: 2, L0754: 2, | | |
| | | | | | Ile-66 to Ser-78, | H0553: 1, L0743: 1, | | |
| | | | | | Lys-84 to Pro-105, | L0748:1 and L0747: 1. | | |
| | | | | | Pro-171 to Pro-181, | | | |
| | | | | | Arg-194 to Ala-199. | | | |
| HLWCM44 | 727699 | 305 | 57-314 | 2992 | Ala-17 to Thr-24. | H0553: 2 | | |
| HLWCM70 | 926850 | 306 | 207-329 | 2993 | | H0553: 2 | 3p24-p22 | 116806, |
| | | | | | | | | 168468, |
| | | | | | | | | 182280, |
| | | | | | | | | 190182, |
| | | | | | | | | 190182, |
| | | | | | | | | 227646, |
| | | | | | | | | 261510, |
| | | | | | | | | 600163, |
| | | | | | | | | 601154 |
| HLWCO66 | 750779 | 307 | 71-208 | 2994 | Gln-16 to Met-21, | H0553: 2 | | |
| | | | | | Val-25 to Lys-33, | | | |
| | | | | | Ala-40 to Arg-46. | | | |
| HLWCQ53 | 869700 | 308 | 160-348 | 2995 | Ser-11 to Gly-17. | H0553: 2 and L0754: 1. | | |
| HLWCQ62 | 742778 | 309 | 329-114 | 2996 | Pro-10 to Lys-16. | H0615: 3, H0553: 2, | | |
| | | | | | | L0756: 2 and L0758: 2. | | |
| HLWCQ76 | 768018 | 310 | 2-154 | 2997 | | H0553: 2, L0656: 1, | | |
| | | | | | | L0659: 1, L0666: 1, | | |
| | | | | | | L0664: 1 and L0748: 1. | | |
| HLWDA01 | 913768 | 311 | 2-463 | 2998 | Ile-31 to Ser-40, | H0553: 2 | | |
| | | | | | Arg-115 to Gly-122. | | | |
| HLWDB18 | 790969 | 312 | 1-702 | 2999 | Ser-21 to Glu-27, | H0553: 2, H0038: 1, | | |
| | | | | | Gln-50 to Pro-59, | L0764: 1, L0794: 1 and | | |
| | | | | | Gln-61 to Ser-66, | L0438: 1. | | |
| | | | | | Thr-68 to Pro-74, | | | |
| | | | | | Pro-77 to Gln-84. | | | |
| HLWDD02 | 953283 | 313 | 3-149 | 3000 | | H0553: 2 | | |
| HLWDE60 | 868276 | 314 | 148-426 | 3001 | Tyr-8 to Arg-14, | H0553: 2 | | |
| | | | | | Asn-40 to His-46, | | | |
| | | | | | Val-56 to Thr-62. | | | |
| HLWDL71 | 759843 | 315 | 1-51 | 3002 | Pro-1 to Gly-12. | H0553: 2 | | |
| HLWEE76 | 973315 | 316 | 2-157 | 3003 | Thr-18 to Met-25. | H0553: 2 | | |
| HLWFG82 | 929647 | 317 | 1-558 | 3004 | Pro-4 to Pro-18, | AR054: 2, AR051: 1, | | |
| | | | | | Gly-81 to Pro-87, | AR089: 1, AR050: 1, | | |
| | | | | | Ala-110 to Ala-118, | AR061: 0 | | |
| | | | | | Gln-127 to Gly-143, | H0651: 59, L0751: 5, | | |
| | | | | | Arg-168 to Asp-176. | L0438: 4, L0774: 3, | | |
| | | | | | | L0439: 3, L0748: 2, | | |
| | | | | | | L0779: 2, L0752: 2, | | |
| | | | | | | L0755: 2, L0595: 2, | | |
| | | | | | | H0295: 1, H0009: 1, | | |
| | | | | | | T0010: 1, H0553: 1, | | |
| | | | | | | H0617: 1, H0163: 1, | | |
| | | | | | | H0102: 1, H0494: 1, | | |
| | | | | | | L0770: 1, L0662: 1, | | |
| | | | | | | L0375: 1, L0806: 1, | | |
| | | | | | | L0776: 1, L0657: 1, | | |
| | | | | | | L0659: 1, L0792: 1, | | |
| | | | | | | L0666: 1, L0663: 1, | | |
| | | | | | | L0664: 1, L0665: 1, | | |
| | | | | | | L0352: 1, H0648: 1, | | |
| | | | | | | L0740: 1, L0749: 1, | | |
| | | | | | | L0757: 1, L0361: 1, | | |
| | | | | | | L0603: 1 and S0042: 1. | | |
| HLWFQ04 | 856488 | 318 | 1-402 | 3005 | Phe-20 to Gly-26, | H0553: 2 | | |
| | | | | | Ser-30 to Ser-37. | | | |
| HMVDU41 | 957804 | 319 | 2-289 | 3006 | Ser-37 to Ala-46, | H0651:29 and S0212:1. | | |
| | | | | | Cys-77 to Ser-85. | | | |
| HNBTP01 | 914428 | 320 | 3-512 | 3007 | | H0662: 2, H0670: 1, | 22q12.1-q13.2 | 103050, |
| | | | | | | L0756: 1 and L0759: 1. | | 103050, |
| | | | | | | | | 124030, |
| | | | | | | | | 124030, |
| | | | | | | | | 138981, |
| | | | | | | | | 182380, |
| | | | | | | | | 188826, |
| | | | | | | | | 190040, |
| | | | | | | | | 190040, |
| | | | | | | | | 190040 |
| HNBTT79 | 965424 | 321 | 3-194 | 3008 | Pro-12 to Ser-24, | H0662: 2 | | |
| | | | | | Thr-42 to Ser-47, | | | |
| | | | | | Pro-52 to Trp-59. | | | |
| HNBTX52 | 965428 | 322 | 52-339 | 3009 | | H0662: 2 | | |
| HNBUM19 | 933672 | 323 | 209-472 | 3010 | | H0662: 2 | | |
| HNBUR07 | 951814 | 324 | 203-412 | 3011 | Lys-8 to Asn-14, | H0662: 2 | | |
| | | | | | Lys-48 to Asp-53. | | | |
| HNGAO08 | 958685 | 325 | 300-115 | 3012 | | H0651: 177, L0794: 5, | | |
| | | | | | | L0766: 5, H0657: 3, | | |
| | | | | | | L0526: 2, L0666: 2, | | |
| | | | | | | L0664: 2, L0744: 2, | | |
| | | | | | | L0759: 2, S0212: 1, | | |
| | | | | | | S0360: 1, H0587: 1, | | |
| | | | | | | H0052: 1, H0050: 1, | | |
| | | | | | | H0266: 1, H0428: 1, | | |
| | | | | | | H0551: 1, H0412: 1, | | |
| | | | | | | L0475: 1, H0646: 1, | | |
| | | | | | | L0761: 1, L0662: 1, | | |
| | | | | | | L0803: 1, L0805: 1, | | |
| | | | | | | L0809: 1, L0665: 1, | | |
| | | | | | | S0052: 1, S0374: 1, | | |
| | | | | | | H0690: 1, H0659: 1, | | |
| | | | | | | H0648: 1, H0521: 1, | | |
| | | | | | | L0786: 1, L0779: 1, | | |
| | | | | | | L0777: 1, L0780: 1, | | |
| | | | | | | L0755: 1, H0543: 1 and | | |
| | | | | | | S0424: 1. | | |
| | 959068 | 2654 | 81-284 | 5341 | Ile-1 to Asp-7, | | | |
| | | | | | Asn-39 to Pro-46. | | | |
| HNNNA06 | 917723 | 326 | 340-696 | 3013 | Glu-15 to Asp-21, | AR054: 7, AR050: 1, | 2q35 | 118800, |
| | | | | | His-32 to His-45, | AR051: 0 | | 123660, |
| | | | | | Gly-55 to Lys-64, | H0678: 47, L0748: 12, | | 125660, |
| | | | | | Gly-81 to Ser-88. | L0754: 7, L0747: 6, | | 125660, |
| | | | | | | L0755: 5, L0776: 4, | | 193500, |
| | | | | | | L0740: 4, L0749: 4, | | 193500, |
| | | | | | | L0759: 3, H0553: 2, | | 193500, |
| | | | | | | L0665: 2, L0779: 2, | | 193500, |
| | | | | | | S0282: 1, H0057: 1, | | 201460, |
| | | | | | | H0674: 1, H0616: 1, | | 205100, |
| | | | | | | H0646: 1, L0770: 1, | | 237300, |
| | | | | | | L0769: 1, L0646: 1, | | 262000, |
| | | | | | | L0765: 1, L0773: 1, | | 600266, |
| | | | | | | L0777: 1, L0731: 1 and | | 601277 |
| | | | | | | L0596: 1. | | |
| HNNNA09 | 917724 | 327 | 320-520 | 3014 | Glu-15 to Asp-21, | H0678: 47, L0748: 12, | 2q35 | 118800, |
| | | | | | His-32 to His-45. | L0754: 7, L0747: 6, | | 123660, |
| | | | | | | L0755: 5, L0776: 4, | | 125660, |
| | | | | | | L0740: 4, L0749: 4, | | 125660, |
| | | | | | | L0759: 3, H0553: 2, | | 193500, |
| | | | | | | L0665: 2, L0779: 2, | | 193500, |
| | | | | | | S0282: 1, H0057: 1, | | 193500, |
| | | | | | | H0674: 1, H0616: 1, | | 193500, |
| | | | | | | H0646: 1, L0770: 1, | | 201460, |
| | | | | | | L0769: 1, L0646: 1, | | 205100, |
| | | | | | | L0765: 1, L0773: 1, | | 237300, |
| | | | | | | L0777: 1, L0731: 1 and | | 232000, |
| | | | | | | L0596: 1. | | 600266, |
| | | | | | | | | 601277 |
| HNNNA77 | 917725 | 328 | 771-1019 | 3015 | | H0678: 2 | 2q35 | 118800, |
| | | | | | | | | 123660, |
| | | | | | | | | 125660, |
| | | | | | | | | 125660, |
| | | | | | | | | 193500, |
| | | | | | | | | 193500, |
| | | | | | | | | 193500, |
| | | | | | | | | 193500, |
| | | | | | | | | 201460, |
| | | | | | | | | 205100, |
| | | | | | | | | 237300, |
| | | | | | | | | 262000, |
| | | | | | | | | 600266, |
| | | | | | | | | 601277 |
| HNOAS06 | 933730 | 329 | 525-752 | 3016 | Asp-28 to Ala-37, | H0618: 3, L0758: 3, | | |
| | | | | | Arg-49 to Gly-58, | L0794: 2, L0748: 2, | | |
| | | | | | Ala-63 to Asn-69. | L0779: 2, L0755: 2, | | |
| | | | | | | L0731: 2, L0770: 1, | | |
| | | | | | | H0651: 1 and L0603: 1. | | |
| HNOAX12 | 969363 | 330 | 231-524 | 3017 | Pro-76 to Cys-88. | H0651: 8, L0744: 2, | | |
| | | | | | | L0598: 1 and L0756: 1. | | |
| HNOBF57 | 927903 | 331 | 101-475 | 3018 | Ala-2 to Lys-10, | H0651: 154, L0731: 9, | | |
| | | | | | Glu-70 to Gln-76. | L0777: 6, L0803: 4, | | |
| | | | | | | L0775: 3, H0196: 2, | | |
| | | | | | | H0163: 2, L0662: 2, | | |
| | | | | | | L0805: 2, L0783: 2, | | |
| | | | | | | L0438: 2, L0740: 2, | | |
| | | | | | | L0759: 2, H0170: 1, | | |
| | | | | | | S0444: 1, H0592: 1, | | |
| | | | | | | H0632: 1, L0471: 1, | | |
| | | | | | | H0399: 1, H0615: 1, | | |
| | | | | | | H0040: 1, S0294: 1, | | |
| | | | | | | H0647: 1, L0598: 1, | | |
| | | | | | | L0763: 1, L0638: 1, | | |
| | | | | | | L0637: 1, L0642: 1, | | |
| | | | | | | L0374: 1, L0767: 1, | | |
| | | | | | | L0768: 1, L0794: 1, | | |
| | | | | | | L0804: 1, L0774: 1, | | |
| | | | | | | L0375: 1, L0776: 1, | | |
| | | | | | | L0606: 1, L0659: 1, | | |
| | | | | | | L0809: 1, L0647: 1, | | |
| | | | | | | L0789: 1, L0791: 1, | | |
| | | | | | | L0666: 1, L0663: 1, | | |
| | | | | | | L0664: 1, L0665: 1, | | |
| | | | | | | H0659: 1, H0658: 1, | | |
| | | | | | | H0672: 1, S0328: 1, | | |
| | | | | | | H0539: 1, S0380: 1, | | |
| | | | | | | L0439: 1, L0779: 1, | | |
| | | | | | | L0594: 1, L0361: 1, | | |
| | | | | | | S0026: 1, S0242: 1 and | | |
| | | | | | | S0460: 1. | | |
| HNOCQ04 | 964933 | 332 | 3-374 | 3019 | | H0651: 6 | | |
| HNOCT39 | 952611 | 333 | 46-114 | 3020 | Asn-18 to Lys-23. | H0651: 3 | | |
| HNCOU05 | 957833 | 334 | 536-745 | 3021 | | H0651: 2 | | |
| HOCMU03 | 922418 | 335 | 8-220 | 3022 | Asp-9 to Lys-20, | H0660: 2 | | |
| | | | | | Ser-25 to Glu-30, | | | |
| | | | | | Pro-57 to Asn-63. | | | |
| HOCPJ03 | 917484 | 336 | 3-185 | 3023 | | H0660: 2 | | |
| HODAD73 | 973463 | 337 | 91-231 | 3024 | Gly-42 to His-47. | H0328: 3 | | |
| HODAD95 | 974043 | 338 | 280-426 | 3025 | | H0328: 2 and H0615: 2. | | |
| HODAG37 | 529410 | 339 | 48-236 | 3026 | | H0328: 2 | | |
| HODAH32 | 859509 | 340 | 70-300 | 3027 | | H0328: 2 and L0534: 1. | | |
| HODAJ01 | 921666 | 341 | 46-321 | 3028 | | H0328: 1 anD H0615: 1. | | |
| HODAJ35 | 529405 | 342 | 76-216 | 3029 | | H0328: 2 | | |
| HODAK38 | 529404 | 343 | 108-311 | 3030 | Pro-10 to Cys-27, | H0328: 2 | | |
| | | | | | Gln-41 to Arg-48. | | | |
| HODAK95 | 960179 | 344 | 147-398 | 3031 | | L0777: 4, H0328: 2, | | |
| | | | | | | L0756: 2 and L0803: 1. | | |
| HODAO16 | 529401 | 345 | 3-161 | 3032 | Thr-3 to Lys-12. | H0328: 2 | | |
| HODAT56 | 529402 | 346 | 21-158 | 3033 | Arg-15 to Thr-21, | H0328: 2 | | |
| | | | | | Ser-38 to Glu-44. | | | |
| HODAV80 | 859519 | 347 | 85-300 | 3034 | | H0328: 2 | | |
| HODAW60 | 692684 | 348 | 227-328 | 3035 | | H0328: 2 | | |
| HODAW84 | 775425 | 349 | 142-297 | 3036 | Thr-6 to Asp-14. | H0546: 1, H0328: 1, | | |
| | | | | | | L0779: 1 and L0361: 1. | | |
| HODBC01 | 921662 | 350 | 166-303 | 3037 | Gly-2 to Arg-10, | H0328: 3 | | |
| | | | | | Ile-27 to Pro-33. | | | |
| HODBC07 | 954161 | 351 | 158-331 | 3038 | Arg-27 to Trp-33. | H0328: 2 | | |
| HODBE01 | 921655 | 352 | 18-116 | 3039 | Cys-14 to Pro-20. | H0328: 2 | | |
| HODBH16 | 927781 | 353 | 3-299 | 3040 | Glu-23 to His-30, | H0328: 2 | | |
| | | | | | Leu-41 to Asp-53. | | | |
| HODBO85 | 859559 | 354 | 1-168 | 3041 | Lys-13 to Gln-21. | H0328: 2 | | |
| HODBT58 | 678444 | 355 | 2-166 | 3042 | Ser-39 to Arg-45. | H0328: 2 | | |
| HODBU95 | 529329 | 356 | 59-280 | 3043 | Glu-10 to Ala-17. | H0328: 2 | | |
| HODBV71 | 761447 | 357 | 71-343 | 3044 | Ser-22 to Val-41. | H0328: 1, H0059: 1 | | |
| | | | | | | and L0596: 1. | | |
| HODCA11 | 967732 | 358 | 1-180 | 3045 | | H0328:2 | | |
| HODCA68 | 529400 | 359 | 2-184 | 3046 | Leu-20 to Arg-25, | H0328:2 | | |
| | | | | | Ser-47 to Gly-53. | | | |
| HODCD05 | 932218 | 360 | 2-286 | 3047 | Glu-35 to Ile-40, | H0328: 1 and H0038: 1. | | |
| | | | | | Pro-73 to Gln-79. | | | |
| HODCH64 | 529327 | 361 | 1-123 | 3048 | Glu-1 to Thr-10. | H0328: 2 | | |
| HODCJ11 | 967320 | 362 | 20-175 | 3049 | Gln-44 to Thr-51. | H0328: 2 | | |
| HODCJ42 | 932638 | 363 | 39-242 | 3050 | Tyr-16 to Thr-22. | H0328: 2 | | |
| HODCL88 | 529334 | 364 | 1-222 | 3051 | | H0328: 2 and L0749:2. | | |
| HODCM62 | 859556 | 365 | 87-275 | 3052 | Gln-1 to Ser-7, | H0328: 2 | | |
| | | | | | Arg-15 to Gly-21. | | | |
| HODCO09 | 573202 | 366 | 1-168 | 3053 | Lys-27 to Leu-32, | H0328: 2 | | |
| | | | | | Asp-49 to Asp-56. | | | |
| HODCO46 | 573200 | 367 | 2-196 | 3054 | | H0328: 2 | | |
| HODCO82 | 573195 | 368 | 162-335 | 3055 | | H0328: 2 | | |
| HODCP69 | 507249 | 369 | 3-185 | 3056 | | H0328: 2 | | |
| HODCR43 | 529332 | 370 | 122-325 | 3057 | Leu-1 to Lys-14. | H0328: 2 | | |
| HODCT07 | 954149 | 371 | 127-234 | 3058 | Pro-14 to Ile-20, | H0328: 2 | | |
| | | | | | Pro-23 to Pro-28. | | | |
| HODCU01 | 917270 | 372 | -203 | 3059 | Arg-1 to Pro-12. | H0328: 2 | | |
| HODCU02 | 920698 | 373 | 313-477 | 3060 | Gly-8 to Thr-22. | H0328: 1 and H0615: 1. | | |
| HODCU62 | 524314 | 374 | 207-323 | 3061 | Arg-5 to Cys-11. | H0328: 2 | | |
| HODCV09 | 973487 | 375 | 382-591 | 3062 | Lys-7 to Glu-12. | H0328: 3 | | |
| HODCW17 | 960051 | 376 | 156-284 | 3063 | Lys-37 to Ser-43. | H0328: 2 | | |
| HODCW37 | 575256 | 377 | 80-280 | 3064 | Pro-49 to His-59. | H0328: 2 | | |
| HODCZ20 | 859580 | 378 | 82-273 | 3065 | | H0328: 2 | | |
| HODDD20 | 933726 | 379 | 56-166 | 3066 | Glu-21 to Glu-37. | H0328: 1 and H0615: 1. | | |
| HODDD41 | 529390 | 380 | 3-305 | 3067 | Ala-8 to Ala-13, | H0328: 2 | | |
| | | | | | Ile-17 to Gln-26, | | | |
| | | | | | Phe-52 to Asn-64, | | | |
| | | | | | Asp-72 to Lys-77. | | | |
| HODDE28 | 529169 | 381 | 137-277 | 3068 | Gln-14 to Leu-22, | H0328: 2 and H0615: 1. | | |
| | | | | | Lys-25 to Lys-35. | | | |
| HODDF51 | 937759 | 382 | 1-240 | 3069 | | H0328: 2 | | |
| HODDG57 | 806204 | 383 | 127-468 | 3070 | | H0328: 1, H0615: 1 | | |
| | | | | | | and L0748: 1. | | |
| HODDH52 | 742217 | 384 | 18-329 | 3071 | Val-26 to Lys-38, | H0038: 2, H0328: 1 | | |
| | | | | | Lys-47 to Lys-53, | and H0616: 1. | | |
| | | | | | Lys-60 to Leu-65, | | | |
| | | | | | Ser-80 to Ile-90. | | | |
| HODDM21 | 523270 | 385 | 58-147 | 3072 | Leu-16 to Arg-30. | H028: 2 | | |
| HODDM25 | 780472 | 386 | 387-566 | 3073 | | H0328: 1, H0615: 1 | | |
| | | | | | | and L0748: 1. | | |
| HODDM78 | 859516 | 387 | 83-286 | 3074 | | H0328: 2 | | |
| HODDN40 | 859518 | 388 | 385-615 | 3075 | Arg-10 to Arg-17, | H0328: 1, H0615: 1 | | |
| | | | | | Ser-24 to Lys-30. | and L0758: 1. | | |
| HODDN59 | 975437 | 389 | 391-660 | 3076 | | H0615: 2 and H0328: 1. | | |
| HODDN93 | 891236 | 390 | 60-371 | 3077 | | AR054: 28: AR050: 22, | | |
| | | | | | | AR051: 13 | | |
| | | | | | | H3028: 1, H0674: 1 | | |
| | | | | | | and L0754: 1. | | |
| HODDQ02 | 920962 | 391 | 101-283 | 3078 | | H0328: 2 | | |
| HODDQ21 | 919295 | 392 | 3-359 | 3079 | Tyr-11 to Gln-16, | H0615: 2 and H0328: 1. | | |
| | | | | | Ala-24 to Ala-32, | | | |
| | | | | | Pro-36 to Ser-41. | | | |
| HODDR13 | 529640 | 393 | 48-152 | 3080 | | H0328: 2 | | |
| HODDS67 | 567197 | 394 | 171-338 | 3081 | | H0328: 2 | | |
| HODDU70 | 529290 | 395 | 1-357 | 3082 | Gly-1 to Pro-7. | H0328: 2 | | |
| HODDX35 | 531209 | 396 | 126-275 | 3083 | Leu-9 to Gln-20. | H0328: 2 | | |
| HODEA90 | 782242 | 397 | 391-534 | 3084 | | H0615: 3 | | |
| HODEB04 | 927022 | 398 | 1-282 | 3085 | | H0615: 3 | | |
| HODEC76 | 952204 | 399 | 350-514 | 3086 | | H0615: 2 | | |
| HODED11 | 966085 | 400 | 42-218 | 3087 | Ile-12 to Thr-20, | H0615: 3 | | |
| | | | | | Tyr-47 to Gly-57. | | | |
| HODED55 | 859368 | 401 | 24-296 | 3088 | Thr-34 to Ser-40. | H0615: 2 | | |
| HODED87 | 915909 | 402 | 23-421 | 3089 | Gln-3 to Arg-14, | L0776: 2, L0740: 2, | | |
| | | | | | Pro-30 to Thr-36. | H0484: 1, H0615: 1, | | |
| | | | | | | L0809: 1, L0748: 1, | | |
| | | | | | | L0750: 1, L0779: 1 and | | |
| | | | | | | L0752: 1. | | |
| HODEF10 | 963494 | 403 | 235-480 | 3090 | | H0615: 2 | | |
| HODEF87 | 974342 | 404 | 27-266 | 3091 | | H0615: 3 | | |
| HODEG86 | 784833 | 405 | 373-648 | 3092 | | H0615: 3 | | |
| HODEH08 | 963895 | 406 | 2-142 | 3093 | Pro-3 to Thr-10, | H0615: 2 | | |
| | | | | | Ser-38 to Pro-47. | | | |
| HODEH22 | 974329 | 407 | 101-295 | 3094 | | H0615: 3 | | |
| HODEI13 | 859318 | 408 | 66-227 | 3095 | Ile-9 to Cys-14, | H0615: 3 | | |
| | | | | | Pro-22 to Gly-27. | | | |
| HODEI48 | 841906 | 409 | 511-633 | 3096 | Lys-1 to Ser-10. | H0615: 3 | | |
| HODEK50 | 859307 | 410 | 363-740 | 3097 | Ser-25 to Pro-30, | H0615: 3 | | |
| | | | | | Pro-84 to Glu-92. | | | |
| HODEL92 | 859313 | 411 | 45-188 | 3098 | | H0615: 2 | | |
| HODEN75 | 772940 | 412 | 312-458 | 3099 | | H0615: 2 | | |
| HODEO87 | 930735 | 413 | 1-159 | 3100 | Val-9 to Val-15. | H0615: 2 | | |
| HODEP04 | 926984 | 414 | 69-269 | 3101 | | H0615: 2 | | |
| HODEP12 | 965534 | 415 | 115-381 | 3102 | | H0615: 2 | | |
| HODEP86 | 784846 | 416 | 215-364 | 3103 | | H0615: 2 | | |
| HODEQ28 | 972808 | 417 | 206-331 | 3104 | Thr-1 to Ser-13. | H0615: 3 | | |
| HODEQ79 | 859287 | 418 | 246-479 | 3105 | | H0615: 2 | | |
| HEDER91 | 789661 | 419 | 1-351 | 3106 | Phe-28 to Thr-33, | AR061: 4, AR089: 2 | | |
| | | | | | Ile-44 to Thr-54, | H0651: 709, L0766: 5, | | |
| | | | | | Arg-78 to Lys-88, | L0754: 5, L0756: 3, | | |
| | | | | | Gln-99 to Lys-106. | L0803: 2, L0779: 2, | | |
| | | | | | | L0777: 2, L0759: 2, | | |
| | | | | | | S0354: 1, H0643: 1, | | |
| | | | | | | H0013: 1, H0194: 1, | | |
| | | | | | | H0545: 1, H0373: 1, | | |
| | | | | | | H0252: 1, H0615: 1, | | |
| | | | | | | H0316: 1, H0040: 1, | | |
| | | | | | | H0641: 1, H0647: 1, | | |
| | | | | | | S0422: 1, L0598: 1, | | |
| | | | | | | L0369: 1, L0520: 1, | | |
| | | | | | | L0762: 1, L0649: 1, | | |
| | | | | | | L0804: 1, L0527: 1, | | |
| | | | | | | L0656: 1, H0144: 1, | | |
| | | | | | | H0702: 1, H0547: 1, | | |
| | | | | | | H0555: 1, H0436: 1, | | |
| | | | | | | S0028: 1, L0746: 1, | | |
| | | | | | | L0750: 1, L0780: 1, | | |
| | | | | | | L0752: 1 and L0686: 1. | | |
| HODES86 | 784815 | 420 | 3-278 | 3107 | | L0753: 3, H0615: 1 | | |
| | | | | | | and H0683: 1. | | |
| HODET03 | 922988 | 421 | 27-191 | 3108 | Val-36 to Gly-42. | H0615: 2 | | |
| HODEV13 | 859302 | 422 | 433-639 | 3109 | Asn-37 to Lys-42. | H0615: 2 | | |
| HODEX10 | 926260 | 423 | 22-159 | 3110 | Met-1 to Arg-6, | AR061: 6, AR089: 3 | | |
| | | | | | Ser-16 to Lys-29. | H0615: 5 | | |
| HODEX31 | 922473 | 424 | 129-524 | 3111 | Pro-16 to Gly-45. | H0615: 2 | | |
| HODEY08 | 972984 | 425 | 425-667 | 3112 | Glu-1 to Lys-7, | H0615: 2 | | |
| | | | | | Thr-34 to Asn-43. | | | |
| HODEY13 | 859323 | 426 | 179-382 | 3113 | | H0615: 2 | | |
| HODEY80 | 859296 | 427 | 432-677 | 3114 | Gln-36 to Gly-41. | H0615: 2 | | |
| HODEZ02 | 918672 | 428 | 37-207 | 3115 | Leu-27 to Ile-33, | H0615: 2 and H0328: 1. | | |
| | | | | | Trp-43 to Gln-48. | | | |
| HODEZ11 | 952166 | 429 | 178-336 | 3116 | | H0615: 2 | | |
| HODFA38 | 934266 | 430 | 170-397 | 3117 | Ser-9 to Gly-15, | H0615: 3 and L0367: 1. | | |
| | | | | | Pro-22 to Lys-27, | | | |
| | | | | | Glu-43 to Glu-56. | | | |
| HODFB05 | 929733 | 431 | 451-639 | 3118 | | H0615: 2 | | |
| HODFB57 | 972810 | 432 | 2-217 | 3119 | Thr-1 to Ser-16. | H0615: 2 | | |
| HODFB88 | 792979 | 433 | 449-634 | 3120 | | H0615: 2 | | |
| HODFD08 | 958371 | 434 | 133-270 | 3121 | | H0615: 2 | | |
| HODFD10 | 963516 | 435 | 325-465 | 3122 | | H0615: 2 | | |
| HODFD45 | 780531 | 436 | 169-399 | 3123 | | H0615: 2 | | |
| HODFE69 | 859338 | 437 | 2-301 | 3124 | Arg-46 to Ser-57, | H0615: 2 | | |
| | | | | | Thr-67 to Cys-78. | | | |
| HODFG37 | 782219 | 438 | 263-433 | 3125 | | H0615: 2 | | |
| HODFH02 | 915257 | 439 | 33-164 | 3126 | Gln-15 to Ser-23, | H0615: 3 | | |
| | | | | | Gly-30 to Lys-36. | | | |
| HODFH76 | 783783 | 440 | 143-391 | 3127 | Lys-32 to Ser-37. | H0615: 2 | | |
| HODFJ01 | 859549 | 441 | 247-501 | 3128 | | H0328: 1 and H0615: 1. | | |
| HODFK18 | 974313 | 442 | 44-343 | 3129 | Ala-14 to Ser-38. | H0615: 5 and L0665: 2. | | |
| HODFK94 | 974318 | 443 | 42-182 | 3130 | Ser-7 to Lys-15, | H0615: 3 | | |
| | | | | | Val-17 to Pro-29. | | | |
| HODFL91 | 918456 | 444 | 1-159 | 3131 | Pro-45 to Cys-51. | H0615: 2 | | |
| HODFN19 | 859334 | 445 | 198-425 | 3132 | | H0615: 2 | | |
| HODFN42 | 921529 | 446 | 79-318 | 3133 | | H0328: 1 and H0615: 1. | | |
| HODFO03 | 859329 | 447 | 124-309 | 3134 | Asp-1 to Asp-7. | H0615: 3 and H0328:2. | | |
| HODFO37 | 859314 | 448 | 85-306 | 3135 | Trp-44 to Thr-54. | H0615: 2 | | |
| HODFP40 | 921651 | 449 | 587-817 | 3136 | Tyr-4 to Thr-11, | H0328: 1, H0615: 1, | | |
| | | | | | Thr-15 to Asp-20, | L0775: 1, H0648: 1 and | | |
| | | | | | Arg-29 to Leu-42. | L0758: 1. | | |
| HODFQ02 | 918637 | 450 | 427-615 | 3137 | Tyr-1 to Cys-14, | H0615: 3 | | |
| | | | | | Gln-20 to Ile-47. | | | |
| HODFQ06 | 934304 | 451 | 258-401 | 3138 | Thr-1 to Asn-6. | H0615: 2 | | |
| HODFT52 | 915232 | 452 | 224-51 | 3139 | | H0615: 2 | | |
| HODFU02 | 918536 | 453 | 204-398 | 3140 | | H0615: 2 | | |
| HODFU06 | 934229 | 454 | 460-588 | 3141 | Thr-1 to Ser-6. | H0615: 3 | | |
| HODFU47 | 806232 | 455 | 274-582 | 3142 | Glu-1 to His-6, | H0615: 2 and L0558: 1. | | |
| | | | | | Phe-13 to Pro-23, | | | |
| | | | | | Arg-29 to Leu-34, | | | |
| | | | | | Pro-54 to Asp-60, | | | |
| | | | | | Pro-62 to Gly-67. | | | |
| HODFU54 | 965526 | 456 | 60-134 | 3143 | | H0615: 2 | | |
| HODFW17 | 859322 | 457 | 370-603 | 3144 | | H0615: 2 | | |
| OHDFX57 | 975259 | 458 | 1-183 | 3145 | | H0615: 3 | | |
| HODFY16 | 958329 | 459 | 163-309 | 3146 | | AR061: 6, AR089: 3 | | |
| | | | | | | H0615: 2 and L0766: 1. | | |
| HODFY79 | 975253 | 460 | 393-259 | 3147 | | H0615: 3 | | |
| HODFZ11 | 965104 | 461 | 45-209 | 3148 | | H0615: 2 and H0619: 1. | | |
| HODGC04 | 926863 | 462 | 83-214 | 3149 | Glu-9 to Gln-21. | H0615: 2 | | |
| HODGC61 | 973449 | 463 | 43-324 | 3150 | Thr-50 to Gln-57. | AR061: 8, AR089: 5 | | |
| | | | | | | H0615: 3 | | |
| HODGD05 | 931071 | 464 | 1-147 | 3151 | Ala-8 to Gln-29, | H0615: 2 | | |
| | | | | | Ser-36 to Gly-44. | | | |
| HODGH02 | 917969 | 465 | 28-285 | 3152 | His-8 to Gly-18, | H0615: 2 | | |
| | | | | | Leu-37 to Lys-42. | | | |
| HODGH04 | 926255 | 466 | 10-159 | 3153 | His-8 to Gly-18, | H0615: 2 | | |
| | | | | | Gly-26 to Arg-33. | | | |
| HODGH07 | 951933 | 467 | 178-330 | 3154 | | H0615: 2 | | |
| HODGH11 | 965105 | 468 | 383-556 | 3155 | | H0615: 2 | | |
| HODGH91 | 968794 | 469 | 91-333 | 3156 | Arg-30 to Asn-35. | H0328: 1 and H0615: 1. | | |
| HODGI08 | 958235 | 470 | 1-267 | 3157 | Arg-11 to Thr-29. | H0615: 2 | | |
| HODGJ67 | 974297 | 471 | 3-353 | 3158 | Ser-2 to Thr-13, | H0615: 3 | | |
| | | | | | Ile-16 to Ser-26, | | | |
| | | | | | Pro-28 to Gln-36, | | | |
| | | | | | Gln-41 to Pro-47. | | | |
| HODGL54 | 859303 | 472 | 402-698 | 3159 | Pro-25 to Ser-31. | H0615: 4 and H0328: 1. | | |
| HODGM46 | 974051 | 473 | 2-304 | 3160 | Phe-81 to Phe-87. | H0615: 3 | | |
| HODGO46 | 883087 | 474 | 292-525 | 3161 | | H0615: 2 | | |
| HODGP37 | 974293 | 475 | 67-228 | 3162 | | H0615: 3 | | |
| HODGP83 | 889967 | 476 | 3-236 | 3163 | | H0615: 2 | | |
| HODGP95 | 908650 | 477 | 23-358 | 3164 | Lys-38 to Arg-44, | AR089: 8, AR061: 3 | | |
| | | | | | Thr-84 to Asp-99. | H0615: 2 | | |
| HODGQ08 | 958237 | 478 | 261-377 | 3165 | | H0615: 2 | | |
| HODGQ22 | 974290 | 479 | 117-245 | 3166 | | H0615: 3 | | |
| HODGQ32 | 974294 | 480 | 175-405 | 3167 | Val-1 to Lys-7, | H0615: 3 | | |
| | | | | | Gln-12 to Arg-18, | | | |
| | | | | | Arg-22 to Gln-30, | | | |
| | | | | | Gly-32 to Glu-40. | | | |
| HODGQ92 | 894368 | 481 | 2-274 | 3168 | Asp-42 to Arg-47, | AR061: 5, AR089: 2 | | |
| | | | | | Gln-84 to Gly-91. | H0615: 2 | | |
| HODGT62 | 974052 | 482 | 253-402 | 3169 | | H0615: 3 | | |
| HODGW08 | 958277 | 483 | 183-371 | 3170 | Ala-11 to Cys-16. | H0615: 2 | | |
| HODGX10 | 963427 | 484 | 206-310 | 3171 | | H0615: 3 | | |
| HODGX29 | 913879 | 485 | 138-257 | 3172 | | H0615: 2 and H0658: 1. | | |
| HODGZ06 | 933783 | 486 | 315-479 | 3173 | | H0615: 2 | | |
| HODGZ10 | 961977 | 487 | 3-119 | 3174 | | H0615: 2 | | |
| HODHC03 | 922987 | 488 | 3-341 | 3175 | Pro-59 to Pro-65, | H0615: 2 and L0777: 1. | | |
| | | | | | Glu-96 to Phe-113. | | | |
| HODHD16 | 974924 | 489 | 132-278 | 3176 | Ala-1 to Glu-12. | H0615: 3 and H0328: 1. | | |
| HODHG71 | 926203 | 490 | 190-384 | 3177 | Asp-1 to Lys-20, | H0615: 2 | | |
| | | | | | Cys-34 to Ser-42. | | | |
| HODHH82 | 964935 | 491 | 78-293 | 3178 | Thr-14 to Arg-22, | H0328: 1 and H0615: 1. | | |
| | | | | | Ile-25 to Ser-35. | | | |
| HODHI07 | 952195 | 492 | 376-636 | 3179 | Glu-33 to Lys-46. | H0328: 1 and H0615: 1. | | |
| HODHI26 | 973423 | 493 | 275-451 | 3180 | | H0615: 2 and H0328: 1. | | |
| HODHK02 | 918613 | 494 | 108-302 | 3181 | | H0615: 3 | | |
| HODHL19 | 973433 | 495 | 79-315 | 3182 | | H0615: 3 | | |
| HODHL56 | 847724 | 496 | 185-415 | 3183 | | H0615: 2, H0188: 1 | | |
| | | | | | | and L0758: 1. | | |
| HODHO11 | 965529 | 497 | 36-137 | 3184 | | H0615: 2 | | |
| HODHS34 | 965460 | 498 | 285-461 | 3185 | | H0615: 2 | | |
| HODHY53 | 914554 | 499 | 47-214 | 3186 | | H0615: 2 | | |
| HODJR03 | 922484 | 500 | 134-379 | 3187 | | H0615: 3 | | |
| HODJY33 | 951404 | 501 | 31-384 | 3188 | Lys-30 to Arg-36. | H0615: 3 | | |
| HODJZ90 | 965049 | 502 | 41-169 | 3189 | Lys-8 to Ser-14. | H0615: 2 | | |
| HODKN07 | 933320 | 503 | 92-256 | 3190 | His-20 to Val-35. | H0615: 2 and L0060: 1. | | |
| HOFAA15 | 659522 | 504 | 71-385 | 3191 | Ile-13 to Arg-20. | H0415: 1 and H0414: 1. | | |
| HOFAB40 | 964113 | 505 | 527-99 | 3192 | | H0415: 2 and H0414: 1. | | |
| HOFAB71 | 573337 | 506 | 100-249 | 3193 | | H0414: 2 | | |
| HOFAD05 | 932211 | 507 | 118-306 | 3194 | Pro-1 to Arg-8, | H0415: 1 and H0414: 1. | | |
| | | | | | Pro-39 to Glu-56. | | | |
| HOFAE31 | 772992 | 508 | 2-220 | 3195 | Glu-1 to Leu-8, | H0414: 2 | | |
| | | | | | Arg-38 to Cys-49. | | | |
| HOFAE61 | 707359 | 509 | 3-293 | 3196 | Val-18 to Arg-31, | H0415: 1 and H0414: 1. | | |
| | | | | | Arg-57 to Cys-62. | | | |
| HOFAF84 | 868887 | 510 | 136-273 | 3197 | Gly-30 to Gly-46. | H0414: 2 | | |
| HOFMA24 | 782275 | 511 | 63-347 | 3198 | Ser-2 to Arg-15. | H0415: 2 | | |
| HOFMB78 | 572941 | 512 | 1-399 | 3199 | Arg-10 to Lys-23. | AR089: 26, AR061: 10 | | |
| | | | | | | H0415: 8 and H0414: 2. | | |
| HOFMB83 | 572839 | 513 | 3-158 | 3200 | Thr-7 to Gly-18, | H0415: 2 | | |
| | | | | | Pro-20 to Gly-26. | | | |
| HOFMD13 | 916959 | 514 | 232-405 | 3201 | | H0415: 2 | | |
| HOFME41 | 867993 | 515 | 55-264 | 3202 | | H0415: 2 | | |
| HOFMF03 | 924679 | 516 | 3-446 | 3203 | Lys-36 to Ala-52, | H0415: 2 | | |
| | | | | | Thr-54 to His-61, | | | |
| | | | | | Pro-90 to Thr-96. | | | |
| HOFMF70 | 734917 | 517 | 1-387 | 3204 | Pro-31 to Arg-36, | H0415: 2 | 13q11-q12 | 121011, |
| | | | | | Glu-41 to Gln-52. | | | 121011, |
| | | | | | | | | 129500, |
| | | | | | | | | 253700, |
| | | | | | | | | 601885, |
| | | | | | | | | 602221 |
| HOFMG21 | 973358 | 518 | 66-497 | 3205 | Pro-1 to Pro-6, | AR089: 6, AR061: 3 | 1q42 | 106150, |
| | | | | | Asp-41 to Arg-67, | H0415: 3 | | 106150, |
| | | | | | Gly-100 to Val-106. | | | 145260, |
| | | | | | | | | 173870, |
| | | | | | | | | 173870, |
| | | | | | | | | 600759, |
| | | | | | | | | 600996, |
| | | | | | | | | 601744, |
| | | | | | | | | 601975 |
| HOFMH12 | 964722 | 519 | 2-478 | 3206 | Arg-1 to Cys-16, | H0415: 3 and H0414:1. | | |
| | | | | | Tyr-59 to Lys-68, | | | |
| | | | | | Glu-76 to Arg-82. | | | |
| HOFMH38 | 920365 | 520 | 3-413 | 3207 | Ser-85 to Gly-100, | AR089: 5, AR061: 3 | 5 | |
| | | | | | Pro-102 to Ser-113. | H0415: 1 and H0414: 1. | | |
| HOFMH95 | 973359 | 521 | 2-211 | 3208 | Val-15 to Ala-22, | H0415: 3 | | |
| | | | | | Val-26 to Gly-38, | | | |
| | | | | | Gln-65 to Gly-70. | | | |
| HOFMI01 | 609722 | 522 | 2-121 | 3209 | Cys-2 to Gly-7, | H0415: 2 | | |
| | | | | | Ala-14 to Pro-20. | | | |
| HOFMI62 | 796358 | 523 | 3-452 | 3210 | Asp-1 to Gly-22, | H0415: 8 and H0414: 2. | | |
| | | | | | Pro-24 to Gly-34. | | | |
| HOFMI63 | 745133 | 524 | 1-225 | 3211 | Ala-4 to Gly-11, | H0415: 2 | | |
| | | | | | Pro-26 to Trp-31. | | | |
| HOFMJ44 | 719663 | 525 | 2-301 | 3212 | Arg-1 to Asp-7, | AR089: 30, AR061: 10 | | |
| | | | | | Ser-26 to Leu-39. | H0415: 1 and H0414: 1. | | |
| HOFMK22 | 675122 | 526 | 3-359 | 3213 | Asp-22 to Val-42, | H0415: 2 | | |
| | | | | | Phe-50 to Tyr-55, | | | |
| | | | | | Leu-65 to Gln-70. | | | |
| HOFMM27 | 973349 | 527 | 1-132 | 3214 | Ala-5 to Trp-19. | H0415: 5 and H0414:1. | | |
| HOFMM72 | 464015 | 528 | 49-366 | 3215 | | H0415: 2 | | |
| HOFMN30 | 514556 | 529 | 422-234 | 3216 | | H0415: 2 | | |
| HOFMP31 | 698097 | 530 | 2-202 | 3217 | Gly-1 to Pro-6, | H0415: 2 | | |
| | | | | | Pro-23 to Asp-28, | | | |
| | | | | | Pro-36 to Ser-46, | | | |
| | | | | | Lys-54 to Asn-63. | | | |
| HOFMP79 | 775242 | 531 | 2-445 | 3218 | Gly-1 to His-12, | AR089: 11, AR061: 3 | | |
| | | | | | Ser-40 to Pro-66, | H0415: 2 | | |
| | | | | | Glu-79 to Lys-89, | | | |
| | | | | | Glu-96 to Leu-105. | | | |
| HOFMQ04 | 823439 | 532 | 34-318 | 3219 | Gly-11 to Leu-19, | H0415: 1 and H0414: 1. | | |
| | | | | | Val-23 to Gly-32, | | | |
| | | | | | His-34 to Ser-45. | | | |
| HOFMQ31 | 906933 | 533 | 183-449 | 3220 | | H0415: 4 | | |
| HOFMQ65 | 789347 | 534 | 2-280 | 3221 | Gly-1 to Ser-13, | H0415: 2 | | |
| | | | | | Arg-26 to Glu-35, | | | |
| | | | | | Gly-38 to Met-48. | | | |
| HOFMS68 | 464075 | 535 | 187-348 | 3222 | | H0415: 2 | | |
| HOFMS74 | 514568 | 536 | 340-2 | 3223 | Thr-4 to Gly-9, | H0415: 1 and H0435: 1. | | |
| | | | | | Leu-32 to Glu-42, | | | |
| | | | | | Pro-54 to Cys-68, | | | |
| | | | | | Ile-97 to Gly-113. | | | |
| HOFMS89 | 575820 | 537 | 2-502 | 3224 | Arg-34 to Thr-44, | H0415: 2 | | |
| | | | | | Pro-65 to Gly-79, | | | |
| | | | | | Leu-98 to Ser-105. | | | |
| HOFMT20 | 669738 | 538 | 2-157 | 3225 | Asn-20 to Cys-29, | H0415: 2 | | |
| | | | | | Val-33 to Ser-40. | | | |
| HOFMT43 | 811542 | 539 | 1-411 | 3226 | Val-6 to Arg-12, | H0415: 2 | | |
| | | | | | Pro-19 to Thr-36, | | | |
| | | | | | Ser-49 to Thr-54, | | | |
| | | | | | Glu-61 to Thr-67, | | | |
| | | | | | Pro-77 to Ala-84, | | | |
| | | | | | Ser-104 to Asn-114. | | | |
| HOFMT66 | 754251 | 540 | 2-169 | 3227 | Arg-1 to Asn-8, | H0415: 2 | | |
| | | | | | Lys-20 to Gly-38. | | | |
| HOFMT72 | 563575 | 541 | 3-248 | 3228 | Gly-2 to Gly-9. | H0415: 1 and H0414: 1. | | |
| HOFMU33 | 702492 | 542 | 2-373 | 3229 | Arg-1 to Gly-20, | H0415: 2 | | |
| | | | | | Pro-45 to Ser-50. | | | |
| HOFMU63 | 744325 | 543 | 1-243 | 3230 | His-8 to Trp-19. | H0415: 2 | | |
| HOFMU75 | 713809 | 544 | 2-121 | 3231 | | H0415: 2 | | |
| HOFMV84 | 859109 | 545 | 3-230 | 3232 | Lys-10 to Trp-15, | H0415: 2 | | |
| | | | | | Pro-47 to Ser-55, | | | |
| | | | | | Pro-67 to Phe-76. | | | |
| HOFNA04 | 615287 | 546 | 209-373 | 3233 | Glu-19 to Gln-24, | H0415: 2 | | |
| | | | | | Thr-30 to Lys-38. | | | |
| HOFNA92 | 792734 | 547 | 95-343 | 3234 | Arg-1 to Gly-12. | H0415: 2 | | |
| HOFNC63 | 973354 | 548 | 203-3 | 3235 | Tyr-1 to Pro-12. | H0415: 2 | | |
| HOFND14 | 658476 | 549 | 3-122 | 3236 | | H0415: 2 | | |
| HOFND40 | 867984 | 550 | 54-341 | 3237 | Pro-80 to Trp-88. | H0415: 2 | | |
| HOFND50 | 727285 | 551 | 446-90 | 3238 | | H0415: 2 | | |
| HOFND52 | 727173 | 552 | 407-174 | 3239 | | AR054: 11, AR051: 3, | | |
| | | | | | | AR050: 2 | | |
| | | | | | | H0415 :2 | | |
| | 888450 | 2655 | 2-325 | 5342 | Ala-5 to Ala-13, | | | |
| | | | | | Pro-15 to Lys-23, | | | |
| | | | | | Ala-39 to Cys-44, | | | |
| | | | | | Pro-47 to Cys-74, | | | |
| | | | | | Ala-83 to Gly-90. | | | |
| HOFND90 | 716670 | 553 | 2-388 | 3240 | Gly-1 to Asn-10, | H0415: 2 | | |
| | | | | | Gln-30 to Asp-35, | | | |
| | | | | | Gln-44 to Gly-54, | | | |
| | | | | | Ser-61 to Val-89, | | | |
| | | | | | Ser-92 to Ser-98. | | | |
| HOFND94 | 717067 | 554 | 67-225 | 3241 | Thr-30 to Tyr-39. | H0415: 2 | | |
| HOFNG01 | 859106 | 555 | 140-280 | 3242 | Gly-19 to Asn-24. | H0415: 2 | | |
| HOFNG06 | 935569 | 556 | 1-207 | 3243 | Thr-18 to Trp-23. | H0415: 2 | | |
| HOFNH33 | 715101 | 557 | 3-152 | 3244 | Asp-14 to Gly-20, | H0415: 2 | | |
| | | | | | Arg-45 to Ala-50. | | | |
| HOFNI08 | 974435 | 558 | 1-426 | 3245 | | H0415: 4 | | |
| HOFNI48 | 708727 | 559 | 140-376 | 3246 | Pro-2 to Gly-13, | H0415: 2 | | |
| | | | | | Gly-59 to Ser-64. | | | |
| HOFNI82 | 717355 | 560 | 117-362 | 3247 | Gly-36 to Tyr-50. | H0415: 3 | | |
| HOFNL18 | 666498 | 561 | 1-405 | 3248 | Ser-26 to Pro-33. | AR089: 9, AR061: 3 | | |
| | | | | | | H0415: 1 and H0414: 1. | | |
| HOFNL25 | 916963 | 562 | 41-346 | 3249 | Lys-54 to Ser-60, | AR089: 8, AR061: 7 | | |
| | | | | | Tyr-86 to His-93. | H0415: 3 | | |
| HOFNL37 | 906250 | 563 | 2-394 | 3250 | Gly-1 to Pro-6, | H0415: 6, H0414: 2, | 10p13 | 601362 |
| | | | | | Thr-24 to Ala-30, | H0046: 1 and H0271: 1. | | |
| | | | | | Ser-33 to Pro-41, | | | |
| | | | | | Ser-51 to Ser-61. | | | |
| HOFNL40 | 711205 | 564 | 1-225 | 3251 | | H0415: 2 | | |
| HOFNL92 | 770088 | 565 | 244-414 | 3252 | Gln-1 to Pro-8. | H0415: 2 | | |
| HOFNM85 | 869113 | 566 | 2-340 | 3253 | | H0415: 2 | | |
| HOFNT59 | 615305 | 567 | 109-405 | 3254 | Pro-7 to Ser-12, | H0415: 2 | | |
| | | | | | Glu-37 to Ser-42, | | | |
| | | | | | Leu-45 to Gly-53, | | | |
| | | | | | Leu-68 to Val-75, | | | |
| | | | | | Ser-81 to Thr-86. | | | |
| HOFNU72 | 705435 | 568 | 1-216 | 3255 | | H0415: 2 | 11p15.5 | 125852, |
| | | | | | | | | 126452, |
| | | | | | | | | 126452, |
| | | | | | | | | 141900, |
| | | | | | | | | 141900, |
| | | | | | | | | 141900, |
| | | | | | | | | 141900, |
| | | | | | | | | 141900, |
| | | | | | | | | 141900, |
| | | | | | | | | 142000, |
| | | | | | | | | 142000, |
| | | | | | | | | 142200, |
| | | | | | | | | 142250, |
| | | | | | | | | 142270, |
| | | | | | | | | 176730, |
| | | | | | | | | 176730, |
| | | | | | | | | 176730, |
| | | | | | | | | 190020, |
| | | | | | | | | 191290, |
| | | | | | | | | 192500, |
| | | | | | | | | 192500, |
| | | | | | | | | 194071, |
| | | | | | | | | 194071, |
| | | | | | | | | 204500, |
| | | | | | | | | 600856, |
| | | | | | | | | 601680, |
| | | | | | | | | 602631, |
| | | | | | | | | 602631 |
| HOFNW10 | 916588 | 569 | 28-237 | 3256 | Lys-1 to Ser-14. | H0415: 2 | | |
| HOFNW79 | 973351 | 570 | 6-365 | 3257 | | H0415: 8 and H0414: 2. | | |
| HOFNY02 | 920218 | 571 | 217-495 | 3258 | | H0415: 2 | | |
| HOFNY50 | 715312 | 572 | 68-430 | 6259 | Pro-15 to Pro-25, | H0415: 2 | | |
| | | | | | Lys-68 to Glu-76, | | | |
| | | | | | Lys-89 to Arg-107. | | | |
| HOFNZ15 | 660317 | 573 | 98-379 | 3260 | Ser-18 to Ser-34. | H0415: 2 | | |
| HOFNZ16 | 859104 | 574 | 2-268 | 3261 | Gly-1 to Pro-6. | H0415: 2 | | |
| HOFNZ21 | 677372 | 575 | 109-456 | 3262 | Arg-1 to Gly-6. | H0415: 2 | 9p13-p12 | 230400, |
| | | | | | | | | 250250 |
| HOFNZ58 | 683473 | 576 | 29-229 | 3263 | | H0415: 2 | | |
| HOFNZ94 | 794308 | 577 | 99-218 | 3264 | | H0415: 1 and H0414: 1. | | |
| HOFOA17 | 935553 | 578 | 142-369 | 3265 | Gly-34 to Glu-39. | H0415: 2 | | |
| HOFOB88 | 751692 | 579 | 1-501 | 3266 | Thr-2 to Val-11, | H0415: 2 | | |
| | | | | | Leu-18 to Gly-25, | | | |
| | | | | | Pro-30 to Ser-35, | | | |
| | | | | | Ala-40 to Pro-47, | | | |
| | | | | | Lys-62 to Glu-70, | | | |
| | | | | | Lys-76 to Arg-82. | | | |
| HOFOB91 | 827631 | 580 | 1-234 | 3267 | | H0415: 2 | | |
| HOFOE94 | 924473 | 581 | 173-382 | 3268 | Thr-1 to Ser-11, | H0415: 2 | | |
| | | | | | Ser-23 to His-29, | | | |
| | | | | | Gly-53 to Gln-67. | | | |
| HOFOF57 | 666909 | 582 | 3-419 | 3269 | | H0415: 2 | | |
| HOFOF84 | 739399 | 583 | 78-431 | 3270 | Asn-1 to Gln-9, | H0415: 2 | | |
| | | | | | Pro-17 to Ala-30. | | | |
| HOGAF39 | 947431 | 584 | 3-269 | 3271 | Asp-1 to Leu-22, | H0435: 1 and S0152: 1. | | |
| | | | | | Val-26 to Trp-38. | | | |
| HOGAU90 | 954011 | 585 | 247-402 | 3272 | Cys-10 to Asp-19. | H0615: 1 and H0435: 1. | | |
| HOGAV36 | 926098 | 586 | 211-576 | 3273 | Pro-8 to Lys-15, | H0663: 2, L0761: 1, | | |
| | | | | | Arg-67 to Arg-74, | L0771: 1 and H0435: 1. | | |
| | | | | | Arg-76 to Gly-85, | | | |
| | | | | | Glu-91 to Gly-97, | | | |
| | | | | | Thr-113 to Phe-120. | | | |
| HOGBF78 | 575929 | 587 | 264-443 | 3274 | Lys-1 to Val-7. | H0435: 2 and L0592: 1. | | |
| HOGCQ05 | 950216 | 588 | 381-193 | 3275 | Pro-12 to Ala-17, | H0165: 1, H0435: 1 | | |
| | | | | | Val-29 to Gly-36. | and L0747: 1. | | |
| HOGCR32 | 575931 | 589 | 3-137 | 3276 | Pro-3 to Lys-13, | H0435: 2 | | |
| | | | | | Thr-39 to Ile-45. | | | |
| HOGCT45 | 717068 | 590 | 2-364 | 3277 | Arg-1 to Glu-14, | H0040: 1 and H0435: 1. | | |
| | | | | | Thr-39 to Gln-45, | | | |
| | | | | | Pro-52 to Lys-62, | | | |
| | | | | | Glu-89 to Thr-94. | | | |
| HOGCX95 | 890607 | 591 | 52-660 | 3278 | | H0038: 2, L0758: 2, | | |
| | | | | | | H0253: 1, H0616: 1, | | |
| | | | | | | H0435: 1 and L0777: 1. | | |
| HOGEE76 | 968956 | 592 | 732-298 | 3279 | | H0435: 2 | | |
| HOGEU49 | 961587 | 593 | 1-285 | 3280 | Asp-25 to Ser-34, | H0435: 1 and H0670: 1. | | |
| | | | | | Tyr-39 to Gln-44, | | | |
| | | | | | Leu-84 to Lys-90. | | | |
| HOOJQ59 | 965013 | 594 | 418-621 | 3281 | | H0648: 2, L0367: 1, | | |
| | | | | | | H0651: 1, L0748: 1 and | | |
| | | | | | | L0754: 1. | | |
| HOVAF17 | 576627 | 595 | 215-358 | 3282 | | H0428: 2 | | |
| HOVAF71 | 757294 | 596 | 55-183 | 3283 | | H0428: 2 | | |
| HOVAG49 | 927320 | 597 | 2-298 | 3284 | | H0428: 2 and L0588: 1. | | |
| HOVAI41 | 670963 | 598 | 3-107 | 3285 | | H0428: 2 | | |
| HOVAM50 | 723671 | 599 | 64-243 | 3286 | Ser-22 to Arg-35, | H0428: 2 | | |
| | | | | | Lys-39 to Gly-44. | | | |
| HPVAO76 | 770066 | 600 | 89-238 | 3287 | Arg-15 to Gln-21. | L0754: 2, H0428: 1 | | |
| | | | | | | and H0616: 1. | | |
| HPVBQ10 | 964671 | 601 | 515-763 | 3288 | Lys-21 to Gly-26. | L0777: 6, L0758: 5, | | |
| | | | | | | L0747: 2, H0428: 1, | | |
| | | | | | | L0770: 1, L0768: 1, | | |
| | | | | | | L0533: 1, H0666: 1, | | |
| | | | | | | L0750: 1 and L0755: 1. | | |
| HOVBY34 | 706816 | 602 | 2-295 | 3289 | Gly-1 to Ala-8, | H0428: 2 | | |
| | | | | | Glu-67 to His-74. | | | |
| HOVBZ26 | 888442 | 603 | 3-215 | 3290 | Gly-37 to Arg-46, | AR051: 44, AR050: 43, | | |
| | | | | | Ser-57 to Trp-70. | AR054: 30 | | |
| | | | | | | H0428: 2 | | |
| HOVCA52 | 727170 | 604 | 232-354 | 3291 | | H0428: 2 | | |
| HOVCD39 | 705406 | 605 | 25-192 | 3292 | Ser-8 to Leu-16. | H0428: 2 | | |
| HOVCI76 | 858845 | 606 | 60-284 | 3293 | Arg-13 to Gly-18, | H0428: 3 | | |
| | | | | | Gln-44 to Ser-50. | | | |
| HOVCI77 | 713792 | 607 | 119-241 | 3294 | Lys-7 to Ser-16. | H0428: 2 | | |
| HOVCJ24 | 858844 | 608 | 68-319 | 3295 | Leu-16 to His-22, | H0428: 2 | | |
| | | | | | Cys-50 to Pro-55. | | | |
| HOVCM22 | 674177 | 609 | 219-482 | 3296 | Ser-1 to Lys-14, | H0674: 2, H0549: 1 | | |
| | | | | | Gln-48 to Asn-63, | and H0428: 1. | | |
| | | | | | Glu-70 to Pro-88. | | | |
| HOVCO11 | 970814 | 610 | 157-423 | 3297 | Val-11 to Leu-18. | H0428: 2 and L0770: 1. | 7p15 | 138079, |
| | | | | | | | | 138079, |
| | | | | | | | | 139191, |
| | | | | | | | | 142959, |
| | | | | | | | | 153880, |
| | | | | | | | | 180104, |
| | | | | | | | | 600994, |
| | | | | | | | | 601649 |
| HOVCO58 | 736065 | 611 | 283-420 | 3298 | | H0428: 2 | | |
| HOVCQ47 | 496190 | 612 | 1-213 | 3299 | | L0758: 3, H0428: 2, | | |
| | | | | | | L0794: 2, L0764: 1, | | |
| | | | | | | L0803: 1 and L0593: 1. | | |
| HOVDY04 | 926219 | 613 | 81-320 | 3300 | Ser-25 to Gly-45. | L0769: 4, L0758: 3, | | |
| | | | | | | L0717: 2, H0428: 2, | | |
| | | | | | | L0794: 2, L0731: 2, | | |
| | | | | | | L0591: 2, L0776: 1, | | |
| | | | | | | L0786: 1 and L0779: 1. | | |
| HOVEE58 | 968699 | 614 | 131-3 | 3301 | Thr-11 to Pro-21. | H0428: 1 and H0032: 1. | | |
| HOVEK70 | 909138 | 615 | 3-395 | 3302 | Met-10 to Gly-18. | AR089: 10, AR061: 4 | | |
| | | | | | | H0038: 4, H0616: 3, | | |
| | | | | | | L0747: 3, L0758: 3, | | |
| | | | | | | L0663: 2, H0369: 1, | | |
| | | | | | | H0428: 1, L0769: 1, | | |
| | | | | | | L0542: 1, L0809: 1, | | |
| | | | | | | L0666: 1, L0665: 1, | | |
| | | | | | | L0743: 1, L0777: 1, | | |
| | | | | | | L0731: 1 and S0456: 1. | | |
| HOVEV36 | 959234 | 616 | 128-307 | 3303 | | H0428: 2 and H0546: 1. | | |
| HOVJA10 | 961467 | 617 | 37-225 | 3304 | | H0688: 3 | | |
| HPCAB21 | 573829 | 618 | 57-155 | 3305 | | S0146: 2 | | |
| HPCAB31 | 698320 | 619 | 96-230 | 3306 | | H0658: 1, S0146: 1 and | | |
| | | | | | | L0754: 1. | | |
| HPCAE18 | 574952 | 620 | 2-355 | 3307 | | S0146: 2 | 12q24 | 113100, |
| | | | | | | | | 124200, |
| | | | | | | | | 147440, |
| | | | | | | | | 158590, |
| | | | | | | | | 160781, |
| | | | | | | | | 163950, |
| | | | | | | | | 163950, |
| | | | | | | | | 251170, |
| | | | | | | | | 276710, |
| | | | | | | | | 600175, |
| | | | | | | | | 601517, |
| HPCAH18 | 573395 | 621 | 192-314 | 3308 | | S0146: 2 | | |
| HPCAH88 | 953808 | 622 | 488-637 | 3309 | | S0146: 2, H0046: 1, | | |
| | | | | | | S0148: 1, L0439: 1 and | | |
| | | | | | | L0745: 1. | | |
| HPCAI21 | 655535 | 623 | 134-259 | 3310 | | S0146: 2 | | |
| HPCAI68 | 655536 | 624 | 58-168 | 3311 | Lys-1 to Gln-6, | S0146: 2 | | |
| | | | | | Met-15 to Thr-29. | | | |
| HPCAK16 | 662121 | 625 | 455-634 | 3312 | | H0615: 1, H0658: 1 | | |
| | | | | | | and S0146: 1. | | |
| HPCAK57 | 734931 | 626 | 265-420 | 3313 | | H0031: 1 and S0146: 1. | | |
| HPCAL60 | 655723 | 627 | 41-142 | 3314 | Gly-24 to Ser-34. | S0146: 2 | | |
| HPCAL86 | 924709 | 628 | 1-117 | 3315 | Asn-12 to Ile-18. | S0146: 2 | | |
| HPCAM22 | 655607 | 629 | 64-234 | 3316 | Asp-26 to Phe-39. | S0146: 2 | | |
| HPCAN59 | 655742 | 630 | 91-210 | 3317 | | S0146: 2 | | |
| HPCAO04 | 655732 | 631 | 181-315 | 3318 | | S0146: 2 | | |
| HPCPF05 | 927168 | 632 | 88-249 | 3319 | | H0659: 2 | | |
| HPCPO07 | 951826 | 633 | 3-128 | 3320 | Gly-29 to Tyr-34. | H0659: 2 | | |
| HPCQY57 | 927135 | 634 | 3-371 | 3321 | Ser-34 to Gly-43, | H0606: 1, L0803: 1 | | |
| | | | | | Lys-55 to Leu-71. | and H0659: 1. | | |
| HPDOT03 | 922481 | 635 | 1-384 | 3322 | | H0549: 1, L0773: 1, | | |
| | | | | | | L0768: 1, L0794: 1, | | |
| | | | | | | L0803: 1, H0658: 1 and | | |
| | | | | | | L0747: 1. | | |
| HPDOY06 | 929318 | 636 | 22-201 | 3323 | | H0658: 2 | | |
| HPDPJ69 | 966158 | 637 | 92-436 | 3324 | Arg-7 to Tyr-14. | H0046: 17, H0658: 1 | | |
| | | | | | | and H0672: 1. | | |
| HPDPK12 | 969340 | 638 | 155-316 | 3325 | | H0658: 2 | | |
| HPDPQ40 | 922464 | 639 | 2-223 | 3326 | Ile-10 to Asn-36. | L0520: 2, L0770: 2, | | |
| | | | | | | H0658: 2, L0659: 1 and | | |
| | | | | | | L0759: 1. | | |
| HPDQO05 | 929274 | 640 | 588-875 | 3327 | Ala-13 to His-22, | L0748: 3, H0658: 2 | | |
| | | | | | Leu-80 to Arg-86. | and H0660: 1. | | |
| HPDRB01 | 914437 | 641 | 306-449 | 3328 | | H0658: 2, L0745: 2, | | |
| | | | | | | H0644: 1 and L0529: 1. | | |
| HPDRD28 | 957791 | 642 | 308-511 | 3329 | | H0658: 2 | | |
| HPDRG92 | 967704 | 643 | 2-291 | 3330 | Pro-51 to Phe-57, | L0748: 3, H0658: 2 | | |
| | | | | | Ser-87 to Thr-94. | and L0741: 1. | | |
| HPDRO20 | 957678 | 644 | 2-163 | 3331 | | L0021: 1, H0658: 1 | | |
| | | | | | and H0672: 1. | | | |
| HPDVB07 | 951634 | 645 | 342-554 | 3332 | Arg-5 to Cys-10, | H0644: 2 and H0658: 1. | | |
| | | | | | Ser-22 to Ile-28. | | | |
| HPDVE05 | 928647 | 646 | 430-765 | 3333 | Pro-22 to Asn-33, | L0512: 5, L0513: 4, | | |
| | | | | | Arg-103 to Val-108. | H0686: 3, L0509: 3, | | |
| | | | | | | L0789: 3, L0761: 2, | | |
| | | | | | | L0772: 2, L0764: 2, | | |
| | | | | | | L0717: 1, L0800: 1, | | |
| | | | | | | L0378: 1, L0776: 1, | | |
| | | | | | | L0659: 1, H0658: 1 and | | |
| | | | | | | L0747: 1. | | |
| HPDVF03 | 922193 | 647 | 524-847 | 3334 | | H0046: 2, L0794: 1, | | |
| | | | | | | L0766: 1, H0658: 1, | | |
| | | | | | | L0748: 1, and L0758: 1. | | |
| HPDVK12 | 968977 | 648 | 97-243 | 3335 | | L0374: 1. L0804: 1, | | |
| | | | | | | L0805: 1, H0658: 1, | | |
| | | | | | | H0648: 1, L0750: 1 and | | |
| | | | | | | L0755: 1. | | |
| HPDVM06 | 933443 | 649 | 439-591 | 3336 | His-19 to Tyr-34, | L0779: 2, H0032: 1 | | |
| | | | | | Glu-29 to Pro-47. | and H0658: 1. | | |
| HPDVY17 | 655902 | 650 | 226-444 | 3337 | Gln-1 to Thr-6, | H0658: 2 | | |
| | | | | | Ser-22 to Leu-27, | | | |
| | | | | | Ser-32 to Phe-37. | | | |
| HPEAF19 | 867892 | 651 | 3-224 | 3338 | | H0165: 2 | | |
| HPEBA06 | 960802 | 652 | 253-2 | 3339 | Trp-1 to Pro-11, | H0166: 1, H0059: 1 | | |
| | | | | | Ala-27 to Phe-34, | and L0768: 1. | | |
| | | | | | Ser-46 to Thr-60. | | | |
| HPEBA51 | 723298 | 653 | 61-255 | 3340 | Ile-18 to Asn-25. | H0166: 2 and L0598: 1. | | |
| HPEBD31 | 655760 | 654 | 3-200 | 3341 | | H0166: 2 and L604: 1. | | |
| HPEBE44 | 716911 | 655 | 284-406 | 3342 | Glu-31 to CyS-39. | H0166: 1, H0673: 1, | | |
| | | | | | | L0763: 1 and L0581: 1. | | |
| HPEKG18 | 914115 | 656 | 1-96 | 3343 | | H0673: 2 | | |
| HPEKJ42 | 922391 | 657 | 57-131 | 3344 | | H0673: 2 | | |
| HPEKU27 | 921663 | 658 | 220-408 | 3345 | | H0328: 1 and H0673: 1. | | |
| HEPKX12 | 969251 | 659 | 2-217 | 3346 | Gly-1 to Asn-8, | L0779: 2, H0428: 1, | | |
| | | | | | Pro-22 to Ser-31, | H0673: 1, L0766: 1 and | | |
| | | | | | Thr-41 to Lys-48. | L0658: 1. | | |
| HPFAA06 | 960801 | 660 | 283-426 | 3347 | | H0168: 1 and H0169: 1. | | |
| HPFCA36 | 524720 | 661 | 40-288 | 3348 | Ser-12 to Ser-17, | H0169: 2 | 6p21.1-p21.3 | 106300, |
| | | | | | Lys-24 to Ser-34. | | | 108800, |
| | | | | | | | | 120290, |
| | | | | | | | | 120290, |
| | | | | | | | | 120810, |
| | | | | | | | | 120820, |
| | | | | | | | | 142857, |
| | | | | | | | | 142858, |
| | | | | | | | | 150270, |
| | | | | | | | | 167250, |
| | | | | | | | | 170261, |
| | | | | | | | | 177900, |
| | | | | | | | | 179450, |
| | | | | | | | | 179605, |
| | | | | | | | | 179605, |
| | | | | | | | | 179605, |
| | | | | | | | | 179605, |
| | | | | | | | | 179605, |
| | | | | | | | | 180297, |
| | | | | | | | | 201910, |
| | | | | | | | | 217000, |
| | | | | | | | | 222100, |
| | | | | | | | | 233100, |
| | | | | | | | | 235200, |
| | | | | | | | | 248611, |
| | | | | | | | | 256550, |
| | | | | | | | | 256550, |
| | | | | | | | | 263200, |
| | | | | | | | | 600202, |
| | | | | | | | | 600261, |
| | | | | | | | | 600364, |
| | | | | | | | | 601498, |
| | | | | | | | | 601690, |
| | | | | | | | | 601868, |
| | | | | | | | | 602280, |
| | | | | | | | | 602475 |
| HPFCA71 | 655596 | 662 | 130-363 | 3349 | Glu-28 to Gly-42. | H0169: 2 | | |
| HPFCF09 | 536666 | 663 | 152-355 | 3350 | | H0169: 2 | | |
| HPFCF24 | 655744 | 664 | 186-398 | 3351 | | H0169: 2 | | |
| HPFCF40 | 968600 | 665 | 242-189 | 3352 | Ser-2 to Pro-10. | H0169: 2 | | |
| HPFCF83 | 781490 | 666 | 38-193 | 3353 | Ala-38 to Ser-48. | H0169: 2 | | |
| HPFCH15 | 655768 | 667 | 154-357 | 3354 | Met-4 to Leu-9, | H0169: 2 | | |
| | | | | | Gly-39 to Gln-46. | | | |
| HPFCH89 | 655538 | 668 | 65-139 | 3355 | Ser-15 to Leu-23. | H0169: 2 | | |
| HPFCM41 | 655736 | 669 | 135-287 | 3356 | | H0169: 2 | | |
| HPFCM87 | 925495 | 670 | 2-244 | 3357 | Leu-18 to Arg-25, | H0169: 2 | | |
| | | | | | Gly-35 to Lys-40. | | | |
| HPFCN08 | 960365 | 671 | 20-166 | 3358 | Ser-18 to Thr-25. | H0169:2 and L0519: 1. | 22q13.1 | 103050, |
| | | | | | | | | 103050, |
| | | | | | | | | 124030, |
| | | | | | | | | 124030, |
| | | | | | | | | 138981, |
| | | | | | | | | 182380, |
| | | | | | | | | 188826, |
| | | | | | | | | 190040, |
| | | | | | | | | 190040, |
| | | | | | | | | 190040 |
| HPFCO02 | 867871 | 672 | 1-210 | 3359 | Glu-11 to Thr-19. | H0169: 2, L0749: 2 | | |
| | | | | | | and L0748: 1. | | |
| HPFCO67 | 867880 | 673 | 136-306 | 3360 | | H0169: 2 | | |
| HPFCQ88 | 655749 | 674 | 273-401 | 3361 | | H0169: 2 | | |
| HPFCR21 | 655621 | 675 | 190-411 | 3362 | | H0169: 2 | | |
| HPFCR82 | 655533 | 676 | 140-286 | 3363 | Lys-9 to Thr-14, | H0169: 2 | | |
| | | | | | Glu-21 to Pro-26. | | | |
| HPFCT09 | 655563 | 677 | 13-120 | 3364 | Met-1 to Cys-9. | H0169: 2 | | |
| HPFCT53 | 974257 | 678 | 271-522 | 3365 | Ile-3 to Ala-14, | H0169: 3 | | |
| | | | | | Arg-63 to Pro-68. | | | |
| HPFCT62 | 655432 | 679 | 82-198 | 3366 | Glu-9 to Arg-15, | H0169: 2 | | |
| | | | | | Pro-24 to Tyr-39. | | | |
| HPFCV19 | 655706 | 680 | 79-195 | 3367 | Leu-5 to Ser-11, | H0169: 2 and L0776: 1. | | |
| | | | | | Pro-13 to His-19, | | | |
| | | | | | Lys-34 to Tyr-39. | | | |
| HPFCV71 | 525554 | 681 | 1-240 | 3368 | Gly-22 to Cys-32. | H0328: 1, H0615: 1, | | |
| | | | | | | H0169: 1, L0807: 1 and | | |
| | | | | | | L0754: 1. | | |
| HPFCX18 | 655588 | 682 | 153-263 | 3369 | Ser-16 to Asp-26. | H0169: 2 | | |
| HPFDD06 | 960700 | 683 | 2-163 | 3370 | Lys-23 to Val-34. | H0169: 2 | | |
| HPFDE38 | 655704 | 684 | 67-330 | 3371 | Leu-4 to Lys-18, | H0169: 2 and L0809: 1. | | |
| | | | | | Gly-36 to Glu-45, | | | |
| | | | | | Lys-60 to Cys-65. | | | |
| HPFDE61 | 974249 | 685 | 392-538 | 3372 | Asp-1 to Arg-7, | H0169: 4 | | |
| | | | | | Thr-17 to Asn-22, | | | |
| | | | | | Leu-25 to Pro-30. | | | |
| HPFDF79 | 973732 | 686 | 156-320 | 3373 | Ser-3 to Tyr-9. | H0169: 3 | | |
| HPFDG58 | 655610 | 687 | 123-318 | 3374 | Cys-32 to Phe-38. | H0169: 2 | | |
| HPFDI23 | 655549 | 688 | 197-367 | 3375 | Leu-5 to Gly-10. | H0169: 2 | | |
| HPFDL90 | 654333 | 689 | 2-202 | 3376 | | H0169: 2 | | |
| HPFDS59 | 655543 | 690 | 8-160 | 3377 | | H0169: 2 | | |
| HPFDT17 | 581133 | 691 | 166-342 | 3378 | Pro-18 to Asn-25. | H0169: 2 | | |
| HPFDT54 | 655530 | 692 | 36-212 | 3379 | | H0169: 2 and L0763: 1. | | |
| HPFDT61 | 974569 | 693 | 63-173 | 3380 | | H0169: 3 | | |
| HPFDU30 | 522113 | 694 | 2-232 | 3381 | His-46 to Pro-51. | H0169: 2 | | |
| HPFDU38 | 867879 | 695 | 36-167 | 3382 | | H0169: 2 | | |
| HPFDU59 | 739617 | 696 | 214-369 | 3383 | | H0169: 2 | | |
| HPFDV71 | 867870 | 697 | 124-354 | 3384 | Pro-14 to Gly-25. | AR050: 117, AR054: 88, | | |
| | | | | | | AR051: 81 | | |
| | | | | | | H0169: 2 | | |
| HPFDX13 | 655571 | 698 | 1-294 | 3385 | Val-1 to Lys-11, | H0169: 2, L0747: 2, | | |
| | | | | | Pro-24 to Asp-33, | H0688: 1, L0770: 1, | | |
| | | | | | Lys-44 to Glu-58. | L0803: 1, L0748: 1 and | | |
| | | | | | | L0756: 1. | | |
| HPFDZ20 | 655764 | 699 | 25-213 | 3386 | | H0169: 2 | | |
| HPFEA08 | 960372 | 700 | 2-187 | 3387 | Ile-1 to Gly-44. | H0169: 3 | | |
| HPFEA32 | 925499 | 701 | 142-309 | 3388 | | H0169: 2 | | |
| HPFMA06 | 953536 | 702 | 63-212 | 3389 | Ala-7 to Arg-12. | H0674: 2 | | |
| HPFML02 | 917775 | 703 | 39-113 | 3390 | Lys-9 to Leu-15. | H0674: 2 | | |
| HPIAE79 | 655748 | 704 | 17-394 | 3391 | Asn-1 to Lys-7, | S0150: 2 | | |
| | | | | | Pro-14 to Cys-23. | | | |
| HPIAO83 | 655595 | 705 | 2-334 | 3392 | Ser-1 to Arg-7, | S0150: 2 | | |
| | | | | | Pro-57 to Trp-67, | | | |
| | | | | | Pro-70 to Ala-75, | | | |
| | | | | | Ser-87 to Gly-95. | | | |
| HPIAQ49 | 919469 | 706 | 106-243 | 3393 | Pro-39 to Glu-46. | S0150: 2 | | |
| HPIAQ76 | 655573 | 707 | 61-2 | 3394 | Lys-1 to Lys-17. | S0150: 2 | | |
| HPIAS40 | 928614 | 708 | 2-463 | 3395 | Gly-1 to Val-6, | H0484: 1 and S0150: 1. | | |
| | | | | | Asp-25 to Gln-42. | | | |
| HPIAV80 | 615007 | 709 | 64-174 | 3396 | Ser-8 to His-16. | S0150: 2 | | |
| HPIAX11 | 925424 | 710 | 282-608 | 3397 | | AR061: 9, AR089: 7 | | |
| | | | | | | H0616: 1, S0150: 1 and | | |
| | | | | | | L0581: 1. | | |
| HPIAZ37 | 655753 | 711 | 2-289 | 3398 | | S0150: 2 | | |
| HPIBQ37 | 884289 | 712 | 2-424 | 3399 | Ile-47 to Val-53, | AR089: 4, AR061: 2 | | |
| | | | | | Phe-71 to Thr-76, | S0150: 2 | | |
| | | | | | Ser-105 to Thr-113, | | | |
| | | | | | Glu-121 to Ser-129. | | | |
| HPIBR51 | 725539 | 713 | 1-468 | 3400 | Ala-15 to Ser-21, | H0546: 1 and S0150: 1. | | |
| | | | | | Gln-30 to Asp-36. | | | |
| HPIBT49 | 655719 | 714 | 176-283 | 3401 | Tyr-30 to Cys-36. | S0150: 2 | | |
| HPIBY65 | 655757 | 715 | 133-294 | 3402 | | S0150: 2 | | |
| HPICC89 | 786117 | 716 | 211-414 | 3403 | | L0439: 2, H0616: 1, | | |
| | | | | | | and S0150: 1. | | |
| HPJAB19 | 655540 | 717 | 1-153 | 3404 | | S0152: 2 | | |
| HPJAB84 | 655531 | 718 | 3-269 | 3405 | His-1 to Asp-6, | S0152: 2 | | |
| | | | | | Ala-16 to Ala-25. | | | |
| HPJAC36 | 655601 | 719 | 154-330 | 3406 | Cys-5 to Gly-12, | S0152: 2 and L0780: 1. | | |
| | | | | | Ser-47 to Arg-52. | | | |
| HPJAC92 | 867831 | 720 | 3-251 | 3407 | His-1 to Leu-19. | S0152: 2 | | |
| HPJAD09 | 655712 | 721 | 180-332 | 3408 | | S0152: 2 | | |
| HPJAD66 | 655694 | 722 | 141-290 | 3409 | Val-2 to Ser-14, | S0152: 2 | | |
| | | | | | Gly-27 to Ala-37. | | | |
| HPJAD82 | 655765 | 723 | 53-187 | 3410 | Arg-5 to Lys-13, | S0152: 2 | | |
| | | | | | Ser-20 to Thr-25. | | | |
| HPJAV07 | 952852 | 724 | 180-335 | 3411 | Leu-43 to Cys-51. | S0152: 2 | | |
| HPJAW56 | 823393 | 725 | 346-594 | 3412 | | L0748: 3, S0152: 2, | | |
| | | | | | | H0615: 1, H0617: 1 and | | |
| | | | | | | L0758: 1. | | |
| HPJBI17 | 655761 | 726 | 162-326 | 3413 | Ser-29 to Arg-35. | S0152: 2 | | |
| HPJBI89 | 655708 | 727 | 1-81 | 3414 | Ser-19 to Gln-25. | S0152: 2 | | |
| HPJBK52 | 655751 | 728 | 99-263 | 3415 | | S0152: 2 | | |
| HPJBU08 | 958979 | 729 | 29-193 | 3416 | Gln-13 to Thr-18, | S0152: 2 | | |
| | | | | | His-40 to Met-45. | | | |
| HPJBV17 | 655729 | 730 | 10-123 | 3417 | | S0152: 2 | | |
| HPJCC04 | 926787 | 731 | 32-370 | 3418 | Asn-42 to Gly-51. | S0152: 2 | | |
| HPJCP10 | 964259 | 732 | 113-244 | 3419 | | S0152: 2 | | |
| HPJCP11 | 966676 | 733 | 95-337 | 3420 | Pro-36 to Gly-62. | H0056: 1 and S0152: 1. | | |
| HPJCS84 | 590404 | 734 | 2-286 | 3421 | | S0152: 2 | | |
| HPJCV50 | 968095 | 735 | 260-460 | 3422 | Ala-14 to Lys-21, | H0253: 1 and S0152: 1. | | |
| | | | | | Asp-37 to Gly-48, | | | |
| | | | | | Gly-60 to Leu-65. | | | |
| HPJCX15 | 655730 | 736 | 245-334 | 3423 | | S0152: 2 | | |
| HPJCX26 | 655600 | 737 | 239-349 | 3424 | | S0152: 2 | | |
| HPJCY70 | 655569 | 738 | 111-203 | 3425 | Pro-3 to Cys-11. | S0152: 2 | | |
| HPJCZ03 | 922850 | 739 | 79-183 | 3426 | Val-2 to Thr-8. | S0152: 2 | | |
| HPJCZ06 | 934170 | 740 | 102-242 | 3427 | Ser-1 to Gly-16. | S0152: 2 | | |
| HPJDA08 | 958182 | 741 | 438-1031 | 3428 | Leu-8 to Lys-19, | S0152: 2 and L0070: 1. | | |
| | | | | | Asp-25 to Arg-33, | | | |
| | | | | | Ser-40 to Ser-63, | | | |
| | | | | | Ala-70 to Val-77, | | | |
| | | | | | Glu-91 to Asp-97, | | | |
| | | | | | His-108 to Asn-116, | | | |
| | | | | | Lys-130 to Glu-136, | | | |
| | | | | | Asp-139 to Val-144. | | | |
| HPJDJ58 | 906904 | 742 | 386-556 | 3429 | | S0152: 2 | | |
| HPJDP05 | 931027 | 743 | 299-454 | 3430 | | H0615: 2 and S0152: 1. | | |
| HPJDX94 | 838748 | 744 | 79-183 | 3431 | | S0152: 2 | | |
| HPJEE38 | 954970 | 745 | 292-483 | 3432 | Ser-23 to Arg-28. | L0770: 2, L0779: 2, | | |
| | | | | | | H0553: 1, L0766: 1, | | |
| | | | | | | L0666: 1, S0152: 1 and | | |
| | | | | | | L0777: 1. | | |
| HPJEI55 | 926815 | 746 | 14-130 | 3433 | Gly-1 to Pro-7. | S0152: 2 | | |
| HPJEJ39 | 930988 | 747 | 284-538 | 3434 | Gly-1 to Ala-11. | S0152: 2 | | |
| HPJEQ04 | 927618 | 748 | 149-329 | 3435 | | H0435: 1 and S0152: 1. | 11 | |
| HPJEQ22 | 867725 | 749 | 239-448 | 3436 | Thr-29 to Gly-38. | S0152: 2 | | |
| HPJET90 | 836503 | 750 | 39-377 | 3437 | His-8 to Gly-18, | AR061: 0, AR089: 0 | | |
| | | | | | Leu-40 to Ile-45, | S0152: 2 | | |
| | | | | | Asn-100 to Asp-105. | | | |
| HPJEV06 | 934096 | 751 | 70-213 | 3438 | Leu-17 to Glu-23, | S0152: 2 | | |
| | | | | | Arg-27 to Glu-35. | | | |
| HPLAN47 | 717680 | 752 | 49-189 | 3439 | Gly-1 to Arg-9. | L0754: 39, L0748: 7, | | |
| | | | | | | H0553: 4, H0030: 1, | | |
| | | | | | | L0142: 1 and S0454: 1. | | |
| HPLAR41 | 557554 | 753 | 236-3 | 3440 | | H0030: 2 | | |
| HPLBB50 | 503751 | 754 | 287-72 | 3441 | | H0030: 2 | | |
| HPLBL31 | 503732 | 755 | 16-183 | 3442 | Gly-1 to Ala-7, | H0030: 2 | | |
| | | | | | Pro-42 to Asn-47. | | | |
| HPLBL57 | 503730 | 756 | 57-245 | 3443 | Phe-29 to Lys-35. | H0030: 2 | | |
| HPLBO61 | 558187 | 757 | 2-241 | 3444 | Glu-1 to Thr-9. | H0030: 1, H0038: 1 | | |
| | | | | | and L0758: 1. | | | |
| HPMAG19 | 705471 | 758 | 40-153 | 3445 | | H0031: 2 | | |
| HPMAH75 | 766443 | 759 | 2-214 | 3446 | | H0031: 2 | | |
| HPMBK34 | 954057 | 760 | 1-147 | 3447 | | H0031: 2 | | |
| HPMBK49 | 577661 | 761 | 125-301 | 3448 | Gln-20 to Ser-31. | H0031: 2 and L0777: 2. | | |
| | | | | | Phe-41 to Gly-47. | | | |
| HPMBM48 | 575626 | 762 | 3-503 | 3449 | Tyr-19 to Gly-46, | H0031: 3 | | |
| | | | | | Ser-48 to His-59, | | | |
| | | | | | Gly-65 to Gly-77, | | | |
| | | | | | Thr-91 to Tyr-96. | | | |
| HPMBN02 | 920865 | 763 | 1-120 | 3450 | | H0031: 2 | | |
| HPMBO10 | 968365 | 764 | 39-278 | 3451 | | H0031: 4 | | |
| HPMBO61 | 867677 | 765 | 1-249 | 3452 | Gly-1 to Gly-8. | H0031: 3 | | |
| HPMBR17 | 785732 | 766 | 192-404 | 3453 | Thr-1 to Gln-7, | H0031: 2 | | |
| | | | | | Pro-24 to Gly-32. | | | |
| HPMBU81 | 557870 | 767 | 28-165 | 3454 | Ser-32 to Thr-41. | H0031: 2 | | |
| HPMBX35 | 531058 | 768 | 3-125 | 3455 | | H0031: 2 | | |
| HPMBX79 | 577637 | 769 | 118-276 | 3456 | | H0031: 2 | | |
| HPMBY76 | 531338 | 770 | 2-163 | 3457 | Tyr-25 to Gly-32. | H0031: 2 | | |
| HPMBY83 | 527006 | 771 | 90-341 | 3458 | Ser-50 to Gly-55. | H0031: 4 and L0803: 1. | 12 | |
| HPMBZ05 | 932527 | 772 | 62-196 | 3459 | | H0031: 2 | | |
| HPMCB65 | 531289 | 773 | 111-302 | 3460 | Gly-12 to Ile-18. | H0031: 2 and L0605: 1. | | |
| HPMCC73 | 531066 | 774 | 171-314 | 3461 | Pro-28 to Pro-42. | H0031: 2 | | |
| HPMCD77 | 529960 | 775 | 3-278 | 3462 | Asp-1 to Cys-6. | H0253: 1 and H0031: 1. | | |
| HPMCI02 | 381961 | 776 | 326-66 | 3463 | Leu-19 to Thr-25, | H0031: 2, L0809: 1, | | |
| | | | | | Arg-66 to Phe-87. | L0438: 1 and L0439: 1. | | |
| | 881473 | 2656 | 3-341 | 5343 | | | | |
| HPMCI65 | 577598 | 777 | 27-161 | 3464 | | H0031: 2 | | |
| HPMCJ14 | 524768 | 778 | 93-317 | 3465 | Glu-30 to Asp-40. | H0031: 3 | | |
| HPMCJ19 | 531279 | 779 | 1-243 | 3466 | | H0031: 2 | | |
| HPMCJ48 | 577601 | 780 | 44-304 | 3467 | | H0031: 2 | | |
| HPMCK65 | 742095 | 781 | 54-314 | 3468 | Leu-6 to Leu-16, | H0031: 2 and L0600: 1. | | |
| | | | | | Thr-24 to Trp-29. | | | |
| HPMCS19 | 954056 | 782 | 3-182 | 3469 | Gln-1 to Gln-9, | H0031: 3 | | |
| | | | | | Arg-15 to Gly-22. | | | |
| HPMCS65 | 961250 | 783 | 16-108 | 3470 | Tyr-1 to Arg-8. | H0031: 10 | | |
| HPMCV93 | 657532 | 784 | 31-186 | 3471 | Arg-5 to Trp-15. | H0031: 3 and L0594: 1. | | |
| HPMCW25 | 867673 | 785 | 1-285 | 3472 | Gly-1 to Ser-8, | H0031: 2 and L0758:1. | | |
| | | | | | Leu-36 to Gly-42, | | | |
| | | | | | Leu-48 to Asn-55, | | | |
| | | | | | Lys-83 to Met-91. | | | |
| HPMCW53 | 727392 | 786 | 2-202 | 3473 | Pro-19 to Lys-26, | H0031: 2 | | |
| | | | | | Pro-36 to Gly-55. | | | |
| HPMCX11 | 967655 | 787 | 115-312 | 3474 | Gln-6 to Thr-19. | H0031: 2 and L0662: 1. | | |
| HPMCY30 | 867687 | 788 | 119-271 | 3475 | Asp-7 to Leu-12, | H0031: 2 | | |
| | | | | | Ala-16 to His-21. | | | |
| HPMCY31 | 725180 | 789 | 189-338 | 3476 | | H0031: 2 | | |
| HPMCY35 | 571411 | 790 | 272-397 | 3477 | | H0031: 3, L0667: 1 | | |
| | | | | | | and L0748: 1. | | |
| HPMDJ09 | 582594 | 791 | 108-215 | 3478 | | H0031: 4 | | |
| HPMDL78 | 577590 | 792 | 49-330 | 3479 | Glu-1 to Pro-6, | H0031: 2 | | |
| | | | | | Thr-45 to Val-50. | | | |
| HPMDO39 | 531275 | 793 | 55-204 | 3480 | | H0031: 2 | | |
| HPMDR07 | 867682 | 794 | 33-227 | 3481 | | H0031: 2 | | |
| HPMDT91 | 745346 | 795 | 3-299 | 3482 | Gly-38 to Ser-45, | H0031: 2 | | |
| | | | | | Gly-72 to Gly-78. | | | |
| HPMDU19 | 577626 | 796 | 163-276 | 3483 | | L0748: 14, H0553: 4, | | |
| | | | | | | L0754: 4, H0644: 3, | | |
| | | | | | | H0031: 2, L0005: 1, | | |
| | | | | | | L0774: 1, S0454: 1, | | |
| | | | | | | L0749: 1 and L0780: 1. | | |
| HPMDY82 | 531274 | 797 | 7-51 | 3484 | Lys-8 to Lys-15. | H0031: 2 | | |
| HPMDZ62 | 531276 | 798 | 116-286 | 3485 | Phe-5 to Gly-10. | H0031: 2 and H0644: 1. | | |
| HPMEB66 | 531349 | 799 | 3-149 | 3486 | Lys-20 to Thr-31. | H0031: 2 | | |
| HPMEC16 | 867658 | 800 | 136-249 | 3487 | | H0031: 2 | | |
| HPMEC36 | 668897 | 801 | 92-214 | 3488 | | H0031: 2 | | |
| HPMEC69 | 702501 | 802 | 1-114 | 3489 | Ile-29 to Ile-36. | H0031: 2 and L0740: 1. | | |
| HPMED52 | 531347 | 803 | 2-451 | 3490 | Lys-23 to Ser-33. | AR061: 6, AR089: 3 | | |
| | | | | | | H0031: 3 | | |
| HPMEE48 | 531321 | 804 | 240-437 | 3491 | | H0031: 4 | | |
| HPMEE66 | 577619 | 805 | 182-319 | 3492 | | H0031: 2 | | |
| HPMEG50 | 925080 | 806 | 3-122 | 3493 | Pro-20 to Pro-26. | H0031: 2 | | |
| HPMEI39 | 784781 | 807 | 117-443 | 3494 | Arg-1 to Ser-8, | H0031: 3, L0731: 3, | 22q12-q13 | 102480, |
| | | | | | Pro-23 to Gly-30, | H0046: 2, L0617: 1, | | 123620, |
| | | | | | Glu-62 to Arg-68. | L0747: 1 and L0779: 1. | | 133450, |
| | | | | | | | | 133450, |
| | | | | | | | | 138981, |
| | | | | | | | | 188826, |
| | | | | | | | | 190040, |
| | | | | | | | | 190040, |
| | | | | | | | | 190040, |
| | | | | | | | | 600850, |
| | | | | | | | | 601669, |
| | | | | | | | | 602229 |
| HPMFB02 | 920308 | 808 | 3-404 | 3495 | Pro-15 to Leu-27, | H0031: 2 | 4q31.1-q31.2 | 189800, |
| | | | | | Phe-44 to Asp-49, | | | 600983 |
| | | | | | Ala-83 to Lys-99. | | | |
| HPMFB28 | 575934 | 809 | 3-281 | 3496 | Asp-37 to Thr-43, | H0031: 3 | | |
| | | | | | Ala-46 to Ala-53, | | | |
| | | | | | His-64 to Trp-76. | | | |
| HPMFB37 | 575620 | 810 | 277-465 | 3497 | | H0031: 8 and L0581: 2. | | |
| HPMFB75 | 526594 | 811 | 46-234 | 3498 | | H0031: 2 | | |
| HPMFB84 | 577593 | 812 | 148-291 | 3499 | Leu-2 to Glu-8, | H0031: 2 | | |
| | | | | | Pro-39 to Ser-44. | | | |
| HPMFE35 | 577633 | 813 | 3-158 | 3500 | Gln-14 to Thr-22. | H0031: 2 | | |
| HPMFE60 | 577636 | 814 | 2-214 | 3501 | Ser-8 to Ser-14, | H0031: 2 | | |
| | | | | | Ser-27 to Pro-48. | | | |
| HPMFE73 | 575941 | 815 | 1-183 | 3502 | Pro-38 to Gly-45. | H0031: 2 | | |
| HPMFH21 | 575943 | 816 | 248-460 | 3503 | | H0031: 2 | | |
| HPMFJ50 | 575932 | 817 | 170-487 | 3504 | Gln-7 to Ser-12. | H0031 ;2, L0438: 2 | | |
| | | | | | | and L0439: 2. | | |
| HPMFJ55 | 577588 | 818 | 53-259 | 3505 | | H0031:5 | | |
| HPMFL08 | 959569 | 819 | 191-346 | 3506 | Met-43 to Trp-52. | AR089: 1, AR061: 1 | | |
| | | | | | | H0031: 2 | | |
| HPMFL80 | 874359 | 820 | 2-205 | 3507 | Ala-1 to Lys-6, | H0031: 2, H0644: 1 | | |
| | | | | | Pro-12 to Trp-19, | and L0527: 1. | | |
| | | | | | Met-63 to Lys-68. | | | |
| HPMFM29 | 582595 | 821 | 482-631 | 3508 | | H0428: 1, H0031: 1, | | |
| | | | | | | L0766: 1, L0659: 1, | | |
| | | | | | | H0690: 1, L0439: 1, | | |
| | | | | | | L0754: 1 and L0756: 1. | | |
| HPMFN12 | 968821 | 822 | 262-444 | 3509 | Arg-15 to Val-21. | H0031: 3 | | |
| HPMFP05 | 867662 | 823 | 107-427 | 3510 | Leu-9 to Ile-17. | H0031: 2 | | |
| HPMFP30 | 577629 | 824 | 121-348 | 3511 | | H0031: 3 | | |
| HPMFP38 | 575914 | 825 | 118-261 | 3512 | | H0031: 3 | | |
| HPMFQ84 | 867651 | 826 | 483-692 | 3513 | | H0031: 4 and L0754: 1. | | |
| HPMFS41 | 711640 | 827 | 64-342 | 3514 | Ala-1 to Asn-9, | H0031: 3 | | |
| | | | | | Glu-17 to Glu-22, | | | |
| | | | | | Trp-36 to Gln-44. | | | |
| HPMFT04 | 916662 | 828 | 28-180 | 3515 | | H0031: 4 | | |
| HPMFU89 | 575894 | 829 | 169-300 | 3516 | Tyr-24 to His-32. | H0031: 2 | | |
| HPMFV28 | 652097 | 830 | 172-312 | 3517 | Lys-1 to Gly-7. | H0031: 2 | | |
| HPMFV82 | 575911 | 831 | 57-167 | 3518 | Phe-15 to Asn-20. | H0031: 2 | | |
| HPMFV88 | 956263 | 832 | 204-365 | 3519 | Gln-10 to Gln-20. | H0031: 2 | | |
| HPMFW25 | 960065 | 833 | 16-246 | 3520 | Arg-18 to Val-24, | H0031: 2 | | |
| | | | | | Glu-43 to Gly-54. | | | |
| HPMFW78 | 932529 | 834 | 3-152 | 3521 | Asp-19 to Ser-30. | H0031: 5 and L0142: 1. | | |
| HPMFX13 | 575908 | 835 | 284-412 | 3522 | Leu-34 to Cys-41. | L0774: 4, H0031: 2, | | |
| | | | | | | L0439: 2, L0435: 1, | | |
| | | | | | | L0803: 1 and H0670: 1. | | |
| HPMFX65 | 867657 | 836 | 158-355 | 3523 | | H0031: 2 | | |
| HPMFX70 | 577642 | 837 | 3-218 | 3524 | His-1 to His-7, | H0031: 2 | | |
| | | | | | Ser-16 to Glu-22, | | | |
| | | | | | Phe-65 to Ser-71. | | | |
| HPMFX92 | 577603 | 838 | 3-206 | 3525 | Arg-28 to Leu-37. | H0031: 2 | | |
| HPMGA83 | 968359 | 839 | 88-243 | 3526 | His-39 to Thr-44. | H0031: 4 | | |
| HPMGB22 | 506379 | 840 | 180-320 | 3527 | | H0031: 2 | | |
| HPMGC07 | 920313 | 841 | 55-381 | 3528 | Gln-6 to Trp-17. | H0031: 9 and L0758: 1. | | |
| HPMGC23 | 703835 | 842 | 1-306 | 3529 | Arg-18 to Ser-29, | H0031: 2 | | |
| | | | | | Gly-62 to Tyr-78. | | | |
| HPMGE31 | 867648 | 843 | 30-353 | 3530 | | H0031: 2 | | |
| HPMGE95 | 873392 | 844 | 176-340 | 3531 | | H0031: 3 | | |
| HPMGF06 | 954823 | 845 | 1-564 | 3532 | Gly-1 to Ser-16, | H0031: 3, H0651: 1, | | |
| | | | | | Ser-37 to Lys-42, | L0731: 1 and L0758 1. | | |
| | | | | | Arg-44 to Val-50. | | | |
| HPMGF32 | 577615 | 846 | 226-92 | 3533 | Tyr-1 to Ile-7, | H0031: 2 | | |
| | | | | | Cys-20 to Asp-33, | | | |
| | | | | | Leu-40 to Ser-45. | | | |
| HPMGH16 | 577641 | 847 | 267-398 | 3534 | | H0031: 2 | | |
| HPMGI03 | 924521 | 848 | 62-283 | 3535 | | H0031: 2 | 20 | |
| HPMGI84 | 920326 | 849 | 79-219 | 3536 | | H0031: 3 | | |
| HPMGJ93 | 864040 | 850 | 147-359 | 3537 | Trp-40 to His-45. | H0031: 2 | | |
| HPMGK37 | 575924 | 851 | 223-369 | 3538 | | H0031: 2 | | |
| HPMGK59 | 671936 | 852 | 159-488 | 3539 | His-18 to Cys-23, | H0031: 3, L0757: 3, | | |
| | | | | | Glu-33 to Phe-40, | L0803: 2 and L0766: 1. | | |
| | | | | | Thr-42 to Trp-47, | | | |
| | | | | | Cys-53 to Glu-63. | | | |
| HPMGK62 | 730751 | 853 | 347-529 | 3540 | | H0031: 3 and L0754: 1. | | |
| HPMGM33 | 854081 | 854 | 2-223 | 3541 | Ala-1 to Asn-16, | L0805: 5, H0031: 2, | | |
| | | | | | Lys-45 to Thr-54. | L0749: 2, L0766: 1, | | |
| | | | | | | L0776: 1 and L0779: 1. | | |
| HPMGM54 | 577599 | 855 | 189-356 | 3542 | | H0031: 2 | | |
| HPMGR80 | 506235 | 856 | 24-224 | 3543 | | H0031: 2 | 7p15-p12 | 138079, |
| | | | | | | | | 138079, |
| | | | | | | | | 139191, |
| | | | | | | | | 142959, |
| | | | | | | | | 153880, |
| | | | | | | | | 180104, |
| | | | | | | | | 600994, |
| | | | | | | | | 601649 |
| HPMGS09 | 575951 | 857 | 46-111 | 3544 | | H0031: 2 | | |
| HPMGS24 | 796440 | 858 | 230-367 | 3545 | | H0031: 2 | | |
| HPMGT67 | 970815 | 859 | 1-123 | 3546 | Ser-26 to Trp-32. | H0031: 2 | | |
| HPMGV12 | 968364 | 860 | 35-301 | 3547 | His-1 to Glu-6. | H0031: 2 | | |
| HPMGV15 | 582596 | 861 | 88-210 | 3548 | | H0031: 4 | | |
| HPMGV59 | 577635 | 862 | 38-277 | 3549 | Asp-23 to Pro-34. | H0031: 2 | | |
| HPMGW48 | 920309 | 863 | 3-257 | 3550 | His-1 to Gln-15, | H0031: 2 | | |
| | | | | | Arg-37 to Asp-48, | | | |
| | | | | | Ser-63 to Pro-77, | | | |
| | | | | | Gly-79 to Lys-85. | | | |
| HPMGX23 | 575903 | 864 | 3-314 | 3551 | Ser-2 to Pro-27, | H0031: 2 | 19q12 | |
| | | | | | Leu-38 to Asn-52. | | | |
| HPMHA80 | 970813 | 865 | 142-294 | 3552 | | H0031: 2 | | |
| HPMHB74 | 577595 | 866 | 289-552 | 3553 | Lys-31 to Thr-37. | H0031: 2, L0769: 1 | | |
| | | | | | | and L0439: 1. | | |
| HPMHB83 | 531382 | 867 | 1-147 | 3554 | Gly-1 to Ser-8, | H0031: 3 | | |
| | | | | | Ile-41 to Ile-49. | | | |
| HPMHC74 | 577631 | 868 | 46-198 | 3555 | | H0031: 2 | | |
| HPMHD66 | 928433 | 869 | 1-441 | 3556 | Arg-13 to Ala-23, | H0031: 2 | | |
| | | | | | Met-27 to Gly-36, | | | |
| | | | | | Ser-109 to Leu-116. | | | |
| HPMHD71 | 760426 | 870 | 159-1 | 3557 | Arg-1 to Thr-20. | H0031: 3 | | |
| HPMJC01 | 914759 | 871 | 1-267 | 3558 | | H0031: 1 and H0644: 1. | | |
| HPMJC05 | 930844 | 872 | 2-370 | 3559 | Leu-39 to Ser-46, | H0644: 2 | | |
| | | | | | Gly-87 to Pro-94. | | | |
| HPMJD88 | 930806 | 873 | 136-330 | 3560 | Gln-42 to Asp-50. | H0644: 3 | | |
| HPMJE84 | 867587 | 874 | 207-425 | 3561 | Ile-1 to Gln-10, | H0644: 2 | | |
| | | | | | Ser-20 to Gln-27. | | | |
| HPMJF76 | 956542 | 875 | 1-171 | 3562 | | H0644: 2 | | |
| HPMJI81 | 930873 | 876 | 166-276 | 3563 | Glu-15 to Arg-20. | H0644: 2 and H0615: 1. | | |
| HPMJN59 | 946876 | 877 | 84-470 | 3564 | | AR089: 21, AR061: 15 | | |
| | | | | | | H0644: 2 | | |
| HPMJQ46 | 922649 | 878 | 1-222 | 3565 | Ala-1 to Phe-6, | H0644: 2 | | |
| | | | | | Thr-32 to Gly-38, | | | |
| | | | | | Pro-54 to Gln-73. | | | |
| HPMJR02 | 917419 | 879 | 160-429 | 3566 | Arg-37 to Asn-50, | H0644: 2 | | |
| | | | | | His-81 to Gln-89. | | | |
| HPMJV08 | 958001 | 880 | 204-353 | 3567 | Tyr-15 to Tyr-21. | H0644: 3 | | |
| HPMJY55 | 922657 | 881 | 3-203 | 3568 | | H0644: 3 | | |
| HPMKB19 | 969478 | 882 | 287-454 | 3569 | Ser-8 to Phe-26. | H0644: 2, L0794: 1 | | |
| | | | | | | and L0748: 1. | | |
| HPMKI53 | 957997 | 883 | 3-125 | 3570 | | H0644: 2 | | |
| HPMKM81 | 894416 | 884 | 64-567 | 3571 | Arg-15 to Gln-21, | AR061: 2, AR089: 1 | 7q22 | 126650, |
| | | | | | Gln-47 to Ile-53, | L0666: 3, L0777: 2, | | 126650, |
| | | | | | Lys-58 to Asp-72. | L0608: 2, H0046: 1, | | 154276, |
| | | | | | | H0031: 1, H0644: 1, | | 173360, |
| | | | | | | L0803: 1, L0783: 1, | | 173360, |
| | | | | | | H0672: 1, L0740: 1, | | 602136, |
| | | | | | | L0750: 1 and L0755: 1. | | 602136, |
| | | | | | | | | 602136, |
| | | | | | | | | 602447 |
| HPMKN43 | 867573 | 885 | 222-545 | 3572 | Arg-2 to Tyr-7. | H0644: 2 and L0589: 1. | | |
| HPMLE04 | 867533 | 886 | 343-543 | 3573 | | H0644: 3 and L0471: 1. | | |
| HPMLK02 | 918123 | 887 | 173-421 | 3574 | Leu-36 to Gln-52. | H0644: 2 and L0527: 1. | | |
| HPMLK76 | 922621 | 888 | 155-370 | 3575 | Arg-43 to Ser-48. | H0644: 2 | | |
| HPMLL74 | 953069 | 889 | 1-285 | 3576 | Gly-4 to Ser-11. | H0544: 1, H0644: 1 | | |
| | | | | | | and L0754: 1. | | |
| HPMLW10 | 963037 | 890 | 53-211 | 3577 | | H0644: 2 | | |
| HPMSF86 | 509490 | 891 | 44-226 | 3578 | Ser-8 to His-17. | H0111: 2 | | |
| HPRAE13 | 971652 | 892 | 3-329 | 3579 | Gly-8 to Glu-21, | H0032: 2 and L0759: 1. | | |
| | | | | | Val-23 to Ser-37. | | | |
| HPRAN84 | 585489 | 893 | 87-299 | 3580 | Cys-19 to Ser-29, | H0032: 2 | | |
| | | | | | Ser-31 to Gly-37, | | | |
| | | | | | His-48 to Gln-53. | | | |
| HPRAU45 | 536630 | 894 | 191-27 | 3581 | Ser-12 to Gln-18, | H0032: 2 | | |
| | | | | | Arg-23 to Gly-30. | | | |
| HPRAZ10 | 968692 | 895 | 1-183 | 3582 | Gln-13 to Ile-22, | L0758: 2, H0688: 1 | | |
| | | | | | Val-34 to Ser-39. | and H0032: 1. | | |
| HPRBA65 | 655537 | 896 | 98-241 | 3583 | Arg-23 to Glu-35. | H0032: 2 | | |
| HPRBE36 | 655587 | 897 | 91-330 | 3584 | Ile-6 to His-11, | H0032: 2 | | |
| | | | | | Gly-24 to Val-29. | | | |
| HPRBL91 | 655693 | 898 | 192-299 | 3585 | | H0032: 2 | | |
| HPRCB11 | 960316 | 899 | 178-336 | 3586 | Ser-13 to Asn-20. | H0032: 2 | | |
| HPRCB21 | 655725 | 900 | 2-121 | 3587 | Ser-19 to Ser-25. | H0032: 2 | | |
| HPRCC08 | 939490 | 901 | 3-296 | 3588 | Leu-39 to Ile-47. | H0032: 2 | | |
| HPRCC61 | 964909 | 902 | 3-176 | 3589 | | H0032: 2 | | |
| HPRCN41 | 655554 | 903 | 23-169 | 3590 | | H0032: 2 | | |
| HPRCU13 | 968521 | 904 | 156-269 | 3591 | | H0032: 2 | | |
| HPRSB16 | 666295 | 905 | 3-188 | 3592 | | H0211: 2 | | |
| HPRTL26 | 849081 | 906 | 258-419 | 3593 | Gln-1 to Gly-7, | H0212: 2 and H0032: 1. | | |
| | | | | | Thr-22 to Gly-31. | | | |
| HPRTP73 | 708761 | 907 | 127-273 | 3594 | | H0032: 1 and H0212: 1. | | |
| HPVAB11 | 967944 | 908 | 295-495 | 3595 | Arg-8 to Phe-20, | L0777: 3, L0662: 1, | 20 | |
| | | | | | Gly-36 to Lys-42. | L0803: 1, L0787: 1, | | |
| | | | | | | H0672: 1, S0013: 1 and | | |
| | | | | | | L0747: 1. | | |
| HPVAF49 | 655578 | 909 | 108-287 | 3596 | Arg-4 to Ser-20, | S0013: 2 | | |
| | | | | | Lys-50 to Glu-60. | | | |
| HPVAF69 | 753744 | 910 | 2-145 | 3597 | Ile-22 to Asn-28. | L0662: 1, L0774: 1, | | |
| | | | | | | L0659: 1, H0672: 1, | | |
| | | | | | | S0013: 1 and L0754: 1. | | |
| HPVAH36 | 525537 | 911 | 204-362 | 3598 | Ser-3 to Gly-11, | T0069: 1 and S0013: 1. | | |
| | | | | | Thr-41 to Gly-52. | | | |
| HPWAF85 | 655691 | 912 | 116-550 | 3599 | Arg-39 to Asp-55, | S0044: 2 and H0618: 1. | 19q | |
| | | | | | Ala-93 to Ser-99, | | | |
| | | | | | Pro-102 to Ser-111. | | | |
| HPWAH48 | 655527 | 913 | 19-156 | 3600 | Asn-6 to Trp-17. | S0044: 2 | | |
| HPWAS77 | 908450 | 914 | 655-266 | 3601 | His-18 to Pro-24. | AR061: 7, AR089: 3 | | |
| | | | | | | S0044: 2, L0747: 2, | | |
| | | | | | | L0777: 2 and L0480: 1. | | |
| HPWBA33 | 655733 | 915 | 66-227 | 3602 | Ala-7 to Thr-13, | S0044: 2 | | |
| | | | | | Arg-43 to Arg-49. | | | |
| HPWBO84 | 867289 | 916 | 14-289 | 3603 | Arg-44 to His-50, | S0044: 2 | | |
| | | | | | Gln-62 to Arg-69, | | | |
| | | | | | Gln-80 to Trp-87. | | | |
| HPWCA53 | 657484 | 917 | 197-367 | 3604 | Phe-24 ro Thr-29. | S0044: 2 | | |
| HPWCJ27 | 655614 | 918 | 2-157 | 3605 | Glu-10 to Gln-19, | S0044: 2 | | |
| | | | | | Gln-22 to Lys-27, | | | |
| | | | | | Pro-37 to Val-44. | | | |
| HPWCJ67 | 655560 | 919 | 236-373 | 3606 | Leu-4 to Lys-9. | S0044: 2 | | |
| HPWCJ82 | 655577 | 920 | 215-415 | 3607 | Ser-15 to Ser-22. | S0044: 2 | | |
| HPWDA73 | 514113 | 921 | 513-656 | 3608 | Leu-43 to Leu-48. | S0044: 1 and S0296: 1. | | |
| | 716228 | 2657 | 53-373 | 5344 | | | | |
| HPWDA86 | 961529 | 922 | 15-164 | 3609 | Gln-1 to Gly-8, | H0648: 1 and S0044: 1. | | |
| | | | | | Lys-15 to Ser-23. | | | |
| HPWDD72 | 537333 | 923 | 193-342 | 3610 | | S0044: 2 and L0748: 1. | | |
| HPWSB35 | 655713 | 924 | 74-268 | 3611 | | S0174: 2 | | |
| HPZAB38 | 655591 | 925 | 138-254 | 3612 | | S0168: 2 | | |
| HSWAC73 | 710354 | 926 | 2-409 | 3613 | | H0618: 1, H0546: 1 | | |
| | | | | | | and H0040: 1. | | |
| HSWAD39 | 705322 | 927 | 638-489 | 3614 | | L0777: 3, H0546: 2, | | |
| | | | | | | L0803: 2, L0755: 2, | | |
| | | | | | | L0637: 1, L0662: 1, | | |
| | | | | | | L0794: 1, H0659: 1 and | | |
| | | | | | | L0758: 1. | | |
| HSWBD86 | 785439 | 928 | 1-150 | 3615 | Ser-13 to Ser-19, | L0800: 2, L0764: 2, | | |
| | | | | | Arg-37 to Gly-48. | L0779: 2, H0546: 1, | | |
| | | | | | | L0351: 1, L0769: 1, | | |
| | | | | | | L0771: 1, L0438: 1, | | |
| | | | | | | H0660: 1, L0439: 1 and | | |
| | | | | | | L0592: 1. | | |
| HSWBJ40 | 711066 | 929 | 2-307 | 3616 | | L0731: 3, H0545: 2, | | |
| | | | | | | L0744: 2, L0021: 1, | | |
| | | | | | | H0546: 1, L0769: 1, | | |
| | | | | | | L0666: 1 and L0665: 1. | | |
| HSWBO34 | 868007 | 930 | 611-826 | 3617 | Gln-1 to Phe-10. | L0777: 2, L0005: 1, | | |
| | | | | | | H0546: 1, H0328: 1, | | |
| | | | | | | L0761: 1, L0373: 1, | | |
| | | | | | | L0527: 1, L0526: 1, | | |
| | | | | | | L0754: 1, L0752: 1, | | |
| | | | | | | L0755: 1, L0731: 1 and | | |
| | | | | | | L0608: 1. | | |
| HTEAA54 | 923070 | 931 | 34-513 | 3618 | Gln-1 to Met-10, | H0618: 2, H0038: 1 | | |
| | | | | | Met-16 to Lys-21, | and H0616: 1. | | |
| | | | | | Thr-26 to Met-32. | | | |
| HTEAB52 | 537136 | 932 | 1-315 | 3619 | Pro-53 to Asn-59. | H0038: 3 | | |
| HTEAD32 | 504353 | 933 | 50-187 | 3620 | Arg-16 to Thr-28. | H0038: 2 | | |
| HTEAD95 | 961232 | 934 | 1-246 | 3621 | Cys-5 to Ser-11, | H0038: 3, L0747: 2, | | |
| | | | | | Pro-13 to Thr-18, | H0618: 1, L0665: 1, | | |
| | | | | | His-28 to Arg-33, | L0779: 1 and L0758: 1. | | |
| | | | | | Arg-40 to Arg-45, | | | |
| | | | | | Pro-52 to Arg-57, | | | |
| | | | | | His-66 to Gln-71. | | | |
| HTEAF07 | 835805 | 935 | 87-326 | 3622 | | L0758: 6, H0038: 3, | | |
| | | | | | | H0616: 1, L0659: 1 and | | |
| | | | | | | L0779: 1. | | |
| | 954433 | 2658 | 330-91 | 5345 | Arg-1 to Pro-9. | | | |
| HTEAF26 | 537271 | 936 | 238-116 | 3623 | Thr-5 to Glu-11. | H0038: 11, L0758: 7, | | |
| | | | | | | L0753: 2 and H0616: 1. | | |
| HTEAG50 | 787500 | 937 | 199-104 | 3624 | Val-6 to Lys-13. | H0038: 1 and H0616: 1. | | |
| HTEAK57 | 536769 | 938 | 423-202 | 3625 | | H0038: 12, H0616: 6, | 10p12-p11.2 | 600964, |
| | | | | | | H0593: 1, L0439: 1 and | | 602026 |
| | | | | | | L0756: 1. | | |
| HTEAL28 | 963538 | 939 | 3-626 | 3626 | Gln-11 to Lys-24, | H0038: 11, L0758: 7, | | |
| | | | | | His-60 to Leu-67, | L0753: 2 and H0616: 1. | | |
| | | | | | Arg-85 to Ser-92. | | | |
| HTEAP91 | 966113 | 940 | 10-324 | 3627 | Glu-13 to Trp-29, | H0616: 4, L0758: 2 | | |
| | | | | | Thr-31 to Thr-44, | and H0038: 1. | | |
| | | | | | Arg-54 to Ser-71. | | | |
| HTEAR84 | 783328 | 941 | 2-130 | 3628 | | H0038: 1 and H0616: 1. | | |
| HTEAV43 | 927010 | 942 | 368-520 | 3629 | Lys-17 to Lys-26. | L0758: 3, H0616: 2 | | |
| | | | | | | and H0038: 1. | | |
| HTEAY67 | 679390 | 943 | 280-143 | 3630 | Tyr-14 to Ser-19. | L0758: 3, H0038: 2, | | |
| | | | | | | L0794: 2 and L0779: 1. | | |
| HTEAZ54 | 793441 | 944 | 286-501 | 3631 | | H0038: 2 and H0616: 1. | | |
| HTEBC74 | 887782 | 945 | 1-321 | 3632 | Pro-32 to Asn-39. | AR054: 7, AR051: 2, | | |
| | | | | | | AR089: 1, AR061: 0 | | |
| | | | | | | L0663: 2, H0038: 1, | | |
| | | | | | | H0672: 1 and L0779: 1. | | |
| HTEBD35 | 967959 | 946 | 13-252 | 3633 | Asn-28 to Cys-34. | H0038: 2 | | |
| HTEBD40 | 779134 | 947 | 3-152 | 3634 | Pro-44 to Ser-50. | H0038: 2 and H0616: 1. | | |
| HTEBJ78 | 779265 | 948 | 3-971 | 3635 | Ser-86 to Thr-97, | H0038: 7, H0253: 1, | | |
| | | | | | Gln-104 to Pro-116, | H0616: 1 and L0151: 1. | | |
| | | | | | Glu-168 to Ser-182, | | | |
| | | | | | Thr-190 to Ser-198, | | | |
| | | | | | Glu-208 to Tyr-213, | | | |
| | | | | | Ser-230 to Val-237. | | | |
| HTEBP39 | 742218 | 949 | 373-540 | 3636 | Glu-38 tO Ala-46. | H0038: 2, H0328: 1 | | |
| | | | | | | and H0616: 1. | | |
| HTEBS30 | 693377 | 950 | 185-334 | 3637 | Ser-39 to Val-49. | H0038: 2 and H0616: 2. | | |
| HTEBS77 | 953904 | 951 | 106-552 | 3638 | Lys-1 to Asn-14. | H0038: 1 and H0616: 1. | | |
| HTEBS80 | 854052 | 952 | 201-359 | 3639 | Lys-24 to Val-32. | H0038: 2, H0040: 2 | | |
| | | | | | | and L0758: 1. | | |
| HTEBX62 | 508150 | 953 | 250-417 | 3640 | | H0038: 2 | | |
| HTEBY08 | 960427 | 954 | 3-356 | 3641 | Ile-11 to Trp-17, | AR061: 1, AR089: 0 | | |
| | | | | | Arg-52 to Glu-65. | H0038: 4 | | |
| HTEBY15 | 526281 | 955 | 1-231 | 3642 | Lys-66 to Thr-72. | H0038: 2 | | |
| HTRBY28 | 923026 | 956 | 1-546 | 3643 | Arg-1 to Phe-12, | H0616: 3 and H0038: 2. | | |
| | | | | | Met-34 to Lys-39, | | | |
| | | | | | Lys-46 to Ser-56, | | | |
| | | | | | Pro-72 to Lys-79, | | | |
| | | | | | Lys-101 to Asp-107, | | | |
| | | | | | Trp-139 to Lys-148. | | | |
| HTEBY41 | 711523 | 957 | 106-243 | 3644 | | H0038: 2 and H0616: 1. | | |
| HTEBY61 | 967340 | 958 | 1-435 | 3645 | Glu-9 to Arg-24. | H0253: 1, H0038: 1 | | |
| | | | | | Arg-32 to Thr-40. | and L0758: 1. | | |
| HTEBZ21 | 958381 | 959 | 2-121 | 3646 | | H0038: 2 and H0616: 1. | | |
| HTECA13 | 507053 | 960 | 1-204 | 3647 | His-27 to Leu-39. | H0038: 4 and H0616: 1. | | |
| HTECA16 | 764416 | 961 | 111-389 | 3648 | Glu-8 to Lys-17. | H0038: 2 and L0779: 1. | | |
| HTECA21 | 911369 | 962 | 1-387 | 3649 | Asn-1 to His-6, | AR061: 596, AR089: 427 | | |
| | | | | | Arg-117 to Cys-126. | H0038: 2, H0616: 1 | | |
| | | | | | | and L0439: 1. | | |
| HTECA32 | 947605 | 963 | 792-406 | 3650 | | AR061: 49, AR089: 45 | | |
| | | | | | | H0038: 2 | | |
| HTECA51 | 708860 | 964 | 96-248 | 3651 | | H0038: 2, L0748: 2, | | |
| | | | | | | L0749: 2, L0769: 1, | | |
| | | | | | | L0776: 1, L0659: 1 and | | |
| | | | | | | L0663: 1. | | |
| HTECA83 | 870692 | 965 | 3-311 | 3652 | Arg-22 to Tyr-28, | H0038: 2 | | |
| | | | | | Ser-78 to Arg-87. | | | |
| HTECB21 | 921070 | 966 | 32-271 | | | | | |
| HTECC13 | 971673 | 967 | 61-270 | 3654 | | H0253: 1 and H0038: 1. | | |
| HTECC20 | 963353 | 968 | 763-1005 | 3655 | Arg-1 to Arg-11, | H0038: 2 and H0616: 2. | | |
| | | | | | Arg-55 to Ser-70, | | | |
| | | | | | Ser-76 to Gly-81. | | | |
| HTECC37 | 508143 | 969 | 1-147 | 3656 | | H0038: 1 and H0616: 1. | | |
| HTECC38 | 844558 | 970 | 203-463 | 3657 | Arg-15 to Leu-21, | H0038: 4, H0616: 3, | | |
| | | | | | Ala-29 to Glu-34. | L0758: 3 and L0779: 1. | | |
| HTECC66 | 790937 | 971 | 84-287 | 3658 | Asn-9 to Asn-16, | H0038: 2 and H0616: 1. | | |
| | | | | | Asp-60 to Lys-68. | | | |
| HTECC80 | 796820 | 972 | 37-459 | 3659 | Gln-18 to Trp-29, | H0038: 2 and H0616: 1. | | |
| | | | | | Arg-46 to Val-52. | | | |
| HTECC85 | 508138 | 973 | 1-297 | 3660 | Ala-10 to Thr-17, | H0038: 2 | | |
| | | | | | Glu-19 to Glu-28, | | | |
| | | | | | Thr-36 to Trp-44, | | | |
| | | | | | Ile-47 to Gly-54, | | | |
| | | | | | Ala-61 to Pro-69. | | | |
| HTECC96 | 959874 | 974 | 138-491 | 3661 | Pro-6 to Cys-11, | H0038: 2 | | |
| | | | | | Pro-77 to His-92. | | | |
| HTECD17 | 508108 | 975 | 154-411 | 3662 | | H0038: 2 | | |
| HTECD18 | 973163 | 976 | 2-508 | 3663 | Arg-1 to Ala-35, | H0616: 14, H0038: 12, | | |
| | | | | | Gly-41 to Lys-61. | H0618: 6, H0253: 5, | | |
| | | | | | | L0758: 5, L0768: 4, | | |
| | | | | | | H0411: 2, L0779: 2, | | |
| | | | | | | L0151: 1, L0697: 1 and | | |
| | | | | | | S0398: 1. | | |
| HTECD36 | 518124 | 977 | 1-141 | 3664 | Val-9 to His-36. | H0038: 2 | | |
| HTECD62 | 527207 | 978 | 3-161 | 3665 | His-8 to Arg-15, | H0038: 2, L0794: 2, | | |
| | | | | | Lys-19 to Lys-36. | L0779: 2, H0616: 1 and | | |
| | | | | | | L0758: 1. | | |
| HTECD75 | 727422 | 979 | 3-275 | 3666 | Gly-2 to Ala-8, | H0616: 4, H0038: 2 | | |
| | | | | | Pro-10 to Thr-18, | and L0758: 1. | | |
| | | | | | Pro-23 to Ser-34, | | | |
| | | | | | Pro-45 to Asp-55. | | | |
| HTECE09 | 620494 | 980 | 2-286 | 3667 | Ile-1 to Gly-9. | H0038: 2 | | |
| HTECE44 | 764830 | 981 | 2-286 | 3668 | Ser-29 to Gly-35, | H0038: 8, L0758:5, | | |
| | | | | | Asp-85 to Val-92. | L0794: 4, H0616: 2, | | |
| | | | | | | L0763: 1 and L0777: 1. | | |
| HTECE45 | 790894 | 982 | 2-352 | 3669 | | L0766: 2, H0038: 1 | | |
| | | | | | | and H0616: 1. | | |
| HTECE69 | 522983 | 983 | 2-253 | 3670 | Ile-1 to Arg-13. | H0038: 2 | | |
| | | | | | Glu-25 to Leu-31. | | | |
| HTECE91 | 522984 | 984 | 3-296 | 3671 | | H0038: 2 | | |
| HTEDF13 | 522964 | 985 | 123-257 | 3672 | Glu-1 to Thr-6, | H0038: 2 | | |
| | | | | | Glu-30 to Met-43. | | | |
| HTEDF23 | 522966 | 986 | 3-164 | 3673 | Gly-2 to Arg-19, | H0038: 2 | | |
| | | | | | Arg-24 to Gly-29, | | | |
| | | | | | Lys-48 to Arg-54. | | | |
| HTEDF57 | 964734 | 987 | 2-418 | 3674 | Asn-37 to Val-42, | H0616: 2 and H0038: 1. | | |
| | | | | | Lys-82 to Glu-95, | | | |
| | | | | | Glu-100 to Leu-105, | | | |
| | | | | | Tyr-114 to Ser-120, | | | |
| | | | | | Leu-129 to Lys-134. | | | |
| HTEDF76 | 522973 | 988 | 141-329 | 3675 | | H0038: 2 | | |
| HTEDG16 | 925527 | 989 | 1-423 | 3676 | Gln-61 to Cys-76, | H0038: 2 | | |
| | | | | | Ile-95 to Asp-111. | | | |
| HTEDG34 | 761752 | 990 | 169-324 | 3677 | | H0616: 2 and H0038: 1. | | |
| HTEDH21 | 522764 | 991 | 3-170 | 3678 | Arg-1 to Glu-9, | H0038: 3 | | |
| | | | | | Thr-42 to Arg-49. | | | |
| HTEDH22 | 522765 | 992 | 33-206 | 3679 | | H0038: 2, H0616:2, | | |
| | | | | | | L0769: 1, L0794: 1, | | |
| | | | | | | L0779: 1 and L0758: 1. | | |
| HTEDH54 | 957762 | 993 | 1-411 | 3680 | Asn-1 to Ser-14, | H0038: 1 and H0616: 1. | | |
| | | | | | Glu-103 to Gly-108. | | | |
| HTEDI02 | 921243 | 994 | 121-705 | 3681 | Glu-7 to Lys-13, | AR061: 14, AR089: 12 | | |
| | | | | | Asp-29 to Leu-34, | H0618: 2, H0634: 2, | | |
| | | | | | His-83 to Pro-91, | H0038: 1, H0616: 1 and | | |
| | | | | | Ser-106 to Thr-111. | L0758: 1. | | |
| HTEDI16 | 932292 | 995 | 65-544 | 3682 | Lys-18 to Arg-24, | H0038: 2, H0616: 2, | | |
| | | | | | Pro-30 to Thr-35. | L0740: 1 and L0758: 1. | | |
| HTEDI82 | 536477 | 996 | 274-549 | 3683 | Pro-20 to Thr-29. | H0038: 3 | | |
| HTEDJ04 | 519940 | 997 | 43-165 | 3684 | | H0038: 2 | | |
| HTEDJ30 | 771404 | 998 | -3-305 | 3685 | | L0740: 2, H0615: 1, | | |
| | | | | | | H0428: 1, H0038: 1, | | |
| | | | | | | L0662: 1, L0805: 1, | | |
| | | | | | | L0661: 1 and L0751: 1. | | |
| HTEDM08 | 960303 | 999 | 3-257 | 3686 | Pro-31 to Ala-40. | H0038: 2 and H0616:1. | 8p12-p11.2 | 136350, |
| | | | | | | | | 152760, |
| | | | | | | | | 173370, |
| | | | | | | | | 180100, |
| | | | | | | | | 182900, |
| | | | | | | | | 185430, |
| | | | | | | | | 270800, |
| | | | | | | | | 277700, |
| | | | | | | | | 600617 |
| HTEDO31 | 870711 | 1000 | 101-271 | 3687 | Pro-1 to Trp-9, | H0038: 2 | | |
| | | | | | Pro-25 to Lys-31. | | | |
| HTEDO51 | 530592 | 1001 | 3-164 | 3688 | Arg-8 to Ser-20. | H0038: 2 | | |
| HTEDO59 | 964379 | 1002 | 130-231 | 3689 | | H0553: 1 and H0038: 1. | | |
| HTEDP15 | 870675 | 1003 | 1-321 | 3690 | | H0038: 4 | | |
| HTEDP31 | 870548 | 1004 | 68-337 | 3691 | | H0038: 1 and H0616: 1. | | |
| HTEDP32 | 839532 | 1005 | 152-322 | 3692 | Ser-9 to Ala-15. | H0038: 2 | | |
| HTEDP83 | 536821 | 1006 | 1-345 | 3693 | | H0038: 2 | | |
| HTEDQ30 | 530589 | 1007 | 3-206 | 3694 | | AR061: 7, AR089: 3 | | |
| | | | | | | L0758: 4, H0038: 2 | | |
| | | | | | | and H0616: 1. | | |
| HTEDQ72 | 795332 | 1008 | 53-475 | 3695 | Pro-11 to Cys-28, | H0616: 2, H0038: 1 | | |
| | | | | | Ser-41 to Leu-55, | and L0758: 1. | | |
| | | | | | Pro-58 to Asn-63, | | | |
| | | | | | Phe-67 to Ser-77. | | | |
| HTEDQ83 | 530586 | 1009 | 318-494 | 3696 | | H0038: 2 | | |
| HTEDR71 | 761585 | 1010 | 88-171 | 3697 | | L0070: 2, H0038: 1 | | |
| | | | | | | and H0616: 1. | | |
| HTEDR91 | 530451 | 1011 | 53-238 | 3698 | Ala-25 to Thr-32, | H0038: 2 | | |
| | | | | | Lys-46 to Gly-52. | | | |
| HTEDU45 | 870708 | 1012 | 137-706 | 3699 | Ile-2 to Gly-8. | L0731: 6, L0758: 3, | | |
| | | | | | | H0618: 1, H0038: 1 and | | |
| | | | | | | L0794: 1. | | |
| HTEDU48 | 832315 | 1013 | 2-730 | 3700 | Lys-16 to Ser-22. | H0038: 2 and H0616: 2. | | |
| HTEDV02 | 921114 | 1014 | 3-164 | 3701 | | H0038: 2 | | |
| HTEDX22 | 523959 | 1015 | 324-566 | 3702 | Phe-37 to Ser-49. | H0038: 3, L0438: 2, | | |
| | | | | | | H0616: 1 and L0439: 1. | | |
| HTEDX55 | 530452 | 1016 | 172-357 | 3703 | Arg-1 to Asn-13, | H0038: 2 | | |
| | | | | | Met-37 to Pro-47. | | | |
| HTEDY38 | 771505 | 1017 | 3-140 | 3704 | Lys-28 to Lys-41. | H0616: 2 and H0038: 1. | | |
| HTEDY54 | 922964 | 1018 | 151-762 | 3705 | Asp-67 to Asn-72, | H0616: 3, L0759: 3, | | |
| | | | | | Pro-113 to Gly-121. | H0038: 1, L0774: 1 and | | |
| | | | | | | L0777: 1. | | |
| HTEDY57 | 530580 | 1019 | 189-326 | 3706 | Glu-11 to Gln-18. | H0038: 2 | | |
| HTEEA03 | 925399 | 1020 | 86-199 | 3707 | His-1 to His-10. | H0169: 2 and H0038: 1. | | |
| HTEEB18 | 523962 | 1021 | 271-549 | 3708 | Gln-9 to Asn-26. | H0038: 2 and L0779: 1. | | |
| HTEEB33 | 924818 | 1022 | 100-615 | 3709 | His-19 to Lys-55, | H0038: 5 and H0618: 1. | | |
| | | | | | Pro-72 to Ser-84, | | | |
| | | | | | Ser-92 to Gly-104, | | | |
| | | | | | Ser-111 to Asp-124, | | | |
| | | | | | Thr-129 to His-141. | | | |
| HTEEC10 | 968517 | 1023 | 1-216 | 3710 | Ser-1 to Gly-14, | H0038: 2 and H0616: 1. | | |
| | | | | | Lys-28 to Ser-37. | | | |
| HTEEE65 | 530157 | 1024 | 202-384 | 3711 | | H0038: 2, L0758: 2 | | |
| | | | | | | and L0779: 1. | | |
| HTEEF31 | 924840 | 1025 | 88-345 | 3712 | Pro-5 to Gln-13, | H0038: 2 | | |
| | | | | | Thr-40 to Arg-45, | | | |
| | | | | | Thr-52 to Gln-57, | | | |
| | | | | | Phe-59 to Gly-64. | | | |
| HTEEH31 | 507814 | 1026 | 72-215 | 3713 | Glu-9 to Val-15, | H0038: 3 | | |
| | | | | | Glu-24 to Pro-30. | | | |
| HTEEU23 | 524059 | 1027 | 2-328 | 3714 | Pro-8 to Leu-13. | H0038: 2 | | |
| HTEEU52 | 530199 | 1028 | 128-343 | 3715 | Pro-32 to Asp-39, | H0038: 1 and H0616: 1. | | |
| | | | | | Lys-57 to Gly-65. | | | |
| HTEEU88 | 698315 | 1029 | 106-240 | 3716 | Ser-1 to Ser-8, | H0038: 3 | | |
| | | | | | Ser-11 to Trp-19. | | | |
| HTEEU92 | 960127 | 1030 | 136-393 | 3717 | Asn-2 to Lys-8, | H0038: 2 and L0779: 1. | | |
| | | | | | Lys-16 to Asp-23, | | | |
| | | | | | Arg-28 to His-51. | | | |
| HTEEV53 | 523957 | 1031 | 48-311 | 3718 | Pro-24 to Ala-38. | H0038: 2 | | |
| HTEEW73 | 917206 | 1032 | 55-507 | 3719 | | H0038: 4, L0779: 2, | | |
| | | | | | | L0758: 2 and L0618: 1. | | |
| HTEEZ95 | 530095 | 1033 | 1-147 | 3720 | | H0038: 2 | | |
| HTEFJ53 | 935982 | 1034 | 103-222 | 3721 | | H0038: 2 | | |
| HTEFM31 | 771355 | 1035 | 298-429 | 3722 | | H0616: 2 and H0038: 1. | | |
| HTEFN15 | 959854 | 1036 | 266-493 | 3723 | | H0038: 2 and H0616: 1. | | |
| HTEFO32 | 529272 | 1037 | 150-73 | 3724 | Phe-3 to Val-24. | H0038: 2 | | |
| HTEFO76 | 770270 | 1038 | 240-416 | 3725 | | H0038: 1 and H0616: 1. | | |
| HTEFP14 | 659369 | 1039 | 3-260 | 3726 | | H0038: 4 and H0616: 1. | | |
| HTEFP50 | 507219 | 1040 | 124-321 | 3727 | Met-41 to Ile-46. | L0776: 3 and H0038: 2. | | |
| HTEFP61 | 711399 | 1041 | 119-352 | 3728 | Arg-1 to Gln-22. | H0038: 3 | | |
| HTEFS60 | 836010 | 1042 | 1-168 | 3729 | | H0038: 1 and H0616: 1. | | |
| HTEFU46 | 920604 | 1043 | 118-195 | 3730 | | H0038: 2 | | |
| HTEFW55 | 787550 | 1044 | 273-662 | 3731 | | H0616: 4 and H0038: 1. | | |
| HTEFW56 | 528019 | 1045 | 35-358 | 3732 | Arg-1 to Asp-7, | H0308: 2 and H0616: 1. | | |
| | | | | | Trp-24 to Cys-29, | | | |
| | | | | | Ser-68 to Ile-73. | | | |
| HTEFW78 | 961061 | 1046 | 1-279 | 3733 | Arg-3 to Leu-10, | H0038: 1 and H0616: 1. | | |
| | | | | | Gln-34 to Glu-41, | | | |
| | | | | | Ile-48 to Ser-53. | | | |
| HTEFX53 | 842047 | 1047 | 268-35 | 3734 | Lys-1 to Thr-6. | H0038: 3 | | |
| HTEGA13 | 656077 | 1048 | 2-139 | 3735 | | H0038: 3 | 2q37.3 | |
| HTEGA17 | 964198 | 1049 | 2-1519 | 3736 | Val-11 to Ser-19. | H0038: 15, L0758: 5, | | |
| | | | | | | H0618: 1, H0253: 1, | | |
| | | | | | | L0151: 1 and L0768: 1. | | |
| HTEGA43 | 715583 | 1050 | 190-306 | 3737 | Lys-7 to Tyr-19. | H0038: 2 | | |
| HTEGA47 | 503300 | 1051 | 2-298 | 3738 | Lys-6 to Lys-16, | H0038: 2, L0779: 2 | | |
| | | | | | Arg-44 to Gln-51, | and L0758: 2. | | |
| | | | | | Asn-57 to Phe-63, | | | |
| | | | | | Ser-84 to Trp-89. | | | |
| HTEGD11 | 967698 | 1052 | 190-468 | 3739 | Gln-6 to Ser-11, | H0038: 1 and H0616: 1. | | |
| | | | | | Ser-15 to Gly-31, | | | |
| | | | | | Ser-69 to Lys-93. | | | |
| HTEGE44 | 528017 | 1053 | 2-334 | 3740 | Asn-1 to Pro-9. | H0038: 2 | | |
| HTEGF78 | 614242 | 1054 | 210-407 | 3741 | Thr-1 to Ala-7. | H0038: 2 | | |
| HTGEF95 | 796660 | 1055 | 76-267 | 3742 | Glu-25 to Trp-31, | H0038: 1 and H0616: 1. | | |
| HTEGG07 | 954115 | 1056 | 144-335 | 3743 | | H0038: 2 | | |
| HTEGG61 | 528007 | 1057 | 2-217 | 3744 | | H0038: 2 | | |
| HTEGK51 | 520046 | 1058 | 3-143 | 3745 | Pro-13 to Lys-25. | H0038: 2 | | |
| HTEGM38 | 675087 | 1059 | 84-263 | 3746 | Ala-15 to Tyr-24, | AR089: 1, AR061: 0 | 11q25 | 602782 |
| | | | | | His-32 to Asp-39. | H0038: 2 | | |
| HTEGN63 | 520037 | 1060 | 1-183 | 3747 | Asn-38 to Glu-47. | H0038: 2 | | |
| HTEGO05 | 932583 | 1061 | 3-884 | 3748 | Pro-12 to Tyr-21. | AR089: 1, AR061: 0 | | |
| | | | | | | H0038: 2, L0745: 2 | | |
| | | | | | | and H0616: 1. | | |
| HTEGQ21 | 923059 | 1062 | 134-433 | 3749 | Lys-28 to Lys-34, | L0794: 15, H0616: 13, | | |
| | | | | | Glu-42 to Ser-48, | H0038: 7, H0253: 1 and | | |
| | | | | | Ser-53 to Phe-63. | L0758: 1. | | |
| HTEGQ74 | 573865 | 1063 | 2-187 | 3750 | Val-3 to Ser-8. | H0038: 2 | | |
| | | | | | Cys-35 to Lys-45. | | | |
| HTEGR56 | 959871 | 1064 | 23-196 | 3751 | Glu-8 to Ile-22. | H0038: 2 | | |
| HTEGR88 | 871611 | 1065 | 160-402 | 3752 | | H0038: 3 | | |
| HTEGS16 | 527914 | 1066 | 131-352 | 3753 | | H0038: 2 | | |
| HTEGS34 | 458520 | 1067 | 220-405 | 3754 | Pro-35 to Glu-43, | H0038: 2, L0758: 2, | | |
| | | | | | Gly-52 to His-57. | H0294: 1 and H0616: 1. | | |
| HTEGS93 | 506653 | 1068 | 155-355 | 3755 | | H0038: 2 | | |
| HTEGT29 | 870638 | 1069 | 200-367 | 3756 | Arg-1 to Thr-11. | H0038: 3 and L0758: 1. | | |
| HTEGT33 | 716783 | 1070 | 170-463 | 3757 | | H0038: 2 and L0758: 2. | | |
| HETGU13 | 520041 | 1071 | 2-205 | 3758 | Ala-1 to Tyr-14, | H0038: 3 and H0616: 1. | | |
| | | | | | Thr-28 to Ser-60. | | | |
| HTEGU32 | 524053 | 1072 | 39-506 | 3759 | Asn-44 to Asp-49, | H0253: 8, H0038: 2, | | |
| | | | | | Ala-91 to Thr-97. | H0179: 1, L0151: 1 and | | |
| | | | | | | L0758: 1. | | |
| HTEGU62 | 573885 | 1073 | 3-98 | 3760 | | H0038: 2 and H0616: 1. | | |
| HTEGU93 | 764831 | 1074 | 194-595 | 3761 | | H0038: 8, L0758: 5, | | |
| | | | | | | L0794: 4, H0616: 2, | | |
| | | | | | | L0763: 1 and L0777: 1. | | |
| HTEGV08 | 959888 | 1075 | 220-399 | 3762 | Thr-14 to Gln-20, | H0038: 2 | | |
| | | | | | Cys-23 to Glu-31. | | | |
| HTEGV60 | 822954 | 1076 | 80-418 | 3763 | Tyr-12 to Phe-17, | H0038: 1 and H0616: 1. | | |
| | | | | | Pro-32 to Asp-39. | | | |
| HTEGV84 | 870240 | 1077 | 234-449 | 3764 | | L0758: 8, H0038: 3, | | |
| | | | | | | H0618: 2, H0616: 2 and | | |
| | | | | | | H0253: 1. | | |
| HTEGW41 | 573880 | 1078 | 1-243 | 3765 | Ser-24 to Gln-30, | H0038: 2 | 20q13.2-q13.3 | 118504, |
| | | | | | Asn-38 to Leu-44, | | | 118504, |
| | | | | | Pro-46 to Glu-59. | | | 131242, |
| | | | | | | | | 139320, |
| | | | | | | | | 139320, |
| | | | | | | | | 139320, |
| | | | | | | | | 139320, |
| | | | | | | | | 602025, |
| | | | | | | | | 602235 |
| HTEGW94 | 794350 | 1079 | 1-351 | 3766 | Gly-1 to Ile-7, | H0038: 3 and H0616: 2. | | |
| | | | | | Pro-76 to Ala-82, | | | |
| | | | | | Asn-86 to Ile-91. | | | |
| HTEGX74 | 783829 | 1080 | 200-556 | 3767 | Asn-1 to Asp-9, | L0758: 5, H0038: 3, | | |
| | | | | | Pro-17 to Cys-23. | H0618: 1, H0616: 1, | | |
| | | | | | | L0768: 1 and L0794: 1. | | |
| HTEGY01 | 917214 | 1081 | 2-388 | 3768 | Arg-87 to Tyr-92. | H0038: 1 and H0616: 1. | | |
| HTEGY85 | 573849 | 1082 | 91-312 | 3769 | | H0038: 2 | | |
| HTEHB07 | 870707 | 1083 | 90-350 | 3770 | Gly-23 to Lys-29. | H0038: 5 | | |
| HTEHC20 | 526704 | 1084 | 198-326 | 3771 | | H0038: 3 | | |
| HTEHC47 | 973071 | 1085 | 719-84 | 3772 | Ser-32 to Thr-37, | AR050: 13, AR051: 13, | | |
| | | | | | Ser-161 to Cys-167. | AR061: 3, AR054: 1, | | |
| | | | | | | AR089: 1 | | |
| | | | | | | L0758: 5, H0616: 2 | | |
| | | | | | | and H0038: 1. | | |
| HTEHC60 | 965998 | 1086 | 74-358 | 3773 | Thr-44 to Ala-49, | H0616: 3 and H0038: 2. | | |
| | | | | | Pro-60 to Arg-67, | | | |
| | | | | | Asp-83 to Lys-95. | | | |
| HTEH78 | 573882 | 1087 | 2-256 | 3774 | Ala-1 to Leu-9, | H0038: 2 | | |
| | | | | | Thr-11 to Gly-19, | | | |
| | | | | | Arg-31 to Thr-39, | | | |
| | | | | | Gln-44 to Ser-58. | | | |
| HTEHE60 | 795264 | 1088 | 2-223 | 3775 | Glu-57 to Pro-63. | H0038: 1 and H0616: 1. | | |
| HTEHE67 | 784926 | 1089 | 143-652 | 3776 | Ala-2 to Asn-7, | H0616: 2, H0038: 1 | | |
| | | | | | Glu-47 to Ile-62, | and L0794: 1. | | |
| | | | | | Pro-71 to Trp-81, | | | |
| | | | | | Gly-83 to Glu-88. | | | |
| HTEHE78 | 932312 | 1090 | 194-301 | 3777 | Ser-1 to Arg-6, | H0038: 3 and L0518: 1. | | |
| HTEHE91 | 790342 | 1091 | 3-329 | 3778 | Gln-1 to Asp-17, | H0038: 2 | | |
| | | | | | Ser-51 to Arg-63, | | | |
| | | | | | Pro-70 to Asp-78, | | | |
| | | | | | Val-86 to Asn-93, | | | |
| | | | | | Pro-100 to Asp-105. | | | |
| HTEHF13 | 667224 | 1092 | 201-332 | 3779 | | H0038: 2 anD H0616: 1. | | |
| HTEHF66 | 836999 | 1093 | 2-436 | 3780 | Ala-1 to Tyr-6, | H0038: 4 | | |
| | | | | | Ala-88 to Asp-95. | | | |
| HTEHG44 | 933624 | 1094 | 57-695 | 3781 | | H0618: 1, L0023: 1, | | |
| | | | | | | H0038: 1, H0616: 1 and | | |
| | | | | | | L0758: 1. | | |
| HTEHI06 | 935984 | 1095 | 262-534 | 3782 | His-16 to Ser-22, | L0758: 3, H0038: 2 | | |
| | | | | | Ala-77 to Glu-83. | and L0747: 1. | | |
| HTEHI14 | 526687 | 1096 | 216-458 | 3783 | | AR089: 5, AR061: 5 | | |
| | | | | | | H0038: 4 | | |
| HTEHI54 | 533960 | 1097 | 3-350 | 3784 | Arg-1 to Gly-9, | H0038: 2 | | |
| | | | | | Pro-50 to Ala-56. | | | |
| HTEHI62 | 922559 | 1098 | 1-282 | 3782 | | H0038: 2 and H0616: 1. | | |
| HTEHI93 | 870629 | 1099 | 1-330 | 3786 | Lys-9 to Pro-14. | H0038: 3 | | |
| HTEHJ64 | 530749 | 1100 | 136-249 | 3787 | | H0038: 2 | | |
| HTEHK40 | 660875 | 1101 | 2-301 | 3788 | Thr-16 to Met-39. | H0038: 4 | | |
| HTEHK70 | 771432 | 1102 | 2-274 | 3789 | | H0038: 2 | | |
| HTEHK81 | 573866 | 1103 | 73-231 | 3790 | Gln-2 to Leu-8, | H0038: 2 | | |
| | | | | | Asp-42 to Gly-47. | | | |
| HTEHL96 | 573859 | 1104 | 3-404 | 3791 | Glu-17 to Trp-27, | H0038: 2 | | |
| | | | | | Leu-29 to Phe-34, | | | |
| | | | | | Leu-56 to Arg-61, | | | |
| | | | | | Asn-74 to Gly-83. | | | |
| HTEHO56 | 787521 | 1105 | 63-677 | 3792 | Pro-9 to Asp-16, | H0616: 2, H0038: 1 | | |
| | | | | | Gln-30 to Gln-36, | and T0069: 1. | | |
| | | | | | Pro-69 to Ile-74, | | | |
| | | | | | Val-78 to Pro-87, | | | |
| | | | | | Ala-99 to Lys-112, | | | |
| | | | | | Lys-117 to Gly-124. | | | |
| | | | | | Lys-130 to Val-147, | | | |
| | | | | | Ala-151 to Phe-156, | | | |
| | | | | | Lys-180 to Asp-186. | | | |
| HTEHP02 | 920625 | 1106 | 66-215 | 3793 | Glu-13 to Pro-27, | H0038: 2 and H0616: 2. | | |
| | | | | | Leu-30 to Arg-37. | | | |
| HTEHP20 | 967443 | 1107 | 37-285 | 3794 | Lys-5 to Glu-14, | L0758: 3, H0038: 2, | | |
| | | | | | Arg-53 to Lys-60, | H0616: 2 and L0794: 1. | | |
| | | | | | Met-77 to Gln-83. | | | |
| HTEHP50 | 531505 | 1108 | 7-126 | 3795 | Arg-2 to Arg-17. | H0038: 3 | | |
| HTEHP60 | 573853 | 1109 | 210-434 | 3796 | Glu-18 to Ser-26. | H0038: 2 | | |
| HTEHP67 | 751866 | 1110 | 1-135 | 3797 | | H0616: 2, H0038: 1 | | |
| | | | | | | and L0758: 1. | | |
| HTEHP80 | 573830 | 1111 | 3-320 | 3798 | His-1 to Ser-8, | H0038: 2 | | |
| | | | | | Asp-15 to Gln-50, | | | |
| | | | | | Val-54 to Ser-67, | | | |
| | | | | | Glu-76 to Lys-86, | | | |
| | | | | | Ala-90 to Arg-105. | | | |
| HTEHR83 | 573841 | 1112 | 3-197 | 3799 | Phe-43 to Glu-49. | H0038: 2 | | |
| HTEHS19 | 529280 | 1113 | 1-237 | 3800 | Gly-70 to Gly-75. | AR061: 5, AR089: 2 | | |
| | | | | | | H0038: 2 | | |
| HTEHU20 | 573813 | 1114 | 61-234 | 3801 | | H0038: 2, H0616: 2 | | |
| | | | | | | and L0758: 2. | | |
| HTEHU68 | 786378 | 1115 | 109-294 | 3802 | Lys-1 to Arg-6, | H0038: 1 and H0616: 1. | | |
| | | | | | Glu-23 to Arg-29. | | | |
| HTEHU73 | 870083 | 1116 | 76-276 | 3803 | | H0038: 2 | | |
| HTEHV72 | 920610 | 1117 | 1-357 | 3804 | Phe-32 to Asn-37, | AR061: 8, AR089: 3 | | |
| | | | | | Phe-73 to Tyr-79. | L0780: 3, L0759: 3, | | |
| | | | | | | H0038: 2, L0779: 2, | | |
| | | | | | | H0673: 1, L0803: 1, | | |
| | | | | | | L0804: 1, L0666: 1 and | | |
| | | | | | | H0648: 1. | | |
| HTEHV86 | 785652 | 1118 | 2-466 | 3805 | Ala-1 to Gly-8, | H0038: 1 and H0616: 1. | | |
| | | | | | Ser-52 to Lys-58, | | | |
| | | | | | Leu-81 to Asn-86. | | | |
| HTEHW03 | 924832 | 1119 | 181-453 | 3806 | | H0038: 2 | | |
| HTEHW21 | 760552 | 1120 | 2-163 | 3807 | | H0038: 3, L0774: 2 | | |
| | | | | | | and L0748: 1. | | |
| HTEHX03 | 924826 | 1121 | 15-410 | 3808 | Pro-4 to Lys-14, | H0616: 3, H0038: 2 | | |
| | | | | | Thr-17 to His-22, | and L0758: 1. | | |
| | | | | | Glu-25 to Arg-49, | | | |
| | | | | | Pro-78 to Gly-85, | | | |
| | | | | | Pro-120 to Phe-126. | | | |
| HTEHX32 | 772643 | 1122 | 3-215 | 3809 | Arg-19 to Asn-24, | L0758: 5, H0616: 3, | | |
| | | | | | Gly-30 to Gln-47. | H0038: 2, L0794: 2 and | | |
| | | | | | | H0253: 1. | | |
| HTEHX51 | 668553 | 1123 | 84-212 | 3810 | | H0038: 2 | | |
| HTEHX92 | 527167 | 1124 | 17-292 | 3811 | | H0038: 3 | | |
| HTEIA60 | 859130 | 1125 | 2-343 | 3812 | | H0618: 2, H0038: 1 | 16q24.1 | 256850 |
| | | | | | | and L0783: 1. | | |
| HTEIA80 | 721831 | 1126 | 10-225 | 3813 | | H0038: 3 | | |
| HTEIB14 | 963099 | 1127 | 3-308 | 3814 | Gln-1 to Ser-10, | AR061: 7, AR089: 4 | | |
| | | | | | Arg-18 to Thr-27, | H0038: 4, H0616: 3, | | |
| | | | | | Arg-36 to Gln-65. | L0747: 3, L0663: 2, | | |
| | | | | | | L0758: 2, H0369: 1, | | |
| | | | | | | H0428: 1, L0769: 1, | | |
| | | | | | | L0542: 1, L0809: 1, | | |
| | | | | | | L0666: 1, L0665: 1, | | |
| | | | | | | L0743: 1, L0777: 1, | | |
| | | | | | | L0731: 1 and S0456: 1. | | |
| HTEIF40 | 958355 | 1128 | 173-457 | 3815 | His-16 to Ser-21, | H0038: 4 and H0616: 4. | | |
| | | | | | Ser-33 to Gly-60, | | | |
| | | | | | Asp-87 to Glu-95. | | | |
| HTEIF68 | 573828 | 1129 | 139-249 | 3816 | Ser-5 to Ile-17. | H0038: 2 | | |
| HTEIG32 | 699470 | 1130 | 135-326 | 3817 | Leu-41 to Arg-55. | H0038: 3 | | |
| HEITH70 | 573826 | 1131 | 58-192 | 3818 | | H0038: 2 | | |
| HTEIJ17 | 520113 | 1132 | 3-311 | 3819 | Thr-65 to Thr-71, | H0038: 3 and H0616: 1. | | |
| | | | | | Arg-92 to Glu-99. | | | |
| HTEIJ41 | 712520 | 1133 | 1-186 | 3820 | Ser-7 to Ile-13, | H0038: 1, H0616: 1 | | |
| | | | | | Arg-21 to His-26, | and L0731: 1. | | |
| | | | | | Met-33 to Ser-49. | | | |
| HTEIJ73 | 958241 | 1134 | 40-255 | 3821 | Pro-38 to Gln-54. | H0038: 1 and H0616: 1. | | |
| HTEIJ77 | 772402 | 1135 | 1-69 | 3822 | | H0038: 1 and H0616: 1. | | |
| HTEIK11 | 967431 | 1136 | 149-409 | 3823 | His-8 to Ala-24, | H0038: 2 and H0032: 1. | | |
| | | | | | Thr-26 to Lys-33. | | | |
| HTEIK70 | 530454 | 1137 | 2-121 | 3824 | Thr-24 to Thr-39. | H0038: 2 | | |
| HTEIK90 | 789121 | 1138 | 104-292 | 3825 | Thr-41 to Lys-46, | H0038: 1 and H066: 1. | | |
| HTEIL07 | 953803 | 1139 | 42-443 | 3826 | Glu-13 to Thr-27. | AR061: 1, AR089: 0 | | |
| | | | | | | L0758: 4, L0617: 2, | | |
| | | | | | | L0794: 2, H0253: 1, | | |
| | | | | | | H0038: 1, H0616: 1, | | |
| | | | | | | L0789: 1 and L0779: 1. | | |
| HTEIL48 | 523681 | 1140 | 83-271 | 3827 | | H0038: 3 | | |
| HTEIL70 | 520045 | 1141 | 2-331 | 3828 | Lys-15 to Lys-29, | H0038: 2 | | |
| | | | | | Lys-36 to Thr-42, | | | |
| | | | | | Val-48 to Thr-55, | | | |
| | | | | | Gln-61 to Glu-80. | | | |
| HTEIL71 | 760551 | 1142 | 1-246 | 3829 | Gly-1 to Gly-6, | H0616: 2 and H0038: 1. | | |
| | | | | | Leu-28 to Asn-33. | | | |
| HTEIN68 | 753210 | 1143 | 74-346 | 3830 | Gly-1 to Gly-6, | H0038: 2 | | |
| | | | | | Pro-12 to Pro-17, | | | |
| | | | | | Arg-27 to Pro-40. | | | |
| HTEIN95 | 839884 | 1144 | 159-545 | 3831 | Asn-28 to Asn-33. | H0038: 1 and H0616: 1. | | |
| HTEIO02 | 920622 | 1145 | 3-347 | 3832 | His-1 to Arg-11. | H0038: 2 and H0616: 1. | | |
| HTEIO12 | 653244 | 1146 | 152-334 | 3833 | Phe-27 to Glu-39. | H0038: 3 | | |
| HTEIO28 | 573803 | 1147 | 159-356 | 3834 | | H0038: 2 | | |
| HTEIP88 | 941155 | 1148 | 1-252 | 3835 | Met-23 to Thr-30. | AR089: 1, AR061: 0 | | |
| | | | | | | H0038: 2 and H0253: 1. | | |
| HTEIP92 | 523892 | 1149 | 194-370 | 3836 | | H0038: 4 | | |
| HTEIQ74 | 765794 | 1150 | 232-462 | 3837 | Lys-1 to Trp-10. | H0038: 1 and H0616: 1. | | |
| HTEIR33 | 928058 | 1151 | 41-472 | 3838 | Arg-24 to Glu-38, | H0616: 5, H0038: 2 | | |
| | | | | | Arg-46 to Ser-52, | and H0253: 1. | | |
| | | | | | Pro-74 to Glu-80, | | | |
| | | | | | Pro-118 to Ser-126. | | | |
| HTEIS65 | 573775 | 1152 | 300-458 | 3839 | Glu-15 to Lys-29. | H0038: 2 | | |
| HTEIU75 | 779163 | 1153 | 305-547 | 3840 | | H0038: 1 and H0616: 1. | | |
| HTEIU92 | 870652 | 1154 | 1-339 | 3841 | Asp-5 to Arg-13, | AR061: 3, AR089: 1 | | |
| | | | | | Thr-37 to Ser-45. | H0038: 3 | | |
| HTEIV54 | 922027 | 1155 | 2-712 | 3842 | Ala-1 to Arg-9, | H0616: 8, L0751: 6, | | |
| | | | | | Thr-14 to Trp-20, | L0753: 6, L0776: 4, | | |
| | | | | | Arg-46 to His-53, | L0758: 4, H0038: 3, | | |
| | | | | | Pro-58 to Glu-67, | L0759: 2, S0222: 1, | | |
| | | | | | Tyr-80 to Pro-86, | L0770: 1, L0779: 1, | | |
| | | | | | Ile-151 to Pro-160. | L0731: 1 anD L0608: 1. | | |
| HTEIV86 | 784657 | 1156 | 1-231 | 3843 | Arg-16 to Ser-23, | L0779: 2, H0038: 1 | | |
| | | | | | Cys-30 to Arg-35, | and H0616: 1. | | |
| | | | | | Arg-51 to Arg-57, | | | |
| | | | | | Gly-62 to Thr-68. | | | |
| HTEIW27 | 829698 | 1157 | 124-423 | 3844 | | H0038: 6 and H0616: 1. | | |
| HTEIW37 | 573891 | 1158 | 68-352 | 3845 | | H0038: 2 | | |
| HTEIX28 | 836011 | 1159 | 204-554 | 3846 | His-33 to Gly-42. | H0038: 2, L0758: 2, | | |
| | | | | | | L0776: 1, L0809: 1, | | |
| | | | | | | L0438: 1, H0658: 1 and | | |
| | | | | | | L0756: 1. | | |
| HTEIX85 | 864251 | 1160 | 2-226 | 3847 | | H0038: 2 | | |
| HTEIY52 | 963536 | 1161 | 58-216 | 3848 | Gly-43 to Ser-48. | H0038: 1 and H0616: 1. | | |
| HTEIY69 | 577783 | 1162 | 2-355 | 3849 | Pro-7 to Pro-20, | H0038: 2 | | |
| | | | | | Pro-33 to Leu-49. | | | |
| HTEIY80 | 955242 | 1163 | 188-460 | 3850 | Thr-7 to Glu-16, | H0038: 3 and L0758: 1. | | |
| | | | | | Lys-24 to Asp-34, | | | |
| | | | | | Thr-40 to Glu-48, | | | |
| | | | | | Leu-52 to Lys-57. | | | |
| HTEIZ76 | 523764 | 1164 | 144-386 | 3851 | Leu-5 to Gly-13. | H0038: 3, H0616: 1 | | |
| | | | | | | and L0758: 1. | | |
| HTEJB20 | 528015 | 1165 | 115-348 | 3852 | | H0038: 2 | | |
| HTEJB25 | 530590 | 1166 | 216-377 | 3853 | | H0038: 2 | | |
| HTEJB81 | 870644 | 1167 | 3-269 | 3854 | Gly-47 to Ile-53. | H0038: 2 | | |
| HTEJC28 | 573774 | 1168 | 167-304 | 3855 | Trp-14 to Glu-21, | H0038: 2 and H0616: 1. | | |
| | | | | | Gly-29 tp Arg-36. | | | |
| HTEJC95 | 772989 | 1169 | 156-377 | 3856 | | H0616: 2 and H0038: 1. | | |
| HTEJE15 | 908360 | 1170 | 2-319 | 3857 | | AR061: 4, AR089: 1 | | |
| | | | | | | L0758: 7, L0794: 4, | | |
| | | | | | | H0038: 2 and L0791: 1. | | |
| HTEJE50 | 520049 | 1171 | 2-242 | 3858 | Lys-9 to Lys-23, | H0038: 2 | | |
| | | | | | Lys-30 to Lys-35. | | | |
| HTEJF45 | 942476 | 1172 | 122-643 | 3859 | Ser-11 to Ala-19, | AR089: 21, AR061: 15 | | |
| | | | | | Glu-24 to Leu-33, | H0038: 2 | | |
| | | | | | Pro-37 to Pro-45. | | | |
| HTEJG24 | 526278 | 1173 | 79-276 | 3860 | | H0038: 2 | | |
| HTEJJ43 | 774243 | 1174 | 148-384 | 3861 | | H0038: 2and H0616: 1. | | |
| HTEJL21 | 573742 | 1175 | 415-173 | 3862 | Gly-1 to Leu-9, | L0758: 12, L0794: 6, | | |
| | | | | | Cys-15 to Arg-26, | H0038: 2, L0789: 2, | | |
| | | | | | Pro-44 to Arg-50. | L0752: 2, L0803: 1 and | | |
| | | | | | | L0779: 1. | | |
| HTEJM56 | 952255 | 1176 | 115-294 | 3863 | Thr-17 to Ala-24. | H0038: 1 and H0616: 1. | | |
| HTEJN10 | 958389 | 1177 | 63-368 | 3864 | Thr-1 to Trp-9, | H0038: 2 and H0616: 1. | | |
| | | | | | Glu-12 to Arg-17, | | | |
| | | | | | Pro-23 to Gln-40. | | | |
| HTEJN49 | 558383 | 1178 | 1-126 | 3865 | | H0038: 2 | | |
| HTEJN96 | 573845 | 1179 | 169-354 | 3866 | Thr-13 to Asn-19. | H0038: 2 | | |
| HTEJP10 | 914785 | 1180 | 2-418 | 3867 | His-1 to Cys-7. | H0038: 2 | | |
| HTEJP66 | 916481 | 1181 | 475-645 | 3868 | | H0038: 1 and H0616: 1. | | |
| HTEJP71 | 767955 | 1182 | 1-534 | 3869 | Gln-12 to Ser-20. | H0415: 1 and H0038: 1. | | |
| HTEJT37 | 530596 | 1183 | 3-194 | 3870 | His-1 to Ser-15, | H0038: 2 and L0747: 1. | | |
| | | | | | Glu-29 to Lys-46, | | | |
| | | | | | Pro-51 to Glu-63. | | | |
| HTEJT74 | 676254 | 1184 | 1-450 | 3871 | Pro-14 to Ser-31. | H0038: 2 | | |
| HTEJU30 | 573823 | 1185 | 1-219 | 3872 | Lys-1 to Ser-6, | H0038: 2 and H0616: 1. | | |
| | | | | | Glu-22 to Ser-28, | | | |
| | | | | | Ser-48 to Arg-56. | | | |
| HTEJV62 | 694525 | 1186 | 23-337 | 3873 | Gly-11 to Thr-17. | H0038: 2 | | |
| HTEJX78 | 806395 | 1187 | 2-388 | 3874 | Glu-2 to Thr-11, | H0038: 2 | | |
| | | | | | Asn-35 to Gly-41, | | | |
| | | | | | Thr-57 to Asn-63, | | | |
| | | | | | Pro-73 to Glu-88, | | | |
| | | | | | Pro-101 to Phe-110. | | | |
| HTEJY21 | 530156 | 1188 | 3-440 | 3875 | Pro-9 to Trp-16, | H0616: 3, H0038: 2 | | |
| | | | | | Trp-18 to Gly-25. | and H0658:1. | | |
| HTEJY27 | 685272 | 1189 | 1-252 | 3876 | Arg-3 to Ala-10, | L0758: 4, L0779: 3 and | | |
| | | | | | Asp-25 to Trp-31. | H0038: 2. | | |
| HTEJZ26 | 523818 | 1190 | 2-121 | 3877 | Ala-1 to Pro-7, | H0038: 2 and H0616: 1. | | |
| | | | | | Arg-13 to Ser-22. | | | |
| HTEKC07 | 920925 | 1191 | 76-402 | 3878 | Arg-1 to Pro-12, | H0038: 2 | | |
| | | | | | Trp-42 to Thr-47. | | | |
| HTEKC12 | 815975 | 1192 | 1-291 | 3879 | Gly-1 to Trp-6, | H0038: 2 | | |
| | | | | | Pro-12 to Ser-20. | | | |
| HTEKD04 | 519938 | 1193 | 147-338 | 3880 | Arg-7 to Ser-12, | H0038: 5 | | |
| | | | | | Trp-36 to Pro-60. | | | |
| HTEKE41 | 974044 | 1194 | 103-315 | 3890 | Glu-29 to Ser-36, | H0616: 2 and H0038: 1. | | |
| | | | | | Cys-49 to Thr-71. | | | |
| HTEKE46 | 870084 | 1195 | 753-1043 | 3882 | Pro-22 to His-28. | H0038: 2 and H0618: 1. | | |
| HTEKE80 | 790381 | 1196 | 130-438 | 3883 | Glu-19 to Tyr-36, | H0616: 3 and H0038: 2. | | |
| | | | | | Glu-48 to Lys-53. | | | |
| HTEKF04 | 774260 | 1197 | 1-594 | 3884 | Phe-1 to Gly-19, | L0758: 5, H0616: 3 | | |
| | | | | | Gln-21 to Glu-31, | and H0038: 2. | | |
| | | | | | Arg-79 to Lys-92, | | | |
| | | | | | Ser-135 to Leu-145. | | | |
| HTEKF24 | 573750 | 1198 | 103-267 | 3885 | Arg-43 to Phe-48. | H0038: 2 | 1p13 | 102770, |
| | | | | | | | | 188540, |
| | | | | | | | | 600234, |
| | | | | | | | | 601414, |
| | | | | | | | | 601691, |
| | | | | | | | | 601691, |
| | | | | | | | | 601691, |
| | | | | | | | | 601691, |
| | | | | | | | | 601718, |
| | | | | | | | | 602094 |
| HTEKF35 | 573749 | 1199 | 27-233 | 3886 | Pro-28 to Gly-33, | H0038: 2 | | |
| | | | | | Asp-35 to Leu-51, | | | |
| | | | | | Leu-61 to Thr-69. | | | |
| HTEKF68 | 772997 | 1200 | 1-291 | 3887 | Glu-12 to Glu-19. | H0038: 2and H0616: 1. | | |
| HTEKI01 | 917176 | 1201 | 3-344 | 3888 | | H0038: 2 | | |
| HTEKI70 | 503039 | 1202 | 257-682 | 3889 | Ala-24 to Tyr-31, | H0038: 3, L0758: 2, | | |
| | | | | | Gln-38 to Lys-43. | H0253: 1, H0616: 1, | | |
| | | | | | | L0794: 1, L0803: 1, | | |
| | | | | | | L0748: 1 and L0588: 1. | | |
| HTEKJ48 | 530588 | 1203 | 2-247 | 3890 | Pro-7 to Gln-16, | H0038: 2 | | |
| | | | | | Arg-19 to Gly-32, | | | |
| | | | | | Pro-34 to Glu-45, | | | |
| | | | | | Phe-56 to Leu-65. | | | |
| HTEKM14 | 745257 | 1204 | 1-264 | 3891 | Lys-34 to Ala-42. | H0038: 3 and H0616: 1. | | |
| HTEKO49 | 723148 | 1205 | 3-251 | 3892 | Pro-8 to Thr-14. | H0038: 1 and H0616: 1. | | |
| HTEKQ26 | 870627 | 1206 | 31-165 | 3893 | | H0038: 2 | | |
| HTEKQ85 | 784444 | 1207 | 348-569 | 3894 | Lys-62 to Ser-67. | H0038: 1 and H0616: 1. | | |
| HTEKR75 | 870555 | 1208 | 139-318 | 3895 | | H0038: 1 and H0616: 1. | | |
| HTEKS15 | 529273 | 1209 | 290-427 | 3896 | | H0038: 2 | | |
| HTEKS20 | 845714 | 1210 | 3-569 | 3897 | Pro-9 to Arg-14, | AR061: 2, AR089: 1 | | |
| | | | | | Phe-34 to Ile-39, | L0758: 14, H0038: 5, | | |
| | | | | | Arg-41 to Lys-47, | L0774: 4, L0794: 2 and | | |
| | | | | | Leu-49 to Gly-55, | H0616: 1. | | |
| | | | | | Lys-104 to Lys-110, | | | |
| | | | | | Asp-119 to Gly-124. | | | |
| HTEKS21 | 506651 | 1211 | 113-346 | 3898 | Val-1 to Val-8, | H0618: 3, H0253: 1 | | |
| | | | | | Arg-36 to Pro-41, | and H0038: 1. | | |
| | | | | | Thr-50 to Leu-55. | | | |
| HTEKS76 | 767658 | 1212 | 166-399 | 3899 | Ser-9 to Ser-17, | H0038: 1 and H0616: 1. | | |
| | | | | | Leu-48 to Cys-54. | | | |
| HTEKX06 | 935945 | 1213 | 87-263 | 3900 | Gly-46 to Glu-58. | H0038: 1 and H0616: 1. | | |
| HTEKX08 | 959876 | 1214 | 118-375 | 3901 | Glu-37 to Asp-46. | L0758: 10, H0038: 3, | | |
| | | | | | | L0794: 2, H0618: 1, | | |
| | | | | | | H0253: 1 and H0616: 1. | | |
| HTEKX28 | 920927 | 1215 | 108-257 | 3902 | | H0038: 2 and L0758: 1. | | |
| HTEKX70 | 573700 | 1216 | 68-259 | 3903 | | H0038: 2 | | |
| HTEKZ50 | 524054 | 1217 | 98-280 | 3904 | Ile-9 to Asn-20, | H0038: 2 | | |
| | | | | | Ala-22 to Asp-29. | | | |
| HTELA50 | 774268 | 1218 | 49-195 | 3905 | Lys-8 to Lys-14. | H0616: 4, L0803: 1 | | |
| | | | | | | and L0731: 1. | | |
| HTELD47 | 934272 | 1219 | 165-536 | 3906 | | H0616: 3 and L0519: 2. | | |
| HTELD82 | 779315 | 1220 | 79-267 | 3907 | Arg-1 to Ser-6. | H0616: 2 | | |
| HTELE10 | 963563 | 1221 | 157-438 | 3908 | | H0616: 3 | | |
| HTELE41 | 791743 | 1222 | 260-475 | 3909 | Ala-8 to Ser-13. | H0616: 5 | | |
| HTELG47 | 757740 | 1223 | 279-455 | 3910 | Pro-2 to Asp-7. | H0038: 1 and H0616: 1. | | |
| HTELG57 | 870621 | 1224 | 1-318 | 3911 | Val-17 to Val-23, | H0616: 2 and H0038: 1. | | |
| | | | | | Phe-34 to Tyr-46, | | | |
| | | | | | Thr-62 to His-67. | | | |
| HTELG80 | 773018 | 1225 | 3-107 | 3912 | Val-1 to Thr-12. | H0616: 2 | | |
| HTELH44 | 766462 | 1226 | 351-542 | 3913 | Gln-9 to His-21. | H0038: 1, H0616: 1 | | |
| | | | | | | and L0745: 1. | | |
| HTELI03 | 923071 | 1227 | 421-588 | 3914 | Glu-27 to Thr-34. | H0038: 1 and H0616:1. | | |
| HTELI51 | 806403 | 1228 | 318-554 | 3915 | | H0616: 2 and L0749: 1. | | |
| HTELJ89 | 966134 | 1229 | 86-361 | 3916 | Asn-1 to Gln-7. | H0616: 4 and L0758: 3. | | |
| | | | | | Phe-27 to Gly-38, | | | |
| | | | | | Pro-61 to Gly-68. | | | |
| HTELK14 | 794339 | 1230 | 3-449 | 3917 | | H0038: 1 and H0616: 1. | | |
| HTELK50 | 870552 | 1231 | 9-239 | 3918 | Arg-21 to Phe-28. | H0616: 2 | | |
| HTELK68 | 923055 | 1232 | 107-349 | 3919 | | H0616: 2 | | |
| HTELL48 | 783824 | 1233 | 181-294 | 3920 | | H0616: 4 | | |
| HTELL51 | 952267 | 1234 | 394-648 | 3921 | | H0616: 2 | | |
| HTELL90 | 952269 | 1235 | 357-626 | 3922 | Asn-56 to Ser-66. | H0616: 3 and L0779: 1. | | |
| HTELM89 | 786268 | 1236 | 75-302 | 3923 | Asp-19 to Lys-24. | H0038: 2 and H0616: 1. | 18 | |
| HTELO20 | 926910 | 1237 | 117-434 | 3924 | Leu-21 to Gly-26, | H0616: 11 and H0038: 1. | | |
| | | | | | His-101 to Trp-106. | | | |
| HTEL051 | 931120 | 1238 | 2-166 | 3925 | Ser-21 to Aer-29. | H0616:4 | | |
| | | | | | Ala-43 to Asn-49. | | | |
| HTELO73 | 761806 | 1239 | 56-232 | 3926 | Lys-1 to Cys-7, | H0038: 1 and H0616: 1. | | |
| | | | | | Lys-16 to Glu-21, | | | |
| | | | | | Ser-23 to Thr-37, | | | |
| | | | | | Pro-40 to Ser-47, | | | |
| | | | | | Glu-49 to Arg-59. | | | |
| HTELO93 | 934344 | 1240 | 1-204 | 3927 | Asn-6 to Ser-12. | H0616:2 | | |
| HTELP27 | 921621 | 1241 | 3-470 | 3928 | Pro-1 to Val-16, | and L0754: 1. | | |
| | | | | | Asn-47 to Ala-61, | | | |
| | | | | | Arg-89 to Leu-94. | | | |
| HTELQ41 | 922634 | 1242 | 97-462 | 3929 | | H0616: 3 | | |
| HTELQ87 | 761768 | 1243 | 36-344 | 3930 | Tyr-1 to Leu-7, | H0616: 2 and H0038: 1. | | |
| | | | | | Phe-51 to Asp-60. | | | |
| HTELR90 | 826531 | 1244 | 2-451 | 3931 | Arg-29 to Leu-40, | H0616: 2 | | |
| | | | | | Gly-50 to Gln-55, | | | |
| | | | | | Thr-73 to Ile-83, | | | |
| | | | | | Lys-90 to Lys-95. | | | |
| HTELT72 | 761598 | 1245 | 2-235 | 3932 | Thr-7 to Asp-12, | H0616: 4, L0774: 2, | | |
| | | | | | Leu-20 to Ile-29, | H0618: 1, L0665: 1 and | | |
| | | | | | Ser-54 to Ser-64, | L0747: 1. | | |
| | | | | | Met-66 to Gly-77. | | | |
| HTELT83 | 780619 | 1246 | 3-521 | 3933 | Lys-50 to Glu-55. | H0616: 4 | | |
| HTELU01 | 915339 | 1247 | 3-173 | 3934 | Lys-1 to Lys-9. | H0616: 2 | | |
| HTELV06 | 934302 | 1248 | 37-240 | 3935 | Lys-57 to Gly-63. | H0616: 2 and L0758: 1. | | |
| HTELV10 | 963576 | 1249 | 106-270 | 3936 | Asp-1 to Trp-11, | H0616: 2 | | |
| | | | | | Ser-49 to Lys-55. | | | |
| HTELV26 | 796832 | 1250 | 172-303 | 3937 | Thr-17 to Leu-22. | L01758: 16, H0038: 1 | | |
| | | | | | | and H0616: 1. | | |
| HTELV43 | 870615 | 1251 | 2-448 | 3938 | Gly-2 to Ile-19, | H0038: 1 and H0616: 1. | | |
| | | | | | Lys-22 to Ala-31, | | | |
| | | | | | Asp-49 to Asn-56. | | | |
| HTELV86 | 910946 | 1252 | 1-927 | 3939 | Thr-5 to Ser-11, | AR089: 7, AR061: 6 | | |
| | | | | | Asp-78 to His-85, | H0616: 4, H0038: 1, | | |
| | | | | | Ser-153 to Ser-162, | L0745: 1 and L0779: 1. | | |
| | | | | | Glu-221 to Ala-234, | | | |
| | | | | | Gly-247 to Glu-252. | | | |
| HTELW29 | 952241 | 1253 | 3-293 | 3940 | Ala-21 to Trp-26, | H0616: 4, H0038: 2, | | |
| | | | | | Arg-64 to Val-83. | L0768: 1 and L0779: 1. | | |
| HTELW62 | 870596 | 1254 | 71-271 | 3941 | Cys-2 to Glu-9. | H0616: 2 and L0758: 1. | | |
| HTELX52 | 963506 | 1255 | 3-302 | 3942 | Gln-3 to Gln-13. | H0616: 2 | | |
| HTELX72 | 761599 | 1256 | 25-117 | 3943 | | H0038: 1 and H0616: 1. | | |
| HTELY64 | 764834 | 1257 | 140-283 | 3944 | Thr-18 to Gly-25. | H0616: 2 | | |
| HTELZ07 | 952268 | 1258 | 94-312 | 3945 | Lys-32 to His-41. | H0038: 1 and H0616: 1. | | |
| HTELZ89 | 786424 | 1259 | 171-353 | 3946 | Ser-46 to Thr-53. | H0616: 2 | | |
| HTEMA54 | 911666 | 1260 | 22-1167 | 3947 | Gly-23 to Asn-30, | AR089: 19, AR061: 13 | 9q31 | 109400, |
| | | | | | Arg-45 to Lys-50. | H0618: 14, H0253: 12, | | 132800, |
| | | | | | | H0038: 11, H0616: 2, | | 132800, |
| | | | | | | L0794: 1, L0779: 1 and | | 186855, |
| | | | | | | L0758: 1. | | 223900, |
| | | | | | | | | 253800, |
| | | | | | | | | 253800, |
| | | | | | | | | 278700, |
| | | | | | | | | 602088 |
| HTEMB26 | 827055 | 1261 | 75-143 | 3948 | Thr-6 to Lys-23. | H0616: 2 | | |
| HTEMB28 | 870614 | 1262 | 103-342 | 3949 | Tyr-4 to Tyr-23. | H0616: 2 | | |
| | | | | | Ala-20 to Ser-28, | | | |
| | | | | | Val-44 to Arg-54. | | | |
| HTEMB34 | 870589 | 1263 | 141-371 | 3950 | Leu-25 to Asn-32, | H0616: 3 | | |
| | | | | | Ala-49 to Phe-56, | | | |
| | | | | | Arg-60 to Lys-69. | | | |
| HTEMB72 | 761602 | 1264 | 1-306 | 3951 | | H0038: 1 and H0616: 1. | | |
| HTEMB83 | 775593 | 1265 | 2-292 | 3952 | Lys-49 to Lys-56. | L0758: 9, L0794: 3, | | |
| | | | | | | H0038: 2, H0616: 2, | | |
| | | | | | | L0790: 1 and L0779: 1. | | |
| HTEMC18 | 924727 | 1266 | 1-453 | 3953 | Gln-16 to Gly-27, | H0253: 3, H0618: 2 | | |
| | | | | | Glu-59 to Gly-65, | and H0616: 1. | | |
| | | | | | Ser-107 to Arg-113. | | | |
| HTEMC75 | 848193 | 1267 | 58-240 | 3954 | Gln-15 to Arg-21. | H0038: 1 and H0616: 1. | | |
| HTEMD10 | 963546 | 1268 | 1-270 | 3955 | Gly-1 to Glu-8, | H0616:2 and L0758: 2. | | |
| | | | | | Glu-16 to Ser-22, | | | |
| | | | | | Asp-43 to Gly-49, | | | |
| | | | | | His-65 to Met-70, | | | |
| | | | | | Lys-79 to Gln-90. | | | |
| HTEMD73 | 761783 | 1269 | 2-310 | 3956 | Ala-20 to Thr-44. | H0038: 2 and H0616: 2. | | |
| HTEMF08 | 958386 | 1270 | 3-116 | 3957 | | H0616: 2 | | |
| HTEMJ34 | 786377 | 1271 | 248-496 | 3958 | | H0616: 6 and L0758: 1. | | |
| HTEMJ54 | 963531 | 1272 | 388-570 | 3959 | | H0616: 4, H0038: 1 | | |
| | | | | | | and L0748: 1. | | |
| HTEMK03 | 923066 | 1273 | 45-359 | 3960 | Pro-11 to Gly-21, | H0038: 1 and H0616: 1. | | |
| | | | | | Pro-65 to Ser-71. | | | |
| HTEMM80 | 888686 | 1274 | 353-631 | 3961 | Pro-32 to Gly-40, | H0616: 5, H0038: 2, | | |
| | | | | | His-54 to Glu-74. | L0779: 1 and L0758: 1. | | |
| HTEMN08 | 958374 | 1275 | 10-96 | 3962 | Tyr-16 to Ser-25. | H0616: 2 | | |
| HTEMN95 | 789113 | 1276 | 54-251 | 3963 | | H0038: 1 and H0616: 1. | | |
| HTEMO14 | 880634 | 1277 | 2-319 | 3964 | | H0616: 2 and H0038: 1. | | |
| HTEMO85 | 771434 | 1278 | 166-276 | 3965 | Phe-7 to Glu-12, | H0616: 3 | | |
| | | | | | Leu-22 to Tyr-28. | | | |
| HTEMP48 | 767863 | 1279 | 1-159 | 3966 | Gln-29 to Gly-34. | H0616: 3 and H0038: 1. | | |
| HTEMP49 | 932319 | 1280 | 3-629 | 3967 | Arg-8 to Ser-15, | H0038: 10, L0758: 7, | | |
| | | | | | Ser-21 to Trp-40, | L0768: 6, H0253: 4, | | |
| | | | | | Glu-63 to Trp-74, | H0616: 2, L0772: 1, | | |
| | | | | | Ser-76 to Ser-81, | L0773: 1, L0779: 1 and | | |
| | | | | | Asp-83 to Asp-96, | L0731: 1. | | |
| | | | | | Glu-125 to Ser-131, | | | |
| | | | | | Leu-198 to Leu-206. | | | |
| HTEMR65 | 909280 | 1281 | 2-340 | 3968 | Ser-7 to Asp-13, | AR089: 17, AR061: 13 | | |
| | | | | | Leu-49 to Asn-54, | L0794: 2, L0752: 2, | | |
| | | | | | His-62 to Tyr-68. | H0616: 1, L0763: 1, | | |
| | | | | | | L0766: 1, L0664: 1, | | |
| | | | | | | H0670: 1 and L0758: 1. | | |
| HTEMS10 | 963527 | 1282 | 102-371 | 3969 | Arg-1 to Arg-8, | H0038: 1, H0661: 1 | | |
| | | | | | Leu-44 to Ala-50, | and L0758: 1. | | |
| | | | | | Ser-58 to Ile-68. | | | |
| HTEMS48 | 832506 | 1283 | 45-203 | 3970 | Ser-16 to His-24. | H0038: 1 and H0616: 1. | | |
| HTEMT06 | 934338 | 1284 | 2-268 | 3971 | Ile-14 to Asn-22, | L0758: 4, H0038: 1, | | |
| | | | | | Pro-28 to Gln-43, | H0616: 1 and L0779: 1. | | |
| | | | | | Pro-49 to Arg-56, | | | |
| | | | | | Pro-62 to Ser-78, | | | |
| | | | | | Thr-81 to Glu-89. | | | |
| HTEMT89 | 922999 | 1285 | 2-160 | 3972 | Glu-36 to Val-53. | L0758: 3 and H0616: 2. | | |
| HTEMU17 | 789623 | 1286 | 112-273 | 3973 | Arg-21 to Pro-26. | H0616: 2, L0749: 2 | | |
| | | | | | | and H0038: 1. | | |
| HTEMU54 | 870618 | 1287 | 43-189 | 3974 | Arg-18 to Lys-24, | H0616: 3 | | |
| | | | | | Thr-29 to Ile-34. | | | |
| HTEMX92 | 913795 | 1288 | 23-514 | 3975 | Gly-82 to Lys-89. | AR061: 6, AR089: 3 | | |
| | | | | | | H0616: 2 and H0038: 1. | | |
| HTEMY30 | 870662 | 1289 | 46-231 | 3976 | Arg-32 to Gly-37. | H0038: 1, H0616: 1 | | |
| | | | | | | and L0759: 1. | | |
| HTEMZ04 | 927021 | 1290 | 162-377 | 3977 | | H0616: 2 | | |
| HTENA22 | 870601 | 1291 | 1-294 | 3978 | Pro-20 to Ala-32, | H0038: 1 and H0616: 1. | | |
| | | | | | Arg-46 to Val-51. | | | |
| HTENB03 | 923050 | 1292 | 24-338 | 3979 | Ser-29 to Val-39. | H0616: 3 | | |
| HTENC22 | 775544 | 1293 | 243-497 | 3980 | Gln-29 to Leu-34, | H0616: 2 and L0109: 1. | | |
| | | | | | Arg-36 to Leu-44, | | | |
| | | | | | Glu-58 to Ser-64, | | | |
| | | | | | Ser-67 to Pro-85. | | | |
| HTENF08 | 958378 | 1294 | 380-574 | 3981 | Ala-6 to Ala-12. | H0038: 1 and H0616: 1. | | |
| HTENF95 | 795316 | 1295 | 111-347 | 3982 | Glu-69 to Leu-79. | H0038: 1, H0616: 1 | | |
| | | | | | | and S0152: 1. | | |
| HTENG66 | 840151 | 1296 | 3-308 | 3983 | Asn-2 to Glu-14, | H0253: 3, H0038: 1 | | |
| | | | | | Pro-17 to Lys-27, | and H0616: 1. | | |
| | | | | | Gly-42 to Ser-59, | | | |
| | | | | | Cys-70 to Lys-81. | | | |
| HTENG93 | 967432 | 1297 | 1-102 | 3984 | His-7 to Ser-12. | H0038: 1 and H0616: 1. | | |
| HTENH86 | 784798 | 1298 | 182-436 | 3985 | Ile-28 to Ser-36. | H0616: 2, H0038: 1 | | |
| | | | | | and L0758: 1. | | | |
| HTENI58 | 917213 | 1299 | 41-589 | 3986 | Asn-17 to Asn-30, | AR089: 30, AR061: 13 | | |
| | | | | | Glu-37 to Lys-56, | L0794: 25, L0758: 4, | | |
| | | | | | Asp-64 to Gln-69, | H0038: 3, H0616: 2, | | |
| | | | | | Gly-77 to Ser-95, | L0779: 2, L0768: 1 and | | |
| | | | | | Lys-109 to Asn-114, | L0790: 1. | | |
| | | | | | Arg-158 to Ser-183. | | | |
| HTENJ28 | 968135 | 1300 | 1-948 | 3987 | Thr-6 to Arg-17. | H0038: 7, H0124: 1, | | |
| | | | | | | H0040: 1, H0616: 1 and | | |
| | | | | | | L0779: 1. | | |
| HTENJ76 | 767838 | 1301 | 3-443 | 3988 | Thr-17 to Ala-25, | H0253: 1 and H0616: 1. | 11q13.2-q13.3 | 133780, |
| | | | | | Pro-40 to Glu-46, | | | 151400, |
| | | | | | Asn-76 to Glu-81, | | | 602078 |
| | | | | | Gln-90 to Lys-104. | | | |
| HTENK06 | 835851 | 1302 | 249-566 | 3989 | Gly-23 to Pro-32. | H0616: 3 and H0618: 1. | | |
| HTENK69 | 844557 | 1303 | 192-509 | 3990 | Arg-15 to Leu-21, | H0038: 4, H0616: 3, | | |
| | | | | | Ala-29 to Glu-34, | L0758: 3 and L0779: 1. | | |
| | | | | | Pro-40 to Trp-49, | | | |
| | | | | | Ser-82 to Ala-97. | | | |
| HTENO12 | 917032 | 1304 | 76-1467 | 3991 | Gly-29 to Glu-39, | H0616: 6, H0618: 3, | | |
| | | | | | Gly-105 to Lys-117, | H0253: 3 and H0038: 3. | | |
| | | | | | Gln-135 to Leu-142, | | | |
| | | | | | Pro-180 to Ser-186, | | | |
| | | | | | Gln-202 to Ser-207, | | | |
| | | | | | Gln-214 to Asp-220, | | | |
| | | | | | Gly-246 to Thr-255. | | | |
| HTENO50 | 969213 | 1305 | 190-618 | 3992 | Asn-1 to Glu-6, | H0038: 1 and H0616: 1. | | |
| | | | | | Gln-9 to Gly-15, | | | |
| | | | | | Gln-18 to Arg-40. | | | |
| HTENP54 | 787535 | 1306 | 17-208 | 3993 | Arg-13 to Leu-18. | H0616: 17 and L0758: 1. | | |
| HTENP80 | 775387 | 1307 | 2-496 | 3994 | Asp-16 to Leu-22, | H0038: 1 and H0616: 1. | | |
| | | | | | Met-37 to Thr-42, | | | |
| | | | | | Glu-55 to Gly-68. | | | |
| HTENQ05 | 928244 | 1308 | 1-654 | 3995 | His-23 to Ser-34, | H0038: 2, H0616: 1 | | |
| | | | | | His-77 to Glu-82. | and L0758: 1. | | |
| HTENR10 | 963530 | 1309 | 24-380 | 3996 | Gly-40 to Ala-45, | H0038: 1 and H0616: 1. | | |
| | | | | | Arg-65 to Thr-75. | | | |
| HTENR74 | 764828 | 1310 | 1-456 | 3997 | Gly-1 to Pro-15. | H0038: 2 and H0616: 1. | | |
| HTENR93 | 920834 | 1311 | 201-659 | 3998 | Glu-49 to Ala-55, | H0328: 1, H0038: 1 | | |
| | | | | | Cys-57 to Ser-85, | and H0616: 1. | | |
| | | | | | Ser-90 to Glu-97, | | | |
| | | | | | Ile-108 to Lys-114, | | | |
| | | | | | Val-117 to Asn-127. | | | |
| HTENS22 | 785996 | 1312 | 3-440 | 3999 | Met-2 to Asn-16, | H0038: 1, H0616: 1 | | |
| | | | | | Gln-30 to Gln-35, | and L0748: 1. | | |
| | | | | | Met-42 to Gln-48, | | | |
| | | | | | Ser-54 to His-60, | | | |
| | | | | | Pro-63 to Ser-69, | | | |
| | | | | | Leu-101 to Gln-118, | | | |
| | | | | | Gly-139 to Pro-146. | | | |
| HTENS43 | 784936 | 1313 | 226-756 | 4000 | | H0616: 5, H0038: 3, | | |
| | | | | | | H0253: 1, L0769: 1, | | |
| | | | | | | L0794: 1, H0521: 1, | | |
| | | | | | | L0748: 1, L0779: 1 and | | |
| | | | | | | L0758: 1. | | |
| HTENS91 | 870515 | 1314 | 387-725 | 4001 | Trp-1 to Gln-10. | H0616: 2 and L0517: 1. | | |
| HTENV57 | 944416 | 1315 | 99-617 | 4002 | Gly-5 to Arg-10, | AR061: 7, AR089: 3 | | |
| | | | | | Arg-18 to Ser-24, | H0616: 5 and H0037: 1. | | |
| | | | | | Glu-35 to Asn-42, | | | |
| | | | | | Lys-72 to Gln-82, | | | |
| | | | | | Tyr-90 to Lys-96, | | | |
| | | | | | Lys-112 to Arg-123, | | | |
| | | | | | Asp-141 to Met-146. | | | |
| HTENW53 | 907717 | 1316 | 1-243 | 4003 | Arg-6 to Asp-13, | H0038: 2, H0616: 2 | | |
| | | | | | Lys-70 to Trp-76. | and L0758: 2. | | |
| HTENX77 | 771409 | 1317 | 168-359 | 4004 | Glu-1 to Lys-11. | L0758: 10, L0439: 6, | | |
| | | | | | H0616: 2, L0803: 2, | | | |
| | | | | | L0756: 2, L0455: 1, | | | |
| | | | | | H0038: 1 and L0438: 1. | | | |
| HTENY21 | 870587 | 1318 | 383-553 | 4005 | Ala-17 to Ser-22. | H0038: 1 and H0616: 1. | | |
| HTENY35 | 884043 | 1319 | 2-1009 | 4006 | Gln-1 to Ser-19, | H0616: 3 | | |
| | | | | | Glu-29 to Lys-35, | | | |
| | | | | | Leu-58 to Phe-68, | | | |
| | | | | | Cys-100 to Arg-107, | | | |
| | | | | | Cys-113 to Cys-119, | | | |
| | | | | | Phe-124 to Asn-139, | | | |
| | | | | | Leu-157 to Glu-163, | | | |
| | | | | | Ile-174 to Ile-180, | | | |
| | | | | | Pro-195 to Pro-204, | | | |
| | | | | | Gly-228 to Glu-250, | | | |
| | | | | | Ile-260 to Asp-266, | | | |
| | | | | | Thr-273 to His-279, | | | |
| | | | | | Cys-281 to Gly-291. | | | |
| HTENZ16 | 917185 | 1320 | 203-454 | 4007 | | L0779: 9, L0758: 9, | | |
| | | | | | | L0665: 8, H0616: 4, | | |
| | | | | | | L0663: 4, H0038: 3, | | |
| | | | | | | L0755: 3, L0717: 1, | | |
| | | | | | | L0768: 1, L0666: 1, | | |
| | | | | | | H0659: 1, H0670: 1, | | |
| | | | | | | L0748: 1 and L0749: 1. | | |
| HTENZ33 | 870591 | 1321 | 102-377 | 4008 | Gln-24 to Glu-34, | H0038: 1 and H0616: 1. | | |
| | | | | | Ala-58 to Ser-64. | | | |
| HTENZ72 | 773024 | 1322 | 2-400 | 4009 | Met-56 to Pro-67, | H0616: 2 and H0038: 1. | | |
| | | | | | Ser-82 to Tyr-87, | | | |
| | | | | | Pro-111 to Ala-121. | | | |
| HTEOA90 | 787516 | 1323 | 24-329 | 4010 | Arg-20 to Gln-27, | H0038: 1 and H0616: 1. | | |
| | | | | | Arg-37 to His-42, | | | |
| | | | | | Pro-46 to His-55. | | | |
| HTEOD34 | 812307 | 1324 | 129-428 | 4011 | Tyr-3 to Cys-9, | H0616: 2 and H0038: 1. | | |
| | | | | | Thr-20 to Ile-25, | | | |
| | | | | | Gly-60 to Arg-67. | | | |
| HTEOE61 | 918635 | 1325 | 247-411 | 4012 | | H0616: 2 and H0038: 1. | | |
| HTEOF31 | 793202 | 1326 | 258-632 | 4013 | Gly-2 to Glu-13, | H0038: 1 and H0616: 1. | | |
| | | | | | Val-40 to Cys-79. | | | |
| HTEOF80 | 847224 | 1327 | 2-262 | 4014 | Val-17 to Arg-23, | AR061l 7, AR089: 3 | Xp22 | 300000, |
| | | | | | Tyr-28 to Ser-34, | H0616: 3 | | 300066, |
| | | | | | Thr-41 to Cys-47. | | | 300077, |
| | | | | | | | | 300310, |
| | | | | | | | | 301220, |
| | | | | | | | | 302350, |
| | | | | | | | | 304050, |
| | | | | | | | | 304110, |
| | | | | | | | | 306100, |
| | | | | | | | | 309530, |
| | | | | | | | | 309585, |
| | | | | | | | | 312040 |
| HTEOF85 | 768583 | 1328 | 113-364 | 4015 | | H0663: 1, H0644: 1, | | |
| | | | | | | H0038: 1 and H0616: 1. | | |
| HTEOF91 | 918571 | 1329 | 27-164 | 4016 | Arg-31 to Asp-37. | H0616: 2 | | |
| HTEOI36 | 870575 | 1330 | 3-410 | 4017 | Pro-17 to Ala-25, | AR089: 36, AR061: 21 | | |
| | | | | | Lys-33 to Arg-40, | H0038: 7, H0618: 1, | | |
| | | | | | Arg-62 to Lys-68, | H0253: 1 and H0616: 1. | | |
| | | | | | Ala-79 to Val-93, | | | |
| | | | | | Lys-106 to Asp-113. | | | |
| HTEOI53 | 810333 | 1331 | 11-295 | 4018 | Arg-1 to Ile-8, | H0038: 1 and H0616: 1. | | |
| | | | | | Tyr-12 to Gly-29, | | | |
| | | | | | Lys-34 to Ala-64, | | | |
| | | | | | Lys-77 to Glu-91. | | | |
| HTEOK02 | 918590 | 1332 | 121-408 | 4019 | | H0616: 2 and H0038: 1. | | |
| HTEON29 | 815852 | 1333 | 2-520 | 4020 | Pro-27 to Ala-35. | AR061: 6, AR089: 3 | | |
| | | | | | | H0038: 4, L0758: 3, | | |
| | | | | | | H0616: 2, L0794: 2, | | |
| | | | | | | L0747: 2, L0803: 1, | | |
| | | | | | | L0789: 1 and L0590: 1. | | |
| HTEON67 | 654114 | 1334 | 107-271 | 4021 | | H0038: 2 and H0616: 1. | | |
| HTEOU45 | 915138 | 1335 | 320-529 | 4022 | | H0616: 22 | | |
| HTEOV90 | 870532 | 1336 | 22-438 | 4023 | Pro-14 to Phe-23, | L0766: 5, L0803: 3, | | |
| | | | | | Lys-111 to Lys-133. | H0616: 2, L0777: 2, | | |
| | | | | | | L0470: 1, L0761: 1, | | |
| | | | | | | L0764: 1, L0804: 1, | | |
| | | | | | | L0805: 1, L0776: 1, | | |
| | | | | | | L0789: 1 and L0750: 1. | | |
| HTEOW02 | 918475 | 1337 | 3-266 | 4024 | Ser-30 to His-36, | H0616: 2 | | |
| | | | | | Arg-54 to Arg-59. | | | |
| HTEOW39 | 870566 | 1338 | 2-445 | 4025 | Gly-38 to Val-44. | AR089: 17, AR061: 14 | | |
| | | | | | | H0616: 2 | | |
| HTEOW85 | 969682 | 1339 | 2-490 | 4026 | Arg-1 to Ala-13, | H0618: 3, H0616: 2 | | |
| | | | | | Arg-99 to Arg-104, | and H0253: 1. | | |
| | | | | | Thr-117 to Gln-124, | | | |
| | | | | | Asn-132 to Gln-137, | | | |
| | | | | | Thr-145 to His-155. | | | |
| HTEPA08 | 958391 | 1340 | 147-605 | 4027 | Tyr-34 to Glu-43. | L0758: 9, H0038: 1. | | |
| | | | | | | H0616: 1 and S0042: 1. | | |
| HTEPA27 | 872923 | 1341 | 43-393 | 4028 | Pro-77 to Ser-83. | H0616: 3, L0747: 2, | | |
| | | | | | | L0794: 1, L0803: 1 and | | |
| | | | | | | L0779: 1. | | |
| HTEPB66 | 772949 | 1342 | 204-515 | 4029 | Asp-35 to Gly-40. | H0616: 3, L0758: 2, | | |
| | | | | | | L0794: 1 and L0366: 1. | | |
| HTEPB84 | 782248 | 1343 | 161-568 | 4030 | Leu-2 to Gly-11. | H0616: 2 and H0038: 1. | | |
| HTEPC76 | 767824 | 1344 | 140-328 | 4031 | Pro-10 to Asn-16, | H0616: 4, L0779: 1 | | |
| | | | | | Asn-38 to Arg-44. | and L0758: 1. | | |
| HTEPC87 | 883021 | 1345 | 126-497 | 4032 | Cys-5 to Thr-14. | H0616: 2 | | |
| HTEPD06 | 933299 | 1346 | 2-193 | 4033 | His-7 to Gly-17, | H0616: 4, L0756: 2 | | |
| | | | | | Gly-25 to Leu-36. | and H0038: 1. | | |
| HTEPE28 | 932576 | 1347 | 2-640 | 4034 | Asn-30 to Lys-43, | AR061: 5, AR089: 2 | | |
| | | | | | Pro-58 to Glu-65, | H0369: 1, H0038: 1, | | |
| | | | | | Arg-77 to Asn-85. | H0616: 1, L0593: 1 and | | |
| | | | | | | L0595: 1. | | |
| HTEPG15 | 812303 | 1348 | 3-395 | 4035 | Gln-1 to Asn-9, | L0752: 1, H0618: 1, | | |
| | | | | | Pro-14 to Leu-20, | H0616: 1, L0769: 1, | | |
| | | | | | Leu-42 to Gly-47, | L0803: 1, L0789: 1, | | |
| | | | | | Gln-56 to Arg-61, | L0439: 1, L0758: 1 and | | |
| | | | | | Pro-109 to Ser-114, | L0698: 1. | | |
| | | | | | Lys-119 to Thr-131. | | | |
| HTEPH01 | 915301 | 1349 | 25-447 | 4036 | Thr-2 to Ser-12, | H0616: 3 and H0038: 1. | | |
| | | | | | Arg-60 to Leu-67, | | | |
| | | | | | Ala-72 to Thr-77, | | | |
| | | | | | Pro-82 to Lys-91, | | | |
| | | | | | Gly-96 to Ser-101, | | | |
| | | | | | Glu-110 to Pro-118, | | | |
| | | | | | Gln-124 to Leu-129, | | | |
| | | | | | Gln-132 to Ser-138. | | | |
| HTEPJ09 | 956200 | 1350 | 305-1216 | 4037 | Arg-1 to Asn-11, | H0616: 2 and L0758: 1. | | |
| | | | | | His-40 to Arg-45. | | | |
| HTEPJ19 | 918599 | 1351 | 37-345 | 4038 | Arg-1 to Ser-9. | H0616: 2 | | |
| HTEPJ79 | 774212 | 1352 | 27-122 | 4039 | | H0038: 1 and H0616: 1. | | |
| HTEPK40 | 939675 | 1353 | 209-631 | 4040 | Gly-5 to Pro-15, | H0616: 5, L0758: 5 | | |
| | | | | | Ser-23 to His-32. | and H0038: 1. | | |
| HTEPM33 | 870561 | 1354 | 1-735 | 4041 | Pro-8 to Gly-26, | AR061: 25, AR089: 5 | | |
| | | | | | Cys-54 to Cys-66, | L0758: 3, H0616: 2, | | |
| | | | | | Gly-73 to His-85. | H0038: 1 and L0779: 1. | | |
| HTEPM52 | 806471 | 1355 | 171-326 | 4042 | | H0616: 2 | | |
| HTEPN07 | 952243 | 1356 | 3-311 | 4043 | Leu-12 to Pro-17, | H0616: 2 and H0038: 1. | | |
| | | | | | Pro-24 to Gly-29, | | | |
| | | | | | Ser-34 to Gly-39. | | | |
| HTEPP23 | 836572 | 1357 | 1-192 | 4044 | Asn-6 to Asp-16. | H0616: 2, L0779: 2, | | |
| | | | | | | H0038: 1 and L0758: 1. | | |
| HTEPP29 | 917207 | 1358 | 1-372 | 4045 | Gly-33 to Gly-38, | H0038: 1 and H0616: 1. | | |
| | | | | | Gln-61 to His-66. | | | |
| HTEPP30 | 947107 | 1359 | 12-641 | 4046 | Ala-35 to Glu-41, | H0616: 3 and H0038: 1. | | |
| | | | | | Ile-54 to Glu-74, | | | |
| | | | | | Lys-80 to Leu-87. | | | |
| HTEPP32 | 785803 | 1360 | 3-866 | 4047 | Gln-8 to Cys-17, | H0616: 4 and H0038: 3. | | |
| | | | | | Cys-20 to Gln-26, | | | |
| | | | | | Thr-61 to Lys-68, | | | |
| | | | | | His-75 to Gly-83, | | | |
| | | | | | Asn-88 to Gln-104, | | | |
| | | | | | Pro-118 to Leu-126, | | | |
| | | | | | Gln-131 to Glu-138. | | | |
| HTEPP92 | 790869 | 1361 | 3-545 | 4048 | Lys-86 to Lys-91, | H0038: 1 and H0616: 1. | | |
| | | | | | LyS-107 to Lys-139, | | | |
| | | | | | Leu-155 to Asn-162. | | | |
| HTEPR90 | 787499 | 1362 | 1-168 | 4049 | | H0038: 2 and H0616: 2. | | |
| HTEPT25 | 870509 | 1363 | 1-238 | 4050 | Gly-42 to Gly-47. | H0616: 2 | | |
| HTEPT75 | 870637 | 1364 | 42-518 | 4051 | Pro-66 to Ser-74. | H0616: 2 and H0038: 1. | | |
| HTEPU01 | 915134 | 1365 | 533-670 | 4052 | | H0616: 2 | | |
| HTEPV02 | 917406 | 1366 | 1-471 | 4053 | Ser-9 to Ser-17, | AR061: 6, AR089: 2 | | |
| | | | | | Phe-21 to Leu-45. | H0616: 3, L0758: 2, | | |
| | | | | | | L0768: 1, L0792: 1 and | | |
| | | | | | | L0779: 1. | | |
| HTEPX32 | 870698 | 1367 | 91-699 | 4054 | Ser-10 to Gly-15, | AR089: 11, AR061: 2 | | |
| | | | | | Pro-20 to Ser-27, | H0038: 6, H0616: 6, | | |
| | | | | | Glu-34 to Gly-41, | L0794: 4, L0768: 1 and | | |
| | | | | | Ala-45 to Trp-50, | ` L0758: 1. | | |
| | | | | | Pro-79 to Gly-88. | | | |
| HTEPZ10 | 963433 | 1368 | 274-543 | 4055 | Pro-9 to Ser-19, | H0616: 2 and L0758: | | |
| | | | | | Pro-51 to Asp-57. | 2. | | |
| HTEPZ18 | 888470 | 1369 | 50-52 | 4056 | Lys-2 to Gly-11. | H0618: 1 and H0616: | | |
| | | | | | | 1. | | |
| HTEQB03 | 922941 | 1370 | 2-151 | 4057 | Pro-30 to Cys-35, | H0616: 4 | | |
| | | | | | Thr-41 to Ser-47. | | | |
| HTEQD40 | 915198 | 1371 | 2-490 | 4058 | Met-11 to Lys-28. | L0758: 7, H0618: 1, | | |
| | | | | | | H0616: 1, L0794: 1 and | | |
| | | | | | | L0779: 1. | | |
| HTEQD69 | 918579 | 1372 | 133-321 | 4059 | Thr-39 to Asn-45. | H0616: 2 and H0038: | | |
| | | | | | | 1. | | |
| HTEQE87 | 958354 | 1373 | 205-633 | 4060 | His-16 to Ser-21, | H0038: 2 and H0616: | | |
| | | | | | Val-30 to Asn-40, | 1. | | |
| | | | | | Leu-54 to Pro-64. | | | |
| HETQG56 | 881004 | -426 | 4061 | Pro-31 to Glu-45, | H0616: 3 and H0038: | | | |
| | | | | | Ala-52 to Lys-58, | 1. | | |
| | | | | | Met-78 to Lys-89. | | | |
| HTEQI54 | 853971 | 1375 | 189-422 | 4062 | Thr-1 to Asn-6, | H0616: 2, L0803: 1 | | |
| | | | | | Pro-11 to Phe-19, | and L0774: 1. | | |
| | | | | | Arg-21 to Asn-27. | | | |
| HTEQJ14 | 870525 | 1376 | 158-424 | 4063 | | H0038: 2 and H0616: | | |
| | | | | | | 1. | | |
| HTEQJ42 | 806495 | 1377 | 90-308 | 4064 | Gln-4 to Ser-9, | H0038: 1 and H0616: | | |
| | | | | | Ala-23 to Glu-29, | 1. | | |
| | | | | | Phe-65 to Ser-71. | | | |
| HTEQO81 | 806504 | 1378 | -144 | 4065 | | H0038: 1 and H0616: | | |
| | | | | | | 1. | | |
| HTEQP45 | 966141 | 1379 | -141 | 4066 | Lys-1 to Phe-10. | H0616: 4 | | |
| HTEQQ82 | 932301 | 1380 | 254-24 | 4067 | Asp-5 to Asp-14. | H0616:3 and L0758: | | |
| | | | | | | 1. | | |
| HTEQR15 | 939641 | 1381 | 108-590 | 4068 | Thr-17 to Leu-22. | AR089; 10, AR061: 3 | | |
| | | | | | | H0253: 8, H0038: 4, | | |
| | | | | | | H0616: 3, H0618: 2, | | |
| | | | | | | L0758: 2 and L0779: 1. | | |
| HTEQR94 | 966486 | 1382 | 77-388 | 4069 | Asn-83 to Ser-88. | L0758: 6, H0616: 2 | | |
| | | | | | | and L0794: 2. | | |
| HTEQT63 | 924799 | 1383 | 193-1311 | 4070 | | L0758: 3, H0038: 1 | | |
| | | | | | | and H0616: 1. | | |
| HTLAB19 | 530577 | 1384 | 3-281 | 4071 | Asp-32 and Gln-37. | H0253: 2 | | |
| HTLAB44 | 530579 | 1385 | 3-266 | 4072 | Ala-6 to Gly-25. | H0618: 4 and H0253: | | |
| | | | | | | 3. | | |
| HTLAB73 | 575019 | 1386 | 1-333 | 4073 | Gly-42 to Arg-47. | H0253: 2 | | |
| HTLAC81 | 679414 | 1387 | 2-163 | 4074 | Leu-2 to Cys-8, | H0253: 3 | | |
| | | | | | Gly-32 to Arg-39. | | | |
| HTLAC87 | 546469 | 1388 | 23-154 | 4075 | Ala-1 to Arg-6, | H0038: 164, H0253: | | |
| | | | | | Met-14 to Thr-32. | 42, H0150: 2, H0549: 1 | | |
| | | | | | | and S0042: 1. | | |
| HTLAD21 | 761758 | 1389 | 2-298 | 4076 | Ser-5 to Asn-12, | L0758: 4, H0253: 2, | | |
| | | | | | Leu-63 to Gly-71. | H0616: 2, L0649: 1, | | |
| | | | | | | L0666: 1, L0663: 1 and | | |
| | | | | | | L0780: 1. | | |
| HTLAD38 | 421550 | 1390 | 86-529 | 4077 | Phe-12 to Leu-22, | L0758: 5, H0253: 4, | | |
| | | | | | Ser-26 to Tyr-32, | L0794: 4, H0618: 2, | | |
| | | | | | Phe-53 to Asn-59, | H0038: 1, H0616: 1 and | | |
| | | | | | Tyr-68 to Leu-73, | L0768: 1. | | |
| | | | | | Gln-96 to Gly-102. | | | |
| HTLAF84 | 836390 | 1391 | 1-444 | 4078 | Pro-32 to Thr-48, | H0253: 2 and L0777: | | |
| | | | | | Arg-102 to Pro-109. | 1. | | |
| HTLAV67 | 530742 | 1392 | 36-221 | 4079 | Ser-39 to Gly-45. | H0253: 3 | | |
| HTLBD12 | 506739 | 1393 | 2-331 | 4080 | Ala-2 to Pro-8, | H0253: 2 | | |
| | | | | | Pro-57 to Trp-67, | | | |
| | | | | | Cys-69 to Gly-74. | | | |
| HTLBE55 | 967408 | 1394 | 2-232 | 4081 | Glu-6 to Thr-15, | H0253: 1, H0038: 1 | | |
| | | | | | Ser-21 to His-34, | and H0616: 1. | | |
| | | | | | Arg-53 to Ala-64. | | | |
| HTLBE82 | 780116 | 1395 | 209-481 | 4082 | Ser-1 to Gly-8, | L0366: 3, H0618: 2, | 9q31-q34 | 109400, |
| | | | | | Thr-15 to Thr-23, | H0253: 1 and L0754: 1. | | 125270, |
| | | | | | Pro-45 to Pro-53. | | | 125270, |
| | | | | | | | | 128100, |
| | | | | | | | | 132800, |
| | | | | | | | | 132800, |
| | | | | | | | | 137350, |
| | | | | | | | | 186855, |
| | | | | | | | | 191100, |
| | | | | | | | | 215700, |
| | | | | | | | | 223360, |
| | | | | | | | | 223900, |
| | | | | | | | | 253800, |
| | | | | | | | | 253800, |
| | | | | | | | | 268900, |
| | | | | | | | | 278700, |
| | | | | | | | | 601850, |
| | | | | | | | | 602088 |
| HTLBF14 | 971661 | 1396 | 3-590 | 4083 | Glu-21 to Gln-27, | H0616: 2, H0618: 1 | | |
| | | | | | Ser-30 to Lys-37. | and H0253: 1. | | |
| HTLBG83 | 527942 | 1397 | 96-200 | 4084 | | H0253: 2 | | |
| HTLCA95 | 911655 | 1398 | 38-1096 | 4085 | | Ar061: 373, AR089: | | |
| | | | | | | 188 | | |
| | | | | | | H0253: 3, H0618: 2, | | |
| | | | | | | H0038: 2, H0616: 1 and | | |
| | | | | | | L0758: 1. | | |
| HTLCG77 | 772644 | 1399 | 2-112 | 4086 | Gly-1 to Ile-6, | L0758: 5, H0616: 3, | | |
| | | | | | Gly-12 to Ile-27. | H0038: 2, L0794: 2 and | | |
| | | | | | | H0253: 1. | | |
| HTLCX76 | 767667 | 1400 | 2-277 | 4087 | Leu-58 to Arg-68. | H0253: 2 | | |
| HTLCY27 | 682208 | 1401 | 2-301 | 4088 | Arg-9 to Cys-18, | H0253: 1, L0794: 1, | | |
| | | | | | Arg-34 to Gly-40, | L0766: 1, L0803: 1, | | |
| | | | | | Glu-47 to Asp-54. | H0670: 1 and L0747: 1. | | |
| HTLCY54 | 908832 | 1402 | 134-934 | 4089 | Arg-1 to Arg-6, | AR061: 5, AR089: 5 | | |
| | | | | | Ala-49 to Tyr-58, | H0253: 4, H0618: 3, | | |
| | | | | | Pro-67 to Lys-80, | L0758: 3, L0779: 2 and | | |
| | | | | | Ser-92 to Trp-108. | L0794: 1. | | |
| HTLCZ48 | 572959 | 1403 | 1-162 | 4090 | His-1 to Gly-6. | H0253: 2 | | |
| HTLCZ96 | 815897 | 1404 | 17-286 | 4091 | | L0758: 4, L0794: 2, | | |
| | | | | | | L0617: 1, H0253: 1, | | |
| | | | | | | H0038: 1, L0789: 1 and | | |
| | | | | | | L0779: 1. | | |
| HTLDA58 | 828115 | 1405 | 2-271 | 4092 | Ser-6 to Ser-11. | H0253: 2 | | |
| HTLDE53 | 780842 | 1406 | 72-497 | 4093 | Asn-1 to Glu-6, | L0758: 11, H0253: 3, | | |
| | | | | | Gly-17 to His-28, | H0550: 1 and H0616: 1. | | |
| | | | | | Glu-33 to Ser-39, | | | |
| | | | | | Pro-41 to Lys-51, | | | |
| | | | | | Pro-56 to Glu-69, | | | |
| | | | | | Ser-83 to Lys-90, | | | |
| | | | | | Thr-97 to Ser-103, | | | |
| | | | | | Arg-121 to Asp-131. | | | |
| HTLDE64 | 908613 | 1407 | 83-427 | 4094 | Glu-15 to Leu-20, | AR089: 25, AR061: 11 | | |
| | | | | | Leu-24 to Ser-47. | H0253: 2 and H0618: | | |
| | | | | | | 1. | | |
| HTLDE95 | 616724 | 1408 | 86-298 | 4095 | | H0253: 2 | | |
| HTLDF33 | 909254 | 1409 | 3-599 | 4096 | Pro-7 to Gly-13. | AR061: 7, AR089: 3 | | |
| | | | | | | L0758: 6, L0789: 2, | | |
| | | | | | | L0779: 2, H0253: 1, | | |
| | | | | | | L0809: 1, L0666: 1 and | | |
| | | | | | | H0648: 1. | | |
| HTLDG55 | 911645 | 1410 | 1-192 | 4097 | Gly-1 to Arg-10. | H0253: 2 | | |
| HTLDH65 | 839795 | 1411 | 3-431 | 4098 | | H0553: 3 and H0253: | | |
| | | | | | | 1. | | |
| HTLDI90 | 835850 | 1412 | 248-472 | 4099 | | H0618: 1 and H0253: | | |
| | | | | | | 1. | | |
| HTLDO94 | 915223 | 1413 | 90-458 | 4100 | Met-12 to Asp-18, | H0253: 2, H0188: 1 | | |
| | | | | | Tyr-20 to Gly-31, | and H0038: 1. | | |
| | | | | | Lys-38 to Trp-47. | | | |
| HTLDP77 | 920546 | 1414 | -573 | 4101 | Gly-1 to Gly-9, | H0253: 3 and H0618: | | |
| | | | | | Gln-15 to Arg-20, | 2. | | |
| | | | | | Cys-53 to Arg-59, | | | |
| | | | | | Arg-84 to Glu-89, | | | |
| | | | | | Pro-105 to Glu-113. | | | |
| HTLDQ25 | 870057 | 1415 | 1-834 | 4102 | Ser-3 to Ser-16. | H0618: 11, H0253: 10, | | |
| | | | | | | H0616: 6, L0758: 5, | | |
| | | | | | | H0038: 4, L0768: 2 and | | |
| | | | | | | H0090: 1, | | |
| HTLDS55 | 891322 | 1416 | -1171 | 4103 | Ala-1 to Gln-13, | AR061: 7, AR089: 2, | | |
| | | | | | Pro-19 to Leu-27, | AR054: 2, AR051: 2, | | |
| | | | | | Asp-34 to Pro-40, | AR050: 2 | | |
| | | | | | Ser-45 to Ser-52, | H0618: 5, L0758: 4, | | |
| | | | | | Lys-105 to Pro-112, | H0038: 3, H0253: 2, | | |
| | | | | | Pro-146 to Trp-158, | H0553: 1, H0616: 1, | | |
| | | | | | Arg-181 to Arg-189, | L0789: 1, L0663: 1 and | | |
| | | | | | Arg-241 to Arg-248, | L0779: 1. | | |
| | | | | | Asp-285 to Asn-291, | | | |
| | | | | | Gln-328 to Ile-333, | | | |
| | | | | | Gln-369 to Thr-375, | | | |
| | | | | | Arg-380 to Phe-390. | | | |
| HTLDT05 | 909752 | 1417 | 2-328 | 4104 | Gly-3 to Ser-8. | AR089: 11, AR061: 7 | | |
| | | | | | | H0253: 2, L0439: 1 | | |
| | | | | | | and L0599: 1. | | |
| HTLDT81 | 952265 | 1418 | 1-465 | 4105 | Pro-3 to Pro-8, | H0253: 2 and H0618: | | |
| | | | | | Glu-22 to Gln-29. | 1. | | |
| HTLDU05 | 911649 | 1419 | 2-469 | 4106 | Pro-89 to Ala-97. | AR061: 8, AR089: 7 | 9q31 | 109400, |
| | | | | | | H0253: 3, H0618: 1 | | 132800, |
| | | | | | | and L0758: 1, | | 132800, |
| | | | | | | | | 186855, |
| | | | | | | | | 223900, |
| | | | | | | | | 253800, |
| | | | | | | | | 253800, |
| | | | | | | | | 278700, |
| | | | | | | | | 602088 |
| HTLDV31 | 867748 | 1420 | 61-309 | 4107 | Gln-16 to Gly-35, | H0253: 1 and S0152: 1, | | |
| | | | | | Gly-59 to Ser-74. | | | |
| HTLDX88 | 791684 | 1421 | 149-636 | 4108 | Pro-5 to Gly-10, | H0618: 2 and H0253: | | |
| | | | | | Gly-24 to Ala-33, | 1. | | |
| | | | | | Pro-88 to Pro-95, | | | |
| | | | | | Pro-106 to His-114. | | | |
| HTLDY85 | 573746 | 1422 | 3-425 | 4109 | Lys-50 to Ala-55, | H0038: 2 and H0253: | | |
| | | | | | Thr-99 to Glu-104, | 1. | | |
| | | | | | Arg-116 to Arg-122, | | | |
| | | | | | Lys-129 to Thr-136. | | | |
| HTLDZ14 | 573401 | 1423 | 174-347 | 4110 | | H0253: 2 | | |
| HTLEB14 | 573464 | 1424 | 1-414 | 4111 | Gly-63 to Arg-71. | H0618: 4 and H0253: | | |
| | | | | | | 3. | | |
| HTLED72 | 906989 | 1425 | 102-287 | 4112 | Leu-1 to Pro-7. | H0253: 2 | | |
| HTLEF94 | 870258 | 1426 | 33-239 | 4113 | | H0253: 2 | | |
| HTLEG65 | 870154 | 1427 | 177-1181 | 4114 | | AR051: 12, AR054: | | |
| | | | | | | 10, AR050: 8 | | |
| | | | | | | H0616: 6, H0618: 2, | | |
| | | | | | | H0253: 2 and H0038: 2. | | |
| HTLEG91 | 870257 | 1428 | 1-111 | 4115 | | H0253: 2 | | |
| HTLEH30 | 934287 | 1429 | 1-528 | 4116 | Gly-1 to His-8, | H0253: 2 | | |
| | | | | | Glu-26 to Gly-33. | | | |
| HTLEI47 | 573460 | 1430 | 124-417 | 4117 | Flu-58 to Thr-63. | H0253: 3 | | |
| HTLEJ11 | 973302 | 1431 | 2-802 | 4118 | Tyr-52 to Gln-60, | AR061: 3, AR089: 1 | 15q13-qter | |
| | | | | | Phe-86 to Ala-94, | H0618: 3 and H0253: | | |
| | | | | | Lys-111 to Arg-118, | 1. | | |
| | | | | | His-193 to Tyr-198. | | | |
| HTLEJ93 | 960314 | 1432 | 2-307 | 4119 | His-22 to Lys-36, | H0253: 5 and H0618: | | |
| | | | | | Asp-51 to Lys-59, | 3. | | |
| | | | | | Gln-68 to Leu-83. | | | |
| HTLEK64 | 506747 | 1433 | 2-331 | 4120 | Ala-1 to Cys-13, | H0253: 2 | | |
| | | | | | Arg-32 to Ala-37. | | | |
| HTLEL01 | 917022 | 1434 | 2-202 | 4121 | Pro-3 to Gly-9. | H0253: 1 and H0616: | | |
| | | | | | | 1. | | |
| HTLEL03 | 575080 | 1435 | 2-106 | 4122 | | H0253: 2 | 3p21.3 | 116806, |
| | | | | | | | | 120120, |
| | | | | | | | | 120120, |
| | | | | | | | | 120120, |
| | | | | | | | | 120436, |
| | | | | | | | | 120436, |
| | | | | | | | | 120436, |
| | | | | | | | | 138320, |
| | | | | | | | | 168468, |
| | | | | | | | | 182280, |
| | | | | | | | | 600163 |
| HTLEL07 | 953712 | 1436 | 55-555 | 4123 | Ala-29 to Asn-37, | H0253: 1 and H0617: | | |
| | | | | | | Lys-64 to Thr-77, | 1. | |
| | | | | | | Ile-97 to Arg-126. | | |
| HTLEL31 | 669950 | 1437 | 3-143 | 4124 | Pro-6 to Glu-13, | H0253: 2 | 7q22 | 126650, |
| | | | | | Arg-18 to Pro-30. | | | 126650, |
| | | | | | | | | 154276, |
| | | | | | | | | 173360, |
| | | | | | | | | 173360, |
| | | | | | | | | 602136, |
| | | | | | | | | 602136, |
| | | | | | | | | 602136, |
| | | | | | | | | 602447 |
| HTLEM46 | 719160 | 1438 | 1-456 | 4125 | | H0253: 2, L0777: 2 | | |
| | | | | | | and L0759: 1. | | |
| HTLEO50 | 506649 | 1439 | 2-265 | 4126 | Ser-2 to Pro-10. | H0253: 1 and H0038: | | |
| | | | | | | 1. | | |
| HTLEP16 | 574942 | 1440 | 3-443 | 4127 | | H0253: 2, L0794: 2 | | |
| | | | | | | and S0042: 1. | | |
| HTLEQ07 | 953706 | 1441 | 3-605 | 4128 | His-7 to Ile-32, | H0618: 2 and H0253: | | |
| | | | | | Glu-82 to Glu-87, | 1. | | |
| | | | | | Lys-103 to Gly-108. | | | |
| HTLES43 | 573403 | 1442 | 49-216 | 4129 | | H0253: 2 | | |
| HTLES54 | 574884 | 1443 | 1-282 | 4130 | Pro-10 to Gln-19, | H0038: 2 and H0253: | | |
| | | | | | Pro-46 to Ile-59, | 1. | | |
| | | | | | Thr-64 to Leu-70. | | | |
| HTLET56 | 911654 | 1444 | 95-826 | 4131 | Ser-54 to Lys-61, | AR061: 6, AR089: 5 | | |
| | | | | | Pro-118 to Lys-128, | H0253: 18, H0618: 7, | | |
| | | | | | Thr-208 to Ser-213, | L0794: 3, H0038: 1, | | |
| | | | | | Ser-218 to Ala-227, | H0616: 1, L0788: 1 and | | |
| | | | | | Pro-230 to Ser-236, | L0758: 1. | | |
| | | | | | Pro-238 to Ser-244. | | | |
| HTLET78 | 836820 | 1445 | 2-826 | 4132 | Leu-11 to Lys-18, | AR061: 4, AR089: 2 | | |
| | | | | | Phe-107 to Gly-114, | H0618: 10, H0253: 5, | | |
| | | | | | Glu-121 to Asn-128, | L0758: 5, L0664: 1, | | |
| | | | | | Met-146 to Pro-153. | L0756: 1, L0779: 1 and | | |
| | | | | | | L0698: 1. | | |
| HTLET93 | 573454 | 1446 | 1-111 | 4133 | | H0253: 2 | | |
| HTLEV33 | 527956 | 1447 | 1-273 | 4134 | Ala-8 to Gly-17, | L0794: 5, H0253: 3, | | |
| | | | | | Pro-25 to His-34. | H0618: 2, H0616: 2, | | |
| | | | | | | L0758: 2 and L0787: 1. | | |
| HTLEV95 | 883332 | 1448 | 52-414 | 4135 | His-1 to Thr-6, | H0616: 14, H0618: 8, | | |
| | | | | | His-14 to Cys-58, | L0779: 4, H0253: 3, | | |
| | | | | | Cys-70 to Ala-77, | H0038: 3, L0790: 1 and | | |
| | | | | | Pro-85 to Cys-109, | L0758: 1. | | |
| | | | | | Pro-116 to Gly-121. | | | |
| HTLEW12 | 870255 | 1449 | 2-346 | 4136 | | H0253: 2, H0617: 2 | | |
| | | | | | | and H0618: 1. | | |
| HTLEW21 | 573458 | 1450 | 3-197 | 4137 | | H0253: 2 | | |
| HTLEY11 | 967309 | 1451 | 2-130 | 4138 | Arg-1 to Gly-21, | H0253: 2 | | |
| | | | | | Gln-38 to Asp-43. | | | |
| HTLEY91 | 775310 | 1452 | 5-226 | 4139 | Pro-38 to Trp-43, | H0253: 2 | | |
| | | | | | Pro-47 to Lys-54, | | | |
| | | | | | Gly-62 to Arg-72. | | | |
| HTLEZ14 | 791662 | 1453 | 2-334 | 4140 | Asn-18 to Pro-44, | H0618: 4 and H0253: | | |
| | | | | | Val-64 to Phe-70. | 3. | | |
| HTLEZ15 | 934288 | 1454 | 3-251 | 4141 | Pro-5 to His-12, | H0618: 2 and H0253: | | |
| | | | | | Glu-30 to Thr-36. | 2. | | |
| HTLEZ32 | 870261 | 1455 | 3-209 | 4142 | | H0253: 2 | | |
| HTLFA74 | 934172 | 1456 | 279-707 | 4143 | Ser-20 to Glu-26, | H0253: 2 and H0618: | | |
| | | | | | Gly-31 to Ala-46, | 1. | | |
| | | | | | Thr-62 to His-67, | | | |
| | | | | | Arg-72 to Pro-81. | | | |
| HTLFC20 | 917128 | 1457 | 409-1041 | 4144 | Ala-4 to Trp-10, | H0618:3 and H0253: | | |
| | | | | | Glu-27 to Gln-32, | 3. | | |
| | | | | | Gly-115 to Gly-122. | | | |
| HTLFE01 | 917033 | 1458 | 98-313 | 4145 | Asn-7 to Val-12, | H0253: 4 and H0038: | | |
| | | | | | Leu-15 to Ser-23. | 1. | | |
| HTLFE05 | 954984 | 1459 | 3-812 | 4146 | His-1 to Cys-6, | H0253: 5, H0618: 4, | 7q22 | 126650, |
| | | | | | Glu-24 to Gly-29, | H0038:1 and H0616: 1. | | 126650, |
| | | | | | Gln-53 to Asp-59, | | | 154276, |
| | | | | | Gly-80 to Pro-86, | | | 173360, |
| | | | | | Glu-142 to Ser-148, | | | 173360, |
| | | | | | Ser-154 to Val-160, | | | 602136, |
| | | | | | Pro-163 to Gln-180, | | | 602136, |
| | | | | | Val-195 to Pro-200, | | | 602136, |
| | | | | | Lys-205 to Ser-213, | | | 602447 |
| | | | | | Ala-222 to Glu-228, | | | |
| | | | | | Asp-239 to Gly-270. | | | |
| HTLFE20 | 934278 | 1460 | 80-475 | 4147 | Gly-11 to Val-29, | H0253: 8 and H0618: | | |
| | | | | | Gly-31 to Glu-38, | 7. | | |
| | | | | | Ala-40 to Arg-48, | | | |
| | | | | | Gly-55 to Val-65, | | | |
| | | | | | Leu-70 to Thr-76. | | | |
| HTLFI28 | 775392 | 1461 | 2-430 | 4148 | Pro-24 to Arg-31, | H0253: 3 and H0038: | | |
| | | | | | Ile-66 to Leu-72, | 2. | | |
| | | | | | Asp-90 to Glu-98. | | | |
| HTLFI39 | 953730 | 1462 | 2-622 | 4149 | Ala-15 to Asp-23, | AR089: 19. AR061: 13 | 7q22 | 126650, |
| | | | | | Thr-44 to Tyr-62. | H0618: 8 and H0253: | | 126650, |
| | | | | | | 4. | | 154276, |
| | | | | | | | | 173360, |
| | | | | | | | | 173360, |
| | | | | | | | | 602136, |
| | | | | | | | | 602136, |
| | | | | | | | | 602136, |
| | | | | | | | | 602447 |
| HTLFI83 | 781303 | 1463 | 19-516 | 4150 | Asp-13 to Leu-26, | H0253: 1 and H0038: | | |
| | | | | | Val-38 to Val-76. | 1. | | |
| HTLFJ39 | 573462 | 1464 | 2-343 | 4151 | Gln-7 to Phe-13, | H0253: 2 | | |
| | | | | | Leu-14 to Val-37, | | | |
| | | | | | Pro-50 to Leu-65. | | | |
| HTLGD25 | 870136 | 1465 | 28-600 | 4152 | Gly-3 to Gly-9, | AR061: 3, AR089: 1 | | |
| | | | | | Leu-51 to Gln-58, | H0618: 4, H0253: 4, | | |
| | | | | | Leu-67 to Ser-74, | H0616: 2, L0758: 2 and | | |
| | | | | | His-100 to Pro-106, | H0038: 1 | | |
| | | | | | Arg-132 to Arg-138. | | | |
| HTLGD69 | 835493 | 1466 | 287-652 | 4153 | His-27 to Ser-39, | L0758: 2, H0618: 1, | | |
| | | | | | His-47 to Pro-55. | H0253: 1, H0616: 1 and | | |
| | | | | | | L0779: 1. | | |
| HTLGG36 | 789656 | 1467 | 2-574 | 4154 | Thr-13 to Ser-21, | H0618: 4, L0779: 1 | | |
| | | | | | Arg-26 to His-44, | and L0758: 1. | | |
| | | | | | Ala-85 to Cys-91, | | | |
| | | | | | Thr-104 to Thr-121, | | | |
| | | | | | Gly-156 to Arg-163. | | | |
| HTLGK55 | 868309 | 1468 | 1-483 | 4155 | | H0618: 2, H0617: 1 | | |
| | | | | | | and L0743: 1. | | |
| HTLGM02 | 964878 | 1469 | 62-766 | 4156 | Lys-1 and Gly-12, | H0618: 2 | | |
| | | | | | Glu-32 to Phe-41, | | | |
| | | | | | Arg-69 to Leu-81, | | | |
| | | | | | Pro-188 to Ile-195. | | | |
| HTLGM07 | 952254 | 1470 | 3-761 | 4157 | Arg-1 to Glu-6, | AR089: 21, AR061: 16 | | |
| | | | | | Ile-15 to Phe-23, | H0618: 32, H0253: 13, | | |
| | | | | | Gly-59 to Phe-72, | H0616: 6, L0758: 3, | | |
| | | | | | Pro-95 to Trp-112, | H0038: 2, L0794: 2, | | |
| | | | | | Phe-117 to Pro-129. | H0009: 1, H0688: 1, | | |
| | | | | | | L0769: 1, L0372: 1, | | |
| | | | | | | L0646: 1, L0363: 1, | | |
| | | | | | | L0766: 1, L0790: 1, | | |
| | | | | | | L0665: 1, H0670: 1 and | | |
| | | | | | | L0779: 1. | | |
| HTLGT62 | 918606 | 1471 | 2-547 | 4158 | Asn-4 to Thr-10, | H0618: 9, H0253: 1 | | |
| | | | | | Pro-46 to Asp-51. | and L0758: 1. | | |
| HTLGW17 | 958208 | 1472 | 1-768 | 4159 | Arg-39 to Asn-44, | H0618: 3 and H0253: | | |
| | | | | | Arg-55 to Gly-62, | 3. | | |
| | | | | | Arg-98 to Ile-103. | | | |
| HTLGX90 | 870528 | 1473 | 61-906 | 4160 | Pro-41 to Gly-57, | L0748: 4, H0618: 3, | | |
| | | | | | Leu-76 to Gly-83, | L0751: 3, L0749: 2, | | |
| | | | | | Pro-87 to Ser-95, | L0777: 2, H0038: 1, | | |
| | | | | | Glu-97 to Pro-106, | H0616: 1, L0772: 1 and | | |
| | | | | | Ile-122 to Glu-128, | L0775: 1. | | |
| | | | | | Gln-152 to Arg-166, | | | |
| | | | | | Thr-180 to Arg-187, | | | |
| | | | | | Leu-191 to Pro-199, | | | |
| | | | | | Glu-231 to Cys-241, | | | |
| | | | | | Val-248 to Asp-255. | | | |
| HTLHC14 | 908428 | 1474 | 3-503 | 4161 | Glu-38 to Phe-51, | AR061: 7, AR089: 4 | | |
| | | | | | Pro-74 to Trp-91, | H0618: 32, H0253: 13, | | |
| | | | | | Phe-96 to Ala-127, | H0616: 6, L0758: 3, | | |
| | | | | | Glu-130 to Gly-148. | H0038: 2, L0794: 2, | | |
| | | | | | | H0009: 1, H0688: 1, | | |
| | | | | | | L0769: 1, L0372: 1, | | |
| | | | | | | L0646: 1, L0363: 1, | | |
| | | | | | | L0766: 1, L0790: 1, | | |
| | | | | | | L0665: 1, H0670: 1 and | | |
| | | | | | | L0779: 1. | | |
| HTLHE72 | 963471 | 1475 | 62-508 | 4162 | | H0618:3 and H0253: | | |
| | | | | | | 1. | | |
| HTLHL82 | 958334 | 1476 | 186-1103 | 4163 | Gln-1 to Trp-27. | H0253: 11, H0618: 8, | | |
| | | | | | | L0779: 3, L0758: 3 and | | |
| | | | | | | L0768: 1. | | |
| HTLHO94 | 968685 | 1477 | 298-164 | 4164 | Lys-36 to Glu-45. | H0038: 2, L0747: 2, | | |
| | | | | | | H0618: 1, L0665: 1, | | |
| | | | | | | L0779: 1 and L0758: 1. | | |
| HTLHP32 | 933335 | 1478 | 87-455 | 4165 | Phe-6 to Ala-12, | AR089: 35, AR061: 7 | | |
| | | | | | Arg-24 to Arg-35, | H0618: 2 | | |
| | | | | | Leu-66 to Phe-84. | | | |
| HTLHP52 | 926980 | 1479 | 11-181 | 4166 | Glu-37 to Gln-42. | H0618: 2 | | |
| HTLHP80 | 807156 | 1480 | 350-604 | 4167 | | H0618: 2 | | |
| HTLHT15 | 946586 | 1481 | 1-381 | 4168 | Tyr-31 to Arg-42, | H0618: 2 | | |
| | | | | | Met-63 to Leu-69, | | | |
| | | | | | Tyr-114 to His-123. | | | |
| HTLHT24 | 870254 | 1482 | 21-893 | 4169 | Pro-1 to Ala-10, | H0618: 26, H0253: 20 | | |
| | | | | | Val-27 to Gly-42, | and L0758: 1. | | |
| | | | | | Asp-61 to Asp-66, | | | |
| | | | | | Ser-81 to Ala-88. | | | |
| HTLHU04 | 926950 | 1483 | 2-943 | 4170 | Gln-10 to Ile-18, | L0758: 8, H0618: 4, | | |
| | | | | | Arg-41 to Ala-59, | H0253: 1, H0038: 1 and | | |
| | | | | | His-115 to Lys-128, | L0769: 1. | | |
| | | | | | Lys-143 to Glu-151, | | | |
| | | | | | Thr-164 to Glu-169. | | | |
| HTLHV67 | 936139 | 1484 | 2-700 | 4171 | Glu-2 to Thr-7, | H0618: 3 | 15q23-q25 | 118485, |
| | | | | | Arg-64 to Lys-72, | | | 151670, |
| | | | | | Glu-77 to Leu-83, | | | 231680, |
| | | | | | Arg-93 to Ser-102, | | | 272800, |
| | | | | | Ile-118 to Gln-123. | | | 272800, |
| | | | | | | | | 272800, |
| | | | | | | | | 276700, |
| | | | | | | | | 600374, |
| | | | | | | | | 601780, |
| HTLHZ08 | 958321 | 1485 | 1-675 | 4172 | Ser-134 to Glu-139, | H0618: 2 | | |
| | | | | | Thr-154 to Leu-160. | | | |
| HTLHZ10 | 963475 | 1486 | 2-241 | 4173 | Arg-1 to Gln-13, | H0618: 1 and H0253: | | |
| | | | | | Phe-16 to Pro-62. | 1. | | |
| HTLIA92 | 784817 | 1487 | 96-656 | 4174 | Pro-7 to Lys-15, | H0618: 2, L0764: 2, | | |
| | | | | | Asp-21 to Ser-28, | H0253: 1, L0492: 1, | | |
| | | | | | Gln-53 to Ala-58, | H0673: 1 and H0038: 1. | | |
| | | | | | Thr-115 to Asn-127. | | | |
| HTLID36 | 945891 | 1488 | 1-417 | 4175 | Thr-10 to Thr-18, | AR089: 7, AR061: 7 | | |
| | | | | | Pro-58 to Val-65. | H0618: 1 and H0038: | | |
| | | | | | | 1. | | |
| HTLIK11 | 966043 | 1489 | 133-312 | 4176 | Pro-11 to His-17, | H0618: 2 | | |
| | | | | | Pro-27 to Asp-36, | | | |
| | | | | | Ser-38 to His-43. | | | |
| HTLIP19 | 958351 | 1490 | 3-899 | 4177 | Ser-25 to Thr-32, | L0758: 6, H0616: 3, | | |
| | | | | | His-50 to Lys-56, | H0038: 2 and H0618: 1. | | |
| | | | | | Glu-111 to Asp-116, | | | |
| | | | | | Trp-156 to Lys-161, | | | |
| | | | | | Leu-189 to Arg-202, | | | |
| | | | | | Asp-258 to Thr-264. | | | |
| HTLIQ09 | 931046 | 1491 | 501-644 | 4178 | | H0618: 2 | | |
| HTLIR30 | 870115 | 1492 | 3-659 | 4179 | Leu-11 to Leu-17, | H0618: 1 and H0253: | | |
| | | | | | Pro-22 to Leu-27, | 1. | | |
| | | | | | Pro-40 to Lys-46, | | | |
| | | | | | Arg-66 to Pro-73, | | | |
| | | | | | Thr-91 to Ser-98, | | | |
| | | | | | Val-102 to Lys-108, | | | |
| | | | | | Gly-125 to Glu-130, | | | |
| | | | | | Leu-138 to Asp-144, | | | |
| | | | | | Arg-149 to Arg-158. | | | |
| HTLIU76 | 946300 | 1493 | 46-609 | 4180 | Pro-13 to Ala-18, | AR089: 9, AR061: 8 | | |
| | | | | | His-30 to Gln-37, | L0758: 12, H0618: 6, | | |
| | | | | | Gly-48 to Ala-66, | H0038: 3, H0253: 1, | | |
| | | | | | Ala-80 to Lys-92, | H0050: 1, L0151: 1 and | | |
| | | | | | Glu-98 to Asp-103, | L0768: 1. | | |
| | | | | | His-119 to Thr-126. | | | |
| HTLIV78 | 947234 | 1494 | 618-97 | 4181 | Pro-18 to Asp-23, | AR089: 9, AR061: 7 | | |
| | | | | | Arg-110 to Gln-122. | L0758: 10, L0794: 3, | | |
| | | | | | | H0618: 2, H0038: 2, | | |
| | | | | | | H0253: 1, L0768: 1 and | | |
| | | | | | | L0789: 1. | | |
| HTLIY52 | 942161 | 1495 | 1-1368 | 4182 | | AR061: 0, AR089: 0 | | |
| | | | | | | H0618: 64, H0253: 52, | | |
| | | | | | | L0758: 6, L0779: 2, | | |
| | | | | | | H0392: 1, H0038: 1, | | |
| | | | | | | L0761: 1, L0803: 1, | | |
| | | | | | | L0806: 1 and L0697: 1. | | |
| HTLJA23 | 953729 | 1496 | 2-814 | 4183 | Thr-50 to Tyr-58, | H0618: 8 and H0253: | 7q22 | 126650, |
| | | | | | Gly-155 to Gln-161, | 4. | | 126650, |
| | | | | | Thr-164 to Gln-175. | | | 154276, |
| | | | | | | | | 173360, |
| | | | | | | | | 173360, |
| | | | | | | | | 602136, |
| | | | | | | | | 602136, |
| | | | | | | | | 602136, |
| | | | | | | | | 602447 |
| HTLJA24 | 934279 | 1497 | 3-572 | 4184 | Ile-1 to Trp-9, | H0618: 2 | | |
| | | | | | Gly-35 to Val-53, | | | |
| | | | | | Gly-55 to Glu-62, | | | |
| | | | | | Ala-64 to Arg-72, | | | |
| | | | | | Gly-79 to Arg-85. | | | |
| HTLJC71 | 922923 | 1498 | 3-1355 | 4185 | His-1 to Phe-9, | AR061: 7, AR089: 5 | | |
| | | | | | Cys-13 to Thr-18, | H0618: 12, H0253: 8, | | |
| | | | | | Pro-35 to Gly-48, | H0038: 6, L0758: 6, | | |
| | | | | | Glu-61 to Pro-68, | L0779: 5, H0616: 3, | | |
| | | | | | Lys-105 to Ala-136, | T0041: 1, L0776: 1, | | |
| | | | | | Thr-144 to Gln-154, | S0274: 1 and H0543: 1. | | |
| | | | | | Leu-163 to Gly-171, | | | |
| | | | | | Thr-205 to Gln-222, | | | |
| | | | | | Pro-251 to Gln-257. | | | |
| HTLJD35 | 967336 | 1499 1-192 | 4186 | Cys-5 to Ser-15, | H0618: 1 and H0253: | | | |
| | | | | | Pro-36 to Pro-44. | 1. | | |
| HTLJD88 | 953714 | 1500 | 161-760 | 4187 | Arg-15 to Glu-25, | H0253: 5 and H0618: | | |
| | | | | | Lys-35 to Val-41, | 2. | | |
| | | | | | Gln-70 to Pro-100. | | | |
| HTLJJ75 | 924755 | 1501 | 1-921 | 4188 | Gln-1 to Thr-12. | AR089: 11, AR061: 9 | | |
| | | | | | | H0253: 7, H0618L 6, | | |
| | | | | | | L0794: 2, L0779: 2, | | |
| | | | | | | L0595: 2, H0687: 1, | | |
| | | | | | | L0438: 1, L0741: 1 and | | |
| | | | | | | L0758: 1. | | |
| HTLJL23 | 922994 | 1502 | 2-619 | 4189 | Leu-9 to Ser-14. | H0618: 3, H0038: 3, | | |
| | | | | | | H0616: 3 and H0253: 2. | | |
| HTTAD55 | 835652 | 1503 | 132-245 | 4190 | | H0040: 3 | | |
| HTTAE49 | 723331 | 1504 | 74-160 | 4191 | | H0040: 2 | | |
| HTTAH87 | 509574 | 1505 | 2-232 | 4192 | | H0040: 2 | | |
| HTTAJ35 | 707750 | 1506 | 3-194 | 4193 | Leu-10 to Lys-16, | L0770: 3, L0766: 3, | | |
| | | | | | Asn-43 to Ser-49. | L0759: 3, L0790: 2, | | |
| | | | | | | H0659: 2, H0040: 1, | | |
| | | | | | | L0776: 1, L0663: 1, | | |
| | | | | | | L0665: 1, L0752: 1 and | | |
| | | | | | | L0755: 1. | | |
| HTTAJ50 | 509657 | 1507 | 1-261 | 4194 | | H0040: 2 | | |
| HTTAN57 | 509453 | 1508 | -274 | 4195 | Gly-21 to Gly-27, | H0040: 2 | | |
| | | | | | Pro-38 to Gly-49, | | | |
| | | | | | Ser-68 to Asp-73. | | | |
| HTTAS96 | 961057 | 1509 | 91-255 | 4196 | Arg-7 to Cys-13, | H0040: 2 | | |
| | | | | | Ser-16 to Arg-21, | | | |
| | | | | | Ala-28 to Gly-33. | | | |
| HTTAU82 | 797726 | 1510 | 61-309 | 4197 | Pro-6 to Asn-13, | H0040: 2 | | |
| | | | | | Thr-25 to Gly-34. | | | |
| HTTBE25 | 509128 | 1511 | 1-156 | | H0040: 2 | | | |
| HTTBH34 | 530565 | 1512 | 177-326 | 4199 | Pro-14 to Gly-20, | H0040: 1, L0438: 1 | | |
| | | | | | Leu-23 to Asn-33. | and H0658: 1. | | |
| HTTBH41 | 530562 | 1513 | 106-264 | 4200 | Ser-16 to Lys-22, | H0031: 1 and H0040: | | |
| | | | | | Ser-29 to Gln-35. | 1. | | |
| HTTBH54 | 530563 | 1514 | 114-266 | 4201 | | H0040: 2 | | |
| HTTBJ94 | 530564 | 1515 | 3-263 | 4202 | Thr-3 to Arg-14. | AR061: 4, AR089: 3 | | |
| | | | | | | H0040: 2 | | |
| HTTBN67 | 578085 | 1516 | 54-176 | 4203 | | H0040: 2 | | |
| HTTCA15 | 869705 | 1517 | 2-262 | 4204 | Glu-74 to Tyr-79. | H0040: 2 | | |
| HTTCD03 | 925390 | 1518 | 248-391 | 4205 | Asn-1 to Ser-13. | H0040: 2 | | |
| HTTCD71 | 530393 | 1519 | 3-101 | 4206 | | H0040: 2 | | |
| HTTCL35 | 529672 | 1520 | 72-185 | 4207 | | H0040: 2, L0766: 1 | | |
| | | | | | | and L0758: 1. | | |
| HTTCT34 | 973210 | 1521 | 3-1049 | 4208 | Phe-86 to Tyr-94, | AR061: 5, AR089: 2 | | |
| | | | | | Val-149 to Lys-155, | H0040: 3 | | |
| | | | | | Trp-169 to Asn-179, | | | |
| | | | | | Thr-189 to Glu-197. | | | |
| HTTDF50 | 526385 | 1522 | 191-298 | 4209 | | H0040: 2 | | |
| HTTDF90 | 917155 | 1523 | 78-260 | 4210 | | H0040: 3 | | |
| HTTDG36 | 968131 | 1524 | 26-280 | 4211 | Gly-13 to Gly-19, | H0040: 2 | | |
| | | | | | Pro-38 to Gly-50, | | | |
| | | | | | Glu-67 to Gly-73. | | | |
| HTTDI21 | 869686 | 1525 | 3-188 | 4212 | | H0040: 1 and H0634: | | |
| | | | | | | 1. | | |
| HTTDJ65 | 973307 | 1526 | 155-364 | 4213 | Ser-2 to Val-16, | H0040: 3 | | |
| | | | | | Pro-50 to Trp-56. | | | |
| HTTDL38 | 573641 | 1527 | 47-136 | 4214 | | H0040: 2 | | |
| HTTDL45 | 523452 | 1528 | 3-89 | 4215 | | H0040: 3 and L0792: | | |
| | | | | | | 1. | | |
| HTTDL89 | 959837 | 1529 | 183-341 | 4216 | | H0040: 2 | | |
| HTTDN40 | 734318 | 1530 | 52-387 | 4217 | Gln-8 to Ser-13, | H0040: 2 | | |
| | | | | | Asp-20 to Tyr-27. | | | |
| HTTDN85 | 783444 | 1531 | 89-313 | 4218 | | H0040: 2 | | |
| HTTDO19 | 908937 | 1532 | 1-333 | 4219 | Thr-3 to Lys-9, | AR089: 16, AR061: 9 | | |
| | | | | | Gly-14 to His-26, | H0040: 2 | | |
| | | | | | His-30 to Lys-37, | | | |
| | | | | | Lys-43 to Ser-49. | | | |
| HTTDO37 | 573685 | 1533 | 150-440 | 4220 | Phe-25 to Phe-38. | H0040: 2 and H0670: | | |
| | | | | | | 1. | | |
| HTTDR91 | 790336 | 1534 | 110-280 | 4221 | Ile-3 to Lys-9. | H0040: 2 and L0766: | | |
| | | | | | | 1. | | |
| HTTDR92 | 573666 | 1535 | 190-330 | 4222 | Gly-8 to His-21. | H0040: 2 | | |
| HTTDS02 | 920589 | 1536 | 217-387 | 4223 | | H0040: 2 | | |
| HTTDX84 | 921100 | 1537 | 1-480 | 4224 | Pro-33 to Arg-43, | H0253: 3, L0758: 2, | | |
| | | | | | Ala-48 to Tyr-57. | H0618: 1, H0038: 1 and | | |
| | | | | | | H0040: 1. | | |
| HTTDZ54 | 692608 | 1538 | 125-298 | 4225 | | H0040: 2 | | |
| HTTDZ91 | 523206 | 1539 | 2-313 | 4226 | Ser-11 to Ala-19, | H0618: 1 and H0040: | | |
| | | | | | Lys-27 to Ala-33. | 1. | | |
| HTTEB33 | 573719 | 1540 | 227-349 | 4227 | | H0040: 2 | | |
| HTTEH58 | 747943 | 1541 | 149-286 | 4228 | | H0040: 2 | | |
| HTTEL50 | 745985 | 1542 | 102-209 | 4229 | | H0040: 2 | | |
| HTTEU68 | 967819 | 1543 | 2-766 | 4230 | Lys-8 to Val-20, | H0040: 2, L0439: 2, | | |
| | | | | | Ser-72 to Ala-77, | L0438: 1 and L0747: 1. | | |
| | | | | | Ala-84 to Ser-92, | | | |
| | | | | | Leu-110 to Lys-119. | | | |
| HTTEV62 | 573614 | 1544 | 85-285 | 4231 | Ser-1 to Gln-7, | H0040: 2, H0616: 1, | | |
| | | | | | Arg-9 to Glu-14, | L0794: 1, L0779: 1 and | | |
| | | | | | Pro-16 to Val-24, | L0758: 1. | | |
| | | | | | Arg-35 to Asp-40. | | | |
| HTTEY64 | 974107 | 1545 | 207-464 | 4232 | | H0040: 4 | | |
| HTTEY67 | 917903 | 1546 | 598-804 | 4233 | Ala-1 to Ala-7, | H0040: 2, H0435: 1, | | |
| | | | | | Gly-53 to Lys-67. | L0439: 1 and L0759: 1. | | |
| HTTEZ34 | 771602 | 1547 | 168-329 | 4234 | Arg-40 to Asn-45. | H0040: 2 | | |
| HTTFA16 | 870198 | 1548 | 1-408 | 4235 | | H0040: 1, S0150: 1 and | | |
| | | | | | | L0601: 1. | | |
| HTTFB60 | 869666 | 1549 | 2-220 | 4236 | | H0040: 2 | | |
| HTTFG35 | 778426 | 1550 | 1-183 | 4237 | Asp-14 to Gln-22. | H0040: 5 | | |
| HTTFG83 | 974284 | 1551 | 235-441 | 4238 | | H0040: 2, H0169: 1 | | |
| | | | | | | and L0753: 1. | | |
| HTTFH70 | 757358 | 1552 | 139-285 | 4239 | | H0040: 2 | | |
| HTTFK90 | 787599 | 1553 | 36-263 | 4240 | Arg-25 to Trp-32. | H0040: 2, L0794: 2, | | |
| | | | | | | L0659: 1, L0809: 1, | | |
| | | | | | | L0779: 1 and L0752: 1. | | |
| HTTFL89 | 974346 | 1554 | 99-419 | 4241 | Gly-15 to Gly-21, | H0040: 3 | | |
| | | | | | Pro-31 to Pro-46. | | | |
| HTTFM17 | 750942 | 1555 | 52-219 | 4242 | | H0040: 2, L0805: 1 | 17q | |
| | | | | | | and L0758: 1. | | |
| HTTFM66 | 950051 | 1556 | 141-1079 | 4243 | | AR061: 6, AR089: 2 | | |
| | | | | | | H0040: 2 | | |
| HTTFS59 | 825922 | 1557 | 1-273 | 4244 | | H0040: 2, L0748: 2, | 11p11.2-p11.1 | 133701, |
| | | | | | | L0749: 2 and L0766: 1. | | 168500, |
| | | | | | | | | 171650, |
| | | | | | | | | 176930, |
| | | | | | | | | 176930, |
| | | | | | | | | 600623, |
| | | | | | | | | 600811, |
| | | | | | | | | 600958 |
| HTTFT08 | 934460 | 1558 | 34-207 | 4245 | Asn-23 to Gln-29, | H0040: 3 | | |
| | | | | | Arg-37 to Asn-43. | | | |
| HTTFV93 | 925544 | 1559 | 47-169 | 4246 | Asp-36 to Lys-41. | H0040: 2 | | |
| HTTFW03 | 923105 | 1560 | 53-202 | 4247 | | H0615: 1 and H0040: | | |
| | | | | | | 1. | | |
| HTTFX21 | 924775 | 1561 | 63-212 | 4248 | | L0748: 13, L0770: 4, | | |
| | | | | | | L0777: 3, H0040: 2, | | |
| | | | | | | L0794: 2, L0528: 2, | | |
| | | | | | | L0789: 2, L0758: 2, | | |
| | | | | | | H0685: 1, H0688: 1, | | |
| | | | | | | L0662: 1, L0768: 1, | | |
| | | | | | | L0766: 1, L0657: 1, | | |
| | | | | | | L0526: 1, L0809: 1, | | |
| | | | | | | L0439: 1 and L0740: 1. | | |
| HTTFZ70 | 974066 | 1562 | 114-329 | 4249 | Lys-20 to Lys-27. | H0040: 2 and H0634: | | |
| | | | | | | 1. | | |
| HTTHH05 | 931004 | 1563 | 436-606 | 4250 | Tyr-12 to Gly-17. | H0634: 2 | | |
| HTTHU43 | 953479 | 1564 | 207-542 | 4251 | | L0755: 3, L0766: 2, | | |
| | | | | | | H0031: 1, H0634: 1, | | |
| | | | | | | L0439: 1 and L0759: 1. | | |
| HTTIG04 | 926752 | 1565 | 2-235 | 4252 | His-54 to Ser-61. | H0634: 2 | | |
| HTTIH23 | 869636 | 1566 | 2-247 | 4253 | Lys-47 to Asp-56. | H0634:2 | | |
| HTTIH80 | 869635 | 1567 | 32-226 | 4254 | | H0040: 1 and H0634: | | |
| | | | | | | 1. | | |
| HTTIL06 | 934089 | 1568 | 547-717 | 4255 | | H0040: 1, H0634: 1 | | |
| | | | | | | and L0485: 1. | | |
| HTTIN23 | 869634 | 1569 | 338-553 | 4256 | Gln-15 to Thr-20. | H0634: 2 | | |
| HTTIU05 | 931015 | 1570 | 158-430 | 4257 | Ala-17 to Gln-28, | H0634: 2 | | |
| | | | | | Pro-73 to Thr-83. | | | |
| HTTIW81 | 922817 | 1571 | 294-446 | 4258 | | H0634: 3 | | |
| HTTIZ05 | 930994 | 1572 | 112-354 | 4259 | Ser-60 to Pro-69. | H0634: 2 | | |
| HTTJA11 | 839725 | 1573 | 13-240 | 4260 | Glu-54 to Lys-60, | H0040: 1, H0634: 1 | | |
| | | | | | Pro-65 to Gly-74 | and L0803: 1. | | |
| HTTJA47 | 869618 | 1574 | 18-356 | 4261 | Glu-61 to Lys-66, | H0040: 1 and H0634: | | |
| | | | | | Met-76 to Asn-83. | 1. | | |
| HTTJH13 | 869615 | 1575 | 3-182 | 4262 | Gln-11 to Gly-17, | H0634: 2 | | |
| | | | | | Glu-26 to Ser-36, | | | |
| | | | | | Arg-53 to Ala-60. | | | |
| HTTJM01 | 913799 | 1576 | 137-283 | 4263 | Pro-14 to Pro-20. | H0634: 2 | | |
| HTTJQ06 | 934130 | 1577 | 61-177 | 4264 | | H0040: 1 and H0634: | | |
| | | | | | | 1. | | |
| HTTJX68 | 974063 | 1578 | 1-147 | Arg-29 to Arg-41. | H0040: 1 and H0634: | | | |
| | | | | | | 1. | | |
| HTTJY08 | 958170 | 1579 | 169-276 | 4266 | | H0634: 2 | | |
| HTTKD44 | 948750 | 1580 | 2-448 | 4267 | Lys-13 to Arg-21, | H0549: 1 and H0634: | | |
| | | | | | Gly-26 to Thr-36. | 1. | | |
| HTTKF89 | 960928 | 1581 | 1-189 | 4268 | | H0040: 2 and H0634: | | |
| | | | | | | 1. | | |
| HTTKG34 | 915033 | 1582 | 56-181 | 4269 | | H0634: 2 | | |
| HTTKK06 | 974311 | 1583 | 210-383 | 4270 | | H0634: 3 | | |
| HTTKL80 | 974316 | 1584 | 228-362 | 4271 | | H0634: 3 | | |
| HTTKN21 | 974310 | 1585 | 354-509 | 4272 | | H0634: 3 | | |
| HTTKN30 | 920893 | 1586 | 166-429 | 4273 | Asn-54 to Leu-60. | H0634: 1, H0672: 1 | | |
| | | | | | | and L0740: 1. | | |
| HTTKP07 | 911390 | 1587 | 2-337 | 4274 | Thr-15 to Asp-25, | AR089: 1, AR061: 1 | | |
| | | | | | Glu-69 to Leu-89. | H0634: 2 | | |
| HTTKS13 | 926795 | 1588 | 65-484 | 4275 | Ala-12 to Gly-22, | H0634: 2 | | |
| | | | | | Pro-38 to Ser-45, | | | |
| | | | | | Ala-77 to Pro-83, | | | |
| | | | | | Ala-88 to Gly-93. | | | |
| HTTKV17 | 830008 | 1589 | 2-193 | 4276 | Thr-1 to Gln-7, | H0634: 2 | | |
| | | | | | Gly-13 to Gln-37. | | | |
| HUDAM29 | 529157 | 1590 | 3-224 | 4277 | | S0042: 2 | | |
| HUDBZ78 | 739638 | 1591 | 2-163 | 4278 | | H0038: 1 and S0042: 1. | | |
| HUKAA62 | 503626 | 1592 | 308-81 | 4279 | Ala-4 to Val-11, | H0059: 2 | | |
| | | | | | Gly-58 to Leu-64. | | | |
| HUKAB80 | 503445 | 1593 | 210-347 | 4280 | | H0059: 2 | | |
| HUKAC72 | 966804 | 1594 | 1-309 | 4281 | Glu-1 to Arg-14. | H0059: 2 | | |
| HUKAM82 | 954420 | 1595 | 122-322 | 4282 | | H0059: 3 | | |
| HUKAX07 | 954359 | 1596 | 36-164 | 4283 | Gly-23 to Pro-31. | H0059: 2 | | |
| HUKCC86 | 529727 | 1597 | 57-224 | 4284 | Pro-1 to Lys-7. | H0059:2 | | |
| HUKDH28 | 531165 | 1598 | 26-334 | 4285 | Ser-27 to Thr-35. | H0059: 2 | | |
| HUKDH50 | 531163 | 1599 | 3-164 | 4286 | Asp-13 to Gln-19. | H0059: 2 | | |
| HUKEH36 | 531110 | 1600 | 139-327 | 4287 | | H0059: 2 | | |
| HUKEH50 | 531108 | 1601 | 126-254 | 4288 | Pro-19 to Pro-28. | H0059: 2, L0657: 1, | | |
| | | | | | | L0809: 1 and L0789: 1. | | |
| HUKEK55 | 522213 | 1602 | 2-271 | 4289 | Ile-49 to Gly-63, | H0059: 2 and L0766: | | |
| | | | | | Ile-66 to Asp-77, | 1. | | |
| | | | | | Gly-84 to Ser-90. | | | |
| HUKEO55 | 714187 | 1603 | 253-62 | 4290 | | H0059: 2 | | |
| HUKES11 | 967604 | 1604 | 3-122 | 4291 | Arg-1 to Ser-6, | H0059: 2 | | |
| | | | | | Tyr-11 to Asp-17. | | | |
| HUKFL69 | 526819 | 1605 | 103-294 | 4292 | | H0059: 2 | | |
| HUKFV41 | 537530 | 1606 | 3-302 | 4293 | Thr-14 to Trp-20, | H0059: 2 and L0803: | | |
| | | | | | Gly-25 to Pro-30, | 2. | | |
| | | | | | Gln-42 to Trp-60. | | | |
| HUKFX63 | 946931 | 1607 | 2-112 | 4294 | Cys-18 to Ser-24, | AR061: 69, AR089: 1 | | |
| | | | | | Gly-29 to Gln-37. | H0046: 1 and H0059: | | |
| | | | | | | 1. | | |
| HUNAD94 | 575299 | 1608 | 1-135 | 4295 | Thr-1 to Asn-10, | T0069: 2 | | |
| | | | | | Ser-18 to Lys-31. | | | |
| HUVBB90 | 503042 | 1609 | 184-342 | 4296 | | H0056: 2 | | |
| HUVBB93 | 502903 | 1610 | 145-231 | 4297 | | H0056: 2 | | |
| HUVBC12 | 933023 | 1611 | 122-289 | 4298 | Thr-35 to Asn-45. | H0056: 3 | | |
| HUVCQ07 | 928053 | 1612 | 3-371 | 4299 | Asp-14 to Ala-30, | H0056: 7 | | |
| | | | | | Val-33 to Tyr-39, | | | |
| | | | | | Ile-52 to Lys-58, | | | |
| | | | | | Thr-83 to Arg-88. | | | |
| HUVCQ55 | 868795 | 1613 | 163-372 | 4300 | Ile-1 to Asn-8. | H0056: 10 and S0134: | | |
| | | | | | | 1. | | |
| HUVCS14 | 914768 | 1614 | 1-243 | 4301 | Asn-1 to Ala-14, | H0056: 1, H0623: 1 | | |
| | | | | | Arg-30 to Gly-37. | and L0748: 1. | | |
| HUVCU71 | 968663 | 1615 | 79-279 | 4302 | Leu-40 to Leu-45, | H0056: 2 | | |
| | | | | | Phe-55 to Leu-60. | | | |
| HUVCW62 | 535361 | 1616 | 139-309 | 4303 | Arg-6 to Ala-26. | H0056: 8 | | |
| HUVDB28 | 535006 | 1617 | 38-220 | 4304 | | H0056: 6 and L0547: | | |
| | | | | | | 1. | | |
| HUVDB53 | 509119 | 1618 | 151-297 | 4305 | Gly-1 to Ser-10. | H0056: 2 | | |
| HUVDC15 | 921088 | 1619 | 3-176 | 4306 | | H0056: 11, L0805: 2, | | |
| | | | | | | L0789: 2, S0358: 1, | | |
| | | | | | | L0375: 1, L0776: 1, | | |
| | | | | | | L0743: 1, L0777: 1 and | | |
| | | | | | | L0759: 1. | | |
| HUVDD09 | 707061 | 1620 | 1-177 | 4307 | Pro-27 to Trp-38, | H0056: 2 | | |
| | | | | | Leu-48 to Arg-56. | | | |
| HUVDF13 | 961020 | 1621 | 1-225 | 4308 | Arg-1 to Ser-6, | H0056: 2 | | |
| HUVDF84 | 526248 | 1622 | 2-214 | 4309 | | H0056: 2 | | |
| HUVDF88 | 522823 | 1623 | 3-257 | 4310 | Gly-1 to Arg-12. | H0056: 3 | | |
| HUVDI28 | 530558 | 1624 | 29-241 | 4311 | Glu-13 to Phe-18, | H0056: 2, H0623: 1 | | |
| | | | | | Gly-46 to Ala-56. | and L0439: 1. | | |
| HUVDI76 | 719332 | 1625 | 111-293 | 4312 | | H0056: 3 and H0623: | | |
| | | | | | | 3. | | |
| HUVDL30 | 530387 | 1626 | 3-110 | 4313 | Lys-16 to Lys-36. | H0056: 2 | | |
| HUVDO25 | 679477 | 1627 | 233-412 | 4314 | Ser-21 to Thr-29. | H0623: 2, H0056: 1 | | |
| | | | | | | and L0748: 1. | | |
| HUVDP95 | 530386 | 1628 | 1-81 | 4315 | Phe-7 to Trp-22. | H0056: 2 and H0623: | | |
| | | | | | | 2. | | |
| HUVDS26 | 958027 | 1629 | 224-415 | 4316 | Ala-2 to Gly-9. | H0623: 2, H0056: 1 | | |
| | | | | | | and L0758: 1. | | |
| HUVDU51 | 868660 | 1630 | 3-263 | 4317 | | H0056: 1 and H0623: | | |
| | | | | | | 1. | | |
| HUVED35 | 430750 | 1631 | 318-572 | 4318 | Lys-31 to Gln-40, | H0040: 1, H0056: 1, | | |
| | | | | | Gln-42 to Met-49, | H0623: 1, L0755: 1 and | | |
| | | | | | Lys-74 to Thr-82. | L0592: 1. | | |
| HUVED54 | 534783 | 1632 | 1-150 | 4319 | | H0056:2 | | |
| HUVED65 | 527937 | 1633 | 75-164 | 4320 | Gln-20 to Cys-26. | H0056: 2 | | |
| HUVEN50 | 530094 | 1634 | 3-110 | 4321 | Arg-12 to Gly-17. | H0056: 2, H0615: 1 | | |
| | | | | | | and H0623: 1. | | |
| HUVFA55 | 868779 | 1635 | 148-354 | 4322 | | H0056: 2 and H0623: | | |
| | | | | | | 1. | | |
| HUVFB48 | 967815 | 1636 | 170-343 | 4323 | Leu-22 to Ser-31. | H0056: 1 and H0623: | | |
| | | | | | | 1. | | |
| HUVFB69 | 868782 | 1637 | 175-330 | 4324 | | H0056: 1 and H0623: | | |
| | | | | | | 1. | | |
| HUVFC07 | 952080 | 1638 | 85-240 | 4325 | Phe-1 to Gly-8. | H0623: 2 and L0759: | | |
| | | | | | | 1. | | |
| HUVFH03 | 922064 | 1639 | 240-362 | 4326 | Phe-3 to Arg-8, | H0623: 2 | | |
| | | | | | Arg-21 to Ser-27. | | | |
| HUVFH32 | 934003 | 1640 | 160-294 | 4327 | Ser-27 to Gly-32. | H0623: 3 | | |
| HUVFI03 | 868776 | 1641 | 3-131 | 4328 | | H0056: 1 and H0623: | | |
| | | | | | | 1. | | |
| HUVFK11 | 965765 | 1642 | 119-328 | 4329 | Ser-46 to Pro-57. | H0623: 2 | | |
| HUVFK58 | 868784 | 1643 | 435-734 | 4330 | His-7 to Thr-18, | H0623: 2, L0749: 2, | | |
| | | | | | Gly-53 to Phe-59, | H0056: 1 and L0794: 1. | | |
| | | | | | Pro-67 to Ser-74, | | | |
| | | | | | Val-76 to Leu-85. | | | |
| HUVFL71 | 958059 | 1644 | 3-128 | 4331 | Asp-1 to Arg-7. | H0623: 2 | | |
| HUVFQ03 | 922727 | 1645 | 213-374 | 4332 | | H0623: 3 | | |
| HUVFR02 | 918233 | 1646 | 20-286 | 4333 | Thr-3 to Ala-12, | H0623: 2 and L0534: | | |
| | | | | | Ser-27 to Ala-32, | 1. | | |
| | | | | | Ala-38 to Glu-44. | | | |
| HUVFT28 | 870617 | 1647 | 97-417 | 4334 | Arg-1 to Ser-8, | H0623: 3, H0616: 1 | | |
| | | | | | Pro-13 to Pro-18, | and L0748: 1. | | |
| | | | | | Glu-55 to Trp-64. | | | |
| HUVFT50 | 868769 | 1648 | 3-371 | 4335 | Asp-1 to Asn-10, | H0545: 1 and H0623: | | |
| | | | | | Thr-29 to Trp-43, | 1. | | |
| | | | | | Trp-62 to Ser-68. | | | |
| HUVFZ06 | 933942 | 1649 | 225-422 | 4336 | Thr-9 to Asp-17, | H0623: 2 | | |
| | | | | | Asp-43 to Arg-48. | | | |
| HUVGZ77 | 909169 | 1650 | 2-382 | 4337 | Lys-1 to Cys-8, | AR089: 2, AR061: 1 | | |
| | | | | | Glu-31 to Ser-37, | H0623: 2, H0056: 1, | | |
| | | | | | Val-98 to Pro-105. | L0803: 1, L0750: 1 and | | |
| | | | | | | L0779: 1. | | |
| HUVHB35 | 868751 | 1651 | 145-354 | 4338 | | H0056: 1 and H0623: | | |
| | | | | | | 1. | | |
| HUVBH59 | 963129 | 1652 | 200-400 | 4339 | Pro-35 to Ser-46. | H0623: 3 | | |
| HUVHV93 | 908555 | 1653 | 51-344 | 4340 | Pro-5 to Trp-10, | AR089: 3, AR061: 1 | | |
| | | | | | Phe-20 to Met-26, | H0040: 1, H0056: 1 | | |
| | | | | | Leu-85 to Trp-92. | and H0623: 1. | | |
| HUVHD88 | 868697 | 1654 | 158-39 | 4341 | | H0623: 2 | | |
| HUVHG80 | 968507 | 1655 | 33-221 | 4342 | Lys21 to Lys-27. | H0623: 2 and H0056: | | |
| | | | | | | 1. | | |
| HUVHI07 | 952090 | 1656 | 313-522 | 4343 | Leu-23 to Ser-35. | H0056: 1, H0623: 1 | | |
| | | | | | | | and L0367: 1. | |
| HUVH)40 | 924621 | 1657 | 1-486 | 4344 | Leu-51 to Val-56, | H0623: 2 and L0731: | 22q13.33 | |
| | | | | | Ala-69 to Arg-74, | 1. | | |
| | | | | | Thr-82 to Thr-91, | | | |
| | | | | | Asp-116 to Ile-126, | | | |
| | | | | | Ala-142 to Pro-147. | | | |
| HUVHU74 | 868649 | 1658 | 158-361 | 4345 | Thr-47 to Arg-53. | H0623: 2 | | |
| HVCAZ38 | 969208 | 1659 | 3-206 | 4346 | Ala-47 to Phe-55. | H0666: 339, H0660: 3, | | |
| | | | | | | L0751: 2, H0676: 1, | | |
| | | | | | | H0560: 1 and H0520: 1. | | |
| HVCBV04 | 925844 | 1660 | 519-632 | 4347 | His-1 to ser-6. | H0666: 5 | | |
| HVCCC81 | 933449 | 1661 | 3-62 | 4348 | | H0666: 2 | | |
| HVCCK04 | 925796 | 1662 | 3-560 | 4349 | Arg-8 to Gly-19, | H0666: 222, L0776: 5, | | |
| | | | | | Pro-22 to Cys-29, | L0749: 3, S0358: 2, | | |
| | | | | | Asp-54 to Cys-65, | L0763: 2, L0766: 2, | | |
| | | | | | Ser-68 to Ala-77, | L0439: 2, L0596: 2, | | |
| | | | | | Glu-97 to Ser-103, | H0650: 1, H0341: 1, | | |
| | | | | | Pro-171 to Leu-176. | S0442: 1, H0009: 1, | | |
| | | | | | | H0178: 1, H0012: 1, | | |
| | | | | | | H0087: 1, S0150: 1, | | |
| | | | | | | L0805: 1, L0655: 1, | | |
| | | | | | | L0657: 1, L0659: 1, | | |
| | | | | | | L0783: 1, L0809: 1, | | |
| | | | | | | L0789: 1, L0663: 1, | | |
| | | | | | | S0374: 1, L0602: 1, | | |
| | | | | | | L0731: 1 and L0758: 1. | | |
| HVVAC41 | 949141 | 1663 | 85-273 | 4350 | | H0672: 2 | | |
| HVVAJ01 | 914354 | 1664 | 83-277 | 4351 | Asp-34 to Glu-40. | H0644: 1, H0658: 1 | | |
| | | | | | | and H0672: 1. | | |
| HVVAJ06 | 933675 | 1665 | 1-240 | 4352 | | H0672: 2 | | |
| HVVBG19 | 968967 | 1666 | 1-171 | 4353 | | H0672: 2 | | |
| HVVBK45 | 964102 | 1667 | 710-480 | 4354 | Cys-14 to Tyr-21. | L0666: 3 and H0672: | | |
| | | | | | | 2. | | |
| HVVBK72 | 933167 | 1668 | 2-397 | 4355 | Glu-38 to Lys-43, | AR061: 1, AR089: 1 | | |
| | | | | | Gly-125 to Thr-132. | H0038: 1, H0672: 1 | | |
| | | | | | | and L0758: 1. | | |
| HVVBV44 | 917559 | 1669 | 3-104 | 4356 | | H0672: 2 | | |
| HVVCO01 | 913996 | 1670 | 67-294 | 4357 | Lys-12 to Trp-18, | H0672: 2 | | |
| | | | | | Phe-35 to Thr-42. | | | |
| HWLHJ68 | 957834 | 1671 | 78-410 | 4358 | Cys-17 to Lys-31. | AR089: 3, AR061: 2 | | |
| | | | | | | H0651: 709, L0766: 5, | | |
| | | | | | | L0754: 5, L0756: 3, | | |
| | | | | | | L0803: 2, L0779: 2, | | |
| | | | | | | L0759: 2, S0354: 1, | | |
| | | | | | | H0643: 1, H0013: 1, | | |
| | | | | | | H0194: 1, H0545: 1, | | |
| | | | | | | H0373: 1, H0252: 1, | | |
| | | | | | | H0615: 1, H0316: 1, | | |
| | | | | | | H0040: 1, H0641: 1, | | |
| | | | | | | H0647: 1, S0422: 1, | | |
| | | | | | | L0598: 1, L0369: 1, | | |
| | | | | | | L0520: 1, L0762: 1, | | |
| | | | | | | L0649: 1, L0804: 1, | | |
| | | | | | | L0527: 1, L0656: 1, | | |
| | | | | | | H0144: 1, H0702: 1, | | |
| | | | | | | H0547: 1, H0555: 1, | | |
| | | | | | | H0436: 1, S0028: 1, | | |
| | | | | | | L0746: 1, L0750: 1, | | |
| | | | | | | L0777: 1, L0780: 1, | | |
| | | | | | | L0752: 1 and L0686: 1. | | |
| HVVDT04 | 925793 | 1672 | 137-3 | 4359 | | L0766: 1 and H0672: | | |
| | | | | | | 1. | | |
| HVVBY08 | 957658 | 1673 | 2-406 | 4360 | | AR089: 14, AR061: 6 | | |
| | | | | | | H0672: 1 | | |
| HVVBM06 | 933528 | 1674 | 288-443 | 4361 | Pro-33 to Gly-38, | L0731: 2, L0635: 1, | | |
| | | | | | Leu-45 to Thr-51. | L0663: 1, H0672: 1 and | | |
| | | | | | | L0777: 1. | | |
| HUVHL82 | 912011 | 1675 | 215-580 | 4362 | Glu-28 to Arg-36, | L0470: 1 and H0623: | | |
| | | | | | Pro-41 to Thr-50. | 1. | | |
| HUVHI06 | 952479 | 1676 | 1856-2053 | 4363 | | L0471: 1 and H0623: | | |
| | | | | | | 1. | | |
| HUVGP05 | 930892 | 1677 | 2-397 | 4364 | Ala-18 to Arg-25. | L0766: 3, H0623: 1, | | |
| | | | | | | L0740: 1, L0745: 1 and | | |
| | | | | | | L0779: 1. | | |
| HUVFP71 | 950681 | 1678 | 443-204 | 4365 | | H0623: 1 and L0439: | | |
| | | | | | | 1. | | |
| HUVFI01 | 945834 | 1679 | 61-1212 | 4366 | | AR089: 2, AR061: 2 | 6p21.1-p12 | 179605, |
| | | | | | | H0623: 1 | | 179605, |
| | | | | | | | | 179605, |
| | | | | | | | | 179605, |
| | | | | | | | | 179605, |
| | | | | | | | | 180297, |
| | | | | | | | | 230450, |
| | | | | | | | | 248611, |
| | | | | | | | | 263200, |
| | | | | | | | | 600364, |
| | | | | | | | | 601498, |
| | | | | | | | | 601690 |
| HUVFE03 | 922889 | 1680 | 112-258 | 4367 | | H0623: 1 and L0777: | | |
| | | | | | | 1 | | |
| HUVDO018 | 868783 | 1681 | 13-177 | 4368 | Gln-26 to Gln-33, | H0056: 1 | | |
| | | | | | Arg-38 to Thr-45. | | | |
| HUVDO11 | 967813 | 1682 | 2-277 | 4369 | Ile-1 to Leu-10, | H0056: 1 | | |
| | | | | | Gly-54 to Cys-77. | | | |
| HUVDO07 | 954224 | 1683 | 200-313 | 4370 | | H0056: 1 | | |
| HUVDM27 | 521938 | 1684 | 1-144 | 4371 | Gly-12 to Ser-17. | H0056: 1 | | |
| HUVDH61 | 526590 | 1685 | 80-343 | 4372 | Ser-10 to Arg-15. | H0056: 1 | | |
| HUVCU26 | 974232 | 1686 | 420-701 | 4373 | Leu-12 to Trp-20, | H0056: 1 | | |
| | | | | | Ile-29 to Val-34, | | | |
| | | | | | Ser-52 to Arg-60. | | | |
| HUVCM76 | 522660 | 1687 | 1-147 | 4374 | Arg-17 to Ser-38. | H0056: 1 | | |
| HUVBC21 | 671479 | 1688 | 2-199 | 4375 | Lys-1 to Arg-7, | L0745: 3, L0752: 3, | | |
| | | | | | Phe-48 to Phe-54. | H0056: 1, L0761: 1, | | |
| | | | | | | L0803: 1, L0749: 1 and | | |
| | | | | | | L0759: 1. | | |
| HUVAA46 | 667943 | 1689 | 521-384 | 4376 | | H0055: 1 | | |
| HUNAK12 | 839574 | 1690 | 120-278 | 4377 | | T0069: 1 and L0779: 1. | | |
| HUNAG41 | 711543 | 1691 | 185-352 | 4378 | Ser-33 to Ser-38. | L0439: 4 and T0069: 1. | | |
| HUNAF22 | 800452 | 1692 | 3-221 | 4379 | Ser-12 to Ile-19, | AR050: 45, AR051: | | |
| | | | | | Thr-38 to Pro-46. | 39, AR054: 35 | | |
| | | | | | | T0069: 1 | | |
| HUNAF20 | 961527 | 1693 | 171-326 | 4380 | Glu-26 to His-35, | T0069: 1, L0764: 1, | | |
| | | | | | Pro-44 to Asn-49. | L0771: 1, L0783: 1 and | | |
| | | | | | | L0756: 1. | | |
| HUNAE95 | 796691 | 1694 | 2-205 | 4381 | | L0754: 4, T0069: 1 and | | |
| | | | | | | L0599: 1. | | |
| HUNAE76 | 524239 | 1695 | 50-214 | 4382 | Ala-8 to Ser-14, | T0069: 1 | | |
| | | | | | Lys-21 to Pro-29. | | | |
| HUNAE02 | 921132 | 1696 | 2-388 | 4383 | Thr-26 to Pro-36, | T0069: 1 and L0764: 1. | | |
| | | | | | Ile-52 to Ser-60. | | | |
| HUNAD10 | 968590 | 1697 | 294-491 | 4384 | | T0069: 1 and L0766: 1. | | |
| HUNAC68 | 753817 | 1698 | 65-199 | 4385 | Asn-1 to Asn-6. | T0069: 1 and L0754: 1. | | |
| HUNAB76 | 968754 | 1699 | 2-190 | 4386 | | L0748: 2 and T0069: 1. | | |
| HUNAB42 | 714264 | 1700 | 3-170 | 4387 | Lys-1 to Asn-9. | T0069: 1 and L0747: 1. | | |
| HUKFS69 | 754186 | 1701 | 53-151 | 4388 | | H0059: 1 and L0756: | | |
| | | | | | | 1. | | |
| HUKFL89 | 574525 | 1702 | 1-174 | 4389 | Leu-32 to Tyr-38. | H0059: 1 and L0752: | | |
| | | | | | | 1. | | |
| HUKFL71 | 760581 | 1703 | 2-241 | 4390 | Gly-19 to Ser-24. | H0059: 1 | | |
| HUKFL52 | 574523 | 1704 | 67-213 | 4391 | | H0059: 1 | | |
| HUKFK53 | 577349 | 1705 | 263-433 | 4392 | | AR054: 9, AR050: 2, | | |
| | | | | | | AR051: 1 | | |
| | | | | | | H0059: 1 | | |
| HUKFE56 | 574381 | 1706 | 83-226 | 4393 | | H0059: 1 and L0747: | | |
| | | | | | | 1. | | |
| HUKFD95 | 796014 | 1707 | 47-364 | 4394 | Arg-26 to Arg-31. | L0766: 2 and H0059: | | |
| | | | | | | 1. | | |
| HUKEY01 | 921504 | 1708 | 29-178 | 4395 | Pro-7 to Gly-18. | H0059: 1 and L0779: | | |
| | | | | | | 1. | | |
| HUKER62 | 772501 | 1709 | 532-119 | 4396 | | H0059: 1 and L0439: | | |
| | | | | | | 1. | | |
| HUKEP18 | 957456 | 1710 | 852-265 | 4397 | | AR061: 14, AR054: | | |
| | | | | | | 11, AR050: 9, AR089: | | |
| | | | | | | 4 | | |
| | | | | | | L0758: 2, H0059: 1, | | |
| | | | | | | L0789: 1, L0665: 1, | | |
| | | | | | | L0749: 1 and L0779: 1. | | |
| HUKDY02 | 920815 | 1711 | 234-482 | 4398 | | H0059: 1, L0439: 1 | | |
| | | | | | | and L0747: 1. | | |
| HUKDU47 | 719465 | 1712 | 33-185 | 4399 | Met-23 to Gly-35, | L0455: 1, H0059: 1 | | |
| | | | | | Glu-40 to Ser-50. | and L0753: 1. | | |
| HUKDG10 | 968333 | 1713 | 3-329 | 4400 | | L0465: 2 and H0059: | | |
| | | | | | | 1. | | |
| HUKCP30 | 690933 | 1714 | 1-105 | 4401 | Lys-27 to His-35. | H0059: 1, L0657: 1 | | |
| | | | | | | and L0748: 1. | | |
| HUKCO11 | 967742 | 1715 | 76-450 | 4402 | Arg-1 to Asp-7, | L0766: 2, H0059: 1, | | |
| | | | | | Glu-26 to Ser-31, | L0764: 1 and L0774: 1. | | |
| | | | | | Glu-51 to Val-56, | | | |
| | | | | | Asp-59 to Val-69, | | | |
| | | | | | Glu-85 to Asn-94. | | | |
| HUKCL85 | 529718 | 1716 | 77-229 | 4403 | Phe-8 to Glu-15, | H0059: 1 | | |
| | | | | | Val-20 to Thr-25, | | | |
| | | | | | Cys-40 to Glu-49. | | | |
| HUKCC25 | 529723 | 1717 | 84-260 | 4404 | | H0059: 1 | | |
| HUKCC15 | 518537 | 1718 | 2-106 | 4405 | Pro-18 to Cys-25. | H0059: 1 | | |
| HUKAT59 | 628540 | 1719 | 399-136 | 4406 | Arg-16 to Cys-22, | H0059: 1 | | |
| | | | | | Pro-83 to Thr-88. | | | |
| HUKAQ76 | 502711 | 1720 | 351-178 | 4407 | | H0059: 1 and L0748: | | |
| | | | | | | 1. | | |
| HUKAO47 | 502911 | 1721 | 379-170 | 4408 | | L0748: 2 and H0059: | | |
| | | | | | | 1. | | |
| HUKAM19 | 672076 | 1722 | 150-329 | 4409 | Ala-47 to Thr-53. | H0059: 1 | | |
| HUKAM18 | 502912 | 1723 | 314-117 | 4410 | Asp-34 to Arg-41, | H0059: 1, | | |
| | | | | | Glu-44 to Lys-50. | L0794: 1, L0789: 1, | | |
| | | | | | | L0747: 1, L0750: 1 and | | |
| | | | | | | L0362: 1. | | |
| HUKAL44 | 716927 | 1724 | 139Δ402 | 4411 | Arg-1 to Gln-7, | H0059: 1, L0775: 1, | | |
| | | | | | Gln-11 to Ser-17, | L0664: 1 and L0592: 1. | | |
| | | | | | Ser-41 to His-46. | | | |
| HUKAJ91 | 790487 | 1725 | 159-1 | 4412 | | L0750: 2 and H0059: | | |
| | | | | | | 1. | | |
| HUKAJ83 | 524257 | 1726 | 317-102 | 4413 | Lys-1 to Gln-8. | H0059: 1 | | |
| HUKAD77 | 772734 | 1727 | 2-421 | 4414 | Ser-30 to Val-38, | H0059: 1 and L0755: | | |
| | | | | | Gln-44 to Ser-53, | 1. | | |
| | | | | | Pro-56 to Gly-63. | | | |
| HUKAB63 | 625273 | 1728 | 1-207 | 4415 | Trp-10 to Gly-16. | H0059: 1 | | |
| HUKAB25 | 677470 | 1729 | 274-2 | 4416 | | H0059: 1, L0520: 1, | | |
| | | | | | | L0753: 1 and L0731: 1. | | |
| HUKAA54 | 503630 | 1730 | 369-67 | 4417 | | H0059: 1 | | |
| HUKAA39 | 503627 | 1731 | 286-2 | 4418 | | L0439: 2 and H0059: | | |
| | | | | | | 1. | | |
| | 503628 | 2659 | 156-434 | 5346 | | | | |
| HUDBZ01 | 869026 | 1732 | 213-533 | 4419 | Arg-7 to Arg-13, | AR050: 75, AR054: | | |
| | | | | | Asn-31 to Ser-37. | 59, AR051: 51 | | |
| | | | | | | S0042: 1 | | |
| | 915945 | 2660 | 191-3 | 5347 | | | | |
| HUDBK39 | 886368 | 1733 | 77-487 | 4420 | Gly-43 to Leu-48, | AR054: 2, AR051: 0, | | |
| | | | | | Ser-57 to Lys-67. | AR050: 0 | | |
| | | | | | | S0042: 1 | | |
| HUDBE95 | 795796 | 1734 | 147-248 | 4421 | | S0042: 1 | | |
| HUDBE64 | 746508 | 1735 | 56-286 | 4422 | | S0042: 1 | | |
| HUDBE48 | 869034 | 1736 | 39-368 | 4423 | Gly-17 to Ala-30, | | | |
| | | | | | Gly-42 to Thr-56. | | | |
| HUDBE28 | 686520 | 1737 | 3-374 | 4424 | Glu-1 to Leu-6, | S0042; 1 | | |
| | | | | | Cys-10 to Asn-28, | | | |
| | | | | | Lys-41 to Tyr-50, | | | |
| | | | | | Gln-53 to Ser-60, | | | |
| | | | | | Pro-67 to His-78. | | | |
| HUDBE02 | 917361 | 1738 3-137 | 4425 | Phe-2 to Arg-7, | S0042: 1 | | | |
| | | | | | Asn-23 to Asn-32, | | | |
| | | | | | Gln-39 to Asn-45. | | | |
| HUDAK54 | 899753 | 1739 | 18-710 | 4426 | Thr-14 to Phe-26, | AR051: 32, AR050: | | |
| | | | | | Gln-46 to Arg-52, | 31, AR054: 25 | | |
| | | | | | Leu-74 to Tyr-84. | S0042: 1 | | |
| | | | | | Glu-125 to Glu-132, | | | |
| | | | | | Tyr-180 to Ser-186, | | | |
| | | | | | Leu-216 to Pro-222, | | | |
| | | | | | Val-226 to His-231. | | | |
| HUDAK19 | 671974 | 1740 | 109-234 | 4427 | Glu-27 to Glu-33. | L0783: 1, L0439: 1 | | |
| | | | | | | L0731: 1 and S0042: 1. | | |
| HTTKG12 | 969547 | 1741 | 1-171 | 4428 | Thr-1 to Ser-10. | H0634: 1 and L0593: | | |
| | | | | | | 1. | | |
| HTTKC85 | 956206 | 1742 | 380-240 | 4429 | | H0634: 1, L0662: 1 | | |
| | | | | | | and L0766: 1. | | |
| HTTVJ79 | 869602 | 1743 | 61-213 | 4430 | | H0634: 1 and L0766: | | |
| | | | | | | 1. | | |
| HTTJN26 | 869612 | 1744 | 132-497 | 4431 | Glu-53 to Gln-62, | L0770: 3, L0777: 3, | | |
| | | | | | Gly-80 to Val-86. | L0518: 2, L0779: 2, | | |
| | | | | | | L0758: 2, L0608: 2, | | |
| | | | | | | H0634: 1, L0764: 1, | | |
| | | | | | | L0803: 1, L0749: 1 and | | |
| | | | | | | L0752: 1. | | |
| HTTJK06 | 934094 | 1745 | 2-577 | 4432 | Gln-1 to Trp-16, | H0634: 1 and L0565: | | |
| | | | | | Asp-18 to Gly-25, | 1. | | |
| | | | | | Leu-38 to Pro-43, | | | |
| | | | | | Trp-146 to Gly-153. | | | |
| HTTIX05 | 931024 | 1746 | 395-532 | 4433 | | H0634: 1, L0803: 1, | | |
| | | | | | | L0749: 1 and L0779: 1. | | |
| HTTIR33 | 974323 | 1747 | 136-345 | 4434 | Lys-11 to Glu-18. | H0634: 1 | | |
| HTTIR04 | 926772 | 1748 | 86-235 | 4435 | | H0634: 1, L0766: 1 | | |
| | | | | | | and L0588: 1. | | |
| HTTIN11 | 965920 | 1749 | 452-625 | 4436 | | L0745: 2 and H0634: | | |
| | | | | | | 1. | | |
| HTTIE08 | 958169 | 1750 | 195-329 | 4437 | Ala-10 to Thr-16. | H0634: 1 and L0731: | | |
| | | | | | | 1. | | |
| HTTIB12 | 969568 | 1751 | 1-216 | 4438 | Pro-25 to Thr-31, | H0634: 1 and L0748: | | |
| | | | | | Pro-59 to Gly-72. | 1. | | |
| HTTHJ56 | 944914 | 1752 | 87-218 | 4439 | Asn-1 to Arg-11, | L0157: 1 and H0634: | | |
| | | | | | Val-23 to Ser-28, | 1. | | |
| | | | | | Asp-35 to Tyr-44. | | | |
| HTTFG12 | 751809 | 1753 | 128-373 | 4440 | Leu-21 to Gly-30. | H0040: 1 | | |
| HTTEZ61 | 742004 | 1754 | 146-301 | 4441 | Ser-24 to His-34. | H0040: 1 and L0439: | | |
| | | | | | | 1. | | |
| HTTEQ59 | 739445 | 1755 | 57-230 | 4442 | | H0040: 1, L0766: 1 | | |
| | | | | | | and L0748: 1. | | |
| HTTEQ01 | 917156 | 1756 | 2-205 | 4443 | Pro-28 to Thr-38, | H0040: 1, L0803: 1, | | |
| | | | | | Gly-47 to Arg-52. | L0439: 1 and L0777: 1. | | |
| HTTEO59 | 900662 | 1757 | 1-153 | 4444 | Gly-1 to Asp-8, | AR061: 5, AR089: 5 | | |
| | | | | | Leu-15 to Cys-20, | H0040: 1 | | |
| | | | | | Gly-24 to Ser-29. | | | |
| HTTEO53 | 728344 | 1758 | 396-545 | 4445 | Arg-2 to Ile-8, | H0040: 1, L0740: 1 | | |
| | | | | | Ser-34 to Cys-44. | and L0747: 1. | | |
| HTTEJ56 | 573669 | 1759 | 1-339 | 4446 | Pro-1 to Glu-7, | AR050: 2, AR051: 1, | | |
| | | | | | Thr-29 to Gly-35, | AR054: 0 | | |
| | | | | | Glu-63 to Ile-68, | L0439: 3 and H0040: | | |
| | | | | | Glu-89 to Asn-95, | 1. | | |
| | | | | | Glu-98 to Leu-105. | | | |
| HTTEB05 | 932294 | 1760 | 1-387 | 4447 | Arg-10 to Asp-15. | L0483: 1 and H0040: | | |
| | | | | | | 1. | | |
| HTTDO59 | 744438 | 1761 | 511-747 | 4448 | Arg-1 to Trp-9, | L0754: 2 and H0040: | 1q21 | 104770, |
| | | | | | Pro-13 to Gly-19, | 1. | | 107670, |
| | | | | | Gly-24 to Pro-32. | | | 110700, |
| | | | | | | | | 135940, |
| | | | | | | | | 145001, |
| | | | | | | | | 146790, |
| | | | | | | | | 152445, |
| | | | | | | | | 152445, |
| | | | | | | | | 159001, |
| | | | | | | | | 174000, |
| | | | | | | | | 179755, |
| | | | | | | | | 182860, |
| | | | | | | | | 182860, |
| | | | | | | | | 182860, |
| | | | | | | | | 191315, |
| | | | | | | | | 230800, |
| | | | | | | | | 230800, |
| | | | | | | | | 266200, |
| | | | | | | | | 600897, |
| | | | | | | | | 601105, |
| | | | | | | | | 601412, |
| | | | | | | | | 601652, |
| | | | | | | | | 602491 |
| HTTDM42 | 460948 | 1762 | 177-401 | 4449 | | AR061: 5, AR089: 5 | | |
| | | | | | | L0748: 2 and H0040: | | |
| | | | | | | 1. | | |
| HTTDL81 | 694222 | 1763 | 2-241 | 4450 | Ala-4 to Pro-22. | H0040: 1 and L0748: | | |
| | | | | | | 1. | | |
| HTTDL75 | 766551 | 1764 | 41-178 | 4451 | Gly-10 to Cys-16, | H0040: 1, L0742: 1 | | |
| | | | | | Arg-25 to Trp-31, | and L0592: 1. | | |
| | | | | | Pro-39 to Pro-46. | | | |
| HTTDA85 | 784537 | 1765 | 3-392 | 4452 | Arg-83 to Arg-88. | H0040: 1 and L0748: | | |
| | | | | | | 1. | | |
| HTTCQ95 | 796674 | 1766 | 2-241 | 4453 | Cys-19 to Pro-29. | H0040: 1 and L0755: | | |
| | | | | | | 1. | | |
| HTTCJ39 | 709581 | 1767 | 63-266 | 4454 | Ala-50 to Asp-55. | L0745: 2 and H0040: | | |
| | | | | | | 1. | | |
| HTTCD06 | 960599 | 1768 | 162-413 | 4455 | Lys-15 to Asn-23, | L0754: 2 and H0040: | | |
| | | | | | Asp-75 to Val-82. | 1. | | |
| HTTCB87 | 524841 | 1769 | 3-236 | 4456 | Pro-7 to Ala-26. | H0040: 1 and L0748: | | |
| | | | | | | 1. | | |
| HTTBR42 | 714220 | 1770 | 3-272 | 4457 | | H0040: 1 and L0592: | | |
| | | | | | | 1. | | |
| HTTBP62 | 932997 | 1771 | 1-615 | 4458 | Arg-12 to Gly-20, | L0764: 2 and H0040: | | |
| | | | | | His-102 to Ser-108, | 1. | | |
| | | | | | Ala-132 to Gln-137. | | | |
| HTTBO82 | 780164 | 1772 | 367-170 | 4459 | Asn-24 to Asp-32. | H0040: 1 and L0748: | | |
| | | | | | | 1. | | |
| HTTBM03 | 925409 | 1773 | 11-202 | 4460 | Arg-18 to Trp-29. | H0040: 1 and L0753: | | |
| | | | | | | 1. | | |
| HTTBI80 | 781590 | 1774 | 3-203 | 4461 | Asp-1 to Gln-14, | H0040: 1 and L0766: | | |
| | | | | | Phe-18 to Gly-33. | 1. | | |
| HTTBH95 | 530559 | 1775 | 125-256 | 4462 | Tyr-1 to Tyr-12. | H0040: 1 | | |
| HTTBH75 | 767520 | 1776 | 175-435 | 4463 | | H0040: 1 and L0439: | | |
| | | | | | | 1. | | |
| HTTBH36 | 530567 | 1777 | 186-311 | 4464 | | H0040: 1 | | |
| HTTAQ60 | 742377 | 1778 | 367-627 | 4465 | Asn-1 to Cys-12, | L0748: 3 and H0040: | | |
| | | | | | Asp-20 to Trp-37. | 1. | | |
| HTTAP45 | 717736 | 1779 | 65-262 | 4466 | | H0040: 1 | | |
| | 869717 | 2661 | 151-342 | 5348 | | | | |
| HTTAP21 | 671488 | 1780 | 632-787 | 4467 | | L0747: 2 and H0040: | | |
| | | | | | | 1. | | |
| HTTAP09 | 826343 | 1781 | 252-440 | 4468 | | H0040: 1 and L0591: | | |
| | | | | | | 1. | | |
| HTTAN34 | 509454 | 1782 | 111-230 | 4469 | Ser-4 to Lys-12. | L0595: 2, H0040: 1 | | |
| | | | | | | and L0794: 1. | | |
| HTTAJ93 | 791413 | 1783 | 220-420 | 4470 | | L0748: 2 and H0040: | | |
| | | | | | | 1. | | |
| HTTAH03 | 965134 | 1784 | 73-294 | 4471 | Ile-15 to Phe-21, | L0769: 2 and H0040: | | |
| | | | | | Pro-31 to Cys-39, | 1. | | |
| | | | | | Pro-41 to Pro-49, | | | |
| | | | | | Leu-69 to Pro-74. | | | |
| HTTAC77 | 772735 | 1785 | 435-632 | 4472 | | L0752: 2, H0040: 1 | | |
| | | | | | | and L0756: 1. | | |
| HTTAA94 | 793001 | 1786 | 2-271 | 4473 | Asn-14 to Leu-20, | L0749: 2, H0040: 1, | | |
| | | | | | Gln-30 to Pro-46. | L0748: 1 and L0591: 1. | | |
| HTTAA39 | 710355 | 1787 | 298-137 | 4474 | | H0040: 1 and L0731: | | |
| | | | | | | 1. | | |
| HTLIP06 | 934207 | 1788 | 20-241 | 4475 | | H0618: 1, L0751: 1 | | |
| | | | | | | and L0758: 1. | | |
| HTLID06 | 974047 | 1789 | 318-491 | 4476 | Gln-10 to Ser-16. | H0618: 1 | | |
| HTLHV59 | 965808 | 1790 | 41-277 | 4477 | Pro-8 to Ala-15, | H0618: 1 and L0731: | | |
| | | | | | Arg-23 to Glu-35, | 1. | | |
| | | | | | Pro-41 to Val-49. | | | |
| HTLHU81 | 870150 | 1791 | 1-345 | 4478 | | L0591: 2 and H0618: | | |
| | | | | | | 1. | | |
| HTLHU63 | 870147 | 1792 | 219-527 | 4479 | Glu-33 to Arg-40. | L0439: 3 and H0618: | | |
| | | | | | | 1. | | |
| HTLHS69 | 870152 | 1793 | 144-593 | 4480 | Lys-34 to Pro-40, | H0618: 1 and L0770: | | |
| | | | | | Glu-51 to Gly-56, | 1. | | |
| | | | | | Glu-117 to Gly-124. | | | |
| HTLHS05 | 933720 | 1794 | 724-113 | 4481 | Pro-42 to Ser-47, | H0618: 1 and L0771: | | |
| | | | | | Ala-51 to Arg-68, | 1. | | |
| | | | | | Leu-109 to Gly-117. | | | |
| HTLHK57 | 894863 | 1795 | 736-1140 | 4482 | Phe-10 to Pro-19, | AR054: 35, AR051: | | |
| | | | | | Gly-107 to Arg-112, | 24, AR050: 10, AR061: | | |
| | | | | | Thr-128 to Lys-135. | 8, AR089: 3 | | |
| | | | | | | H0618: 1, L0766: 1 | | |
| | | | | | | and L0749: 1. | | |
| | 946914 | 2662 | 1342-1788 | 5349 | Ser-49 to Lys-58, | | | |
| | | | | | Glu-75 to Pro-91. | | | |
| HTLHJ51 | 865399 | 1796 | 165-878 | 4483 | Gln-3 to Arg-10, | H0618: 1, L0749: 1 | | |
| | | | | | Leu-74 to Arg-80, | and L0759: 1. | | |
| | | | | | Pro-87 to Cys-92, | | | |
| | | | | | Ser-144 to Pro-158. | | | |
| HTLHB93 | 945862 | 1797 | 1-375 | 4484 | Glu-1 to Glu-6. | AR061: 1, AR089: 1 | | |
| | | | | | | H0618: 1 and L0758: | | |
| | | | | | | 1. | | |
| HTLHA63 | 870172 | 1798 | 243-566 | 4485 | | H0618: 1 and L0779: | | |
| | | | | | | 1. | | |
| HTLGS10 | 963458 | 1799 | 1-483 | 4486 | Ser-25 to Asn-32, | L0769: 2 and H0618: | | |
| | | | | | His-40 to Glu-45. | 1. | | |
| HTLGR32 | 928245 | 1800 | 657-950 | 4487 | Arg-14 to Gly-29. | L0779: 3, L0758: 3, | | |
| | | | | | | H0618: 1 and L0600: 1. | | |
| HTLGP84 | 782194 | 1801 | 1-393 | 4488 | Ser-1 to Lys-12, | L0439: 3, L0753: 3, | | |
| | | | | | Met-22 to Gly-29, | H0618: 1, L0741: 1, | | |
| | | | | | Pro-62 to Gly-69. | L0745: 1 and L0746: 1. | | |
| HTLGK08 | 958304 | 1802 | 182-388 | 4489 | Glu-35 to Ile-51. | H0618: 1 and L0758: | | |
| | | | | | | 1. | | |
| HTLGC43 | 870228 | 1803 | 3-350 | 4490 | Glu-1 to His-15, | L0794: 2, H0618: 1 | | |
| | | | | | Gly-21 to Cys-26, | and L0768: 1. | | |
| | | | | | Thr-34 to Pro-42, | | | |
| | | | | | Pro-49 to Glu-57. | | | |
| HTLEQ92 | 932882 | 1804 | 3-305 | 4491 | | L0439: 3 and H0253: | | |
| | | | | | | 1. | | |
| HTLEP21 | 671151 | 1805 | 3-416 | 4492 | Val-25 to Ala-31. | H0253: 1 and L0767: | | |
| | | | | | | 1. | | |
| HTLEN77 | 772363 | 1806 | 90-422 | 4493 | Ala-1 to Ala-35. | AR089: 33, AR061: 18 | | |
| | | | | | | L0748: 2 and H0253: | | |
| | | | | | | 1. | | |
| HTLEM92 | 573400 | 1807 | 1-429 | 4494 | Gly-1 to Arg-13, | H0253: 1 | | |
| | | | | | Phe-19 to Arg-33. | | | |
| | 792812 | 2663 | 360-599 | 5350 | Glu-28 to Val-34, | | | |
| | | | | | Trp-58 to Ser-64. | | | |
| HTLEL16 | 384492 | 1808 | 2-355 | 4495 | Thr-30 to Glu-35, | H0253: 1 and L0439: | | |
| | | | | | Asp-101 to Gly-106, | 1. | | |
| | | | | | Ser-112 to Ser-117. | | | |
| HTLEG67 | 751842 | 1809 | 138-317 | 4496 | Thr-6 to Ser-11. | L0748: 2 and H0253: | | |
| | | | | | | 1. | | |
| HTLDZ81 | 778180 | 1810 | 3-296 | 4497 | Ser-5 to Arg-17. | H0253: 1 | | |
| HTLDW27 | 961353 | 1811 | 197-601 | 4498 | His-1 to Cys-8, | H0253: 1, L0761: 1, | | |
| | | | | | His-35 to Phe-40. | L0649: 1 and L0805: 1. | | |
| HTLDO01 | 913669 | 1812 | 3-308 | 4499 | Glu-63 to Ala-68, | L0758: 3 and H0253: | | |
| | | | | | Gly-84 to Tyr-102. | 1. | | |
| HTLDG43 | 715439 | 1813 | 1-132 | 4500 | Ala-28 to Trp-33. | H0253: 1 | | |
| HTLDB18 | 868533 | 1814 | 2-448 | 4501 | Ser-13 to Gly-19, | H0253: 1 and L0439: | | |
| | | | | | Leu-22 to Asn-36, | 1. | | |
| | | | | | Asn-57 to Ser-68, | | | |
| | | | | | Pro-82 to Trp-107. | | | |
| HTLCZ79 | 572853 | 1815 | 1-285 | 4502 | Asp-72 to Leu-78. | H0253: 1 | | |
| HTLCX66 | 578921 | 1816 | 23-199 | 4503 | Gly-6 to Thr-12, | H0253: 1 | | |
| | | | | | Pro-28 to Arg-34, | | | |
| | | | | | Asn-39 to Asn-47. | | | |
| HTLCO02 | 921045 | 1817 | 152-382 | 4504 | Arg-50 to Trp-58. | H0253: 1 and L0768: | | |
| | | | | | | 1. | | |
| HTLCG65 | 413333 | 1818 | 3-143 | 4505 | Ala-14 to Asn-22. | H0253: 1 | | |
| HTLCG59 | 530039 | 1819 | 6-218 | 4506 | | H0253: 1 | | |
| HTLCA03 | 870290 | 1820 | 50-250 | 4507 | | H0253: 1 | | |
| HTLBH67 | 751985 | 1821 | 1-282 | 4508 | | AR061: 2, AR089: 1 | | |
| | | | | | | L0752: 3, L0747: 2, | | |
| | | | | | | H0294: 1, H0253: 1, | | |
| | | | | | | H0046: 1, H0040: 1, | | |
| | | | | | | H0063: 1, H0494: 1, | | |
| | | | | | | S0352: 1, L0769: 1, | | |
| | | | | | | L0766: 1, L0804: 1, | | |
| | | | | | | L0805: 1, L0791: 1, | | |
| | | | | | | H0521: 1, L0779: 1, | | |
| | | | | | | L0780: 1, L0731: 1 and | | |
| | | | | | | L0758: 1. | | |
| HTLBC07 | 954111 | 1822 | 259-408 | 4509 | | L0758: 2 and H0253: | | |
| | | | | | | 1. | | |
| HTLBB72 | 766270 | 1823 | 3-590 | 4510 | His-1 to Trp-11, | H0253: 1, L0745: 1 | | |
| | | | | | Lys-13 to Ser-27, | and L0750: 1. | | |
| | | | | | Glu-33 to Ser-38. | | | |
| HTLAI30 | 690936 | 1824 | 133-492 | 4511 | | L0439: 3, L0438: 2, | | |
| | | | | | | H0253: 1 and L0769: 1. | | |
| HTLAF33 | 870300 | 1825 | 1-228 | 4512 | Phe-2 to Arg-12. | H0253: 1 | | |
| HTLAC61 | 683247 | 1826 | 28-165 | 4513 | | H0253: 1 | 6p25-ter | |
| HTLAC39 | 575343 | 1827 | 74-226 | 4514 | Ala-1 to Trp-18. | H0253: 1 | | |
| HTLAB55 | 732480 | 1828 | 3-320 | 4515 | Gln-32 to Leu-37, | H0253: 1 and L0439: | | |
| | | | | | Gln-65 to Val-70, | 1. | | |
| | | | | | Thr-73 to Pro-79. | | | |
| HTLAB29 | 879168 | 1829 | 133-426 | 4516 | Gly-1 to Thr-9. | H0253: 1 and L0747: | | |
| | | | | | | 1. | | |
| HTFBE02 | 920507 | 1830 | 1-363 | 4517 | Asp-28 to Leu-35, | AR089: 1, AR061: 0 | | |
| | | | | | Asp-52 to Cys-57. | L0439: 2, L0021: 1, | | |
| | | | | | | H0372: 1, L0769: 1, | | |
| | | | | | | L0649: 1, L0748: 1, | | |
| | | | | | | L0485: 1, L0604: 1 and | | |
| | | | | | | L0361: 1. | | |
| HTEQS95 | 972746 | 1831 | 311-496 | 4518 | Ser-37 to Ser-43. | H0616: 1 | | |
| HTEQS90 | 973426 | 1832 | 86-388 | 4519 | Pro-45 to Pro-50, | H0616: 1 | | |
| | | | | | Arg-64 to Ser-77, | | | |
| | | | | | Ile-88 to Ala-101. | | | |
| HTEQP03 | 870516 | 1833 | 129-596 | 4520 | Pro-71 to Cys-82. | H0616: 1 and L0794: | | |
| | | | | | | 1. | | |
| HTEQN83 | 908508 | 1834 | 3-293 | 4521 | Met-12 to Met-24, | AR061: 4, AR089: 1 | | |
| | | | | | Pro-46 to Tyr-52, | L0758: 2 and H0616: | | |
| | | | | | Arg-92 to Lys-97. | 1. | | |
| HTEQB08 | 958291 | 1835 | 147-437 | 4522 | Val-48 to Gly-54, | L0748: 2, H0616: 1 | | |
| | | | | | Asp-63 to Arg-74, | and L0747: 1. | | |
| | | | | | Gly-87 to Leu-92. | | | |
| HTEPY28 | 870559 | 1836 | 263-412 | 4523 | Ala-1 to Met-6, | L0758: 3 and H0616: | | |
| | | | | | Gly-9 to Ser-15. | 1. | | |
| HTEPV63 | 870549 | 1837 | 614-931 | 4524 | Leu-47 to Thr-59, | H0616: 1, L0519: 1, | | |
| | | | | | Pro-73 to Pro-87. | L0748: 1 and L0779: 1. | | |
| HTEPE35 | 948475 | 1838 | 839-78 | 4525 | Tyr-1 to Lys-8, | AR061: 4, AR089: 1 | | |
| | | | | | Phe-19 to Ser-24, | L0758: 7, L0768: 2, | | |
| | | | | | Thr-28 to Ser-34, | H0616: 1 and L0151: 1 | | |
| | | | | | Pro-54 to Trp-70. | | | |
| HTEOY82 | 948845 | 1839 | 159-392 | 4526 | | H0616: 1 and L0779: | | |
| | | | | | | 1. | | |
| HTEOO83 | 836721 | 1840 | 1-318 | 4527 | Lys-22 to Asp-27. | H0616: 1 and L0774: | | |
| | | | | | | 1. | | |
| HTEOE28 | 870581 | 1841 | 18-296 | 4528 | Leu-80 to Lys-86 | H0616: 1 and L0779: | | |
| | | | | | | 1. | | |
| HTENY44 | 870588 | 1842 | 3-191 | 4529 | Asp-16 to Arg-23, | L0758: 3, H0616: 1, | | |
| | | | | | Leu-40 to Asp-47. | L0794: 1, L0791: 1 and | | |
| | | | | | | L0779: 1. | | |
| HTENV06 | 933294 | 1843 | 133-390 | 4530 | Glu-1 to Ser-10. | H0616: 1 and L0755: | | |
| | | | | | | 1. | | |
| HTENS74 | 773925 | 1844 | 3-329 | 4531 | Arg-30 to Arg-37, | L0755: 2 and H0616: | 17p13.3 | 113721, |
| | | | | | Asn-40 to Glu-46, | 1. | | 247200, |
| | | | | | Leu-56 to Arg-64, | | | 600059, |
| | | | | | Ala-85 to Arg-102. | | | 601545 |
| HTENR26 | 870595 | 1845 | 15-146 | 4532 | Thr-12 to Ile-17. | H0616: 1 and L0768: | | |
| | | | | | | 1. | | |
| HTENQ92 | 790908 | 1846 | 54-494 | 4533 | Ala-6 to Trp-19, | L0731: 3, H0616: 1 | | |
| | | | | | Leu-34 to Gln-39, | and L0750: 1. | | |
| | | | | | Asp-63 to Arg-76, | | | |
| | | | | | Thr-94 to Gly-105, | | | |
| | | | | | Asp-108 to Phe-113, | | | |
| | | | | | Lys-122 to Phe-128, | | | |
| | | | | | Asn-131 to Glu-136, | | | |
| | | | | | Arg-142 to Gly-147. | | | |
| HTENP08 | 958382 | 1847 | 58-447 | 4534 | Tyr-2 to His-7 | H0616: 1 and L0794: | | |
| | | | | | | 1. | | |
| HTENL95 | 795314 | 1848 | 149-322 | 4535 | Pro-43 to Ile-51. | L0748: 2, H0616: 1, | | |
| | | | | | | L0439: 1 and L0740: 1. | | |
| HTENL73 | 974363 | 1849 | 109-426 | 4536 | Pro-29 to Thr-34, | H0616: 1 | | |
| | | | | | Cys-42 to Ser-47, | | | |
| | | | | | Gln-52 to His-58, | | | |
| | | | | | Pro-68 to Cys-80. | | | |
| HTENA08 | 958380 | 1850 | 60-206 | 4537 | | H0616: 1 and L0758: | | |
| | | | | | | 1. | | |
| HTEMY05 | 880592 | 1851 | 1-363 | 4538 | Cys-18 to Lys-43, | H0616: 1 and L0362: | | |
| | | | | | Ser-45 to Leu-52, | 1. | | |
| | | | | | Ser-63 to Ser-68, | | | |
| | | | | | Lys-75 to Arg-80, | | | |
| | | | | | His-113 to Lys-121. | | | |
| HTEMV66 | 813038 | 1852 | 1-318 | 4539 | Ser-38 to Pro-45. | AR061: 5, AR089: 1 | | |
| | | | | | | H0616: 1 and L0758: | | |
| | | | | | | 1. | | |
| HTEMU66 | 944419 | 1853 | 454-963 | 4540 | Ala-1 to Gln-7, | AR061: 7, AR089: 5 | | |
| | | | | | Lys-24 to Ser-30, | | | |
| | | | | | Pro-44 to Asn-53, | | | |
| | | | | | Glu-104 to Asp-112, | | | |
| | | | | | Leu-152 to Ser-157. | | | |
| HTEMS01 | 915308 | 1854 | 21-197 | 4541 | Glu-3 to Cys-9, | L0758: 4 and H0616: | | |
| | | | | | Gln-32 to Asp-45. | 1. | | |
| HTEMO58 | 964769 | 1855 | 77-361 | 4542 | | H0616: 1 and L0758: | | |
| | | | | | | 1. | | |
| HTEMN80 | 775543 | 1856 | 51-137 | 4543 | | H0616: 1 and L0439: | | |
| | | | | | | 1. | | |
| HTEMM91 | 968396 | 1857 | 58-378 | 4544 | His-15 to Arg-22. | H0616: 1 and L0747: | | |
| | | | | | | 1. | | |
| HTEMI51 | 870613 | 1858 | 283-573 | 4545 | Arg-24 to Pro-30. | H0616: 1, L0779: 1 | | |
| | | | | | | and L0758: 1. | | |
| HTEMB57 | 849214 | 1859 | 198-374 | 4546 | His-44 to Phe-49, | H0616: 1 and L0758: | | |
| | | | | | Pro-53 to Pro-58. | 1. | | |
| HTELY90 | 787549 | 1860 | 2-250 | 4547 | | H0616: 1 and L0748: | | |
| | | | | | | 1. | | |
| HTELV29 | 806421 | 1861 | 33-641 | 4548 | Pro-28 to His-34, | H0616: 1 and L0594: | | |
| | | | | | Lys-51 to Arg-59, | 1. | | |
| | | | | | Arg-66 to Phe-82, | | | |
| | | | | | Thr-92 to Gln-100, | | | |
| | | | | | Ala-106 to Gln-118, | | | |
| | | | | | Pro-123 to Leu-133, | | | |
| | | | | | Ala-137 to Glu-147, | | | |
| | | | | | Arg-185 to Leu-190. | | | |
| HTELP07 | 952274 | 1862 | 102-296 | 4549 | Thr-15 to Lys-28, | H0616: 1, L0764: 1, | | |
| | | | | | Gly-47 to Thr-54. | L0779: 1 and L0758: 1. | | |
| HTELM71 | 954892 | 1863 | 63-329 | 4550 | Pro-24 to Asn-37, | L0758: 2 and H0616: | | |
| | | | | | Asp-43 to Thr-49, | 1. | | |
| | | | | | Leu-63 to Gln-72. | | | |
| HTELA02 | 918699 | 1864 | 185-451 | 4551 | Ala-48 to Lys-57, | L0794: 2, H0616: 1 | | |
| | | | | | Ser-75 to Phe-84. | and L0758: 1. | | |
| HTEKU62 | 754010 | 1865 | 43-657 | 4552 | His-1 to Lys-7. | H0038: 1 and L0439: | | |
| | | | | | | 1. | | |
| HTEKI62 | 812862 | 1866 | 68-286 | 4553 | Pro-43 to Asn-48. | L0766: 2, H0038: 1, | | |
| | | | | | | L0637: 1, L0750: 1 and | | |
| | | | | | | L0590: 1. | | |
| HTEKH17 | 942526 | 1867 | 83-391 | 4554 | | AR061: 29, AR050: | | |
| | | | | | | 21, AR054: 21, AR089: | | |
| | | | | | | 11, AR061: 11 | | |
| | | | | | | H0038: 1 | | |
| HTEKD77 | 772397 | 1868 | 105-428 | 4555 | Ala-5 to Arg-15. | H0038: 1 and L0756: | | |
| | | | | | | 1. | | |
| HTEJV94 | 793039 | 1869 | 92-241 | 4556 | Pro-19 to Phe-28. | L0758: 2 and H0038: | | |
| | | | | | | 1. | | |
| HTEJO46 | 717850 | 1870 | 282-401 | 4557 | Ser-5 to Cys-16, | H0038: 1 and L0743: | | |
| | | | | | Glu-20 to Ile-25. | 1. | | |
| HTEJN12 | 653252 | 1871 | 1-279 | 4558 | | H0038: 1 and L0595: | Xp22 | 300000, |
| | | | | | | 1. | | 300066, |
| | | | | | | | | 300077, |
| | | | | | | | | 300310, |
| | | | | | | | | 301220, |
| | | | | | | | | 302350, |
| | | | | | | | | 304050, |
| | | | | | | | | 304110, |
| | | | | | | | | 306100, |
| | | | | | | | | 309530, |
| | | | | | | | | 309585, |
| | | | | | | | | 312040 |
| HTEJL30 | 696784 | 1872 | 23-301 | 4559 | | L0748: 2 and H0038: | 15q21.1-q21.2 | 107910, |
| | | | | | | 1. | | 107910, |
| | | | | | | | | 109700, |
| | | | | | | | | 114240, |
| | | | | | | | | 134797, |
| | | | | | | | | 134797, |
| | | | | | | | | 134797, |
| | | | | | | | | 151670, |
| | | | | | | | | 600839, |
| | | | | | | | | 601780, |
| | | | | | | | | 602099 |
| HTEJC70 | 490772 | 1873 | 601-380 | 4560 | | H0038: 1 and L0748: | | |
| | | | | | | 1. | | |
| | 870649 | 2664 | 1-330 | 5351 | Arg-1 to Arg-6, | | | |
| | | | | | Pro-17 to Ala-23, | | | |
| | | | | | Gly-33 to Gln-40, | | | |
| | | | | | Arg-45 to Arg-73. | | | |
| HTEJB07 | 953801 | 1874 | 79-264 | 4561 | Thr-1 to Gly-7, | L0779: 3, L0758: 2 and | | |
| | | | | | Cys-35 to Gly-51. | H0038: 1 | | |
| HTEIS34 | 887112 | 1875 | 383-135 | 4562 | Cys-33 to Asn-38. | H0038: 1 and L0366: | | |
| | | | | | | 1. | | |
| HTEIS25 | 870660 | 1876 | 3-299 | 4563 | Pro-31 to Arg-37, | L0758: 4 and H0038: | | |
| | | | | | Phe-39 to Ala-55. | 1. | | |
| HTEIN26 | 684711 | 1877 | 178-417 | 4564 | Gly-1 to Glu-9, | H0038: 1 and L0754: | | |
| | | | | | Ile-12 to Lys-30, | 1. | | |
| | | | | | Cys-34 to Lys-39, | | | |
| | | | | | Glu-55 to Gln-62, | | | |
| | | | | | Val-66 to Lys-72. | | | |
| HTEIL36 | 708304 | 1878 | 69-395 | 4565 | | H0038: 1, L0768: 1, | | |
| | | | | | | L0438: 1 and L0779: 1. | | |
| HTEIJ58 | 491030 | 1879 | 379-179 | 4566 | Asp-19 to Ser-25. | H0038: 1 | | |
| | 870667 | 2665 | 3-281 | 5352 | Ile-1 to Phe-9, | | | |
| | | | | | Gly-73 to Gly-82. | | | |
| HTEID15 | 395868 | 1880 | 44-151 | 4567 | Gln-1 to Leu-6. | H0038: 1 | | |
| HTEIB38 | 839966 | 1881 | 39-296 | 4568 | His-1 to Asp-9, | H0038: 1 and L0779: | | |
| | | | | | Lys-37 to Glu-45. | 1. | | |
| HTEIB37 | 870671 | 1882 | 19-264 | 4569 | Gln-11 to Cys-18. | H0038: 1 | | |
| HTEIB03 | 921926 | 1883 | 35-235 | 4570 | Pro-2 to Thr-13. | H0038: 1 | | |
| HTEIA57 | 734983 | 1884 | 1-225 | 4571 | Glu-1 to Ser-18. | L0748: 2 and H0038: | | |
| | | | | | | 1. | | |
| HTEHX57 | 734976 | 1885 | 279-446 | 4572 | Gly-14 to Val-21, | H0038: 1, L0740: 1 | | |
| | | | | | Thr-25 to Leu-32. | and L0754: 1. | | |
| HTEHV11 | 967439 | 1886 | 59-361 | 4573 | Gln-9 to Ala-21, | H0038: 1, L0779: 1 | | |
| | | | | | Thr-24 to Thr-29. | and L0758: 1. | | |
| HTEHS17 | 664436 | 1887 | 15-233 | 4574 | Lys-30 to Leu-39, | L0758: 3, L0151: 2, | | |
| | | | | | Glu-42 to Ser-53. | H0038: 1 and L0779: 1. | | |
| HTEHJ11 | 964956 | 1888 | 147-254 | 4575 | Gly-10 to Arg-19. | L0163: 1 and H0038: | | |
| | | | | | | 1. | | |
| HTEGW02 | 920628 | 1889 | 64-747 | 4576 | Lys-1 to Arg-27, | L0758: 3, L0776: 2, | | |
| | | | | | Thr-42 to Met-57, | L0779: 2 and H0038: 1. | | |
| | | | | | Gln-89 to Ala-95, | | | |
| | | | | | Asp-113 to Ser-119, | | | |
| | | | | | Thr-128 to Thr-156, | | | |
| | | | | | Phe-179 to Ser-187. | | | |
| HTEGU55 | 931017 | 1890 | 173-388 | 4577 | Ala-1 to Lys-10, | L0439: 2 and H0038: | 20q13.12 | 602025 |
| | | | | | Pro-29 to Ser-36, | 1. | | |
| | | | | | Gly-46 to Ser-58, | | | |
| | | | | | Ile-62 to Cys-67. | | | |
| HTEGS24 | 932987 | 1891 | 130-600 | 4578 | Glu-13 to Ser-20, | H0038: 1 and L0766: | | |
| | | | | | Pro-33 to Phe-38, | | | |
| | | | | | Ser-41 to Lys-49. | | | |
| HTEGJ74 | 765901 | 1892 | 3-452 | 4579 | | AR089: 3, AR061: 2 | | |
| | | | | | | L0439: 2 and H0038: | | |
| | | | | | | 1. | | |
| HTEGJ56 | 732630 | 1893 | 272-457 | 4580 | Asp-26 to Trp-35. | H0038: 1 and L0755: | | |
| | | | | | | 1. | | |
| HTEGI38 | 709420 | 1894 | 74-325 | 4581 | | H0038: 1 and L0749: | | |
| | | | | | | 1. | | |
| HTEGH60 | 545137 | 1895 | 3-221 | 4582 | Gly-5 to Gly-12. | H0038: 1 | | |
| HTEGC30 | 690998 | 1896 | 2-97 | 4583 | | H0038: 1 and L0756: | | |
| | | | | | | 1. | | |
| HTEFX90 | 887616 | 1897 | 3-581 | 4584 | | AR050: 9, AR051: 3, | | |
| | | | | | | AR054: 1 | | |
| | | | | | | H0038: 1, L0750: 1 | | |
| | | | | | | and L0755: 1. | | |
| HTEFU18 | 666920 | 1898 | 3-353 | 4585 | Leu-25 to Asp-35, | H0038: 1, L0766: 1, | | |
| | | | | | Ser-41 to Tyr-47, | L0789: 1 and L0749: 1. | | |
| | | | | | Trp-72 to Pro-77, | | | |
| | | | | | Lys-106 to Arg-112. | | | |
| HTEFO46 | 719280 | 1899 | 133-408 | 4586 | Pro-28 to Tyr-38, | L0591: 2, H0038: 1, | | |
| | | | | | Thr-40 to Lys-48, | L0381: 1, L0779: 1 and | | |
| | | | | | Val-61 to Thr-69, | L0758: 1. | | |
| | | | | | Glu-74 to Gln-82. | | | |
| HTEFO28 | 685383 | 1900 | 150-464 | 4587 | Thr-6 to Gln-12. | H0038: 1, L0744: 1 | | |
| | | | | | | and L0756: 1. | | |
| HTEEU78 | 530196 | 2-256 | 4588 | Ile-1 to Ala-7, | H0038: 1 | | | |
| | | | | | Arg-26 to Gly-38. | | | |
| HTEEU35 | 707717 | 1902 | 2-115 | 4589 | | H0038: 1 | | |
| HTEEU27 | 575476 | 1903 | 99-227 | 4590 | Glu-15 to Ser-20. | H0038: 1 | | |
| HTEEU18 | 530203 | 1904 | 2-280 | 4591 | Ser-14 to Ser-25, | H0038: 1 and L0758: | 1p21 | 102770, |
| | | | | | Leu-42 to Glu-62, | 1. | | 120280, |
| | | | | | Ala-75 to Thr-84. | | | 120280, |
| | | | | | | | | 166600, |
| | | | | | | | | 170995, |
| | | | | | | | | 232400, |
| | | | | | | | | 232400, |
| | | | | | | | | 600309, |
| | | | | | | | | 601414, |
| | | | | | | | | 601691, |
| | | | | | | | | 601691, |
| | | | | | | | | 601691, |
| | | | | | | | | 601691, |
| | | | | | | | | 601718, |
| | | | | | | | | 602094 |
| HTEEU17 | 530200 | 1905 | 76-303 | 4592 | Pro-40 to Leu-50, | H0038: 1 | | |
| | | | | | Ser-64 to Gln-74. | | | |
| HTEET22 | 675071 | 1906 | 206-373 | 4593 | Thr-20 to His-29, | H0038: 1, L0756: 1 | | |
| | | | | | Pro-31 to Ser-38. | and L0758: 1. | | |
| HTEEF25 | 677513 | 1907 | 123-341 | 4594 | | H0038: 1, L0794: 1 | | |
| | | | | | | and L0758: 1, | | |
| HTEEB82 | 780161 | 1908 | 151-288 | 4595 | Ser-11 to Arg-19. | L0748: 2 and H0038: | | |
| | | | | | | 1. | | |
| HTEDX39 | 530201 | 1909 | 123-260 | 4596 | | H0038: 1 | | |
| HTEDX04 | 927850 | 1910 | 114-344 | 4597 | | H0038: 1 | | |
| HTEDX03 | 925353 | 1911 | 1-204 | 4598 | | H0038: 1 | | |
| HTEDW96 | 881958 | 1912 | 86-511 | 4599 | Thr-48 to Ser-53, | L0601: 2 and H0038: | 2q37.2 | |
| | | | | | Gly-63 to Arg-68, | 1. | | |
| | | | | | Gly-77 to Trp-85, | | | |
| | | | | | Gln-99 to Gly-112, | | | |
| | | | | | Arg-131 to Arg-142. | | | |
| HTEDW59 | 530448 | 1913 | 1-213 | 4600 | Gly-17 to Glu-29. | H0038: 1 | | |
| HTEDV86 | 785818 | 1914 | 86-322 | 4601 | Ser-47 to Phe-57. | H0038: 1 and L0749: | | |
| | | | | | | 1. | | |
| HTEDU53 | 727362 | 1915 | 2-253 | 4602 | Gly-22 to Arg-28. | H0038: 1 and L0756: | | |
| | | | | | | 1. | | |
| HTEDS40 | 934047 | 1916 | 147-509 | 4603 | | H0038: 1 | | |
| HTEDS06 | 960645 | 1917 | 625-170 | 4604 | | H0038: 1 and L0779: | | |
| | | | | | | 1. | | |
| HTEDO75 | 767024 | 1918 | 60-197 | 4605 | | H0038: 1 | | |
| HTEDK72 | 766343 | 1919 | 137-283 | 4606 | | H0038: 1 and L0740: | | |
| | | | | | | 1. | | |
| HTEDJ92 | 522827 | 1920 | 3-143 | 4607 | | H0038: 1 | | |
| HTEDJ63 | 508086 | 1921 | 29-322 | 4608 | | H0038: 1 | | |
| HTEDI09 | 522969 | 1922 | 233-409 | 4609 | | H0038: 1 | | |
| HTEDI01 | 961028 | 1923 | 92-229 | 4610 | | H0038: 1 | | |
| HTEDH90 | 909165 | 1924 | 3-311 | 4611 | Phe-1 to Pro-7, | AR061: 3, AR089: 1 | | |
| | | | | | Trp-32 to Thr-39. | H0038: 1 | | |
| HTEDH76 | 522940 | 1925 | 3-170 | 4612 | Gly-2 to Ile-13. | H0038: 1 | | |
| HTEDH42 | 615250 | 1926 | 18-353 | 4613 | Leu-56 to Leu-63, | AR061: 6, AR089: 4 | | |
| | | | | | Gly-103 to Arg-108. | H0038: 1 | | |
| HTEDH30 | 522936 | 1927 | 1-249 | 4614 | Asn-1 to Gly-17. | H0038: 1 | | |
| HTEDH17 | 522938 | 1928 | 80-385 | 4615 | Pro-67 to Gly-75. | H0038: 1 | | |
| HTEDH06 | 869427 | 1929 | 2-361 | 4616 | Ile-1 to Lys-9, | H0038: 1 | | |
| | | | | | Pro-88 to Lys-100. | | | |
| HTEDG75 | 890715 | 1930 | 162-371 | 4617 | Arg-43 to Thr-50. | AR050: 42, AR054: | | |
| | | | | | | 35, AR051: 33 | | |
| | | | | | | H0038: 1 | | |
| HTEDG26 | 519947 | 1931 | 1-396 | 4618 | Asn-1 to Arg-8, | H0038: 1 | | |
| | | | | | Leu-18 to Asp-23, | | | |
| | | | | | Glu-84 to His-89. | | | |
| HTEDF96 | 614726 | 1932 | 1-174 | 4619 | Leu-22 to Arg-34. | H0038: 1 | 19q13.3 | 113900, |
| | | | | | | | | 126340, |
| | | | | | | | | 126391, |
| | | | | | | | | 130410, |
| | | | | | | | | 134790, |
| | | | | | | | | 138570, |
| | | | | | | | | 160900, |
| | | | | | | | | 173850, |
| | | | | | | | | 258501, |
| | | | | | | | | 600040, |
| | | | | | | | | 602225, |
| | | | | | | | | 602225 |
| HTEDF70 | 522977 | 1933 | 2-277 | 4620 | Ile-1 to Gln-11. | H0038: 1 | | |
| HTEDF60 | 742368 | 1934 | 1-369 | 4621 | Glu-1 to Gln-7, | H0038: 1 | | |
| | | | | | Arg-16 to Asp-30, | | | |
| | | | | | Pro-35 to Asn-43. | | | |
| HTEDF22 | 908406 | 1935 | 1-303 | 4622 | Pro-2 to Trp-7, | AR061: 8, AR089: 3 | | |
| | | | | | His-28 to Gly-35, | L0758: 2 and H0038: | | |
| | | | | | Pro-37 to Gly-56, | 1. | | |
| | | | | | Gly-68 to Lys-75. | | | |
| HTECE66 | 522997 | 1936 | 26-196 | 4623 | Gly-36 to Gly-52. | H0038: 1 | | |
| HTECE62 | 523002 | 1937 | 1-369 | 4624 | Ala-22 to Gly-30, | H0038: 1 | | |
| | | | | | Asn-36 to Ala-43. | | | |
| HTECE61 | 789732 | 1938 | 85-471 | 4625 | Ser-30 to Arg-36. | H0038: 1 and L0750: | | |
| | | | | | | 1. | | |
| HTECE51 | 870723 | 1939 | 85-282 | 4626 | Leu-30 to Arg-40. | H0038: 1 | | |
| HTECE39 | 650885 | 1940 | 63-401 | 4627 | Ser-37 to Gly-49. | H0038: 1 | | |
| HTECE31 | 508104 | 1941 | 33-203 | 4628 | | H0038: 1 | | |
| HTECE08 | 960428 | 1942 | 2-154 | 4629 | Ile-1 to Ser-8, | H0038: 1 | | |
| | | | | | Pro-13 to Ser-19, | | | |
| | | | | | Gly-13 to Ile-41. | | | |
| HTECD94 | 527210 | 1943 | 1-330 | 4630 | Val-28 to Cys-55, | H0038: 1 | 7q11-q22 | 126650, |
| | | | | | Arg-71 to Cys-90, | | | 126650, |
| | | | | | Pro-102 to Pro-107. | | | 154276, |
| | | | | | | | | 173360, |
| | | | | | | | | 173360, |
| | | | | | | | | 602136, |
| | | | | | | | | 602136, |
| | | | | | | | | 602136, |
| | | | | | | | | 602447, |
| HTECD88 | 527214 | 1944 | 246-356 | 4631 | | H0038: 1 | | |
| HTECD70 | 527203 | 1945 | 2-211 | 4632 | Ala-28 to Ser-43, | H0038: 1 | | |
| | | | | | Ala-57 to Tyr-64. | | | |
| HTECD65 | 533795 | 1946 | 144-341 | 4633 | | H0038: 1 | | |
| HTECD56 | 527209 | 1947 | 3-119 | 4634 | Ala-10 to Thr-18. | H0038: 1 | | |
| HTECD15 | 523029 | 1948 | 3-251 | 4635 | Pro-23 to Val-32, | H0038: 1 | | |
| | | | | | Ala-54 to Ala-60, | | | |
| | | | | | Thr-68 to Gly-73. | | | |
| HTECC71 | 508142 | 1949 | 3-173 | 4636 | Glu-39 to Cys-57. | H0038: 1 | | |
| HTECC45 | 508124 | 1950 | 20-142 | 4637 | Phe-1 to Gly-10, | H0038: 1 | | |
| | | | | | Leu-32 to Cys-39. | | | |
| HTECC26 | 508144 | 1951 | 74-202 | 4638 | Ser-21 to Ser-29, | H0038: 1 | | |
| | | | | | Ala-31 to Thr-37. | | | |
| HTECC09 | 678659 | 1952 | 3-365 | 4639 | Arg-1 to Pro-6. | AR089: 39, AR061: 19 | | |
| | | | | | | H0038: 1 | | |
| HTECC08 | 960439 | 1953 | 2-151 | 4640 | | H0038: 1 | | |
| HTECA44 | 508135 | 1954 | 56-439 | 4641 | Ile-4 to Lys-23, | H0038: 1 | | |
| | | | | | Arg-87 to Cys-103. | | | |
| HTECA39 | 508132 | 1955 | 105-236 | 4642 | Gly-9 to Leu-17, | H0038: 1 | | |
| | | | | | Arg-38 to Glu-44. | | | |
| HTEBP54 | 728811 | 1956 | 559-744 | 4643 | | L0754: 2 and H0038: | | |
| | | | | | | 1. | | |
| HTEBO43 | 715704 | 1957 | 3-266 | 4644 | Gly-42 to Gln-53, | H0038: 1 | | |
| | | | | | Leu-67 to Glu-76. | | | |
| HTEBM87 | 503275 | 1958 | 78-230 | 4645 | Glu-16 to Lys-21, | H0038: 1 | | |
| | | | | | Met-25 to Tyr-32. | | | |
| HTEBL53 | 578544 | 1959 | 110-367 | 4646 | Pro-7 to Cys-13, | H0038: 1 | | |
| | | | | | Glu-41 to Trp-46, | | | |
| | | | | | Ser-60 to Gln-65. | | | |
| HTEBJ02 | 921321 | 1960 | 123+144 299 | 4647 | | H0038: 1 and L0748: | | |
| | | | | | | 1. | | |
| HTEBH09 | 870732 | 1961 | 23-346 | 4648 | Glu-7 to Gly-14. | H0038: 1 and L0758: | | |
| | | | | | | 1. | | |
| HTEAX06 | 960792 | 1962 | 134-394 | 4649 | Ala-7 to Val-13, | L0758: 3, L0666: 2, | | |
| | | | | | Pro-15 to Val-21. | L0021: 1, H0038: 1 and | | |
| | | | | | | L0665: 1. | | |
| HTEAV22 | 679394 | 1963 | 151-462 | 4650 | | L0439: 2, L0717L 1, | | |
| | | | | | | H0038: 1, L0769: 1, | | |
| | | | | | | L0772: 1, L0800: 1, | | |
| | | | | | | L0666: 1, L0758: 1 and | | |
| | | | | | | L0601: 1. | | |
| HTEAU39 | 503295 | 1964 | 371-144 | 4651 | Ser-8 to Asn-19. | L0439: 4 and H0038: | | |
| | | | | | | 1. | | |
| HTEAT17 | 667184 | 1965 | 45-311 | 4652 | | L0758: 5, H0038: 1 | | |
| | | | | | | and L0768: 1. | | |
| HTEAS02 | 921323 | 1966 | 79-324 | 4653 | | H0038: 1 and L0758: | | |
| | | | | | | 1. | | |
| HTEAR93 | 503298 | 1967 | 373-230 | 4654 | Ser-19 to Trp-27. | H0038: 1 | | |
| HTEAQ55 | 732562 | 1968 | 3-398 | 4655 | Asn-14 to Gln-20, | L0740: 3, L0731: 3, | | |
| | | | | | Arg-28 to Glu-40. | L0748: 2, L0757: 2 and | | |
| | | | | | | H0038: 1. | | |
| HTEAJ96 | 503533 | 1969 | 216-434 | 4656 | Phe-10 to Ser-16, | H0038: 1 | | |
| | | | | | Ser-24 to Gly-50. | | | |
| HTEAH75 | 503546 | 1970 | 145-336 | 4657 | | H0038: 1 | | |
| HTEAG47 | 503623 | 1971 | 146-268 | 4658 | Ala-15 to Leu-24, | L0748: 2 and H0038: | | |
| | | | | | Pro-32 to Cys-41. | 1. | | |
| HTEAG08 | 960469 | 1972 | 17-172 | 4659 | | H0038: 1 and L0766: | | |
| | | | | | | 1. | | |
| HTEAB50 | 724751 | 1973 | 7-324 | 4660 | Ser-17 to Cys-23, | H0038: 1 and L0758: | | |
| | | | | | Pro-25 to Ala-32. | 1. | | |
| HTEAA04 | 925522 | 1974 | 106-348 | 4661 | Arg-20 to Tyr-28, | L0758: 2 and H0038: | | |
| | | | | | Phe-31 to Arg-38, | 1. | | |
| | | | | | Asp-44 to Arg-51. | | | |
| HSWBY36 | 708291 | 1975 | 87-218 | 4662 | Arg-17 to Gly-22. | H0546: 1, L0598: 1 | | |
| | | | | | | and L0759: 1. | | |
| HSWBT69 | 867537 | 1976 | 3-380 | 4663 | Ala-26 to Pro-31. | H0546: 1 and L0757: | | |
| | | | | | | 1. | | |
| HSWBE29 | 412991 | 1977 | 12-152 | 4664 | Phe-1 to Asn-9. | H0546: 1 and L0756: | | |
| | | | | | | 1. | | |
| HSWAS65 | 953051 | 1978 | 15-404 | 4665 | Leu-15 to Phe-35, | H0546: 1 | 17q21 | 109270, |
| | | | | | Pro-52 to Ser-58. | | | 109270, |
| | | | | | | | | 109270, |
| | | | | | | | | 109270, |
| | | | | | | | | 109270, |
| | | | | | | | | 113705, |
| | | | | | | | | 113705, |
| | | | | | | | | 114200, |
| | | | | | | | | 148065, |
| | | | | | | | | 148066, |
| | | | | | | | | 148066, |
| | | | | | | | | 148067, |
| | | | | | | | | 148067, |
| | | | | | | | | 148069, |
| | | | | | | | | 148080, |
| | | | | | | | | 154275, |
| | | | | | | | | 168610, |
| | | | | | | | | 171190, |
| | | | | | | | | 176705, |
| | | | | | | | | 185800, |
| | | | | | | | | 200350, |
| | | | | | | | | 221820, |
| | | | | | | | | 232200, |
| | | | | | | | | 249000, |
| | | | | | | | | 252920, |
| | | | | | | | | 253250, |
| | | | | | | | | 600119, |
| | | | | | | | | 600119, |
| | | | | | | | | 601363, |
| | | | | | | | | 601844 |
| HSWAS18 | 666302 | 1979 | 200-418 | 4666 | Lys-1 to Ser-8. | L0744: 3, L0021: 1, | | |
| | | | | | | H0546: 1, L0768: 1 and | | |
| | | | | | | L0657: 1. | | |
| HSWAR63 | 471236 | 1980 | 61-222 | 4667 | Asn-19 to Asp-30. | H0546: 1 | 19q13.2 | 107741, |
| | | | | | | | | 113900, |
| | | | | | | | | 122720, |
| | | | | | | | | 122720, |
| | | | | | | | | 126340, |
| | | | | | | | | 126391, |
| | | | | | | | | 160900, |
| | | | | | | | | 164731, |
| | | | | | | | | 173850, |
| | | | | | | | | 207750, |
| | | | | | | | | 248600, |
| | | | | | | | | 258501 |
| HSWAQ31 | 697856 | 1981 | 194-418 | 4668 | | H0546: 1 | | |
| HPWTA06 | 936026 | 1982 | 71-427 | 4669 | | H0383: 1 and L0589: | | |
| | | | | | | 1. | | |
| HPWSA52 | 727294 | 1983 | 155-349 | 4670 | Pro-20 to Ser-27. | S0174: 1 and L0755: 1. | 6p22.1-q22.3 | 120110, |
| | | | | | | | | 121014, |
| | | | | | | | | 142470, |
| | | | | | | | | 156225, |
| | | | | | | | | 164200, |
| | | | | | | | | 164200, |
| | | | | | | | | 601316, |
| | | | | | | | | 601410, |
| | | | | | | | | 601757 |
| HPWDK45 | 839559 | 1984 | 141-533 | 4671 | Lys-9 to Pro-14. | S0044: 1 and L0748: 1. | | |
| HPWDF03 | 924978 | 1985 | 168-452 | 4672 | | L0749: 4, L0748: 2 and | | |
| | | | | | | S0044: 1. | | |
| HPWDE86 | 785710 | 1986 | 166-291 | 4673 | Cys-13 to Pro-26, | L0754: 2 and S0044: 1. | | |
| | | | | | Pro-34 to Val-40. | | | |
| HPWCJ90 | 789170 | 1987 | 17-397 | Cys-1 to Asn-16, | L0731: 2, S0044: 1 and | | | |
| | | | | | Thr-20 to Asp-44, | L0749: 1. | | |
| | | | | | Ser-47 to Asn-54, | | | |
| | | | | | Phe-66 to Arg-93. | | | |
| HPWCG85 | 638155 | 1988 | 461-727 | 4675 | Ser-25 to Glu-33, | S0044: 1 | | |
| | | | | | Ser-58 to His-68. | | | |
| | 812707 | 2666 | 585-319 | 5353 | Ser-25 to Glu-33, | | | |
| | | | | | Ser-58 to His-68. | | | |
| HPWBF35 | 707514 | 1989 | 36-164 | 4676 | Asn-32 to Thr-40. | S0044: 1 and L0608: 1. | | |
| HPWBE47 | 720563 | 1990 | 251-520 | 4677 | Arg-1 to Ile-6, | S0044: 1 and L0581: 1. | | |
| | | | | | Pro-9 to Met-16, | | | |
| | | | | | Gly-32 to Arg-37. | | | |
| HPWAT23 | 676323 | 1991 | 73-258 | 4678 | Ser-21 to Pro-29, | S0044: 1 and L0752: 1. | | |
| | | | | | Leu-42 to Ser-52. | | | |
| HPWAJ85 | 535157 | 1992 | 73-219 | 4679 | Gln-1 to Gly-11. | S0044: 1 and L0439: 1. | | |
| HPWAJ39 | 575271 | 1993 | 72-215 | 4680 | | S0044: 1 | | |
| HPWAI05 | 932627 | 1994 | 2-250 | 4681 | Pro-1 to Pro-9, | L0748: 2 and S0044: 1. | | |
| | | | | | Ser-36 to Gly-43, | | | |
| | | | | | Leu-48 to Gln-62. | | | |
| HPWAH19 | 468246 | 1995 | 201-1 | 4682 | Pro-13 to Arg-23, | S0044: 1 | | |
| | | | | | Pro-41 to Trp-53, | | | |
| | | | | | Pro-56 to Lys-65. | | | |
| | 867315 | 2667 | 27-275 | 5354 | | | | |
| HPWAG31 | 693618 | 1996 | 19-165 | 4683 | Arg-28 to Pro-42. | S0044: 1 | | |
| HPVAH71 | 829301 | 1997 | 2-178 | 4684 | | S0013: 1 and L0756: 1 | | |
| HPVAH41 | 848632 | 1998 | 351-614 | 4685 | Asp-9 to Phe-18, | L0748: 2, S0013: 1 and | | |
| | | | | | Pro-44 to Trp-52. | L0743: 1. | | |
| HPVAC74 | 773298 | 1999 | 2-637 | 4686 | His-42 to Lys-52. | S0013: 1 and L0740: 1. | | |
| HPVAB16 | 526124 | 2000 | 18-155 | 4687 | | S0013: 1 | | |
| HPVAB01 | 961017 | 2001 | 88-261 | 4688 | | S0013: 1 and L0746: 1. | | |
| HPRTJ65 | 753933 | 2002 | 391-549 | 4689 | Gly-27 to Glu-33, | H0212: 1, L0750: 1 | | |
| | | | | | Cys-46 to Lys-53. | and L0777: 1. | | |
| HPRTI54 | 728812 | 2003 | 91-351 | 4690 | | L0605: 2, H0212: 1 | | |
| | | | | | | and L0748: 1. | | |
| HPRTI16 | 667652 | 2004 | 81-470 | 4691 | | L0777: 4, H0212: 1, | | |
| | | | | | | L0809: 1, L0664: 1 and | | |
| | | | | | | L0750: 1. | | |
| HPRCV66 | 320393 | 2005 | 296-472 | 4692 | Ser-1 to Thr-9. | H0032: 1 and L0748: | | |
| | | | | | | 1. | | |
| HPRCT83 | 780264 | 2006 | 37-177 | 4693 | | L0731: 2 and H0032: | | |
| | | | | | | 1. | | |
| HPRCN03 | 925420 | 2007 | 2-166 | 4694 | | H0032: 1, L0761: 1 | | |
| | | | | | | and L0758: 1. | | |
| HPRCM12 | 973740 | 2008 | 45-278 | 4695 | Lys-11 to Ser-19, | H0032: 1 | | |
| | | | | | Lys-72 to Gln-78. | | | |
| HPRCL72 | 766311 | 2009 | 3-248 | 4696 | Lys-4 to Val-12, | H0032: 1 and L0756: | | |
| | | | | | Ser-23 to Ser-39. | 1. | | |
| HPRCI73 | 764710 | 2010 | 2-298 | 4697 | | H0032: 1 | | |
| HPRCG46 | 719340 | 2011 | 175-462 | 4698 | Glu-41 to Ser-46. | H0032: 1 and L0439: | | |
| | | | | | | 1. | | |
| HPRCD11 | 967762 | 2012 | 2-115 | 4699 | Ile-1 to Arg-6, | H0032: 1 and L0748: | | |
| | | | | | Val-27 to Gly-32. | 1. | | |
| HPRCC22 | 526623 | 2013 | 99-236 | 4700 | Arg-6 to Leu-15. | H0032: 1 | | |
| HPRCA02 | 917289 | 2014 | 142-315 | 4701 | Gln-14 to Tyr-19. | H0032: 1 | | |
| | 919513 | 2668 | 205-11 | 5355 | Arg-22 to Asp-27, | | | |
| | | | | | Gln-36 to Glu-42, | | | |
| | | | | | Leu-46 to Glu-56. | | | |
| HPRBN23 | 467480 | 2015 | 200-454 | 4702 | Cys-73 to Lys-82. | H0032: 1 | | |
| | 486123 | 2669 | 484-320 | 5356 | | | | |
| | 867409 | 2670 | 106-282 | 5357 | | | | |
| HPRBI87 | 695116 | 2016 | 93-227 | 4703 | Met-1 to Asn-9. | H0032: 1 and L0731: | 19p13.3-p13.2 | 108725, |
| | | | | | | 1. | | 120700, |
| | | | | | | | | 133171, |
| | | | | | | | | 136836, |
| | | | | | | | | 143890, |
| | | | | | | | | 145981, |
| | | | | | | | | 147141, |
| | | | | | | | | 147670, |
| | | | | | | | | 147670, |
| | | | | | | | | 147670, |
| | | | | | | | | 151440, |
| | | | | | | | | 164953, |
| | | | | | | | | 188070, |
| | | | | | | | | 231670, |
| | | | | | | | | 600276, |
| | | | | | | | | 600957, |
| | | | | | | | | 601238, |
| | | | | | | | | 601843, |
| | | | | | | | | 601846, |
| | | | | | | | | 602216, |
| | | | | | | | | 602477 |
| HPRBH80 | 781636 | 2017 | 183-344 | 4704 | Ser-21 to Gln-27. | H0032: 1 and L0748: | | |
| | | | | | | 1. | | |
| HPRAV80 | 781637 | 2018 | 1-384 | 4705 | | L0439: 3 and H0032: | | |
| | | | | | | 1. | | |
| HPRAN56 | 503140 | 2019 | 338-210 | 4706 | Glu-18 to Val-30. | L0756: 3, L0747: 2, | | |
| | | | | | | L0749: 2, H0032: 1 and | | |
| | | | | | | L0748: 1. | | |
| | 503152 | 2671 | 373-543 | 5358 | | | | |
| HPRAN50 | 724753 | 2020 | 300-196 | 4707 | | H0032: 1 | | |
| HPRAJ75 | 766496 | 2021 | 3-197 | 4708 | Ser-19 to Cys-35. | H0032: 1 | | |
| HPRAG73 | 764757 | 2022 | 267-584 | 4709 | | H0032: 1 and L0749: | | |
| | | | | | | 1. | | |
| HPRAG45 | 484691 | 2023 | 281-84 | 4710 | Gly-7 to Thr-27, | H0032: 1 | | |
| | | | | | Pro-60 to Gln-66. | | | |
| | 939849 | 2672 | 3-365 | 5359 | Ile-1 to Ser-8, | | | |
| | | | | | Ser-103 to Pro-108. | | | |
| | 939850 | 2673 | 1-57 | 5360 | Arg-9 to Tyr-14. | | | |
| HPRAF86 | 784594 | 2024 | 2-232 | 4711 | Thr-13 to Met-23. | H0032: 1 | | |
| HPOAB37 | 789290 | 2025 | 2-406 | 4712 | Ala-1 to Gln-7. | S0004: 1 | | |
| HPMSH94 | 796839 | 2026 | 192-368 | 4713 | Lys-13 to Lys-18. | H0111: 1 and L0766: | | |
| | | | | | | 1. | | |
| HPMSB35 | 707476 | 2027 | 30-206 | 4714 | | H0111: 1 and L0750: | | |
| | | | | | | 1. | | |
| HPMMK05 | 928283 | 2028 | 558-746 | 4715 | Ser-14 to Arg-19, | L0754: 2, H0644: 1, | | |
| | | | | | Glu-43 to Ser-54. | L0747: 1 and L0750: 1. | | |
| HPMMB08 | 957945 | 2029 | 105-299 | 4716 | | H0644: 1 and L0755: | | |
| | | | | | | 1. | | |
| HPMKP06 | 933895 | 2030 | 3-248 | 4717 | Gln-48 to Asp-65. | H0644: 1 and L0777: | | |
| | | | | | | 1. | | |
| HPMKC05 | 930874 | 2031 | 87-257 | 4718 | Asn-8 to Asp-28. | H0644: 1 and L0748: | | |
| | | | | | | 1. | | |
| HPMJT12 | 969483 | 2032 | 242-487 | 4719 | Lys-15 to Leu-25, | L0748: 4 and H0644: | | |
| | | | | | Met-29 to Leu-43. | 1. | | |
| HPMJN08 | 958009 | 2033 | 2-259 | 4720 | His-4 to Arg-20. | H0644: 1 and L0748: | | |
| | | | | | | 1. | | |
| HPMJK11 | 965636 | 2034 | 277-516 | 4721 | Ser-42 to Ser-52. | H0644: 1 and L0462: | | |
| | | | | | | 1. | | |
| HPMJK03 | 867615 | 2035 | 293-436 | 4722 | | H0644: 1 and L0700: | | |
| | | | | | | 1. | | |
| HPMJI11 | 965627 | 2036 | 61-381 | 4723 | Gln-7 to Gly-18, | H0644: 1 and L0774: | | |
| | | | | | Asp-21 to Met-28. | 1. | | |
| HPMJE06 | 939682 | 2037 | 169-2 | 4724 | Tyr-39 to Arg-56. | H0644: 1, L0606: 1 | | |
| | | | | | | and L0749: 1. | | |
| HPMJA11 | 965628 | 2038 | 1-327 | 4725 | | L0745: 4 and H0644: | | |
| | | | | | | 1. | | |
| HPMGX92 | 491004 | 2039 | 346-158 | 4726 | Glu-36 to Ala-43, | H0031: 1 | | |
| | | | | | Pro-45 to Lys-57. | | | |
| | 881472 | 2674 | 63-350 | 5361 | Leu-20 to Arg-26, | | | |
| | | | | | Ala-38 to Thr-43, | | | |
| | | | | | Trp-90 to Ala-96. | | | |
| HPMGR15 | 660374 | 2040 | 178-378 | 4727 | Pro-18 to Glu-24. | H0031: 1 and L0756: | | |
| | | | | | | 1. | | |
| HPMGO88 | 463906 | 2041 | 267-440 | 4728 | | H0031: 1 and L0756: | | |
| | | | | | | 1. | | |
| HPMGM39 | 705460 | 2042 | 865-1128 | 4729 | Thr-1 to Ser-6, | L0748: 6, H0031: 1, | | |
| | | | | | Glu-49 to Phe-63. | L0747: 1, L0756: 1 and | | |
| | | | | | | L0596: 1. | | |
| HPMGJ16 | 662021 | 2043 | 85-195 | 4730 | Lys-28 to Ser-33. | H0031: 1 | | |
| HPMGD63 | 694518 | 2044 | 177-380 | 4731 | Gln-6 to Gly-11, | H0031: 1 and L0748: | | |
| | | | | | Phe-21 to Thr-30, | 1. | | |
| | | | | | Arg-50 to Thr-63. | | | |
| HPMFX29 | 690704 | 2045 | 6-161 | 4732 | | L0747: 2 and H0031: | | |
| | | | | | | 1. | | |
| HPMFL73 | 867670 | 2046 | 203-592 | 4733 | | H0031: 1 | | |
| HPMFC02 | 920327 | 2047 | 112-576 | 4734 | Pro-41 to Ala-63, | L0770: 2, L0779: 2, | | |
| | | | | | Gly-69 to Gly-81. | H0031: 1, L0766: 1, | | |
| | | | | | | L0776: 1 and L0758L 1. | | |
| HPMFB26 | 867674 | 2048 | 2-361 | 4735 | Gly-4 to His-11, | H0031: 1 and L0747: | | |
| | | | | | Val-61 to Gly-67. | 1. | | |
| HPMEG77 | 772503 | 2049 | 214-366 | 4736 | Leu-21 to Val-36, | L0604: 3 and H0031: | | |
| | | | | | Pro-38 to Gln-44. | 1. | | |
| HPMDQ89 | 880787 | 2050 | 1-390 | 4737 | Arg-1 to Phe-9, | L0794: 2 and H0031: | | |
| | | | | | Arg-69 to Gln-83, | 1. | | |
| | | | | | Lys-85 to Leu-103, | | | |
| | | | | | Val-117 to His-122. | | | |
| HPMDP10 | 968350 | 2051 | 1-258 | 4738 | Gly-1 to Gln-7, | L0794: 2, H0031: 1 | | |
| | | | | | Gly-21 to Val-26, | and L0779: 1. | | |
| | | | | | Arg-47 to Arg-55, | | | |
| | | | | | Lys-71 to Ala-77. | | | |
| HPMDF06 | 954567 | 2052 | 1-111 | 4739 | | H0031: 1 and L0455: | | |
| | | | | | | 1. | | |
| HPMAM93 | 791407 | 2053 | 150-1 | 4740 | Lys-42 to Ile-50. | L0439: 2 and H0031: | | |
| | | | | | | 1. | | |
| HPMAL77 | 772740 | 2054 | 629-426 | 4741 | | L0748: 3, H0031: 1 | | |
| | | | | | | and L0731: 1. | | |
| HPMAL73 | 764752 | 2055 | 2-169 | 4742 | Ser-2 to Tyr-15. | H0031: 1 and L0745: | | |
| | | | | | | 1. | | |
| HPMAK71 | 503690 | 2056 | 232-442 | 4743 | Leu-7 to Leu-12, | H0031: 1 | | |
| | | | | | Asn-14 to His-27, | | | |
| | | | | | Pro-30 to Lys-37. | | | |
| HPMAJ83 | 781518 | 2057 | 156-410 | 4744 | | H0031: 1 and L0748: | | |
| | | | | | | 1. | | |
| HPMAI80 | 572808 | 2058 | 2-154 | 4745 | Arg-27 to Thr-46. | H0031: 1 | | |
| HPMAI10 | 968695 | 2059 | 215-63 | 4746 | | H0031: 1 | | |
| HPMAH85 | 783344 | 2060 | 84-233 | 4747 | Lys-1 to Lys-8. | H0031: 1 and L0740: | | |
| | | | | | | 1. | | |
| HPMAH56 | 867711 | 2061 | 156-296 | 4748 | | H0031: 1 | | |
| HPMAB10 | 968723 | 2062 | 3-221 | 4749 | Pro-3 to Gly-11, | H0031: 1 and L0758: | | |
| | | | | | Ser-43 to Leu-55. | 1. | | |
| HPLBW22 | 679217 | 2063 | 3-278 | 4750 | Glu-8 to His-17, | H0030: 1 and L0595: | | |
| | | | | | Gln-19 to Gly-43, | 1. | | |
| | | | | | Thr-62 to Ser-73, | | | |
| | | | | | Pro-80 to Leu-85. | | | |
| HPLBW02 | 921331 | 2064 | 338-499 | 4751 | | L0777: 2 and H0030: | | |
| | | | | | | 1. | | |
| HPLBT54 | 731065 | 2065 | 179-343 | 4752 | Pro-1 to Ala-12, | H0030: 1 and L0754: | | |
| | | | | | Gly-33 to Gln-38. | 1. | | |
| HPLBT53 | 728517 | 2066 | 283-450 | 4753 | Ile-36 to Gly-47. | H0030: 1 and L0758: | | |
| | | | | | | 1. | | |
| HPLBS41 | 712707 | 2067 | 359-559 | 4754 | Pro-16 to Ser-23. | L0747: 2 and H0030: | | |
| | | | | | | 1. | | |
| HPLBQ96 | 796069 | 2068 | 18-155 | 4755 | Lys-6 to Asn-12. | H0030: 1 and L0754: | | |
| | | | | | | 1. | | |
| HPLBO90 | 787208 | 2069 | 202-348 | 4756 | Leu-30 to Cys-39. | H0030: 1 and L0751: | | |
| | | | | | | 1. | | |
| HPLBN79 | 781854 | 2070 | 144-326 | 4757 | Glu-4 to Arg-9, | H0030: 1 and L0756: | | |
| | | | | | Thr-17 to Lys-23. | 1. | | |
| HPLBB47 | 975477 | 2071 | 745-491 | 4758 | Lys-22 to Ser-39. | L0518: 2, H0030: 1 | | |
| | | | | | | and L0740: 1. | | |
| HPLAX14 | 727885 | 2072 | 85-489 | 4759 | Ser-7 to Gly-15, | H0030: 1, L0747: 1 | | |
| | | | | | Pro-66 to Trp-73, | and L0750: 1. | | |
| | | | | | Thr-96 to Gly-101, | | | |
| | | | | | Gly-109 to Arg-133. | | | |
| HPLAV44 | 715732 | 2073 | 197-3 | 4760 | His-23 to Asn-37. | H0030: 1 and L0748: | | |
| | | | | | | 1. | | |
| HPLAI10 | 968707 | 2074 | 54-461 | 4761 | Ser-14 to Phe-20. | H0030: 1, L0517: 1, | | |
| | | | | | | L0740: 1, L0754: 1, | | |
| | | | | | | L0777: 1, L0755: 1 and | | |
| | | | | | | L0758: 1. | | |
| | 968711 | 2675 | 659-372 | 5362 | Leu-3 to Lys-8, | | | |
| | | | | | Arg-27 to Ser-34, | | | |
| | | | | | Leu-45 to Lys-55. | | | |
| HPJFA10 | 963322 | 2075 | 466-341 | 4762 | Gln-9 to Ala-15. | L0783: 1, L0809: 1 and | | |
| | | | | | | S0152: 1. | | |
| HPJEV95 | 929723 | 2076 | 82-408 | 4763 | | AR061: 4, AR089: 1 | | |
| | | | | | | S0152: 1 and L0601: 1, | | |
| HPJEU01 | 928408 | 2077 | 209-352 | 4764 | | S0152: 1 and L0439: 1. | | |
| HPJET11 | 965894 | 2078 | 136-327 | 4765 | Lys-35 to Lys-42. | L0717: 1, S0152: 1 and | | |
| | | | | | | L0756: 1. | | |
| HPJES17 | 859867 | 2079 | 19-318 | 4766 | Glu-8 to Cys-16. | L0435: 1, S0152: 1, | | |
| | | | | | | L0439: 1 and L0747: 1. | | |
| HPJEL02 | 918315 | 2080 | 50-220 | 4767 | Pro-26 to Phe-35. | S0152: 1 and L0745: 1. | | |
| HPJEG53 | 974074 | 2081 | 19-198 | 4768 | | S0152: 1 | | |
| HPJDW93 | 867759 | 2082 | 44-406 | 4769 | | S0152: 1 and L0604: 1. | | |
| HPJDT03 | 922815 | 2083 | 177-392 | 4770 | | S0152: 1 and L0759: 1. | | |
| HPJDP54 | 949149 | 2084 | 155-301 | 4771 | | L0532: 1 and S0152: 1. | | |
| HPJDF61 | 889928 | 2085 | 280-417 | 4772 | | AR054: 38, AR051: | | |
| | | | | | | 29, AR050: 28 | | |
| | | | | | | S0152: 1 | | |
| HPJDC01 | 915056 | 2086 | 212-358 | 4773 | Asn-17 to Met-22. | S0152: 1 and L0779: 1. | | |
| HPJDA25 | 951281 | 2087 | 246-506 | 4774 | Gln-1 to Cys-17, | AR061: 6, AR089: 2 | | |
| | | | | | Gln-20 to Lys-28, | S0152: 1 | | |
| | | | | | Pro-35 to Ser-44. | | | |
| | 951284 | 2676 | 252-13 | 5363 | | | | |
| HPJCU29 | 928407 | 2088 | 1-195 | 4775 | L0667: 1 and S0152: 1. | | | |
| HPJCT81 | 494874 | 2089 | 148-396 | 4776 | Thr-2 to Asn-8, | S0152: 1 and L0605: 1. | | |
| | | | | | Asn-49 to Ser-54. | | | |
| HPJCT26 | 559949 | 2090 | 210-635 | 4777 | Arg-1 to Gly-7. | AR054: 34 | | |
| | | | | | | S0152: 1 | | |
| HPJCS73 | 975087 | 2091 | 3-227 | 4778 | Ser-33 to Lys-41. | S0152: 1 | | |
| HPJCS43 | 715082 | 2092 | 62-322 | 4779 | Pro-10 to Ser-17, | S0152: 1 | | |
| | | | | | Ser-19 to Arg-24, | | | |
| | | | | | Pro-43 to Glu-50, | | | |
| | | | | | Arg-56 to Phe-64, | | | |
| | | | | | Pro-74 to His-87. | | | |
| HPJCS32 | 699046 | 2093 | 179-274 | 4780 | Val-23 to Leu-31. | S0152: 1 | | |
| HPJCN60 | 887600 | 2094 | 1-210 | 4781 | Ile-20 to Trp-33, | AR051: 17, AR050: 9, | | |
| | | | | | Thr-35 to Gly-45. | AR054: 8 | | |
| | | | | | | S0152: 1 | | |
| HPJCL55 | 670083 | 2095 | 458-291 | 4782 | Glu-11 to His-16. | L0758: 3, L0779: 2 and | | |
| | | | | | | S0152: 1. | | |
| HPJBU40 | 710928 | 2096 | 137-373 | 4783 | | L0748: 2 and S0152: 1. | | |
| HPJBU09 | 625362 | 2097 | 3-182 | 4784 | Arg-14 to Cys-22. | L0439: 2 and S0152: 1. | | |
| HPJBS74 | 765390 | 2098 | 310-591 | 4785 | | S0152: 1 and L0592: 1. | | |
| HPJBS52 | 726535 | 2099 | 141-518 | 4786 | Phe-2 to Asp-8. | S0152: 1 and L0743: 1. | | |
| HPJBS35 | 867818 | 2100 | 64-249 | 4787 | | S0152: 1 and L0748: 1. | | |
| HPJBL76 | 769889 | 2101 | 240-546 | 4788 | | S0152: 1, L0740: 1 and | | |
| | | | | | | L0750: 1. | | |
| HPJBL30 | 948721 | 2102 | 354-145 | 4789 | Tyr-10 to Leu-15, | L0752: 7, L0780: 2, | | |
| | | | | | Glu-32 to Gly-41. | L0586: 1 and S0152: 1. | | |
| HPJBK25 | 974606 | 21032 | 17-154 | 4790 | His-15 to Gln-26, | S0152: 1 | | |
| | | | | | Ser-38 to Asn-46. | | | |
| HPJBK14 | 974593 | 2104 | 2-331 | 4791 | Pro-8 to Leu-18, | S0152: 1 | | |
| | | | | | Gly-45 to Ala-53, | | | |
| | | | | | Pro-56 to Trp-63, | | | |
| | | | | | Pro-67 to Arg-73. | | | |
| HPJBH45 | 717088 | 2105 | 252-404 | 4792 | Ser-7 to Lys-12. | L0754: 2 and S0152: 1 | | |
| HPJAX30 | 607408 | 2106 | 762-544 | 4793 | | S0152: 1 | | |
| | 884685 | 2677 | 104-370 | 5364 | Ser-41 to Trp-46, | | | |
| | | | | | Cys-57 to Gln-68, | | | |
| | | | | | Tyr-79 to Gly-84. | | | |
| | 885717 | 2678 | 643-1290 | 5365 | | | | |
| HPJAU73 | 806718 | 2107 | 170-319 | 4794 | | S0152: 1 and L0748: 1. | | |
| HPJAP92 | 887830 | 2108 | 164-322 | 4795 | | AR050: 26, AR051: | | |
| | | | | | | 20, AR054: 10 | | |
| | | | | | | S0152: 1 | | |
| HPJAO13 | 824243 | 2109 | 716-531 | 4796 | Ser-2 to Arg-7. | AR061: 2, AR089: 1 | | |
| | | | | | | S0152: 1 | | |
| | 952302 | 2679 | 865-1110 | 5366 | Gln-10 to Leu-26. | | | |
| | 945194 | 2680 | 127-612 | 5367 | | | | |
| HPJAN69 | 754858 | 2110 | 79-360 | 4797 | Pro-75 to Phe-84. | S0152: 1 | | |
| HPJAN67 | 751384 | 2111 | 3-176 | 4798 | | S0152: 1 | | |
| HPJAN57 | 734503 | 2112 | 65-166 | 4799 | | S0152: 1 | | |
| HPJAJ20 | 669000 | 2113 | 476-652 | 4800 | Thr-31 to Glu-37. | S0152: 1 and L0439: 1. | | |
| HPJAE51 | 725761 | 2114 | 193-2 | 4801 | Ser-42 to Lys-48. | L0439: 2 and S0152: 1. | | |
| HPJAA27 | 419786 | 2115 | 3-278 | 4802 | Leu-17 to Asn-31, | S0152: 1 | 1q32.1 | 134580, |
| | | | | | Gly-55 to Ala-62, | | | 145260, |
| | | | | | Arg-66 to Ala-87. | | | 600105, |
| | | | | | | | | 600759, |
| | | | | | | | | 601975 |
| HPICG93 | 887817 | 2116 | 20-310 | 4803 | Leu-62 to Ser-75. | AR051: 32, AR050; | | |
| | | | | | | 26, AR054: 17 | | |
| | | | | | | S0150: 1 | | |
| HPICE06 | 935095 | 2117 | 607-816 | 4804 | | S0150: 1, L0439: 1 and | | |
| | | | | | | L0740: 1 | | |
| HPIBY36 | 708183 | 2118 | 296-517 | 4805 | | L0439: 2, L0756: 2, | | |
| | | | | | | S0150: 1 and L0438: 1. | | |
| HPIBT62 | 743135 | 2119 | 123-362 | 4806 | | S0150: 1, L0748: 1 and | | |
| | | | | | | L0439: 1. | | |
| HBIBO89 | 786741 | 2120 | 213-473 | 4807 | Lys-79 to Phe-85. | L0439: 3, S0150: 1, | | |
| | | | | | | L0740: 1 and L0749: 1. | | |
| HPIBI89 | 867845 | 2121 | 1-135 | 4808 | Glu-7 to Ser-13. | S0150: 1 and L0748: 1. | | |
| HPIBH31 | 838809 | 2122 | 169-420 | 4809 | Val-3 to Gly-14, | S0150: 1 and L0748: 1. | 2p22-p21 | 120435, |
| | | | | | Ser-65 to Gly-72. | | | 120435, |
| | | | | | | | | 126600, |
| | | | | | | | | 135300, |
| | | | | | | | | 136435, |
| | | | | | | | | 152790, |
| | | | | | | | | 152790, |
| | | | | | | | | 157170, |
| | | | | | | | | 182601, |
| | | | | | | | | 278300, |
| | | | | | | | | 601071, |
| | | | | | | | | 601771, |
| | | | | | | | | 602134 |
| HPIBC93 | 785971 | 2123 | 1-285 | 4810 | Ser-49 to Pro-54, | S0150: 1 and L0751: 1. | | |
| | | | | | Pro-60 to His-70. | | | |
| HPIBB45 | 867850 | 2124 | 77-178 | 4811 | S0150: 1 | | | |
| HPIBB43 | 715037 | 2125 | 47-247 | 4812 | | S0150: 1 | | |
| HPIBB32 | 698901 | 2126 | 1-186 | 4813 | | S0150: 1 | | |
| HPIBB19 | 668489 | 2127 | 182-289 | 4814 | | S0150: 1 | | |
| HPIAW91 | 790033 | 2128 | 223-426 | 4815 | Ala-6 to Ser-25. | L0748: 2 and S0150: 1. | | |
| HPIAV06 | 935111 | 2129 | 41-322 | 4816 | Cys-19 to Trp-24, | L0717: 2 and S0150: 1. | | |
| | | | | | Ser-29 to Glu-34, | | | |
| | | | | | Phe-47 to Trp-52, | | | |
| | | | | | Arg-57 to Gly-68. | | | |
| HPIAQ70 | 973604 | 2130 | 185-436 | 4817 | Gly-36 to Thr-41. | AR089: 18, AR061: 9 | | |
| | | | | | | S0150: 1 | | |
| HPIAP79 | 774817 | 2131 | 102-476 | 4818 | Asp-7 to Thr-15. | L0439: 6 and S0150: 1. | | |
| HPIAD10 | 906987 | 2132 | 547-834 | 4819 | Lys-91 to Pro-96. | S0150: 1 and L0365: 1. | | |
| | 961313 | 2681 | 172-35 | 5368 | | | | |
| HPHSB91 | 790313 | 2133 | 157-273 | 4820 | Val-33 to Lys-39. | S0176: 1 | | |
| HPHSB21 | 671118 | 2134 | 52-189 | 4821 | | S0176: 1 | | |
| HPHSA94 | 793084 | 2135 | 3-209 | 4822 | | S0176: 1 | | |
| HPHAE81 | 778036 | 2136 | 417-127 | 4823 | | S0148: 1 and L0748: 1. | 19q13.1 | 164731 |
| | | | | | | | | 172400, |
| | | | | | | | | 172400, |
| | | | | | | | | 180901, |
| | | | | | | | | 180901, |
| | | | | | | | | 221770, |
| | | | | | | | | 248600, |
| | | | | | | | | 600918, |
| | | | | | | | | 602716 |
| HPFMG06 | 933696 | 2137 | 1-120 | 4824 | | H0674: 1 and L0362: | | |
| | | | | | | 1. | | |
| HPFMB10 | 961758 | 2138 | 414-683 | 4825 | Lys-2 to Lys-10. | H0674: 1 and L0363: | | |
| | | | | | | 1. | | |
| HPFDX38 | 709302 | 2139 | 398-583 | 4826 | | H0169: 1 and L0766: | | |
| | | | | | | 1. | | |
| HPFCZ82 | 780198 | 2140 | 3-341 | 4827 | Pro-108 to Gly-113. | H0169: 1 and L0747: | | |
| | | | | | | 1. | | |
| HPFCZ60 | 430125 | 2141 | 298-444 | 4828 | | H0169: 1 and L0740: | | |
| | | | | | | 1. | | |
| HPFCZ10 | 968360 | 2142 | 33-272 | 4829 | | H0169: 1 | | |
| HPFCR23 | 675120 | 93-263 | 4830 | Thr-52 to Tyr-57. | H0169: 1, L0809: 1 | | | |
| | | | | | | and L0754: 1. | | |
| HPFCP82 | 867881 | 2144 | 435-632 | 4831 | Pro-24 to Gly-44, | AR050: 7, AR054: 3, | | |
| | | | | | Pro-47 to Tyr-56. | AR051: 1 | | |
| | | | | | | H0169: 1 | | |
| HPFCP53 | 526574 | 2145 | 138-245 | 4832 | | AR050: 20, AR051: 4, | | |
| | | | | | | AR054: 4 | | |
| | | | | | | H0169: 1 | | |
| HPFCM45 | 723501 | 2146 | 72-251 | 4833 | | H0169: 1, L0766: 1, | | |
| | | | | | | L0776: 1, L0790: 1, | | |
| | | | | | | L0741: 1 and L0779: . | | |
| HPFCM27 | 682098 | 2147 | 178-294 | 4834 | | L0598: 2, H0169: 1 | | |
| | | | | | | and L0731: 1. | | |
| HPFCL56 | 732601 | 2148 | 20-187 | 4835 | Cys-6 to His-17. | H0169: 1 and L0777: | | |
| | | | | | | 1. | | |
| HPFCL24 | 867889 | 2149 | 56-274 | 4836 | | L0752: 2, H0169: 1, | | |
| | | | | | | L0794: 1 and L0751: 1. | | |
| HPFCG02 | 921196 | 2150 | 94-261 | 4837 | Gly-33 to Arg-39. | H0169: 1 and L0748: | | |
| | | | | | | 1. | | |
| HPFCA01 | 928672 | 2151 | 151-393 | 4838 | Gly-18 to His-30. | L0748: 2 and H0169: | | |
| | | | | | | 1. | | |
| HPELD12 | 969248 | 2152 | 231-623 | 4839 | Gly-18 to Glu-29, | H0673: 1, L0805: 1 | | |
| | | | | | Leu-55 to Gln-60, | and L0731: 1. | | |
| | | | | | His-109 to Gly-117, | | | |
| | | | | | Gly-122 to Pro-127. | | | |
| HPEKI04 | 926104 | 2153 | 43-165 | 4840 | | L0748: 2, H0673: 1 | | |
| | | | | | | and L0749: 1. | | |
| HPEKE01 | 914414 | 2154 | 159-350 | 4841 | | H0673: 1, L0769: 1 | | |
| | | | | | | and L0768: 1. | | |
| HPEBT82 | 524246 | 2155 | 1-111 | 4842 | | H0166: 1 | | |
| HPEBT78 | 773844 | 2156 | 59-148 | 4843 | Lys-15 to Gly-25. | H0166: 1 | | |
| HPEBT68 | 753692 | 2157 | 45-245 | 4844 | Lys-9 to Trp-17. | H0166: 1 | | |
| HPEBT54 | 731002 | 2158 | 86-397 | 4845 | Lys-26 to Cys-31, | H0166: 1 | | |
| | | | | | Arg-38 to Asp-46. | | | |
| HPEBT49 | 530021 | 2159 | 106-300 | 4846 | Leu-12 to Ser-17. | H0166: 1 | | |
| HPEBT34 | 706836 | 2160 | 44-301 | 4847 | Asp-20 to His-27. | H0166: 1 | | |
| HPEBT14 | 535061 | 2161 | 3-98 | 4848 | | H0166: 1 | | |
| HPEBT07 | 954214 | 2162 | 42-317 | 4849 | Thr-78 to Arg-84. | H0166: 1 | | |
| HPEBO67 | 578516 | 2163 | 1-228 | 4850 | Glu-12 to Thr-39. | H0166: 1, L0748: 1 | | |
| | | | | | | and L0747: 1. | | |
| HPEBL08 | 960240 | 2164 | 227-313 | 4851 | Lys-19 to Asn-27. | L0770: 2, H0166: 1, | | |
| | | | | | | L0665: 1 and L0749: 1. | | |
| HPEBH01 | 921767 | 2165 | 105-341 | 4852 | | H0166: 1 and L0745: | | |
| | | | | | | 1. | | |
| HPEBG89 | 785942 | 2166 | 80-277 | 4853 | Gly-2 to Cys-7, | L0759: 2 and H0166: | | |
| | | | | | Glu-28 to Glu-40, | 1. | | |
| | | | | | Glu-53 to Lys-58. | | | |
| HPEBG10 | 867888 | 2167 | 75-284 | 4854 | Phe-26 to Trp-32. | H0166: 1 and L0542: | | |
| | | | | | | 1. | | |
| HPEBA89 | 910250 | 2168 | 268-504 | 4855 | Cys-14 to Ser-26, | AR061: 57, AR089: 38 | | |
| | | | | | Glu-40 to Lys-58. | H0166: 1 and L0749: | | |
| | | | | | | 1. | | |
| | 912272 | 2682 | 182-361 | 5369 | Cys-14 to Ser-26, | | | |
| | | | | | Glu-40 to Lys-60. | | | |
| HPEBA61 | 742251 | 2169 | 2-70 | 4856 | | H0166: 1 | | |
| HPEBA05 | 928027 | 2170 | 2-178 | 4857 | Gly-14 to Ser-19. | H0166: 1 and L0779: | | |
| | | | | | | 1. | | |
| HPEAG43 | 468542 | 2171 | 83-232 | 4858 | | H0165: 1 | | |
| | 589933 | 2683 | 776-1117 | 5370 | Pro-4 to Thr-17. | | | |
| HPEAD72 | 761472 | 2172 | 45-383 | 4859 | | H0165: 1 and L0744: | | |
| | | | | | | 1. | | |
| HPEAB12 | 968847 | 2173 | 2-178 | 4860 | Ser-7 to Lys-13, | L0794: 4 and H0165: | | |
| | | | | | Leu-29 to Ser-36. | 1. | | |
| HPEAA57 | 514231 | 2174 | 199-414 | 4861 | Leu-11 to Ala-18, | H0165: 1 | | |
| | | | | | Gly-22 to Ser-41. | | | |
| HPEAA40 | 867899 | 2175 | 186-308 | 4862 | | H0165: 1 and L0526: | | |
| | | | | | | 1. | | |
| HPDWR11 | 965249 | 2176 | 261-548 | 4863 | Gly-1 to Thr-13, | L0759: 2, L0769: 1, | | |
| | | | | | Arg-37 to Ser-45, | L0768: 1, L0794: 1, | | |
| | | | | | Arg-52 to Asn-73. | L0805: 1, H0658: 1, | | |
| | | | | | | L0750: 1 and L0777: 1. | | |
| HPDWN05 | 928563 | 2177 | 287-472 | 4864 | | L0439: 2, L0717: 1, | | |
| | | | | | | L0803: 1, H0658: 1 and | | |
| | | | | | | L0777: 1. | | |
| HPDVM01 | 913859 | 2178 | 311-433 | 4865 | | L0779: 2 and H0658: | | |
| | | | | | | 1. | | |
| HPDVD11 | 965276 | 2179 | 25-117 | 4866 | Ala-10 to Lys-18. | H0658: 1 and L0779: | | |
| | | | | | | 1. | | |
| HPDRU11 | 965307 | 2180 | 118-342 | 4867 | Gly-13 to Trp-21. | H0658: 1 and L0756: | | |
| | | | | | | 1. | | |
| HPDRR06 | 968601 | 2181 | 448-74 | 4868 | Pro-65 to His-76, | L0666: 2, L0766: 1 | | |
| | | | | | Asn-110 to Phe-118. | L0665: 1 and H0658: 1. | | |
| HPDRN07 | 951838 | 2182 | 54-299 | 4869 | Asp-11 to Asn-17. | H0658: 1 and L0604: | | |
| | | | | | | 1. | | |
| HPDRG01 | 914416 | 2183 | 339-674 | 4870 | | L0748: 2, H0658: 1 | | |
| | | | | | | and L0750: 1. | | |
| HPDPS12 | 969342 | 2184 | 1-255 | 4871 | Arg-10 to Gln-16, | H0658: 1, L0777: 1 | | |
| | | | | | Pro-24 to Gly-30. | and L0592: 1. | | |
| HPDPP12 | 969341 | 2185 | 3-179 | 4872 | Thr-1 to Asn-13, | L0523: 1 and H0658: | | |
| | | | | | Pro-35 to Lys-42. | 1. | | |
| HPDPC08 | 957822 | 2186 | 120-398 | 4873 | Arg-23 to Val-29. | H0658: 1 | 13 | |
| HPDOW10 | 961782 | 2187 | 280-429 | 4874 | Met-6 to His-12. | L0766: 2, L0766: 2, | | |
| | | | | | | H0658: 1 and L0779: 1. | | |
| HPDOO10 | 961881 | 2188 | 338-520 | 4875 | | L0769: 3 and H0658: | | |
| | | | | | | 1./ | | |
| HPDOF11 | 965491 | 2189 | 30-227 | 4876 | | L0770: 2 and H0658: | | |
| | | | | | | 1. | | |
| HPCTK02 | 917480 | 2190 | 207-446 | 4877 | | H0659: 1, L0740: 1 | | |
| | | | | | | and L0756: 1. | | |
| HPCTD03 | 922149 | 2191 | 3-332 | 4878 | | AR089: 6, AR061: 2 | | |
| | | | | | | H0659: 1 | | |
| HPCTC04 | 925777 | 2192 | 150-347 | 4879 | Arg-40 to Gln-47. | L0659: 2, H0659: 1 | | |
| | | | | | | and L0779: 1. | | |
| HPCQQ07 | 951646 | 2193 | 2-328 | 4880 | Arg-6 to Arg-11. | L0805: 1, L0776: 1 and | | |
| | | | | | | H0659: 1. | | |
| HPCPM63 | 954940 | 2194 | 85-222 | 4881 | | L0800: 1, H0659: 1 | | |
| | | | | | | and L0747: 1. | | |
| HPCOV68 | 911075 | 2195 | 97-249 | 4882 | | AR089: 23, AR061: 7 | | |
| | | | | | | L0439: 2, L0369: 1 and | | |
| | | | | | | H0659: 1. | | |
| HPCAO89 | 946913 | 2196 | 1-369 | 4883 | Pro-18 to Gln-28, | AR050: 18, AR054: | | |
| | | | | | Gln-42 to Asn-49, | 18, AR089: 5, AR051: | | |
| | | | | | Ser-72 to Arg-81. | 4, AR061: 2 | | |
| | | | | | | L0761: 1 and S0146: 1. | | |
| HPCAK66 | 320415 | 2197 | 85-237 | 4884 | Lys-9 to Tyr-14, | S0146: 1 | | |
| | | | | | Glu-44 to His-50. | | | |
| HPCAG81 | 778177 | 2198 | 190-348 | 4885 | | S0146: 1 and L0754: 1. | | |
| HPCAF65 | 573368 | 2199 | 75-275 | 4886 | Asp-38 to Ala-43. | S0146: 1 | | |
| HPCAD17 | 584754 | 2200 | 465-271 | 4887 | Glu-16 to Glu-27, | S0146: 1 | | |
| | | | | | Glu-35 to Ser-46, | | | |
| | | | | | Glu-56 to Ala-64. | | | |
| | 584755 | 2684 | 145-312 | 5371 | | | | |
| HPCAB54 | 728857 | 2201 | 2-409 | 4888 | Gly-1 to Gly-11. | S0146: 1 and L0591: 1. | | |
| HPCAB45 | 575233 | 2202 | 8-247 | 4889 | Pro-21 to Thr-40. | S0146: 1 | | |
| HOVEV01 | 914553 | 2203 | 49-540 | 4890 | Gly-50 to Thr-57, | L0748: 3, L0603: 2, | | |
| | | | | | Gln-60 to Trp-74, | H0428: 1, L0771: 1, | | |
| | | | | | Gln-86 to Cys-96, | L0749: 1 and L0757: 1. | | |
| | | | | | Met-106 to Gly-124. | | | |
| HOVEU10 | 961865 | 2204 | 170-328 | 4891 | | H0428: 1 | | |
| HOVEU06 | 933737 | 2205 | 106-201 | 4892 | | H0428: 1 | | |
| HOVEO04 | 926209 | 2206 | 18-179 | 4893 | Ser-27 to Gly-32. | H0428: 1 and L0750: | | |
| | | | | | | 1. | | |
| HOVEE20 | 909030 | 2207 | 88-444 | 4894 | Asn-7 to Met-12, | AR089: 7, AR061: 2 | | |
| | | | | | Cys-38 to Thr-44. | H0428: 1 | | |
| HOVDD82 | 948619 | 2208 | 2-172 | 4895 | Arg-2 to Cys-11, | H0428: 1 and L0766: | | |
| | | | | | Cys-15 to Gly-20. | 1. | | |
| HOVDD10 | 961887 | 2209 | 3-323 | 4896 | Glu-25 to Pro-39, | H0428: 1 and L0462: | | |
| | | | | | Thr-44 to Tyr-50, | 1. | | |
| | | | | | Pro-53 to Gln-60, | | | |
| | | | | | Ser-67 to Val-82. | | | |
| HOVCP77 | 772210 | 2210 | 120-299 | 4897 | Tyr-17 to Gln-23, | L0439: 12 and H0428: | | |
| | | | | | Lys-32 to Ser-38. | 1. | | |
| HOVCO50 | 932544 | 2211 | 425-586 | 4898 | | H0428: 1, L0752: 1 | | |
| | | | | | | and L0759: 1. | | |
| HOVCN57 | 734779 | 2212 | 143-301 | 4899 | Lys-1 to Gln-12 | H0428: 1 and L0744: | | |
| | | | | | Cys-44 to Lys-49. | 1. | | |
| HOVCM77 | 772208 | 2213 | 107-265 | 4900 | Arg-30 to Lys-39. | H0428: 1 and L0439: | | |
| | | | | | | 1. | | |
| HOVCM03 | 924196 | 2214 | 159-257 | 4901 | Glu-10 to Thr-18. | H0428: 1 and L0750: | | |
| | | | | | | 1. | | |
| HOVCI89 | 786917 | 2215 | 194-322 | 4902 | | H0428: 1 | | |
| HOVCI08 | 959470 | 2216 | 938-75 | 4903 | Pro-43 to Ser-49. | H0428: 1, L0743: 1, | | |
| | | | | | | L0744: 1, L0747: 1, | | |
| | | | | | | L0752: 1 and L0592: 1. | | |
| HOVCD33 | 702445 | 2217 | 124-252 | 4904 | Asp-33 to Val-38. | L0439: 2 and H0428: | | |
| | | | | | | 1. | | |
| HOVCC57 | 465313 | 2218 | 210-380 | 4905 | | H0428: 1 and L0581: | | |
| | | | | | | 1. | | |
| HOVBQ07 | 858863 | 2219 | 200-604 | 4906 | Asp-1 to Val-13, | H0428: 1, L0764: 1 | | |
| | | | | | Ser-17 to Ser-26. | and L0758: 1. | | |
| HOVBK69 | 757594 | 2220 | 116-424 | 4907 | | H0428: 1 and L0740: | | |
| | | | | | | 1. | | |
| HOVBK38 | 956238 | 2221 | 33-263 | 4908 | | L0766: 2, H0428: 1, | | |
| | | | | | | L0775: 1, L0782: 1, | | |
| | | | | | | L0783: 1. L0748: 1 and | | |
| | | | | | | L0758: 1. | | |
| HOVBK24 | 858857 | 2222 | 75-353 | 4909 | Gln-1 to Leu-7, | H0428: 1, L0748: 1 | | |
| | | | | | Ser-32 to His-42. | and L0581: 1. | | |
| HOVBI67 | 751665 | 2223 | 155-355 | 4910 | | L0749: 2 and H0428: | | |
| | | | | | | 1. | | |
| HOVBI20 | 669730 | 2224 | 1-183 | 4911 | | H0428: 1 and L0748: | | |
| | | | | | | 1. | | |
| HOVAZ89 | 904818 | 2225 | 2-298 | 4912 | Glu-14 to Pro-19, | H0428: 1 | | |
| | | | | | Arg-24 to Arg-36, | | | |
| | | | | | Arg-85 to His-90. | | | |
| HOVAZ65 | 750273 | 2226 | 275-457 | 4913 | | L0740: 2 and H0428: | | |
| | | | | | | 1. | | |
| HOVAY88 | 827077 | 2227 | 203-409 | 4914 | Asn-20 to Lys-25. | H0428: 1 | | |
| HOVAY58 | 736077 | 2228 | 179-388 | 4915 | Val-1 to Thr-11, | H0428: 1 and L0754: | | |
| | | | | | Tyr-23 to Leu-31, | 1. | | |
| | | | | | Arg-47 to Thr-52. | | | |
| HOVAY42 | 713812 | 2229 | 168-320 | 4916 | Asn-20 to Glu-26. | H0428: 1 | | |
| HOVAY03 | 921959 | 2230 | 147-1 | 4917 | | H0428: 1 | | |
| HOVAW62 | 745704 | 2231 | 2-247 | 4918 | | L0516: 2, H0428: 1 | | |
| | | | | | | and L0753: 1. | | |
| HOVAO25 | 678163 | 2232 | 112-270 | 4919 | | H0428: 1 and L0748: | | |
| | | | | | | 1. | | |
| HOVAN51 | 725005 | 2233 | 3-122 | 4920 | | L0748: 5, H0428: 1 | | |
| | | | | | | and L0749: 1. | | |
| HOVAJ07 | 953422 | 2234 | 279-452 | 4921 | Lys-40 to Phe-47. | H0428: 1 and L0743: | | |
| | | | | | | 1. | | |
| HOVAI05 | 932093 | 2235 | 2-199 | 4922 | Val-41 to Lys-46. | H0428: 1 and L0752: | | |
| | | | | | | 1. | | |
| HOVAF07 | 953553 | 2236 | 22-102 | 4923 | | H0428: 1 | | |
| HOVAF01 | 916770 | 2237 | 245-3 | 4924 | Phe-58 to Arg-67, | H0428: 1 | | |
| | | | | | Leu-71 to Thr-77. | | | |
| HOVAC77 | 578783 | 2238 | 181-366 | 4925 | | H0428: 1 | | |
| HOVAC54 | 578809 | 2239 | 36-197 | 4926 | Ile-23 to Cys-35. | H0428: 1 and L0748: | | |
| | | | | | | 1. | | |
| HOVAC26 | 578810 | 45-278 | 4927 | Gln-12 to Gly-17, | H0428: 1 | | | |
| | | | | | Ser-28 to Pro-39. | | | |
| HOVAB85 | 578788 | 2241 | 3-407 | 4928 | Asp-1 to Arg-6, | H0428: 1 | | |
| | | | | | Thr-31 to Leu-43, | | | |
| | | | | | Val-53 to His-59, | | | |
| | | | | | Pro-61 to Val-73, | | | |
| | | | | | Ser-81 to Ser-96. | | | |
| HOVAB61 | 578791 | 2242 | 256-477 | 4929 | | L0756: 2, L0361: 2, | | |
| | | | | | | H0428: 1, L0598: 1 and | | |
| | | | | | | L0592: 1, | | |
| HOOKF10 | 961499 | 2243 | 210-359 | 4930 | Lys-38 to Lys-50. | L0776: 1 and H0648: | | |
| | | | | | | 1. | | |
| HOOKF04 | 925784 | 2244 | 508-239 | 4931 | Thr-31 to Lys-40. | L0758: 3, L0779: 2, | | |
| | | | | | | H0648: 1 and L0740: 1. | | |
| HOOJU04 | 925774 | 2245 | 17-283 | 4932 | | H0648: 1 and L0777: | | |
| | | | | | | 1. | | |
| HOOJN04 | 925783 | 2246 | 3-260 | 4933 | Arg-21 to Leu-27. | L0770: 1, L0794: 1, | | |
| | | | | | | L0804: 1 and H0648: 1. | | |
| HOOJK11 | 965292 | 2247 | 205-420 | 4934 | Pro-48 to Phe-72. | H0648: 1 and L0750: | | |
| | | | | | | 1. | | |
| HOOJH05 | 928627 | 2248 | 37-210 | 4935 | Val-16 to Thr-26, | L0758: 3 and H0648: | | |
| | | | | | Pro-30 to Ser-36, | 1. | | |
| | | | | | Pro-53 to Glu-58. | | | |
| HOOJE02 | 917454 | 2249 | 248-379 | 4936 | Lys-34 to Gly-41. | H0648: 1 and L0758: | | |
| | | | | | | 1. | | |
| HOOIL05 | 928644 | 2250 | 280-444 | 4937 | Pro-42 to Asp-55. | L0751: 3, L0764: 1, | | |
| | | | | | | L0518: 1, H0648: 1, | | |
| | | | | | | L0747: 1 and L0752: 1. | | |
| HOOIG03 | 922510 | 2251 | 2-205 | 4938 | Glu-34 to Glu-44. | H0648: 1 and L0596: | | |
| | | | | | | 1. | | |
| HOOHP02 | 917424 | 2252 | 210-374 | 4939 | Phe-13 to Gln-24. | H0648: 1, L0748: 1, | | |
| | | | | | | L0751: 1, L0754: 1 and | | |
| | | | | | | L0749: 1. | | |
| HOOHE67 | 969061 | 2253 | 1-171 | 4940 | | H0648: 1, L0754: 1 | | |
| | | | | | | and L0750: 1. | | |
| HOOHD06 | 933873 | 2254 | 1-150 | 4941 | Arg-1 to Cys-10, | L0666: 1 and H0648: | | |
| | | | | | Lys-17 to Gly-24. | 1. | | |
| HOOAB23 | 522227 | 2255 | 249-49 | 4942 | His-1 to Gln-7, | H0028: 1 and L0792: | | |
| | | | | | Gly-14 to Gly-23, | 1. | | |
| | | | | | Leu-50 to Arg-67. | | | |
| HOOAB05 | 932925 | 2256 | 196-579 | 4943 | Ser-66 to Pro-76. | H0028: 1 and L0777: | | |
| | | | | | | 1. | | |
| HONAK10 | 968610 | 2257 | 3-116 | 4944 | Glu-1 to Lys-6. | L0766: 1 and T0068: 1. | | |
| HONAH06 | 936029 | 2258 | 677-333 | 4945 | | AR051: 655, AR050: | | |
| | | | | | | 494, AR054: 346 | | |
| | | | | | | T0068: 1 | | |
| HONAE50 | 723571 | 2259 | 344-559 | 4946 | Gly-18 to Thr-32. | T0068: 1 and L0749: 1. | | |
| HONAD65 | 747152 | 2260 | 174-290 | 4947 | Ser-6 to Lys-14. | T0068: 1 and L0592: 1. | | |
| HONAD02 | 859016 | 2261 | 732-1040 | 4948 | | AR061: 1, AR089: 1 | | |
| | | | | | | T0068: 1 and L0779: 1. | | |
| HOGEW23 | 973221 | 2262 | 2-145 | 4949 | Ser-1 to Gly-11. | H0435: 1 | | |
| HOGDQ03 | 922578 | 2263 | 163-414 | 4950 | | L0774: 1 and H0435: | | |
| | | | | | | 1. | | |
| HOGCW89 | 973227 | 2264 | 484-732 | 4951 | Lys-10 to Asn-16. | H0435: 1 | | |
| HOGCT13 | 657284 | 2265 | 389-763 | 4952 | | L0439: 2 and H0435: | | |
| | | | | | | 1. | | |
| HOGCR31 | 463874 | 2266 | 205-441 | 4953 | | H0435: 1 and L0743: | | |
| | | | | | | 1. | | |
| HOGCR10 | 964761 | 2267 | 1-240 | 4954 | | H0435: 1 and L0748: | | |
| | | | | | | 1. | | |
| HOGCQ54 | 859076 | 2268 | 3-608 | 4955 | Ser-19 to Asp-31. | L0766: 3 and H0435: | | |
| | | | | | | 1. | | |
| HOGCH05 | 930813 | 2269 | 2-202 | 4956 | | H0435: 1 and L0748: | 9q31.2 | 223900, |
| | | | | | | 1. | | 253800, |
| | | | | | | | | 253800 |
| HOGCE07 | 859077 | 2270 | 126-509 | 4957 | | L0369: 1 and H0435: | | |
| | | | | | | 1. | | |
| HOGCD61 | 761991 | 2271 | 247-393 | 4958 | | H0435: 1 | | |
| HOGCC63 | 745130 | 2272 | 101-241 | 4959 | Gly-2 to Tyr-8. | L0745: 2 and H0435: | | |
| | | | | | | 1. | | |
| HOGCA65 | 750308 | 2273 | 298-501 | 4960 | Arg-8 to Leu-17. | L0748: 2 and H0435: | | |
| | | | | | | 1. | | |
| HOGBJ26 | 847191 | 2274 | 208-50 | 4961 | Ser-17 to Trp-23. | H0435: 1 and L0439: | | |
| | | | | | | 1. | | |
| HOGBE27 | 682232 | 2275 | 2-163 | 4962 | Arg-1 to Phe-13. | H0435: 1 and L0747: | | |
| | | | | | | 1. | | |
| HOGAM56 | 908904 | 2276 | 973-779 | 4963 | | H0435: 1 | | |
| HOGAI73 | 764490 | 2277 | 227-379 | 4964 | Lys-3 to Phe-8. | H0435: 1 and L0777: | | |
| | | | | | | 1. | | |
| HOGAI26 | 681919 | 2278 | 221-397 | 4965 | Arg-1 to Gly-19, | L0748: 2 and H0435: | | |
| | | | | | Lys-35 to Trp-43. | 1. | | |
| HOGAH71 | 760431 | 2279 | 163-369 | 4966 | Asp-22 to His-28, | H0435: 1 and L0596: | | |
| | | | | | Arg-49 to Ser-54. | 1. | | |
| HOGAG57 | 734848 | 2280 | 2-634 | 4967 | Lys-10 to Ser-15, | L0747: 2, H0435: 1, | | |
| | | | | | Arg-44 to Ser-62, | L0742: 1, L0596: 1 and | | |
| | | | | | Glu-78 to Thr-83, | L0591: 1. | | |
| | | | | | Lys-115 to Phe-124, | | | |
| | | | | | Glu-137 to Asp-148, | | | |
| | | | | | Gly-165 to His-171, | | | |
| | | | | | Glu-189 to Lys-211. | | | |
| HOGAD77 | 772319 | 2281 | 298-576 | 4968 | | L0748: 2 and H0435: | | |
| | | | | | | 1. | | |
| HOGAC69 | 756713 | 2282 | 578-324 | 4969 | | H0435: 1 | | |
| HOFNW81 | 789232 | 2283 | 46-336 | 4970 | Asp-48 to Glu-53, | H0415: 1 | | |
| | | | | | Pro-72 to Ser-81. | | | |
| HOFNW69 | 533713 | 2284 | 213-28 | 4971 | Glu-17 to His-23, | H0415: 1 | 1q21 | 104770, |
| | | | | | His-26 to Ser-34, | | | 107670, |
| | | | | | Gly-40 to Glu-45. | | | 110700, |
| | | | | | | | | 135940, |
| | | | | | | | | 145001, |
| | | | | | | | | 146790, |
| | | | | | | | | 152445, |
| | | | | | | | | 152445, |
| | | | | | | | | 159001, |
| | | | | | | | | 174000, |
| | | | | | | | | 179755, |
| | | | | | | | | 182860, |
| | | | | | | | | 182860, |
| | | | | | | | | 182860, |
| | | | | | | | | 191315, |
| | | | | | | | | 230800, |
| | | | | | | | | 230800, |
| | | | | | | | | 266200, |
| | | | | | | | | 600897, |
| | | | | | | | | 601105, |
| | | | | | | | | 601412, |
| | | | | | | | | 601652, |
| | | | | | | | | 602491 |
| HOFNW68 | 753048 | 2285 | 1-132 | 4972 | Lys-18 to Asp-23. | H0415: 1 | | |
| HOFNW65 | 815822 | 2286 | 3-431 | 4973 | Arg-14 to Asn-19, | AR089: 5, AR061: 3 | | |
| | | | | | Ala-35 to Ser-45, | H0415: 1 | | |
| | | | | | Gln-74 to Glu-90. | | | |
| HOFNW45 | 720755 | 2287 | 2-118 | 4974 | Asn-12 to Glu-19, | H0415: 1 | | |
| | | | | | Lys-30 to Phe-35. | | | |
| HOFNW07 | 953436 | 2288 | 37-411 | 4975 | Arg-10 to Arg-19, | H0415: 1 | | |
| | | | | | Asn-50 to Ser-61, | | | |
| | | | | | Met-65 to Lys-71, | | | |
| | | | | | Ala-83 to Asn-89. | | | |
| HOFNU50 | 724437 | 2289 | 3-347 | 4976 | Phe-5 to Pro-10, | L0748: 2 and H0415: | | |
| | | | | | Gln-71 to Ser-77, | 1. | | |
| | | | | | Lys-86 to Glu-91. | | | |
| HOFNL96 | 888569 | 2290 | 3-380 | 4977 | Pro-3 to Ala-17, | H0415: 1 | | |
| | | | | | Asn-56 to Asp-62, | | | |
| | | | | | Gln-85 to Gly-100. | | | |
| HOFNI90 | 788947 | 2291 | 90-323 | 4978 | Gln-1 to Ser-6, | H0415: 1 | | |
| | | | | | Ser-36 to Ser-45, | | | |
| | | | | | Leu-47 to Pro-54, | | | |
| | | | | | Arg-59 to Gly-69. | | | |
| HOFNI85 | 784366 | 2292 | 1-138 | 4979 | | H0415: 1 | | |
| HOFNI72 | 760643 | 2293 | 52-273 | 4980 | | H0415: 1 | | |
| HOFNI71 | 760392 | 2294 | 59-253 | 4981 | Arg-1 to Arg-6. | H0415: 1 | | |
| | 773729 | 2685 | 1-177 | 5372 | Gly-9 to His-30, | | | |
| | | | | | Arg-48 to Pro-57. | | | |
| HOFNI58 | 859094 | 2295 | 151-351 | 4982 | | H0415: 1 | | |
| HOFNI56 | 859093 | 2296 | 166-408 | 4983 | Gln-7 to Gly-15. | H0415: 1 | | |
| HOFNI42 | 713813 | 2297 | 111-302 | 4984 | | H0415: 1 | | |
| HOFNI37 | 859102 | 2298 | 35-232 | 4985 | | H0415: 1 | | |
| HOFNI33 | 859103 | 2299 | 3-263 | 4986 | | H0415: 1 | | |
| HOFNI32 | 699299 | 2300 | 2-217 | 4987 | Gly-1 to Gly-11, | H0415: 1 | | |
| | | | | | Thr-59 to Gly-64. | | | |
| HOFNI10 | 964682 | 2301 | 2-193 | 4988 | | H0415: 1 | | |
| HOFNI02 | 917347 | 2302 | 1-201 | 4989 | Gln-16 to Gln-23. | H0415: 1 | | |
| HOFNC80 | 835718 | 2303 | 1-315 | 4990 | Ser-9 to Lys-18. | AR051: 12, AR050: | | |
| | | | | | | 12, AR054: 10, AR061: | | |
| | | | | | | 2, AR089: 1 | | |
| | | | | | | H0415: 1 | | |
| HOFNC79 | 774037 | 2304 | 139-243 | 4991 | Glu-21 to Asp-26. | H0415: 1 | | |
| HOFNB63 | 613681 | 2305 | 179-3 | 4992 | | H0415: 1 | | |
| HOFNB55 | 731801 | 2306 | 2-67 | 4993 | Arg-1 to Thr-15. | H0415: 1 | | |
| HOFNB51 | 725684 | 2307 | 187-432 | 4994 | Arg-18 to Lys-24 | H0415: 1 | | |
| HOFMU70 | 489858 | 2308 | 2-154 | 4995 | Arg-18 to Gly-24. | H0415: 1 | | |
| HOFMU67 | 743184 | 2309 | 256-528 | 4996 | Gln-85 to Pro-91. | H0415: 1 | | |
| HOFMU29 | 824242 | 2310 | 993-625 | 4997 | | H0415: 1 | | |
| | 902061 | 2686 | 217-402 | 5373 | | | | |
| HOFMT55 | 888552 | 2311 | 87-239 | 4998 | Val-17 to Glu-24. | AR050: 84, AR054: | | |
| | | | | | | 73, AR051: 55, AR089: | | |
| | | | | | | 21, AR061: 8 | | |
| | | | | | | H0415: 1 | | |
| HOFMT45 | 891512 | 2312 | 3-269 | 4999 | Asp-1 to Leu-10, | AR051: 10, AR054: 9, | | |
| | | | | | Glu-38 to Cys-74. | AR050: 2 | | |
| | | | | | | H0415: 1 | | |
| HOFMS43 | 947973 | 2313 | 3-359 | 5000 | Asp-1 to Asp-17, | AR051: 15, AR050: 9, | | |
| | | | | | Pro-61 to Asn-66, | AR089: 7, AR061: 5, | | |
| | | | | | Tyr-84 to Tyr-90, | AR054: 1 | | |
| | | | | | Ser-103 to Trp-110. | H0415: 1 | | |
| HOFMS09 | 972725 | 2314 | 3-461 | 5001 | | H0415: 1 | | |
| HOFMP09 | 943358 | 2315 | 1-372 | 5002 | Ala-74 to Gly-84, | AR089: 20, AR061: 9 | | |
| | | | | | Arg-98 to Lys-104. | H0415: 1 | | |
| HOFMI25 | 491360 | 2316 | 145-2 | 5003 | Lys-28 to Val-33, | H0415: 1 | | |
| | | | | | Gln-40 to Gly-48. | | | |
| | 859125 | 2687 | 3-839 | 5374 | Asn-33 to Leu-38. | | | |
| HOFMF82 | 693987 | 2317 | 2-169 | 5004 | Thr-1 to Lys-7, | AR089: 2, AR061: 1 | | |
| | | | | | Ala-17 to Arg-33, | | | |
| | | | | | His 35 to Asn-45, | | | |
| | | | | | Glu-47 to Arg-52. | | | |
| | 694062 | 2688 | 3-476 | 5375 | Phe-8 to Ser-21, | | | |
| | | | | | Ile-28 to Arg-33, | | | |
| | | | | | Ile-40 to Gly-49, | | | |
| | | | | | Ala-56 to Gln-61, | | | |
| | | | | | Gln-69 to Ser-76, | | | |
| | | | | | Ala-91 to Tyr-96, | | | |
| | | | | | Thr-119 to Cys-126, | | | |
| | | | | | Ser-132 to Arg-144, | | | |
| | | | | | Thr-147 to Asp-158. | | | |
| | 909248 | 2689 | 1-447 | 5376 | Arg-17 to Leu-32, | | | |
| | | | | | His-43 to Cys-54. | | | |
| HOFMF81 | 788733 | 2318 | 3-395 | 5005 | Asp-1 to Asn-6, | H0415: 1 | | |
| | | | | | Met-46 to Phe-53. | | | |
| HOFMF19 | 888780 | 2319 | 2-397 | 5006 | Arg-1 to Gly-14, | AR050: 21, AR051: | | |
| | | | | | Glu-35 to Leu-42, | 10, AR054: 9 | | |
| | | | | | Thr-54 to Lys-61. | H0415: 1 | | |
| HOFAF25 | 942367 | 2320 | 271-993 | 5007 | | H0414: 1 | | |
| HOFAD78 | 886485 | 2321 | 3-527 | 5008 | Pro-19 to Arg-27, | AR054: 15, AR051: 3, | | |
| | | | | | Ser-36 to Asn-42, | AR050: 0 | | |
| | | | | | His-101 to Pro-107, | H0414: 1 | | |
| | | | | | Gly-150 to Gln-155, | | | |
| | | | | | Ser-167 to Thr-175. | | | |
| HODKG07 | 951875 | 2322 | 3-143 | 5009 | Gly-13 to Ser-20, | L0623: 2, H0615: 1 | | |
| | | | | | Arg-41 to Thr-47. | and L0519: 1. | | |
| HODJU05 | 929321 | 2323 | 91-309 | 5010 | Arg-52 to Asn-61. | H0615: 1, L0435: 1 | | |
| | | | | | | and L0759: 1. | | |
| HODJL04 | 926200 | 2324 | 128-328 | 5011 | | H615: 1, L0520: 1 | | |
| | | | | | | | and L0766: 1. | |
| HODHK07 | 952193 | 2325 | 114-278 | 5012 | Thr-26 to Ser-33. | H0615: 1 and L0754: | | |
| | | | | | | 1. | | |
| HODHG11 | 966063 | 2326 | 338-610 | 5013 | Arg-1 to Val-10, | H0615: 1 and L0758: | | |
| | | | | | Trp-12 to Tyr-20, | 1. | | |
| | | | | | Arg-47 to Ser-63. | | | |
| HODGL88 | 859300 | 2327 | 461-610 | 5014 | Arg-8 to Arg-16. | L0471: 1, H0615: 1, | | |
| | | | | | | L0748: 1 and L0749: 1. | | |
| HODGJ02 | 918476 | 2328 | 237-368 | 5015 | | L0471: 1, H0615: 1 | | |
| | | | | | | and L0748: 1 | | |
| HODFY10 | 963350 | 2329 | 122-358 | 5016 | Asn-1 to Asp-6, | L0777: 2 and H0615: | | |
| | | | | | Phe-8 to Ser-14. | 1. | | |
| HODFX19 | 842138 | 2330 | 3-494 | 5017 | Pro-15 to Gly-24, | H0615: 1 and L0775: | | |
| | | | | | Cys-36 to Ile-44, | 1. | | |
| | | | | | Arg-77 to Pro-112. | | | |
| HODFX12 | 969588 | 2331 | 3-170 | 5018 | Ser-17 to Gln-29. | H0615: 1 and L0666: | | |
| | | | | | | 1. | | |
| HODFX04 | 926278 | 2332 | 222-491 | 5019 | Ser-2 to Ile-16. | H0615: 1, L0775: 1 | | |
| | | | | | | and L0748: 1. | | |
| HODFW95 | 795281 | 2333 | 3-563 | 5020 | His-1 to Arg-7, | L0747: 2 and H0615: | | |
| | | | | | Ala-45 to Arg-52, | 1. | | |
| | | | | | Ser-75 to Leu-80, | | | |
| | | | | | Arg-89 to Asp-94, | | | |
| | | | | | Arg-139 to Glu-158. | | | |
| HODFW40 | 859320 | 2334 | 386-556 | 5021 | | H0615: 1, L0805: 1 | | |
| | | | | | and L0776: 1. | | | |
| HODFR85 | 783789 | 2335 | 35-199 | 5022 | | H0615: 1 and L0756: | | |
| | | | | | | 1. | | |
| HODFL37 | 948703 | 2336 | 239-463 | 5023 | Lys-1 to Thr-22. | H0615: 1 | | |
| HODFJ11 | 966065 | 2337 | 326-460 | 5024 | | L0777: 2 and H0615: | | |
| | | | | | | 1. | | |
| HODFI66 | 974317 | 2338 | 81-338 | 5025 | | H0615: 1 | | |
| HODFH45 | 974916 | 2339 | 453-593 | 5026 | | H0615: 1 | | |
| HODFG82 | 779191 | 2340 | 1-150 | 5027 | | H0615: 1 and L0362: | | |
| | | | | | | 1. | | |
| HODFF88 | 974911 | 2341 | 14-544 | 5028 | His-8 to Gly-18, | AR054: 34, AR051: | | |
| | | | | | Glu-150 to Leu-167. | 29, AR050: 23, AR089: | | |
| | | | | | | 4, AR061: 4 | | |
| | | | | | | H0615: 1 | | |
| HODFE04 | 926999 | 2342 | 85-249 | 5029 | | H0615: 1 and L0748: | | |
| | | | | | | 1. | | |
| HODFD73 | 909812 | 2343 | 1-576 | 5030 | | AR061: 10, AR089: 4 | | |
| | | | | | | H0615: 1 | | |
| HODFC79 | 774156 | 2344 | 66-242 | 5031 | Thr-47 to Lys-53. | H0615: 1 and L0749: | | |
| | | | | | | 1. | | |
| HODEZ45 | 974337 | 2345 | 215-436 | 5032 | His-34 to Trp-39. | H0615: 1 | | |
| HODEU01 | 915167 | 2346 | 2-286 | 5033 | | L0748: 3 and H0615: | | |
| | | | | | | 1. | | |
| HODET07 | 952194 | 2347 | 354-127 | 5034 | | H0615: 1 and L0748: | | |
| | | | | | | 1. | | |
| HODES10 | 963474 | 2348 | 90-200 | 5035 | | L0534: 1 and H0615: | | |
| | | | | | | 1. | | |
| HODEO35 | 859364 | 2349 | 2-136 | 5036 | | H0615: 1, L0376: 1 | | |
| | | | | | | and L0759: 1. | | |
| HODEK82 | 779245 | 2350 | 450-596 | 5037 | Leu-1 to Phe-8. | H0615: 1 and L0753: | | |
| | | | | | | 1. | | |
| HODEA14 | 859375 | 2351 | 3-527 | 5038 | | H0615: 1, L0060: 1 | | |
| | | | | | | and L0462: 1. | | |
| HODDX64 | 745810 | 2352 | 73-393 | 5039 | | H0328: 1 and L0748: | | |
| | | | | | | 1. | | |
| HODDS89 | 531075 | 2353 | 301-453 | 5040 | Thr-1 to Val-7. | H0328: 1 and L0756: | | |
| | | | | | | 1. | | |
| HODDS74 | 765863 | 2354 | 83-235 | 5041 | Arg-21 to Phe-27, | H0328: 1 and L0748: | | |
| | | | | | Ser-45 to Trp-50. | 1. | | |
| HODDF37 | 420051 | 2355 | 271-420 | 5042 | | H0328: 1 | | |
| | 704622 | 2690 | 173-481 | 5377 | Pro-46 to Tyr-51. | | | |
| HODDE02 | 920961 | 2356 | 3-200 | 5043 | Asp-1 to Asp-8. | H0328: 1, L0373: 1 | | |
| | | | | | | and L0777: 1. | | |
| HODCZ64 | 745966 | 2357 | 71-208 | 5044 | Pro-35 to Lys-46. | AR051: 30, AR050: 10 | | |
| | | | | | | H0328: 1 | | |
| HODCZ39 | 875811 | 2358 | 3-203 | 5045 | | H0328: 1, L0748: 1 | | |
| | | | | | | and L0596: 1 | | |
| HODCY73 | 764543 | 2359 | 214-414 | 5046 | Asn-36 to Thr-47. | H0328: 1, L0748: 1 | | |
| | | | | | | and L0439: 1. | | |
| HODCY32 | 859543 | 2360 | 212-352 | 5047 | | H0328: 1 | | |
| HODCW83 | 781287 | 2361 | 40-207 | 5048 | | H0328: 1 and L0777: | | |
| | | | | | | 1. | | |
| HODCV61 | 868291 | 2362 | 187-393 | 5049 | | H0328: 1 | | |
| HODCO15 | 660502 | 2363 | 82-219 | 5050 | | H0328: 1 and L0748: | | |
| | | | | | | 1. | | |
| HODCJ84 | 973286 | 2364 | 2 28-354 | 5051 | Ser-51 to Leu-56, | H0328: 1 | | |
| | | | | | Ser-84 to Leu-90. | | | |
| HODCC05 | 932633 | 2365 | 397-552 | 5052 | Val-10 to Glu-16. | H0328: 1, L0455: 1 | | |
| | | | | | | and L0777: 1. | | |
| HODCA90 | 792611 | 2366 | 62-313 | 5053 | Asn-44 to Asn-51. | H0328: 1 and L0749: | | |
| | | | | | | 1. | | |
| HODBZ85 | 784526 | 2367 | 60-236 | 5054 | | H0328: 1 and L0748: | | |
| | | | | | | 1. | | |
| HODBX08 | 960178 | 2368 | 344-595 | 5055 | Pro-43 to Ser-54. | H0328: 1, L0527: 1 | | |
| | | | | | | and L0749: 1. | | |
| HODBU72 | 766284 | 2369 | 99-266 | 5056 | Pro-33 to Phe-39, | L0598: 2 and H0328: | | |
| | | | | | Tyr-50 to Ser-56. | 1. | | |
| HODBK84 | 859558 | 2370 | 203-460 | 5057 | Gly-1 to Ser-17. | AR051: 91, AR050: | | |
| | | | | | | 61, AR054: 56 | | |
| | | | | | | H0328: 1 | | |
| HODBF61 | 742114 | 2371 | 1-159 | 5058 | Tyr-35 to Ile-42. | H0328: 1 | | |
| HODBF40 | 529387 | 2372 | 24-215 | 5059 | | H0328: 1 | | |
| HODBF33 | 702750 | 2373 | 2-193 | 5060 | Leu-1 to Gly-12. | L0794: 2, L0750: 2, | | |
| | | | | | | H0328: 1, L0766: 1, | | |
| | | | | | | L0803: 1, L0788: 1 and | | |
| | | | | | | L0755: 1. | | |
| HODBF17 | 529389 | 2374 | 196-336 | 5061 | | H0328: 1 and L0792: | | |
| | | | | | | 1. | | |
| HODBD93 | 792579 | 2375 | 126-308 | 5062 | His-1 to Gly-6, | L0731: 2 and H0328: | | |
| | | | | | Cys-9 to Thr-18. | 1. | | |
| HODBD73 | 764670 | 2376 | 104-340 | 5063 | Thr-8 to Arg-14, | H0328: 1 and L0748: | | |
| | | | | | Ser-37 to Glu-42. | 1. | | |
| HODBC42 | 529635 | 2377 | 280-486 | 5064 | Ser-8 to Ser-13. | L0731: 3 and H0328: | | |
| | | | | | | 1. | | |
| HODBA48 | 721931 | 2378 | 18-257 | 5065 | | L0745: 2, H0328: 1, | | |
| | | | | | | L0740: 1 and L0759: 1 | | |
| HODAZ21 | 826693 | 2379 | 2-205 | 5066 | Glu-1 to Gly-13, | H0328: 1 | | |
| | | | | | Gly-21 to Thr-28, | | | |
| | | | | | Lys-43 to Asn-61. | | | |
| HODAX45 | 723449 | 2380 | 2-103 | 5067 | Pro-1 to Gly-12. | L0748: 2 and H0328: | | |
| | | | | | | 1. | | |
| HODAV84 | 592179 | 2381 | 43-210 | 5068 | Lys-1 to Ser-7. | H0328: 1 | | |
| HODAV24 | 679165 | 2382 | 177-308 | 5069 | | L0748: 3, L0740: 2, | | |
| | | | | | | H0328: 1, L0766: 1, | | |
| | | | | | | L0803: 1, L0659: 1, | | |
| | | | | | | L0665: 1 and L0612: 1. | | |
| HODAK55 | 745532 | 2383 | 2-169 | 5070 | | AR061: 11, AR089: 9 | 9p13-p12 | 230400, |
| | | | | | | L0748: 3 and H0328: | | 250250 |
| | | | | | | 1. | | |
| HODAK05 | 932639 | 2384 | 2-133 | 5071 | Arg-15 to Thr-22, | H0328: 1 and L0596: | | |
| | | | | | Ser-28 to Arg-33. | 1. | | |
| HODAE72 | 529638 | 2385 | 2-135 | 5072 | | H0328: 1 | | |
| HODAE55 | 529637 | 2386 | 2-117 | 5073 | | H0328: 1 | | |
| HODAE48 | 529639 | 2387 | 21-101 | 5074 | Asp-1 to Arg-8. | H0328: 1 | | |
| HODAE01 | 921680 | 2388 | 92-319 | 5075 | | H0328: 1 and L0748: | | |
| | | | | | | 1. | | |
| HODAA92 | 790588 | 2389 | 77-253 | 5076 | Pro-1 to Gly-20, | H0328: 1 | | |
| | | | | | Ser-27 to Ser-34. | | | |
| HODAA85 | 784534 | 2390 | 3-167 | 5077 | | H0328: 1 | | |
| HODAA80 | 529560 | 2391 | 2-298 | 5078 | | H0328: 1 | | |
| HODAA69 | 529563 | 2392 | 113-238 | 5079 | | H0328: 1 | | |
| HODAA54 | 859582 | 2393 | 64-198 | 5080 | Tyr-15 to Gln-27. | H0328: 1 | | |
| HODAA34 | 529570 | 2394 | 93-251 | 5081 | Lys-42 to Thr-47. | H0328: 1 | | |
| HODAA21 | 859583 | 2395 | 49-198 | 5082 | | H0328: 1 and L0605: | | |
| | | | | | | 1. | | |
| HODAA15 | 523382 | 2396 | 84-131 | 5083 | | H0328: 1 | | |
| HODAA07 | 954157 | 2397 | 21-107 | 5084 | | H0328: 1 | | |
| HODAA04 | 927711 | 2398 | 58-303 | 5085 | | H0328: 1 | | |
| HOCPU05 | 928651 | 2399 | 114-377 | 5086 | | L0755: 2, L0758: 2, | | |
| | | | | | | L0717: 1, L0365: 1 and | | |
| | | | | | | H0660: 1. | | |
| HOCPH02 | 917453 | 2400 | 139-327 | 5087 | Arg-14 to Cys-20, | L0748: 2, L0756: 2, | | |
| | | | | | Val-34 to Cys-43, | L0372: 1, L0663: 1, | | |
| | | | | | Pro-45 to Ser-52. | L0665: 1, H0660: 1, | | |
| | | | | | | L0439: 1 and L0777: 1. | | |
| HOCPF02 | 917630 | 2401 | 49 240 | 5088 | Ser-18 to Ser-27. | L0766: 1, H0660: 1 | | |
| | | | | | | and L0758: 1. | | |
| HOCOV07 | 951744 | 2402 | 108-314 | 5089 | Phe-19 to Tyr-34, | L0766: 3 and H0660: | | |
| | | | | | Ser-41 to Arg-51. | 1. | | |
| HOCMM01 | 914464 | 2403 | 112-390 | 5090 | Ser-19 to Tyr-28, | L0763: 1, L0776: 1 and | | |
| | | | | | Glu-34 to Val-45, | H0660: 1. | | |
| | | | | | Gly-53 to Pro-58, | | | |
| | | | | | Glu-63 to Gln-82. | | | |
| HOCMI24 | 878363 | 2404 | 2-484 | 5091 | Asp-21 to Leu-45. | H0660: 1 and L0731: | | |
| | | | | | | 1. | | |
| HOCMC01 | 914552 | 2405 | 432-136 | 5092 | Pro-31 to Gly-36, | H0660: 1 and L0749: | | |
| | | | | | Ser-60 to Leu-65, | 1. | | |
| | | | | | Gln-69 to Thr-76, | | | |
| | | | | | Gly-81 to Glu-87. | | | |
| HNOJJ12 | 969077 | 2406 | 1517-1771 | 5093 | | H0687: 1, L0803: 1 | | |
| | | | | | | and L0666: 1. | | |
| HNOAD04 | 926258 | 2407 | 464-625 | 5094 | Thr-12 to Ser-19, | L0766: 4, L0439: 4, | | |
| | | | | | Lys-28 to Ala-39. | L0646: 1, H0651: 1, | | |
| | | | | | | L0756: 1 and L0759: 1. | | |
| HNNNB08 | 957719 | 2408 | 358-161 | 5095 | | H0678: 1 | | |
| HNNNA07 | 899742 | 2409 | 588-361 | 5096 | | AR051: 4, AR054: 0 | | |
| | | | | | | H0678: 1 | | |
| HNIAB92 | 683077 | 2410 | 111-1 | 5097 | Gln-27 to Asn-35. | S0326: 1 | | |
| HNIAB73 | 764172 | 2411 | 2-346 | 5098 | | S0326: 1 | | |
| HNIAB26 | 974750 | 2412 | 387-73 | 5099 | Arg-14 to Trp-19. | S0326: 1, L0769: 1 and | | |
| | | | | | | L0774: 1. | | |
| HNBVH02 | 917719 | 2413 | 91-192 | 5100 | | H0662: 1 and L0748: | | |
| | | | | | | 1. | | |
| HNBVC03 | 922402 | 2414 | 3-104 | 5101 | Tyr-6 to Thr-15. | H0662: 1 and L0766: | | |
| | | | | | | 1. | | |
| HNBUQ06 | 933673 | 2415 | 321-521 | 5102 | Glu-1 to Tyr-7, | H0662: 1, L0794: 1 | | |
| | | | | | Pro-42 to Leu-47, | and L0758: 1. | | |
| | | | | | Pro-50 to Ala-57. | | | |
| HNBUO01 | 914361 | 2416 | 109-336 | 5103 | His-1 to Phe-6, | H0662: 1 and L0524: | | |
| | | | | | Asn-58 to Met-65. | 1. | | |
| HNBUI10 | 961734 | 2417 | 3-437 | 5104 | Pro-6 to Cys-24, | H0662: 1, L0764: 1, | | |
| | | | | | Glu-26 to Trp-37, | L0803: 1, L0774: 1, | | |
| | | | | | Asn-65 to Leu-73, | L0758: 1 and L0599: 1. | | |
| | | | | | Gln-81 to Gly-90, | | | |
| | | | | | Gly-100 to Gly-115, | | | |
| | | | | | Asn-118 to Ser-126. | | | |
| HLWFJ69 | 754476 | 2418 | 3-245 | 5105 | | H0553: 1 and L0754: | 12q13.3 | 181430, |
| | | | | | | 1. | | 232800, |
| | | | | | | | | 600808, |
| | | | | | | | | 601284, |
| | | | | | | | | 601769, |
| | | | | | | | | 601769, |
| | | | | | | | | 602116 |
| HLWFB01 | 915399 | 2419 | 56-328 | 5106 | Lys-38 to Gly-43. | H0553: 1 and L0794: | | |
| | | | | | | 1. | | |
| HLWEH10 | 963548 | 2420 | 1-204 | 5107 | Gln-1 to Ala-17, | L0617: 1 and H0553: | | |
| | | | | | Arg-47 to Gln-52. | 1. | | |
| HLWEA90 | 787632 | 2421 | 179-331 | 5108 | Lys-1 to Thr-6, | H0553: 1 and L0747: | | |
| | | | | | Ser-32 to Ser-38. | 1. | | |
| HLWDZ31 | 917643 | 2422 | 2-259 | 5109 | | H0553: 1 and L0758: | 20q13.1 | 256540, |
| | | | | | | 1. | | 600281, |
| | | | | | | | | 600281 |
| HLWDD01 | 915378 | 2423 | 1-216 | 5110 | Trp-5 to Lys-11. | H0553: 1 and L0512: | | |
| | | | | | | 1. | | |
| HLWDB48 | 856512 | 2424 | 215-514 | 5111 | Pro-31 to Gln-38, | H0553: 1 and L0740: | | |
| | | | | | Ser-58 to Gly-69. | 1. | | |
| HLWCP60 | 739801 | 2425 | 1-207 | 5112 | Phe-1 to Gly-6, | H0553: 1 and L0596: | | |
| | | | | | Phe-40 to Gly-49. | 1. | | |
| HLWCN93 | 791854 | 2426 | 219-392 | 5113 | Glu-4 to Ala-9. | H0553: 1 and L0748: | | |
| | | | | | | 1. | | |
| HLWCN50 | 723787 | 2427 | 2-250 | 5114 | Val-33 to Ser-38. | H0553: 1 and L0756: | | |
| | | | | | | 1. | | |
| HLWCF83 | 781069 | 2428 | 1-297 | 5115 | Pro-14 to Arg-26, | H0553: 1 and L0752: | | |
| | | | | | Pro-28 to Ser-33, | 1. | | |
| | | | | | Gly-48 to Ala-56. | | | |
| HLWCF33 | 687995 | 2429 | 3-503 | 5116 | Leu-62 to Arg-69, | H0553: 1, L0591: 1 | | |
| | | | | | Lys-76 to Phe-96. | and L0595: 1. | | |
| HLWCE47 | 720156 | 2430 | 278-466 | 5117 | | H0553: 1, L0783: 1 | | |
| | | | | | | and L0749: 1. | | |
| HLWCB93 | 623773 | 2431 | 278-3 | 5118 | Pro-6 to Glu-18, | H0553: 1 | | |
| | | | | | Pro-20 to Trp-40, | | | |
| | | | | | Lys-86 to Arg-92. | | | |
| | 856519 | 2691 | 3-200 | 5378 | Ser-15 to Ser-23. | | | |
| HLWBX42 | 917920 | 2432 | 44-382 | 5119 | Arg-11 to Ser-17. | H0553: 1 and L0751: | | |
| | | | | | | 1. | | |
| HLWBW29 | 690515 | 2433 | 1-195 | 5120 | Arg-2 to Gly-7, | H0553: 1 and L0748: | | |
| | | | | | Ile-28 to Ile-34, | | | |
| | | | | | Ser-56 to Val-62. | | | |
| HLWBT09 | 887877 | 2434 | 3-419 | 5121 | Ser-1 to Glu-28. | AR050: 49, AR054: | | |
| | | | | | | 47, AR051: 27 | | |
| | | | | | | H0553: 1 | | |
| HLWBS62 | 743406 | 2435 | 9-365 | 5122 | Gly-11 to Trp-16, | H0553: 1, L0766: 1 | | |
| | | | | | Cys-53 to Gly-78, | and L0747: 1. | | |
| | | | | | Arg-99 to Asp-105, | | | |
| | | | | | Ser-113 to Glu-119. | | | |
| HLWBR85 | 784261 | 2436 | 221-370 | 5123 | Lys-9 to Asn-22. | L0747: 2 and H0553: | | |
| | | | | | | 1. | | |
| HLWBQ91 | 790072 | 2437 | 1-303 | 5124 | | H0553: 1 and L0748: | 6q16.1-q16.3 | 136550, |
| | | | | | | 1. | | 602772 |
| HLWBJ65 | 747784 | 2438 | 270-467 | 5125 | Leu-20 to Asp-38. | H0553: 1 and L0759: | | |
| | | | | | | 1. | | |
| HLWBH92 | 791355 | 2439 | 95-301 | 5126 | Glu-8 to Gln-18. | H0553: 1 and L0754: | | |
| | | | | | | 1. | | |
| HLWBG78 | 888068 | 2440 | 39-371 | 5127 | Pro-2 to Thr-7, | H0553: 1 and L0748: | | |
| | | | | | Ala-13 to Arg-20. | 1. | | |
| HLWBF48 | 721530 | 2441 | 172-381 | 5128 | Arg-12 to Gly-21. | H0553: 1, L0665: 1, | | |
| | | | | | | L0439: 1 and L0759: 1. | | |
| HLWBE74 | 887967 | 2442 | 2-232 | 5129 | Glu-7 to Glu-13, | AR054: 15, AR050: 3, | | |
| | | | | | Trp-18 to Thr-32, | AR051: 2 | | |
| | | | | | Pro-34 to Arg-44, | H0553: 1 | | |
| | | | | | Gly-51 to Trp-60, | | | |
| | | | | | Pro-62 to Ala-72. | | | |
| HLWBC21 | 869611 | 2443 | 2-412 | 5130 | Pro-2 to Val-21, | L0747: 2, H0553: 1 | | |
| | | | | | Asp-23 to Val-30, | and L0794: 1. | | |
| | | | | | Gly-36 to Leu-41, | | | |
| | | | | | Met-49 to Gly-55, | | | |
| | | | | | Thr-72 to Lys-78, | | | |
| | | | | | Ile-92 to Asp-97. | | | |
| HLWBA80 | 720397 | 2444 | 3-347 | 5131 | Lys-6 to Leu-12, | H0553: 1 and L0755: | | |
| | | | | | His-39 to Leu-57, | 1. | | |
| | | | | | Ile-61 to Asp-66. | | | |
| HLWBA27 | 931387 | 2445 | 2-322 | 5132 | Lys-6 to Asn-13, | H0553: 1 and L0749: | | |
| | | | | | Gly-31 to Gly-36, | 1. | | |
| | | | | | Glu-91 to Ser-99. | | | |
| HLWAW86 | 785395 | 2446 | 1-273 | 5133 | Lys-11 to Arg-23, | H0553: 1 and L0759: | | |
| | | | | | Cys-25 to Cys-31, | 1. | | |
| | | | | | Pro-33 to Tyr-38, | | | |
| | | | | | Arg-46 to Ile-60. | | | |
| | 941397 | 2692 | 115-462 | 5379 | Leu-17 to Gln-23, | | | |
| | | | | | Gln-38 to Phe-44, | | | |
| | | | | | Gln-65 to Gln-72, | | | |
| | | | | | Thr-80 to Tyr-86. | | | |
| HLWAS09 | 625419 | 2447 | 74-235 | 5134 | His-27 to Ile-34. | H0553: 1 | | |
| HLWAR08 | 959139 | 2448 | 3-290 | 5135 | Tyr-46 to His-52. | AR089: 4, AR061: 2 | | |
| | | | | | | L0539: 1 and H0553: | | |
| | | | | | | 1. | | |
| HLWAO67 | 751503 | 2449 | 35-214 | 5136 | | H0553: 1 and L0745: | | |
| | | | | | | 1. | | |
| HLWAL31 | 948928 | 2450 | 124-2 | 5137 | | AR054: 55, AR050: | | |
| | | | | | | 51, AR051: 48, AR089: | | |
| | | | | | | 4, AR061: 2 | | |
| | | | | | | H0553: 1 | | |
| | 971312 | 2693 | 23-511 | 5380 | Arg-9 to Pro-15, | | | |
| | | | | | Leu-114 to Val-120, | | | |
| | | | | | Cys-147 to Cys-156. | | | |
| HLWAJ18 | 666281 | 2451 | 41-214 | 5138 | | H0553: 1 and L0439: | 20q12-q13 | 600281, |
| | | | | | | 1. | | 600281 |
| HLWAF02 | 919714 | 2452 | 156-449 | 5139 | Arg-1 to Ser-6, | H0553: 1 and L0758: | | |
| | | | | | Phe-13 to Gln-24, | 1. | | |
| | | | | | Glu-31 to Arg-40, | | | |
| | | | | | Ser-48 to Asn-56, | | | |
| | | | | | Asp-69 to Val-75. | | | |
| HLWAE09 | 789030 | 2453 | 444-133 | 5140 | Pro-21 to Gln-27, | H0553: 1 and L0439: | | |
| | | | | | Glu-53 to Ser-60. | 1. | | |
| HLWAD57 | 734655 | 2454 | 2-166 | 5141 | His-1 to Ala-7, | H0553: 1 | | |
| | | | | | Thr-34 to Leu-39. | | | |
| HLWAD33 | 702317 | 2455 | 190-468 | 5142 | Arg-1 to Arg-10, | H0553: 1, L0754: 1 | | |
| | | | | | Ile-66 to Glu-78. | and L0755: 1. | | |
| HLWAD32 | 699158 | 2456 | 49-219 | 5143 | Asn-42 to Lys-48. | H0553: 1 | | |
| HLWAD02 | 919725 | 2457 | 13-252 | 5144 | Arg-2 to Phe-7, | H0553: 1 and L0663: | | |
| | | | | | Thr-68 to Asn-73. | 1. | | |
| HKZAH11 | 965175 | 2458 | 1-324 | 5145 | Gly-11 to Ile-17, | L0794: 2, L0766: 1, | | |
| | | | | | Asn-24 to Ser-31, | L0665: 1 and H0689: 1. | | |
| | | | | | Gln-47 to Ala-64, | | | |
| | | | | | Pro-66 to Ala-72, | | | |
| | | | | | Gly-77 to Gly-84. | | | |
| HJMBX19 | 668568 | 2459 | 2-286 | 5146 | Leu-2 to Arg-11, | L0777: 2, H0545: 1 | | |
| | | | | | Ser-25 to Gly-33, | and L0754: 1. | | |
| | | | | | Lys-54 to His-64. | | | |
| HJMBS77 | 772101 | 2460 | 158-328 | 5147 | Ser-48 to Lys-57. | H0545: 1 and L0756: | | |
| | | | | | | 1. | | |
| HJMBS10 | 964464 | 2461 | 96-380 | 5148 | Tyr-47 to Ser-58. | H0545: 1 and L0599: | | |
| | | | | | | 1. | | |
| HJMBQ90 | 788834 | 2462 | 156-557 | 5149 | Thr-17 to Gly-22, | H0545: 1 and L0747: | | |
| | | | | | Gln-69 to Glu-74. | 1. | | |
| HJMBN02 | 919737 | 2463 | 218-436 | 5150 | Arg-5 to Thr-16. | H0545: 1 and L0763: | | |
| | | | | | | 1. | | |
| HJMBI93 | 929114 | 2464 | 47-199 | 5151 | | H0545: 1 and L0646: | | |
| | | | | | | 1. | | |
| HJMAV93 | 828110 | 2465 | 373-122 | 5152 | Asn-74 to Pro-80. | H0545: 1, L0748: 1 | | |
| | | | | | | and L0740: 1. | | |
| HJMAU07 | 961623 | 2466 | 187-501 | 5153 | | H0545: 1 and L0794: | 16p13.3 | 141750, |
| | | | | | | 1. | | 141800, |
| | | | | | | | | 141800, |
| | | | | | | | | 141800, |
| | | | | | | | | 141800, |
| | | | | | | | | 141850, |
| | | | | | | | | 141850, |
| | | | | | | | | 141850, |
| | | | | | | | | 141850, |
| | | | | | | | | 141850, |
| | | | | | | | | 156850, |
| | | | | | | | | 186580, |
| | | | | | | | | 191092, |
| | | | | | | | | 600140, |
| | | | | | | | | 600273, |
| | | | | | | | | 601313, |
| | | | | | | | | 601785 |
| HJMAQ86 | 785410 | 2467 | 1-234 | 5154 | Pro-3 to Ser-16, | L0588: 2, H0545: 1 | | |
| | | | | | Pro-27 to Gly-32, | and L0603: 1. | | |
| | | | | | Pro-49 to Ala-58, | | | |
| | | | | | Thr-70 to Lys-78. | | | |
| HJMAQ14 | 657579 | 2468 | 130-477 | 5155 | | L0163: 2, H0545: 1 | | |
| | | | | | | and L0754: 1. | | |
| HJMAJ91 | 811222 | 2469 | 78-452 | 5156 | Arg-1 to Ser-15, | H0545: 1 and L0740: | | |
| | | | | | Ser-18 to Ser-33, | 1. | | |
| | | | | | Glu-42 to Arg-51. | | | |
| HJMAI62 | 742612 | 2470 | 195-356 | 5157 | Gly-15 to Glu-21. | H0545: 1 | | |
| HETLF29 | 909762 | 2471 | 3-416 | 5158 | | AR061: 4, AR089: 2 | | |
| | | | | | | H0046: 1 and L0758: | | |
| | | | | | | 1. | | |
| HETJY68 | 752542 | 2472 | 109-306 | 5159 | | H0046: 1, L0439: 1, | | |
| | | | | | | L0740: 1 and L0591: 1. | | |
| HETID12 | 655199 | 2473 | 13-321 | 5160 | Pro-39 to Arg-44, | H0046: 1 and L0731: | | |
| | | | | | Ala-89 to Glu-103. | 1. | | |
| HETHO01 | 921649 | 2474 | 218-415 | | L0748: 2, H0046: 1 | | | |
| | | | | | | and L0766: 1. | | |
| HETHB18 | 529467 | 2475 | 2-247 | 5162 | | H0046: 1 | | |
| HETFF68 | 529587 | 2476 | 2-166 | 5163 | Asn-1 to Leu-13. | H0046: 1 | | |
| HETFF43 | 529589 | 2477 | 70-204 | 5164 | | H0046: 1 | | |
| HETDU61 | 742157 | 2478 | 250-420 | 5165 | Ala-39 to Cys-46. | H0046: 1, L0748: 1 | | |
| | | | | | | and L0581: 1. | | |
| HETDA25 | 677490 | 2479 | 181-336 | 5166 | | H0046: 1 and L0439: | | |
| | | | | | | 1. | | |
| HETCO27 | 533536 | 2480 | 3-113 | 5167 | Val-19 to Leu-35. | H0046: 1 | | |
| HETCH01 | 961038 | 2481 | 2-352 | 5168 | Cys-11 to Pro-19, | L0738: 1, H0046: 1, | | |
| | | | | | Asn-28 to Leu-35. | L0527: 1 and L0599: 1. | | |
| HETBM55 | 929285 | 2482 | 113-343 | 5169 | Val-20 to Gly-26, | L0747: 2 and H0046: | 1q12-1q21.2 | 104770, |
| | | | | | Asn-62 to Arg-68. | 1. | | 107670, |
| | | | | | | | | 110700, |
| | | | | | | | | 145001, |
| | | | | | | | | 146760, |
| | | | | | | | | 146790, |
| | | | | | | | | 159001, |
| | | | | | | | | 191315, |
| | | | | | | | | 600897, |
| | | | | | | | | 601412, |
| | | | | | | | | 601652, |
| | | | | | | | | 601863, |
| | | | | | | | | 602491 |
| HETBE61 | 965638 | 2483 | 124-447 | 5170 | Glu-31 to Gly-37, | H0046: 1 and L0731: | 6q25 | 180020, |
| | | | | | Leu-42 to Gln-49. | 1. | | 600320, |
| | | | | | | | | 600883 |
| HETAS91 | 790499 | 2484 | 237-548 | 5171 | Ser-73 to Lys-91. | L0740: 3 and H0046: | | |
| | | | | | | 1. | | |
| HETAS81 | 778539 | 2485 | 12-188 | 5172 | Pro-17 to Ser-23. | H0046: 1 and L0777: | | |
| | | | | | | 1. | | |
| HETAS62 | 754155 | 2486 | 14-187 | 5173 | Ser-22 to Lys-31, | H0046: 1 and L0748: | | |
| | | | | | Thr-39 to Glu-47. | 1. | | |
| HETAJ14 | 660831 | 2487 | 575-757 | 5174 | Ala-24 to Ser-31, | L0747: 2 and H0046: 1 | | |
| | | | | | Val-52 to Asp-61. | and L0748: 1. | | |
| HEQCC01 | 924849 | 2488 | 375-659 | 5175 | Ser-54 to Ala-59, | H0544: 1, L0775: 1, | | |
| | | | | | Ser-64 to Phe-69, | L0776: 1 and L0758: 1, | | |
| | | | | | Arg-79 to Thr-87. | | | |
| HEQBT78 | 773528 | 2489 | 252-10 | 5176 | | H0544: 1 and L0731: | | |
| | | | | | | 1. | | |
| HEQBP18 | 855578 | 2490 | 463-245 | 5177 | Thr-7 to Gly-14. | H0544: 1 | | |
| HEBQI09 | 739877 | 2491 | 29-142 | 5178 | | H0544: 1 | | |
| HEQBG85 | 827915 | 2492 | 1-276 | 5179 | | H0544: 1 | 2qter-p25.1 | |
| HEQBG60 | 427813 | 2493 | 2-295 | 5180 | Ser-1 to Pro-23, | H0544: 1 | 17p13.3 | 113721, |
| | | | | | Pro-35 to Asn-45, | | | 247200, |
| | | | | | Cys-53 to Arg-70. | | | 600059, |
| | | | | | | | | 601545 |
| HEQBE78 | 772860 | 2494 | 101-265 | 5181 | Asp-13 to Lys-20, | H0544: 1 | | |
| | | | | | Thr-43 to Ala-49. | | | |
| HEQBE71 | 760305 | 2495 | 101-451 | 5182 | Glu-18 to Pro-27, | H0544: 1 | | |
| | | | | | Asp-58 to Asn-65. | | | |
| HEQAZ01 | 916321 | 2496 | 97-402 | 5183 | Phe-2 to Gly-7. | H0544: 1 and L0599: | | |
| | | | | | | 1. | | |
| HEQAM59 | 739220 | 2497 | 50-160 | 5184 | | H0544: 1 and L0752: | | |
| | | | | | | 1. | | |
| HEQAK94 | 793250 | 2498 | 2-298 | 5185 | | H0544: 1, L0439: 1 | | |
| | | | | | | and L0754: 1. | | |
| HEQAF54 | 729594 | 2499 | 3-200 | 5186 | | L0439: 2 and H0544: | | |
| | | | | | | 1. | | |
| HEQAD73 | 914044 | 2500 | 82-555 | 5187 | Trp-1 to Ser-10. | L0731: 5 and H0544: | | |
| | | | | | | 1. | | |
| HEQAA93 | 792255 | 2501 | 340-519 | 5188 | Lys-6 to Arg-11, | L0747: 3 and H0544: | | |
| | | | | | Thr-22 to Gly-34. | 1. | | |
| HEPCB04 | 941270 | 2502 | 72-305 | 5189 | Ser-1 to Gln-9, | L0777: 4, H0150: 1 | | |
| | | | | | Ser-16 to Cys-22, | and L0757: 1. | | |
| | | | | | Ser-33 to Ser-38, | | | |
| | | | | | Ser-58 to Trp-66. | | | |
| HEPBO92 | 952996 | 2503 | 146-349 | 5190 | Arg-10 to Ser-18, | H0150: 1 and L0747: | | |
| | | | | | Leu-37 to Arg-48. | 1. | | |
| HEPBO85 | 783362 | 2504 | 1-240 | 5191 | | L0754: 2 and H0150: | | |
| | | | | | | 1. | | |
| HEPAY26 | 825778 | 2505 | 29-193 | 5192 | | H0150: 1 and L0743: | | |
| | | | | | | 1. | | |
| HEPAX40 | 535627 | 2506 | 2-172 | 5193 | | L0744: 2, L0731: 2 and | | |
| | | | | | | H0150: 1. | | |
| HEPAX16 | 667665 | 2507 | 2-330 | 5194 | | L0766: 3, L0776: 2, | 11p15.5 | 125852, |
| | | | | | | H0150: 1, L0371: 1, | | 126452, |
| | | | | | | L0761: 1, L0764: 1, | | 126452, |
| | | | | | | L0662: 1, L0655: 1, | | 141900, |
| | | | | | | L0748: 1, L0754: 1, | | 141900, |
| | | | | | | L0749: 1 and L0779: 1. | | 141900, |
| | | | | | | | | 141900, |
| | | | | | | | | 141900, |
| | | | | | | | | 141900, |
| | | | | | | | | 142000, |
| | | | | | | | | 142000, |
| | | | | | | | | 142200, |
| | | | | | | | | 142250, |
| | | | | | | | | 142270, |
| | | | | | | | | 176730, |
| | | | | | | | | 176730, |
| | | | | | | | | 176730, |
| | | | | | | | | 190020, |
| | | | | | | | | 191290, |
| | | | | | | | | 192500, |
| | | | | | | | | 192500, |
| | | | | | | | | 194071, |
| | | | | | | | | 194071, |
| | | | | | | | | 204500, |
| | | | | | | | | 600856, |
| | | | | | | | | 601680, |
| | | | | | | | | 602631, |
| | | | | | | | | 602631 |
| HEPAQ35 | 707533 | 2508 | 245-511 | 5195 | | L0748: 2, L0756: 2, | | |
| | | | | | | L0777: 2, H0150: 1, | | |
| | | | | | | L0789: 1, L0666: 1 and | | |
| | | | | | | L0758: 1. | | |
| HEPAP34 | 703336 | 2509 | 369-623 | 5196 | Pro-17 to Val-26, | H0150: 1 and L0777: | | |
| | | | | | His-34 to Lys-41, | 1. | | |
| | | | | | Pro-54 to Phe-66 | | | |
| HEPAN05 | 932893 | 2510 | 223-489 | 5197 | Lys-15 to Leu-29, | H0150: 1 and L0780: | | |
| | | | | | Lys-45 to Glu-55, | 1. | | |
| | | | | | Lys-82 to Lys-89. | | | |
| HEPAK04 | 933039 | 2511 | 4-177 | 5198 | Leu-42 to Gly-54. | H0150: 1 and L0763: | | |
| | | | | | | 1. | | |
| HEPAJ14 | 657440 | 2512 | 55-243 | 5199 | His-1 to Ser-10, | H0150: 1 and L0743: | | |
| | | | | | Pro-22 to Gly-38, | 1. | | |
| | | | | | Asn-55 to Ser-60. | | | |
| HEPAJ04 | 933091 | 2513 | 71-367 | 5200 | Thr-1 to Arg-16, | H0150: 1, L0779: 1 | | |
| | | | | | Ala-45 to Gln-50, | and L0758: 1. | | |
| | | | | | Pro-63 to Ala-68, | | | |
| | | | | | Ala-80 to Asp-93. | | | |
| HEPAE58 | 509130 | 2514 | 174-353 | 5201 | Gly-38 to Asp-56. | H0150: 1 and L0743: | | |
| | | | | | | 1. | | |
| HEPAE02 | 921389 | 2515 | 3-107 | 5202 | Leu-15 to Lys-24. | H0150: 1 and L0522: | | |
| | | | | | | 1. | | |
| HEGBC03 | 922550 | 2516 | 2-304 | 5203 | | H0550: 1 and L0646: | | |
| | | | | | | 1. | | |
| HEGBB67 | 751233 | 2517 | 95-352 | 5204 | Val-6 to Glu-11, | H0550: 1 and L0745: | | |
| | | | | | Phe-22 to Cys-29. | 1. | | |
| HEGBA01 | 915596 | 2518 | 217-372 | 5205 | | H0550: 1 and L0605: | | |
| | | | | | | 1. | | |
| HEGAX04 | 927260 | 2519 | 2-230 | 5206 | Lys-18 to Glu-23, | H0550: 1 and L0766: | | |
| | | | | | Gln-60 to Ala-67. | 1. | | |
| HEGAQ91 | 789940 | 2520 | 2-273 | 5207 | | H0550: 1, L0748: 1 | Xq22.3 | 300067, |
| | | | | | | and L0749: 1. | | 300067, |
| | | | | | | | | 300121, |
| | | | | | | | | 300121, |
| | | | | | | | | 301201, |
| | | | | | | | | 301835, |
| | | | | | | | | 311850 |
| HEGAL55 | 731654 | 2521 | 153-359 | 5208 | Lys-5 to Gly-11. | H0550: 1, L0745: 1 | | |
| | | | | | | and L0731: 1. | | |
| HEGAJ08 | 959216 | 2522 | 344-511 | 5209 | Pro-7 to Val-13. | L0731: 2, L0597: 2, | | |
| | | | | | | H0550: 1, L0783: 1 and | | |
| | | | | | | L0439: 1. | | |
| HEGAC02 | 918992 | 2523 | 2-196 | 5210 | Ser-7 to Cys-21, | H0550: 1 and L0758: | | |
| | | | | | Ile-59 to Gly-64. | 1. | | |
| HEEAY84 | 782706 | 2524 | 222-383 | 5211 | Asn-1 to Lys-14. | H0549: 1 and L0748: | | |
| | | | | | | 1. | | |
| HEEAX09 | 912065 | 2525 | 2-328 | 5212 | Arg-65 to Arg-72. | AR051: 4, AR050: 2, | | |
| | | | | | | AR054: 2 | | |
| | | | | | | H0549: 1 | | |
| HEEAW40 | 710655 | 2526 | 222-398 | 5213 | Asn-45 to Thr-50, | H0549: 1, L0589: 1 | 6q25.2-q27 | 152200, |
| | | | | | Pro-52 to Arg-57. | and L0366: 1. | | 167000, |
| | | | | | | | | 180020, |
| | | | | | | | | 600320, |
| | | | | | | | | 600883, |
| | | | | | | | | 602544 |
| HEEAP59 | 738892 | 2527 | 249-413 | 5214 | Leu-32 to Leu-38. | H0549: 1 and L0594: | | |
| | | | | | | 1. | | |
| HEEAM25 | 677599 | 2528 | 101-784 | 5215 | | L0794: 6, L0806: 2 | | |
| | | | | | | L0752: 2, H0549: 1, | | |
| | | | | | | L0796: 1, L0766: 1, | | |
| | | | | | | L0380: 1, L0803: 1, | | |
| | | | | | | L0804: 1, L0807: 1, | | |
| | | | | | | L0789: 1, L0663: 1, | | |
| | | | | | | L0755: 1, L0596: 1 and | | |
| | | | | | | L0485: 1. | | |
| HEEAH94 | 794257 | 2529 | 114-344 | 5216 | | H0549: 1 and L0599: | | |
| | | | | | | 1. | | |
| HEEAH76 | 769950 | 2530 | 16-213 | 5217 | Val-21 to Gly-26, | H0549: 1 and L0748: | | |
| | | | | | Leu-29 to Gly-38. | 1. | | |
| HEEAH57 | 734488 | 2531 | 219-404 | 5218 | Pro-3 to Phe-9, | H0549: 1 and L0601: | | |
| | | | | | Ser-17 to Ala-24, | 1. | | |
| | | | | | Val-52 to Lys-62. | | | |
| HEEAH16 | 661827 | 2532 | 15-344 | 5219 | Ser-45 to Ser-50, | H0549: 1 and L0747: | | |
| | | | | | Tyr-103 to Phe-110. | 1. | | |
| HEEAG51 | 930810 | 2533 | 1-423 | 5220 | Glu-61 to Val-77, | H0549: 1 and L0605: | | |
| | | | | | Phe-81 to Ser-88. | 1. | | |
| HEEAG12 | 724929 | 2534 | 266-36 | 5221 | Thr-29 to Pro-49, | AR050: 66, AR054: | | |
| | | | | | Asp-65 to Glu-77. | 64, AR051: 63, AR089: | | |
| | | | | | | 13, AR061: 3 | | |
| | | | | | | H0549: 1 | | |
| | 887048 | 2694 | 429-295 | 5381 | | | | |
| HEEAD13 | 470886 | 2535 | 1-195 | 5222 | | H0549: 1 and L0756: | | |
| | | | | | | 1. | | |
| HEEAB40 | 710668 | 2536 | 128-310 | 5223 | Val-15 to Ala-23, | H0549: 1 and L0748: | | |
| | | | | | Pro-30 to Ser-35. | 1. | | |
| HEAAX26 | 684734 | 2537 | 63-182 | 5224 | Val-22 to Gly-29. | H0369: 1 and L0740: | | |
| | | | | | | 1. | | |
| HEAAU20 | 911255 | 2538 | 65-364 | 5225 | Lys-80 to Lys-86. | H0369: 1 and L0745: | 6q21 | 120110, |
| | | | | | | 1. | 1 | 121014, |
| | | | | | | | | 601666, |
| | | | | | | | | 602772 |
| HEAAR47 | 973284 | 2539 | 20-220 | 5226 | | H0369: 1 | | |
| HEAAR21 | 883939 | 2540 | 353-535 | 5227 | Gly-1 to Ser-6. | H0369: 1 and L0769: | | |
| | | | | | | 1. | | |
| HEAAN43 | 842032 | 2541 | 235-336 | 5228 | | H0369: 1 and L0748: | | |
| | | | | | | 1. | | |
| HEAAM71 | 950736 | 2542 | 321-563 | 5229 | Thr-3 to Ala-10, | L0539: 1, H0369: 1 | | |
| | | | | | Glu-30 to Arg-38. | and L0748: 1. | | |
| HEAAL76 | 770200 | 2543 | 2-136 | 5230 | Leu-23 to His-28. | H0369: 1 and L0589: | | |
| | | | | | | 1. | | |
| HEAAG84 | 896892 | 2544 | 605-396 | 5231 | | H0369: 1 | | |
| | 904209 | 2695 | 1539-1913 | 5382 | Arg-43 to Ser-49, | | | |
| | | | | | Glu-55 to Ser-61, | | | |
| | | | | | Pro-70 to Arg-75, | | | |
| | | | | | Cys-91 to Gly-103. | | | |
| | 906483 | 2696 | 316-504 | 5383 | Arg-45 to Gly-52. | | | |
| HEAAG42 | 714041 | 2545 | 598-792 | 5232 | Glu-24 to Tyr-31. | L0731: 9, L0754: 3 and | | |
| | | | | | | H0369: 1. | | |
| HEAAB66 | 844361 | 2546 | 438-740 | 5233 | | H0369: 1 | | |
| HCORB05 | 928679 | 2547 | 2-142 | 5234 | Pro-1 to Arg-14. | L0626: 1, L0775: 1, | | |
| | | | | | | L0776: 1 and H0670: 1. | | |
| HCOPM06 | 933473 | 2548 | 158-628 | 5235 | Pro-15 to Glu-21, | L0769: 1, L0665: 1 and | | |
| | | | | | Ala-43 to Glu-58, | H0670: 1. | | |
| | | | | | Leu-96 to Glu-101, | | | |
| | | | | | Ala-111 to Ala-119. | | | |
| HCOPI07 | 951645 | 2549 | 185-313 | 5236 | Thr-29 to Arg-43. | H0670: 1 and L0758: | | |
| | | | | | | 1. | | |
| HCOPF07 | 951655 | 2550 | 79-240 | 5237 | | L0799: 3, L0758: 3 and | | |
| | | | | | | H0670: 1. | | |
| HCOOF07 | 951693 | 2551 | 221-493 | 5238 | Pro-13 to Ser-19, | H0670: 1, L0731: 1 | | |
| | | | | | Asp-27 to Thr-35. | and L0759: 1. | | |
| HCONP02 | 917577 | 2552 | 148-306 | 5239 | Asn-7 to Val-13. | L0517: 1, L0438: 1, | | |
| | | | | | | H0670: 1 and L0439: 1. | | |
| HCONM33 | 971637 | 2553 | 474-217 | 5240 | Asp-5 to Ala-11, | L0517: 2, L0756: 2, | | |
| | | | | | Trp-24 to Phe-31, | L0803: 1, L0776: 1, | | |
| | | | | | Arg-44 to Trp-50. | L0809: 1, L0663: 1, | | |
| | | | | | | H0670: 1, L0755: 1 and | | |
| | | | | | | L0759: 1. | | |
| HCOMM05 | 925952 | 2554 | 1-840 | 5241 | Gln-19 to Asp-38, | AR089: 1, AR061: 1 | | |
| | | | | | Pro-46 to Thr-55, | H0670: 1 | | |
| | | | | | Leu-96 to Gly-104, | | | |
| | | | | | Ala-114 to Ala-119, | | | |
| | | | | | Gln-125 to Trp-131, | | | |
| | | | | | Pro-133 to Pro-141, | | | |
| | | | | | Phe-144 to Glu-150, | | | |
| | | | | | Glu-180 to Val-185, | | | |
| | | | | | Glu-192 to Glu-197, | | | |
| | | | | | Glu-254 to Leu-262, | | | |
| | | | | | Met-272 to Ser-280. | | | |
| HCHQA48 | 908495 | 2555 | 13-357 | 5242 | Cys-6 to Lys-21, | H0484: 1 and L0743: | | |
| | | | | | Ser-53 to Ile-65, | 1. | | |
| | | | | | Asn-68 to Gln-80, | | | |
| | | | | | Arg-106 to Ala-114. | | | |
| HCHOX63 | 957690 | 2556 | 1-741 | 5243 | Arg-1 to Lys-12, | H0484: 1, L0617: 1, | | |
| | | | | | Gly-57 to Gly-62, | L0772: 1, L0751: 1 and | | |
| | | | | | Pro-74 to Asp-80. | L0752: 1. | | |
| HCHNW48 | 862478 | 2557 | 122-325 | 5244 | Lys-1 to Ser-13. | AR061: 1, AR089: 1 | | |
| | | | | | | H0484: 1 and L0589: | | |
| | | | | | | 1. | | |
| HCHMX82 | 850340 | 2558 | 2-349 | 5245 | | H0484: 1 and L0749: | | |
| | | | | | | 1. | | |
| HCHMW18 | 966985 | 2559 | 97-408 | 5246 | Leu-8 to Val-20, | L0757: 2 and H0484: | | |
| | | | | | Arg-25 to Arg-35, | 1. | | |
| | | | | | Ala-38 to Trp-46, | | | |
| | | | | | Phe-69 to Tyr-75, | | | |
| | | | | | Ser-96 to Trp-104. | | | |
| HCHMJ89 | 786765 | 2560 | 2-218 | 5247 | Ala-1 to Gly-8, | H0484: 1 and L0439: | | |
| | | | | | Arg-16 to Ser-21, | 1. | | |
| | | | | | Ser-35 to Pro-45, | | | |
| | | | | | Ala-61 to Gly-67. | | | |
| HCHMI96 | 800129 | 2561 | 3-248 | 5248 | | AR051: 32, AR054: | | |
| | | | | | | 29, AR050: 28 | | |
| | | | | | | H0484: 1 | | |
| HCHMI15 | 935298 | 2562 | 52-591 | 5249 | Lys-67 to Ser-79, | H0484: 1 and L0792: | | |
| | | | | | Ser-89 to Thr-109, | 1. | | |
| | | | | | Asn-116 to Ser-129, | | | |
| | | | | | Glu-140 to Lys-147, | | | |
| | | | | | Ser-161 to Lys-172. | | | |
| HCHCI07 | 952957 | 2563 | 248-499 | 5250 | Gly-1 to Trp-6, | L0749: 3 and H0483: | | |
| | | | | | Gly-74 to Trp-80. | 1. | | |
| HCHCH68 | 869084 | 2564 | 251-502 | 5251 | | H0483: 1 and L0764: | | |
| | | | | | | 1. | | |
| HCHCG28 | 686431 | 2565 | 214-462 | 5252 | Phe-32 to Ala-37. | L0748: 3, L0596: 2, | | |
| | | | | | | H0483: 1, L0439: 1 and | | |
| | | | | | | L0749: 1. | | |
| HCHCE78 | 773428 | 2566 | 11-193 | 5253 | | H0483: 1 | | |
| HCHBQ27 | 682308 | 2567 | 11-241 | 5254 | Gly-4 to Lys-10, | H0483: 1 | | |
| | | | | | Gln-36 to Glu-41, | | | |
| | | | | | Arg-61 to Arg-76. | | | |
| HCHBN09 | 625420 | 2568 | 1-177 | 5255 | Gly-1 to Ser-13. | H0483: 1 | 19q13.2 | 107741, |
| | | | | | | | | 113900, |
| | | | | | | | | 122720, |
| | | | | | | | | 122720, |
| | | | | | | | | 126340, |
| | | | | | | | | 126391, |
| | | | | | | | | 160900, |
| | | | | | | | | 164731, |
| | | | | | | | | 173850, |
| | | | | | | | | 207750, |
| | | | | | | | | 248600, |
| | | | | | | | | 258501 |
| HCHBM26 | 681404 | 2569 | 13-153 | 5256 | Gly-4 to Lys-10, | H0483: 1 | | |
| | | | | | Gln-36 to Glu-41. | | | |
| HCHAI62 | 743411 | 2570 | 2-148 | 5257 | Lys-1 to Lys-21. | H0483: 1 | | |
| HCHAH04 | 487985 | 2571 | 1-75 | 5258 | | H0483: 1 | | |
| HCHAG52 | 726081 | 2572 | 3-212 | 5259 | Ser-26 to Thr-44. | H0483: 1 | | |
| HCDMF96 | 796196 | 2573 | 86-286 | 5260 | Gly-12 to Cys-27. | L0752: 1 and S0398: 1. | | |
| HCDME32 | 863374 | 2574 | 147-473 | 5261 | Glu-8 to Met-22, | L0777: 1, L0758: 1, | | |
| | | | | | Pro-104 to Pro-109. | L0697: 1 and S0398: 1. | | |
| HCDMC86 | 785134 | 2575 | 160-330 | 5262 | Glu-12 to Leu-20. | S0398: 1 | | |
| HCDMC25 | 677627 | 2576 | 47-283 | 5263 | Gln-9 to Val-17, | L0439: 1 and S0398: 1. | | |
| | | | | | Phe-38 to Glu-45. | | | |
| HCDMC23 | 675490 | 2577 | 116-271 | 5264 | | S0398: 1 | | |
| HCDMC22 | 672815 | 2578 | 2-241 | 5265 | | S0398: 1 | | |
| HCDMC06 | 934663 | 2579 | 28-183 | 5266 | | S0398: 1 | | |
| HCDMB91 | 789551 | 2580 | 185-289 | 5267 | | S0398: 1 | | |
| HCDMB42 | 713300 | 2581 | 128-244 | 5268 | Gly-12 to His-19. | S0398: 1 | | |
| HCDMB41 | 711996 | 2582 | 2-202 | 5269 | Gly-13 to Asn-22. | L0587: 1 and S0398: 1. | | |
| HCDMB27 | 682389 | 2583 | 23-148 | 5270 | | S0398: 1 | | |
| HCDMB12 | 968918 | 2584 | 418-627 | 5271 | Pro-7 to Gly-24. | AR050: 93, AR054: | | |
| | | | | | | 62, AR051: 57 | | |
| | | | | | | S0398: 1 | | |
| HCDMB08 | 958542 | 2585 | 115-267 | 5272 | Gly-38 to Gly-51. | L0753: 1 and S0398: 1. | | |
| HCDMB03 | 923316 | 2586 | 88-252 | 5273 | Cys-20 to His-27, | S0398: 1 | | |
| | | | | | Glu-35 to Lys-54. | | | |
| HCDMA20 | 669201 | 2587 | 3-92 | 5274 | | L0438: 1, L0439: 1 and | | |
| | | | | | | S0398: 1. | | |
| HCBND03 | 922388 | 2588 | 3-401 | 5275 | Pro-12 to Thr-21, | H0661: 1, L0805: 1 | | |
| | | | | | Gly-35 to Thr-41, | and L0776: 1 | | |
| | | | | | Thr-53 to Gln-75, | | | |
| | | | | | Ser-92 to Gly-98. | | | |
| HCBMZ07 | 951788 | 2589 | 230-358 | 5276 | | H0661: 1 and L0740: | | |
| | | | | | | 1. | | |
| HCBMY10 | 961718 | 2590 | 371-138 | 5277 | Glu-22 to Glu-49. | H0661: 1 and L0603: | | |
| | | | | | | 1. | | |
| HCBMG11 | 965394 | 2591 | 207-653 | 5278 | Ala-1 to Asn-9, | H0661: 1, L0664: 1, | | |
| | | | | | Thr-24 to Asn-29, | L0754: 1 and L0749: 1. | | |
| | | | | | Gly-43 to Arg-53, | | | |
| | | | | | Arg-106 to Arg-111. | | | |
| HBZSK04 | 926407 | 2592 | 2-79 | 5279 | Gln-7 to Lys-14. | S0190: 1 | | |
| HBZSG02 | 920249 | 2593 | 40-291 | 5280 | | L0771: 2 and S0190: 1. | | |
| HBZSD32 | 699335 | 59-427 | 5281 | Val-8 to Leu-14, | S0190: 1 | | | |
| | | | | | Pro-22 to Arg-31, | | | |
| | | | | | Thr-62 to Lys-68, | | | |
| | | | | | Arg-76 to Cys-82, | | | |
| | | | | | Trp-85 to His-91. | | | |
| HBZAJ73 | 764479 | 2595 | 2-244 | 5282 | | L0741: 3 and S0188: 1. | | |
| HBZAJ26 | 681879 | 2596 | 198-443 | 5283 | Gly-38 to Ser-44. | S0188: 1 and L0747: 1. | | |
| HBZAI39 | 847621 | 2597 | 545-808 | 5284 | | S0188: 1 and L0605: 1. | | |
| HBZAI14 | 847620 | 2598 | 2-203 | 5285 | | S0188: 1 | | |
| HBZAB15 | 660348 | 2599 | 240-362 | 5286 | Lys-26 to His-31. | S0188: 1 and L0587: 1. | | |
| HBZAB08 | 959560 | 2600 | 160-414 | 5287 | Pro-1 to Gln-15, | L0774: 3, L0775: 1, | | |
| | | | | | Gln-38 to Asn-45, | L0809: 1, S0188: 1 and | | |
| | | | | | Pro-57 to Thr-65. | L0758: 1. | | |
| HBNBQ50 | 887096 | 2601 | 222-473 | 5288 | Arg-54 to Arg-60. | H0188: 1 and L0751: | | |
| | | | | | | 1. | | |
| HBNBO30 | 430360 | 2602 | 3-155 | 5289 | Glu-17 to Tyr-22. | L0774: 2, L0741: 2 | | |
| | | | | | | L0439: 2, L0411: 1 and | | |
| | | | | | | H0188: 1. | | |
| HBNBL29 | 703113 | 2603 | 245-409 | 5290 | | H0188: 1, L0663: 1 | | |
| | | | | | | and L0748: 1. | | |
| HBNBJ29 | 907015 | 2604 | 63-215 | 5291 | Trp-18 to Gly-23, | H0188: 1 and L0526: | | |
| | | | | | Ser-25 to Met-31. | 1. | | |
| HBNBJ06 | 960664 | 2605 | 2-298 | 5292 | | H0188: 1, L0769: 1 | | |
| | | | | | | and L0753: 1. | | |
| HBNBB41 | 712676 | 2606 | 50-256 | 5293 | | H0188: 1 and L0748: | | |
| | | | | | | 1. | | |
| HBNBB27 | 600905 | 2607 | 143-3 | 5294 | | H0188: 1 | | |
| | 847732 | 2697 | 1-186 | 5384 | | | | |
| HBNBB09 | 868924 | 2608 | 372-79 | 5295 | | L0439: 3 and H0188: | | |
| | | | | | | 1. | | |
| HBNAW73 | 764716 | 2609 | 87-236 | 5296 | | H0188: 1 and L0748: | | |
| | | | | | | 1. | | |
| HBNAC74 | 586797 | 2610 | 3-152 | 5297 | Asp-30 to Trp-36, | H0188: 1 | | |
| | | | | | Ser-39 to Trp-44. | | | |
| HBNAC71 | 525831 | 2611 | 2-318 | 5298 | Arg-10 to Glu-32. | H0188: 1 | | |
| HBNAC48 | 721983 | 2612 | 150-308 | 5299 | | H0188: 1 | | |
| HBNAC42 | 714263 | 2613 | 2-120 | 5300 | | H0188: 1 and L0591: | | |
| | | | | | | 1. | | |
| HBNAC32 | 526549 | 2614 | 1-111 | 5301 | | H0188: 1 | | |
| HBNAC28 | 525832 | 2615 | 34-183 | 5302 | | H0188: 1 | | |
| HBNAC25 | 525834 | 2616 | 3-146 | 5303 | Leu-2 to Gln-11, | H0188: 1 | | |
| | | | | | Lys-35 to Lys-48. | | | |
| HBNAC09 | 525833 | 2617 | 8-76 | 5304 | | H0188: 1 | | |
| HBNAC02 | 921187 | 2618 | 2-199 | 5305 | Pro-24 to Ala-37. | H0188: 1 | | |
| HBGTT76 | 903653 | 2619 | 14-556 | 5306 | His-8 to Gly-18, | AR050: 173, AR051: | | |
| | | | | | Pro-89 to Gly-96, | 169, AR054: 143, | | |
| | | | | | Lys-126 to Trp-131, | AR089: 46, AR061: 9 | | |
| | | | | | Glu-133 to Gly-141. | H0617: 1 | | |
| HBGTE11 | 965121 | 2620 | 71-325 | 5307 | Gly-14 to Val-21. | H0617: 1, L0766: 1 | | |
| | | | | | | and L0788: 1. | | |
| HBGQS88 | 886650 | 2621 | 2-448 | 5308 | Pro-16 to Gly-38, | AR054: 7, AR051: 2 | | |
| | | | | | Arg-50 to Arg-58, | AR050: 1 | | |
| | | | | | Asp-65 to Asn-81. | H0617: 1, L0769: 1, | | |
| | | | | | | L0637: 1 and L0789: 1. | | |
| HBGNL85 | 848179 | 2622 | 1-570 | 5309 | Thr-10 to Gly-16. | H0617: 1, L0767: 1, | | |
| | | | | | | L0775: 1 and L0779: 1. | | |
| HBGND04 | 926973 | 2623 | 55-354 | 5310 | Ser-73 to Lys-78, | L0779: 2, L0752: 2, | | |
| | | | | | Pro-93 to Gly-100. | H0617: 1 and L0794: 1. | | |
| HBGMT82 | 954374 | 2624 | 28-507 | 5311 | | H0617: 1, L0774: 1, | | |
| | | | | | | L0747: 1 and L0752L 1. | | |
| HBGMS69 | 754392 | 2625 | 3-272 | 5312 | Pro-46 to Gly-55, | H0617: 1 and L0750: | | |
| | | | | | Arg-79 to Cys-89. | 1. | | |
| HBGMO78 | 773043 | 2626 | 104-307 | 5313 | Ser-28 to Trp-36. | L0758: 2 and H0617: | | |
| | | | | | | 1. | | |
| HBGMG81 | 880276 | 2627 | 37-363 | 5314 | Lys-3 to Leu-13, | AR050: 297, AR051: | | |
| | | | | | Pro-70 to Ser-78. | 237, AR054: 211 | | |
| | | | | | | H0617: 1 | | |
| HBGFS88 | 914032 | 2628 | 358-140 | 5315 | | L0748: 2, H0606: 1 | | |
| | | | | | | and L0593: 1. | | |
| HBGFG53 | 727748 | 2629 | 267-473 | 5316 | Gly-18 to Gly-24, | H0606: 1 and L0777: | | |
| | | | | | Gly-31 to Ser-38, | 1. | | |
| | | | | | His-57 to Asn-62. | | | |
| HBGDH33 | 702854 | 2630 | 2-374 | 5317 | | L0439: 6, L0776: 2, | | |
| | | | | | | L0777: 2, H0181: 1, | | |
| | | | | | | L0762: 1 and L0809: 1. | | |
| HBGDF39 | 861602 | 2631 | 2-355 | 5318 | Leu-92 to Phe-98. | AR089: 0, AR061: 0 | | |
| | | | | | | H0181: 1 | | |
| HBGDA74 | 832888 | 2632 | 2-277 | 5319 | | AR089: 33, AR061: 29 | 11q13 | 102200, |
| | | | | | | H0181: 1 | | 106100, |
| | | | | | | | | 131100, |
| | | | | | | | | 131100, |
| | | | | | | | | 131100, |
| | | | | | | | | 133780, |
| | | | | | | | | 147050, |
| | | | | | | | | 153700, |
| | | | | | | | | 161015, |
| | | | | | | | | 164009, |
| | | | | | | | | 168461, |
| | | | | | | | | 168461, |
| | | | | | | | | 168461, |
| | | | | | | | | 180721, |
| | | | | | | | | 180840, |
| | | | | | | | | 191181, |
| | | | | | | | | 193235, |
| | | | | | | | | 209901, |
| | | | | | | | | 232600, |
| | | | | | | | | 259700, |
| | | | | | | | | 259770, |
| | | | | | | | | 600045, |
| | | | | | | | | 600319, |
| | | | | | | | | 600528, |
| | | | | | | | | 601884 |
| HBGBG69 | 802090 | 2633 | 1-57 | 5320 | Lys-8 to Ala-14. | H0181: 1 | | |
| HBGBG67 | 588263 | 2634 | 2-157 | 5321 | | H0181: 1 | | |
| HBGBG52 | 522424 | 2635 | 120-257 | 5322 | Leu-8 to Gly-19, | H0181: 1 | | |
| | | | | | Leu-31 to Cys-36. | | | |
| HBGBG38 | 525837 | 2636 | 2-150 | 5323 | Ser-1 to Glu-10. | H0181: 1 | | |
| HBGBE12 | 971466 | 2637 | 1-69 | 5324 | | H0181: 1 | | |
| HBGBB78 | 773930 | 2638 | 2-342 | 5325 | Ser-11 to Trp-17, | H0181: 1 and L0741: | | |
| | | | | | Pro-19 to Thr-28. | 1. | | |
| HBCPV80 | 932817 | 2639 | 2-403 | 5326 | Arg-1 to Arg-8, | AR061: 1, AR089: 1 | | |
| | | | | | Glu-29 to Arg-37. | H0663: 1 and L0783: | | |
| | | | | | | 1. | | |
| HBCPO75 | 927520 | 2640 | 135-356 | 5327 | Ala-26 to Val-32. | L0779: 3, H0663: 1, | | |
| | | | | | | L0757: 1 and L0758: 1. | | |
| HBCPK03 | 922493 | 2641 | 194-514 | 5328 | Lys-25 to Asn-34, | H0663: 1 and L0766: | | |
| | | | | | Thr-92 to Gly-98. | 1. | | |
| HBCJP02 | 917981 | 2642 | 349-507 | 5329 | Glu-14 to Ala-30, | H0664: 1 and L0758: | | |
| | | | | | Ile-46 to Lys-53. | 1. | | |
| HBCJG07 | 951898 | 2643 | 2-137 | 5330 | Arg-5 to Ser-15. | L0754: 2, H0664: 1 | | |
| | | | | | | and L0748: 1. | | |
| HAUCC58 | 764851 | 2644 | 31-402 | 5331 | Cys-1 to Arg-15, | H0294: 1 and L0777: | | |
| | | | | | Lys-28 to Asp-36, | 1. | | |
| | | | | | Thr-64 to Leu-74, | | | |
| | | | | | Cys-99 to Arg-107, | | | |
| | | | | | Lys-117 to Arg-124. | | | |
| HAUAW51 | 577959 | 2645 | 119-349 | 5332 | Ser-24 to Trp-30, | H0294: 1 and L0748: | | |
| | | | | | Glu-38 to Arg-50. | 1. | | |
| HAUAS89 | 518847 | 2646 | 25-132 | 5333 | | H0294: 1 | | |
| HAUAQ28 | 685374 | 2647 | 320-427 | 5334 | | H0294: 1 and L0608: | | |
| | | | | | | 1. | | |
| HAQCF25 | 678235 | 2648 | 2-303 | 5335 | | L0794: 2, L0599: 2, | | |
| | | | | | | H0295: 1, L0763: 1, | | |
| | | | | | | L0800: 1 and L0515: 1. | | |
| HAQCD07 | 958959 | 2649 | 198-425 | 5336 | Arg-25 to Ser-50. | H0295: 1 and L0780: | | |
| | | | | | | 1. | | |
| HACMR08 | 955638 | 2650 | 2-280 | 5337 | Leu-30 to Lys-38, | L0809: 2, H0685: 1, | | |
| | | | | | Trp-49 to Ala-58, | L0776: 1 and L0780: 1. | | |
| | | | | | Gly-75 to Pro-80. | | | |

[0079] The first column in Table 1A provides a unique “Clone ID NO: Z” for a cDNA clone related to each contig sequence disclosed in Table 1A. This clone ID references the cDNA clone which contains at least the 5′ most sequence of the assembled contig and at least a portion of SEQ ID NO: X was determined by directly sequencing the referenced clone. The reference clone may have more sequence than described in the sequence listing or the clone may have less. In the vast majority of cases, however, the clone is believed to encode a full-length polypeptide. In the case where a clone is not full-length, a full-length cDNA can be obtained by methods known in the art and/or as described elsewhere herein.

[0080] The second column in Table 1A provides a unique “Contig ID” identification for each contig sequence. The third column provides the “SEQ ID NO: X” identifier for each of the reproductive system associated contig polynucleotide sequences disclosed in Table 1A. The fourth column, “ORF (From-To)”, provides the location (i.e., nucleotide position numbers) within the polynucleotide sequence “SEQ ID NO: X” that delineate the preferred open reading frame (ORF) shown in the sequence listing and referenced in Table 1A, column 5, as SEQ ID NO: Y. Where the nucleotide position number “To” is lower than the nucleotide position number “From”, the preferred ORF is the reverse complement of the referenced polynucleotide sequence.

[0081] The fifth column in Table 1A provides the corresponding SEQ ID NO: Y for the polypeptide sequence encoded by the preferred ORF delineated in column 4. In one embodiment, the invention provides an amino acid sequence comprising, or alternatively consisting of, a polypeptide encoded by the portion of SEQ ID NO: X delineated by “ORF (From-To)”. Also provided are polynucleotides encoding such amino acid sequences and the complementary strand thereto.

[0082] Column 6 in Table 1A lists residues comprising epitopes contained in the polypeptides encoded by the preferred ORF (SEQ ID NO: Y), as predicted using the algorithm of Jameson and Wolf, (1988) Comp. Appl. Biosci. 4:181-186. The Jameson-Wolf antigenic analysis was performed using the computer program PROTEAN (Version 3.11 for the Power MacIntosh, DNASTAR, Inc., 1228 South Park Street Madison, Wis.). In some embodiments, polypeptides of the invention comprise, or alternatively consist of, at least one, two, three, four, five or more of the predicted epitopes as described in Table 1A. It will be appreciated that depending on the analytical criteria used to predict antigenic determinants, the exact address of the determinant may vary slightly.

[0083] Column 7 in Table 1A provides an expression profile and library code: count for each of the contig sequences (SEQ ID NO: X) disclosed in Table 1A, which can routinely be combined with the information provided in Table 4 and used to determine the normal or diseased tissues, cells, and/or cell line libraries which predominantly express the polynucleotides of the invention. The first number in column 7 (preceding the colon), represents the tissue/cell source identifier code corresponding to the code and description provided in Table 4. For those identifier codes in which the first two letters are not “AR”, the second number in column 7 (following the colon) represents the number of times a sequence corresponding to the reference polynucleotide sequence was identified in the tissue/cell source. Those tissue/cell source identifier codes in which the first two letters are “AR” designate information generated using DNA array technology. Utilizing this technology, cDNAs were amplified by PCR and then transferred, in duplicate, onto the array. Gene expression was assayed through hybridization of first strand cDNA probes to the DNA array. cDNA probes were generated from total RNA extracted from a variety of different tissues and cell lines. Probe synthesis was performed in the presence of ³³P dCTP, using oligo(dT) to prime reverse transcription. After hybridization, high stringency washing conditions were employed to remove non-specific hybrids from the array. The remaining signal, emanating from each gene target, was measured using a Phosphorimager. Gene expression was reported as Phosphor Stimulating Luminescence (PSL) which reflects the level of phosphor signal generated from the probe hybridized to each of the gene targets represented on the array. A local background signal subtraction was performed before the total signal generated from each array was used to normalize gene expression between the different hybridizations. The value presented after “[array code]:” represents the mean of the duplicate values, following background subtraction and probe normalization. One of skill in the art could routinely use this information to identify normal and/or diseased tissue(s) which show a predominant expression pattern of the corresponding polynucleotide of the invention or to identify polynucleotides which show predominant and/or specific tissue and/or cell expression. The sequences disclosed herein have been determined to be predominantly expressed in reproductive system tissues, including normal and diseased reproductive system tissues (See Table 1A, column 7 and Table 4).

[0084] Column 8 in Table 1A provides a chromosomal map location for certain polynucleotides of the invention. Chromosomal location was determined by finding exact matches to EST and cDNA sequences contained in the NCBI (National Center for Biotechnology Information) UniGene database. Each sequence in the UniGene database is assigned to a “cluster”; all of the ESTs, cDNAs, and STSs in a cluster are believed to be derived from a single gene. Chromosomal mapping data is often available for one or more sequence(s) in a UniGene cluster; this data (if consistent) is then applied to the cluster as a whole. Thus, it is possible to infer the chromosomal location of a new polynucleotide sequence by determining its identity with a mapped UniGene cluster.

[0085] A modified version of the computer program BLASTN (Altshul et al., J. Mol. Biol. 215:403-410 (1990), and Gish et al., Nat. Genet. 3:266-272 (1993)) was used to search the UniGene database for EST or cDNA sequences that contain exact or near-exact matches to a polynucleotide sequence of the invention (the ‘Query’). A sequence from the UniGene database (the ‘Subject’) was said to be an exact match if it contained a segment of 50 nucleotides in length such that 48 of those nucleotides were in the same order as found in the Query sequence. If all of the matches that met this criteria were in the same UniGene cluster, and mapping data was available for this cluster, it is indicated in Table 1A under the heading “Cytologic Band”. Where a cluster had been further localized to a distinct cytologic band, that band is disclosed; where no banding information was available, but the gene had been localized to a single chromosome, the chromosome is disclosed.

[0086] Once a presumptive chromosomal location was determined for a polynucleotide of the invention, an associated disease locus was identified by comparison with a database of diseases which have been experimentally associated with genetic loci. The database used was the Morbid Map, derived from OMIM™ (supra). If the putative chromosomal location of a polynucleotide of the invention (Query sequence) was associated with a disease in the Morbid Map database, an OMIM reference identification number was noted in column 9, Table 1A, labeled “OMIM Disease Reference(s)”. Table 5 is a key to the OMIM reference identification numbers (column 1), and provides a description of the associated disease in Column 2.

TABLE 1B

| Clone ID | SEQ ID | CONTIG | | SEQ ID | EXON |
|---|---|---|---|---|---|
| NO:Z | NO:X | ID: | BAC ID: A | NO:B | From-To |
| HAOSH55 | 14 | 952380 | AL353194 | 5385 | 1-964 |
| | | | | | 1250-1399 |
| | | | | | 2650-2905 |
| | | | | | 3588-3668 |
| | | | | | 3971-4987 |
| | | | | | 5854-5963 |
| | | | | | 7336-7775 |
| | | | | | 7870-8256 |
| | | | | | 8419-8895 |
| | | | | | 9000-9339 |
| HAOSH55 | 14 | 952380 | AL353194 | 5386 | 1-90 |
| HAQAK73 | 15 | 764671 | AC023906 | 5387 | 1-739 |
| HAQAK73 | 15 | 764671 | AC023906 | 5388 | 1-845 |
| HAQBS37 | 20 | 847519 | AP002519 | 5389 | 1-168 |
| | | | | | 683-777 |
| | | | | | 1538-3043 |
| | | | | | 3578-4180 |
| | | | | | 5564-5793 |
| | | | | | 6266-6409 |
| | | | | | 6412-6738 |
| | | | | | 7035-7451 |
| HAUBD69 | 21 | 529711 | AL359674 | 5390 | 1-138 |
| HAUBD69 | 21 | 529711 | AL359674 | 5391 | 1-380 |
| HAUBU10 | 22 | 968339 | AC027538 | 5392 | 1-463 |
| HAUBU10 | 22 | 968339 | AC010770 | 5393 | 1-463 |
| HAUBU10 | 22 | 968339 | AC027538 | 5394 | 1-288 |
| HAUBU10 | 22 | 968339 | AC010770 | 5395 | 1-288 |
| HBCQS93 | 27 | 930682 | AL109945 | 5396 | 1-310 |
| | | | | | 1220-1839 |
| HBCQS93 | 27 | 930682 | AC022307 | 5397 | 1-310 |
| | | | | | 1220-1839 |
| | | | | | 2206-2683 |
| | | | | | 2691-2788 |
| | | | | | 3337-3381 |
| HBCQS93 | 27 | 930682 | AL109945 | 5398 | 1-131 |
| HBGBF56 | 29 | 957870 | AL031963 | 5399 | 1-249 |
| HBGBF56 | 29 | 957870 | AL133351 | 5400 | 1-249 |
| HBGBF56 | 29 | 957870 | AL031963 | 5401 | 1-249 |
| HBGBF56 | 29 | 957870 | AL031963 | 5402 | 1-429 |
| HBGBF56 | 29 | 957870 | AL133351 | 5403 | 1-580 |
| | | | | | 1364-1792 |
| | | | | | 2134-2229 |
| | | | | | 3072-3565 |
| | | | | | 3973-4080 |
| HBGBF56 | 29 | 957870 | AL031963 | 5404 | 1-349 |
| HBGBF56 | 29 | 957870 | AL133351 | 5405 | 1-349 |
| HBGBF56 | 29 | 957870 | AL031963 | 5406 | 1-349 |
| HBGBG42 | 30 | 922396 | AL096773 | 5407 | 1-518 |
| | | | | | 1341-1514 |
| | | | | | 3365-3956 |
| | | | | | 4169-4282 |
| | | | | | 4430-4892 |
| | | | | | 6254-7763 |
| HBGBG42 | 30 | 922396 | AL096773 | 5408 | 1-114 |
| HBGBG42 | 30 | 922396 | AL096773 | 5409 | 1-3033 |
| HBGBH43 | 31 | 524532 | AP000757 | 5410 | 1-726 |
| HBGBH43 | 31 | 524532 | AP000683 | 5411 | 1-726 |
| HBGBH43 | 31 | 524532 | AP000757 | 5412 | 1-249 |
| | | | | | 299-451 |
| | | | | | 651-926 |
| HBGBH43 | 31 | 524532 | AP000683 | 5413 | 1-249 |
| | | | | | 299-452 |
| | | | | | 651-926 |
| HBGBS07 | 32 | 954299 | AL358472 | 5414 | 1-93 |
| | | | | | 229-341 |
| | | | | | 458-525 |
| | | | | | 639-725 |
| | | | | | 820-2416 |
| | | | | | 3085-3172 |
| | | | | | 3955-5506 |
| | | | | | 5626-6422 |
| HBGBS07 | 32 | 954299 | AL358472 | 5415 | 1-391 |
| HBGBS07 | 32 | 954299 | AL358472 | 5416 | 1-344 |
| | | | | | 399-469 |
| HBGBW60 | 34 | 954916 | AC007779 | 5417 | 1-542 |
| | | | | | 1709-1905 |
| | | | | | 3246-3805 |
| HBGBW60 | 34 | 954916 | AC015667 | 5418 | 1-542 |
| | | | | | 1705-1901 |
| | | | | | 3242-3801 |
| HBGBW60 | 34 | 954916 | AC007936 | 5419 | 1-545 |
| | | | | | 1736-1917 |
| | | | | | 3269-3833 |
| | | | | | 6267-6287 |
| HBGBW72 | 35 | 524956 | AL139376 | 5420 | 1-448 |
| HBGBW72 | 35 | 524956 | AL139376 | 5421 | 1-526 |
| HBGDE85 | 37 | 524875 | AC020850 | 5422 | 1-912 |
| | | | | | 1276-1413 |
| HBGDE85 | 37 | 524875 | AC008693 | 5423 | 1-138 |
| HBGDE85 | 37 | 524875 | AC023611 | 5424 | 1-105 |
| HBGDE85 | 37 | 524875 | AC022123 | 5425 | 1-957 |
| | | | | | 1332-1469 |
| HBGDE85 | 37 | 524875 | AC010845 | 5426 | 1-138 |
| HBGDT43 | 39 | 974223 | L81574 | 5427 | 1-168 |
| HBGDT43 | 39 | 974223 | AC022276 | 5428 | 1-166 |
| HBGDT43 | 39 | 974223 | AC023653 | 5429 | 1-57 |
| HBGDT43 | 39 | 974223 | AC012102 | 5430 | 1-140 |
| HBGDT43 | 39 | 974223 | AC048382 | 5431 | 1-115 |
| HBGDT43 | 39 | 974223 | AC011036 | 5432 | 1-193 |
| HBGDT43 | 39 | 974223 | AC068682 | 5433 | 1-153 |
| HBGDT43 | 39 | 974223 | AL356496 | 5434 | 1-35 |
| HBGDT43 | 39 | 974223 | AC006087 | 5435 | 1-129 |
| HBGDT43 | 39 | 974223 | AC016142 | 5436 | 1-150 |
| HBGDT43 | 39 | 974223 | AC027456 | 5437 | 1-98 |
| HBGDT43 | 39 | 974223 | AC016797 | 5438 | 1-116 |
| HBGDT43 | 39 | 974223 | AL356606 | 5439 | 1-87 |
| HBGDT43 | 39 | 974223 | AC025181 | 5440 | 1-159 |
| HBGDT43 | 39 | 974223 | AC055788 | 5441 | 1-170 |
| HBGDT43 | 39 | 974223 | AC027264 | 5442 | 1-147 |
| HBGDT43 | 39 | 974223 | AC026537 | 5443 | 1-132 |
| HBGDT43 | 39 | 974223 | AC000360 | 5444 | 1-142 |
| HBGDT43 | 39 | 974223 | AC023583 | 5445 | 1-153 |
| HBGDT43 | 39 | 974223 | AL161613 | 5446 | 1-63 |
| HBGDT43 | 39 | 974223 | AC062010 | 5447 | 1-155 |
| HBGDT43 | 39 | 974223 | AC004803 | 5448 | 1-154 |
| HBGDT43 | 39 | 974223 | AC023583 | 5449 | 1-59 |
| | | | | | 1391-1548 |
| HBGDT43 | 39 | 974223 | AL161613 | 5450 | 1-129 |
| HBGDT43 | 39 | 974223 | L81574 | 5451 | 1-315 |
| | | | | | 1979-2215 |
| | | | | | 2720-3771 |
| HBGDT43 | 39 | 974223 | AL356496 | 5452 | 1-131 |
| HBGFA62 | 40 | 954306 | AC016889 | 5453 | 1-700 |
| | | | | | 855-956 |
| | | | | | 962-1444 |
| | | | | | 1446-2545 |
| | | | | | 2846-3201 |
| | | | | | 3316-3569 |
| | | | | | 4130-4421 |
| | | | | | 4424-4461 |
| HBGFA62 | 40 | 954306 | AC016889 | 5454 | 1-35 |
| | | | | | 309-427 |
| | | | | | 1161-1286 |
| | | | | | 3151-3255 |
| | | | | | 3263-3604 |
| | | | | | 4836-5346 |
| | | | | | 5473-5765 |
| | | | | | 6231-6283 |
| | | | | | 6387-6534 |
| HBGMD62 | 42 | 933763 | AL031258 | 5455 | 1-692 |
| | | | | | 707-1312 |
| HBGMD62 | 42 | 933763 | AC068332 | 5456 | 1-671 |
| HBGMD62 | 42 | 933763 | AL031258 | 5457 | 1-349 |
| | | | | | 438-545 |
| | | | | | 675-725 |
| | | | | | 744-903 |
| | | | | | 1124-1593 |
| | | | | | 1726-1832 |
| | | | | | 1904-1966 |
| | | | | | 2656-2704 |
| HBGMF10 | 43 | 966132 | AC068259 | 5458 | 1-743 |
| | | | | | 914-1113 |
| | | | | | 1118-1586 |
| HBGMF10 | 43 | 966132 | AC068259 | 5459 | 1-466 |
| HBGMF10 | 43 | 966132 | AC068259 | 5460 | 1-279 |
| HBGMZ39 | 45 | 947112 | AC008537 | 5461 | 1-1186 |
| HBGMZ39 | 45 | 947112 | AC019337 | 5462 | 1-1182 |
| HBGMZ39 | 45 | 947112 | AC008537 | 5463 | 1-1993 |
| | | | | | 2105-2385 |
| | | | | | 2736-3068 |
| | | | | | 4364-4489 |
| | | | | | 6546-6781 |
| | | | | | 7025-8165 |
| HBGMZ39 | 45 | 947112 | AC019337 | 5464 | 1-1991 |
| | | | | | 2103-2383 |
| | | | | | 2734-3066 |
| | | | | | 4360-4485 |
| | | | | | 6541-6776 |
| | | | | | 7021-8159 |
| HBGMZ39 | 45 | 947112 | AC008537 | 5465 | 1-734 |
| | | | | | 767-1001 |
| HBGMZ39 | 45 | 947112 | AC019337 | 5466 | 1-158 |
| | | | | | 291-565 |
| | | | | | 598-832 |
| HBGND09 | 47 | 848219 | AL139288 | 5467 | 1-1670 |
| HBGND09 | 47 | 848219 | AC023889 | 5468 | 1-1670 |
| HBGND09 | 47 | 848219 | AC026657 | 5469 | 1-1477 |
| HBGND09 | 47 | 848219 | AC023889 | 5470 | 1-440 |
| HBGND09 | 47 | 848219 | AL139288 | 5471 | 1-397 |
| HBGND09 | 47 | 848219 | AC026657 | 5472 | 1-396 |
| HBGND09 | 47 | 848219 | AC023889 | 5473 | 1-396 |
| HBGNJ14 | 48 | 914594 | AC004156 | 5474 | 1-56 |
| | | | | | 391-1058 |
| | | | | | 1079-1478 |
| | | | | | 1996-2053 |
| | | | | | 2539-2612 |
| | | | | | 2844-3219 |
| | | | | | 3313-3602 |
| | | | | | 3796-3919 |
| | | | | | 4012-4767 |
| HBGNJ14 | 48 | 914594 | AC004156 | 5475 | 1-275 |
| HBGNO07 | 50 | 952212 | AC073131 | 5476 | 1-1122 |
| HBGNO07 | 50 | 952212 | AC008403 | 5477 | 1-1630 |
| | | | | | 2058-2480 |
| | | | | | 4161-4577 |
| | | | | | 5334-5745 |
| | | | | | 6732-6865 |
| | | | | | 7024-7163 |
| | | | | | 10746-11227 |
| | | | | | 11908-12229 |
| | | | | | 12481-13862 |
| HBGNO07 | 50 | 952212 | AC008403 | 5478 | 1-482 |
| | | | | | 2074-2191 |
| | | | | | 3067-3427 |
| | | | | | 3514-3666 |
| | | | | | 4176-4250 |
| | | | | | 4718-4839 |
| | | | | | 5313-5692 |
| | | | | | 10395-10491 |
| | | | | | 10694-10779 |
| | | | | | 11107-11256 |
| | | | | | 12127-12209 |
| | | | | | 12283-12405 |
| | | | | | 12543-13031 |
| | | | | | 13771-14040 |
| HBGNO07 | 50 | 952212 | AC008403 | 5479 | 1-128 |
| | | | | | 172-232 |
| | | | | | 1302-2232 |
| HBGNQ31 | 51 | 887152 | AL118522 | 5480 | 1-258 |
| | | | | | 787-912 |
| | | | | | 2028-2776 |
| | | | | | 3673-3948 |
| | | | | | 4188-4463 |
| HBGNQ31 | 51 | 887152 | AL118522 | 5481 | 1-1160 |
| HBGNW29 | 52 | 969396 | AL139288 | 5482 | 1-1670 |
| HBGNW29 | 52 | 969396 | AC023889 | 5483 | 1-1670 |
| HBGNW29 | 52 | 969396 | AC026657 | 5484 | 1-1477 |
| HBGNW29 | 52 | 969396 | AC023889 | 5485 | 1-440 |
| HBGNW29 | 52 | 969396 | AL139288 | 5486 | 1-397 |
| HBGNW29 | 52 | 969396 | AC026657 | 5487 | 1-396 |
| HBGNW29 | 52 | 969396 | AC023889 | 5488 | 1-396 |
| HBGOB07 | 53 | 883111 | AC008655 | 5489 | 1-895 |
| HBGOB07 | 53 | 883111 | AC008655 | 5490 | 1-1013 |
| HBGOB07 | 53 | 883111 | AC008655 | 5491 | 1-909 |
| | | | | | 1371-1545 |
| | | | | | 3390-3501 |
| | | | | | 4360-4549 |
| | | | | | 5287-5337 |
| | | | | | 5422-5540 |
| | | | | | 7645-7790 |
| | | | | | 8678-8898 |
| | | | | | 9930-10085 |
| HBGPH02 | 58 | 918513 | AC003037 | 5492 | 1-492 |
| HBGPH02 | 58 | 918513 | AC003037 | 5493 | 1-86 |
| | | | | | 3463-3839 |
| | | | | | 4494-4881 |
| | | | | | 4901-6058 |
| HBGPH02 | 58 | 918513 | AC003037 | 5494 | 1-2178 |
| | | | | | 2394-3039 |
| | | | | | 3041-3358 |
| | | | | | 4072-4175 |
| | | | | | 4212-4316 |
| | | | | | 4571-4941 |
| | | | | | 5381-5529 |
| | | | | | 5783-5886 |
| | | | | | 6445-6588 |
| | | | | | 8722-8835 |
| HBGPK33 | 59 | 973425 | AC012305 | 5495 | 1-712 |
| HBGPK33 | 59 | 973425 | AC067853 | 5496 | 1-712 |
| HBGPK33 | 59 | 973425 | AC067853 | 5497 | 1-601 |
| HBGPV05 | 60 | 930706 | AC020866 | 5498 | 1-592 |
| HBGSD40 | 62 | 923142 | AC007783 | 5499 | 1-215 |
| | | | | | 697-1759 |
| HBGSD40 | 62 | 923142 | AC022007 | 5500 | 1-555 |
| HBGSD40 | 62 | 923142 | AC018809 | 5501 | 1-867 |
| HBGSD40 | 62 | 923142 | AC007783 | 5502 | 1-534 |
| HBGSD40 | 62 | 923142 | AC007783 | 5503 | 1-314 |
| | | | | | 814-969 |
| | | | | | 1228-1301 |
| | | | | | 1391-1502 |
| | | | | | 2374-2548 |
| | | | | | 2750-3470 |
| HBGSD40 | 62 | 923142 | AC022007 | 5504 | 1-279 |
| HBGSD40 | 62 | 923142 | AC022007 | 5505 | 1-314 |
| | | | | | 814-969 |
| | | | | | 1228-1301 |
| | | | | | 1391-1502 |
| | | | | | 2374-2548 |
| | | | | | 2750-3492 |
| | | | | | 3815-3858 |
| | | | | | 4506-4812 |
| | | | | | 5780-6087 |
| | | | | | 6765-6905 |
| | | | | | 7117-7178 |
| | | | | | 11051-11101 |
| | | | | | 11244-11380 |
| | | | | | 11469-11524 |
| | | | | | 12621-12789 |
| | | | | | 12919-13141 |
| | | | | | 13291-13351 |
| | | | | | 13474-13835 |
| | | | | | 14502-14734 |
| | | | | | 14773-15067 |
| | | | | | 15215-16491 |
| HBGSD40 | 62 | 923142 | AC018809 | 5506 | 1-314 |
| | | | | | 814-969 |
| | | | | | 1228-1301 |
| | | | | | 1391-1502 |
| | | | | | 2375-2549 |
| | | | | | 2751-3431 |
| HBGTL01 | 64 | 914573 | Z97986 | 5507 | 1-696 |
| | | | | | 3066-3591 |
| HBGTL01 | 64 | 914573 | Z97986 | 5508 | 1-334 |
| HBNAN41 | 69 | 655842 | AC005729 | 5509 | 1-307 |
| HBNAN41 | 69 | 655842 | AC005729 | 5510 | 1-116 |
| HBNAN41 | 69 | 655842 | AC005729 | 5511 | 1-177 |
| HBNAX71 | 71 | 530843 | AL157375 | 5512 | 1-87 |
| HBNAX71 | 71 | 530843 | AL157375 | 5513 | 1-430 |
| HBNAY58 | 72 | 558193 | AC046185 | 5514 | 1-836 |
| HBNBT52 | 73 | 524869 | AC069303 | 5515 | 1-488 |
| HBNBT52 | 73 | 524869 | AC069303 | 5516 | 1-205 |
| H3NBT52 | 73 | 524869 | AC069303 | 5517 | 1-315 |
| HBZAJ09 | 74 | 655769 | AC019232 | 5518 | 1-315 |
| HBZAJ09 | 74 | 655769 | AC025171 | 5519 | 1-315 |
| HBZAJ09 | 74 | 655769 | AC019232 | 5520 | 1-324 |
| HBZAJ09 | 74 | 655769 | AC025171 | 5521 | 1-148 |
| HBZAJ09 | 74 | 655769 | AC019232 | 5522 | 1-148 |
| HBZAJ09 | 74 | 655769 | AC025171 | 5523 | 1-283 |
| HBZSH16 | 75 | 655619 | AC069483 | 5524 | 1-554 |
| HBZSH16 | 75 | 655619 | AC069483 | 5525 | 1-920 |
| HBZSH71 | 76 | 760418 | AC018693 | 5526 | 1-741 |
| HBZSH71 | 76 | 760418 | AC018693 | 5527 | 1-252 |
| HBZSI73 | 77 | 655737 | AC067954 | 5528 | 1-313 |
| HBZSI73 | 77 | 655737 | AC067954 | 5529 | 1-326 |
| HBZSK17 | 78 | 664013 | AC005005 | 5530 | 1-139 |
| | | | | | 521-674 |
| | | | | | 838-1409 |
| | | | | | 1438-1598 |
| | | | | | 1860-1995 |
| | | | | | 6648-6796 |
| | | | | | 7196-7292 |
| | | | | | 7385-7460 |
| | | | | | 7554-7650 |
| | | | | | 8380-8713 |
| | | | | | 8789-8863 |
| | | | | | 9491-9560 |
| | | | | | 9642-9826 |
| | | | | | 10042-10528 |
| | | | | | 11147-11210 |
| | | | | | 13983-15090 |
| | | | | | 15211-15587 |
| | | | | | 15681-16021 |
| | | | | | 17348-17536 |
| | | | | | 17744-17862 |
| | | | | | 17957-18234 |
| | | | | | 18373-18580 |
| | | | | | 19081-19435 |
| | | | | | 19568-19733 |
| | | | | | 19815-19932 |
| | | | | | 20132-20466 |
| | | | | | 22166-22791 |
| | | | | | 22824-23307 |
| HBZSK17 | 78 | 664013 | AC005005 | 5531 | 1-1393 |
| | | | | | 2604-2971 |
| HCBMV01 | 79 | 914333 | AP002479 | 5532 | 1-401 |
| HCBMV01 | 79 | 914333 | AC012569 | 5533 | 1-193 |
| | | | | | 379-463 |
| | | | | | 1042-1115 |
| | | | | | 2571-3004 |
| | | | | | 3344-3468 |
| | | | | | 4339-4433 |
| | | | | | 5418-5606 |
| | | | | | 5875-6012 |
| | | | | | 6119-6519 |
| | | | | | 7622-7713 |
| HCBMV01 | 79 | 914333 | AP001895 | 5534 | 1-74 |
| | | | | | 1527-1591 |
| | | | | | 1656-1960 |
| | | | | | 2300-2424 |
| | | | | | 3295-3389 |
| | | | | | 4374-4562 |
| | | | | | 4831-4968 |
| | | | | | 5075-5475 |
| | | | | | 6579-6670 |
| HCBMV01 | 79 | 914333 | AP002479 | 5535 | 1-189 |
| HCBMV01 | 79 | 914333 | AC012569 | 5536 | 1-87 |
| HCBMV01 | 79 | 914333 | AP001895 | 5537 | 1-87 |
| HCBMV01 | 79 | 914333 | AP001895 | 5538 | 1-108 |
| HCBNW02 | 80 | 950897 | AF205589 | 5539 | 1-32 |
| | | | | | 110-254 |
| | | | | | 333-849 |
| | | | | | 918-999 |
| | | | | | 1069-1147 |
| | | | | | 1231-1322 |
| | | | | | 1435-1687 |
| | | | | | 1765-1881 |
| | | | | | 1958-2357 |
| | | | | | 2441-3044 |
| | | | | | 3104-3153 |
| | | | | | 3226-3549 |
| | | | | | 3626-3791 |
| | | | | | 3874-4018 |
| | | | | | 4089-4184 |
| | | | | | 4258-4377 |
| | | | | | 4424-5493 |
| | | | | | 5591-5736 |
| | | | | | 5834-5922 |
| | | | | | 6196-6415 |
| | | | | | 6479-6654 |
| | | | | | 6735-6895 |
| | | | | | 7030-7124 |
| | | | | | 7229-7371 |
| | | | | | 7452-7567 |
| | | | | | 7707-7796 |
| | | | | | 7887-7969 |
| | | | | | 8059-8133 |
| | | | | | 8149-8306 |
| | | | | | 8381-8736 |
| HCDMB01 | 83 | 915613 | AC012484 | 5540 | 1-355 |
| HCDMC01 | 86 | 915239 | AC005789 | 5541 | 1-48 |
| | | | | | 1051-2390 |
| | | | | | 2839-3458 |
| HCDMC01 | 86 | 915239 | AC005789 | 5542 | 1-1721 |
| | | | | | 2187-3101 |
| | | | | | 3194-3363 |
| | | | | | 4200-4903 |
| | | | | | 5310-5493 |
| | | | | | 6194-6294 |
| | | | | | 7366-7482 |
| | | | | | 7598-7676 |
| | | | | | 8092-8778 |
| | | | | | 8869-9496 |
| HCDMD23 | 87 | 676799 | AC018743 | 5543 | 1-801 |
| HCDMD23 | 87 | 676799 | AC018630 | 5544 | 1-413 |
| HCDMD23 | 87 | 676799 | AC018743 | 5545 | 1-138 |
| HCDMD23 | 87 | 676799 | AC018630 | 5546 | 1-177 |
| HCHAD40 | 88 | 923764 | AC006096 | 5547 | 1-240 |
| | | | | | 737-1362 |
| HCHAD40 | 88 | 923764 | AC006106 | 5548 | 1-240 |
| | | | | | 736-1423 |
| HCHAD40 | 88 | 923764 | AC006108 | 5549 | 1-240 |
| | | | | | 736-1359 |
| HCHAD40 | 88 | 923764 | AC006179 | 5550 | 1-230 |
| | | | | | 1021-1223 |
| HCHAD40 | 88 | 923764 | U82205 | 5551 | 1-255 |
| | | | | | 736-849 |
| | | | | | 1023-1457 |
| HCHAD40 | 88 | 923764 | U82208 | 5552 | 1-240 |
| | | | | | 736-1425 |
| HCHAD40 | 88 | 923764 | AC006186 | 5553 | 1-2213 |
| | | | | | 2217-2456 |
| | | | | | 2952-4550 |
| | | | | | 4562-4643 |
| | | | | | 4906-5701 |
| HCHAD40 | 88 | 923764 | AC006171 | 5554 | 1-240 |
| | | | | | 736-1540 |
| | | | | | 7244-8075 |
| | | | | | 8087-8167 |
| HCHAD40 | 88 | 923764 | AC006177 | 5555 | 1-2212 |
| | | | | | 2216-2455 |
| | | | | | 2951-4547 |
| | | | | | 4559-4639 |
| | | | | | 4902-5697 |
| HCHAD40 | 88 | 923764 | AC006180 | 5556 | 1-240 |
| | | | | | 736-1625 |
| HCHAD40 | 88 | 923764 | U82210 | 5557 | 1-2210 |
| | | | | | 2214-2453 |
| | | | | | 2949-4547 |
| | | | | | 4559-4614 |
| | | | | | 4899-5620 |
| HCHAD40 | 88 | 923764 | AC006185 | 5558 | 1-240 |
| | | | | | 736-1359 |
| HCHAD40 | 88 | 923764 | AC006184 | 5559 | 1-2204 |
| | | | | | 2208-2447 |
| | | | | | 2943-3574 |
| | | | | | 3724-4540 |
| | | | | | 4552-4633 |
| | | | | | 4896-5715 |
| HCHAD40 | 88 | 923764 | AC006172 | 5560 | 1-240 |
| | | | | | 847-1425 |
| HCHAD40 | 88 | 923764 | AC006099 | 5561 | 1-240 |
| | | | | | 736-1424 |
| HCHAD40 | 88 | 923764 | AC006103 | 5562 | 1-240 |
| | | | | | 737-2325 |
| HCHAD40 | 88 | 923764 | AC006098 | 5563 | 1-240 |
| | | | | | 736-1424 |
| HCHAD40 | 88 | 923764 | AC006096 | 5564 | 1-2211 |
| HCHAD40 | 88 | 923764 | AC006106 | 5565 | 1-2215 |
| HCHAD40 | 88 | 923764 | AC006108 | 5566 | 1-2210 |
| HCHAD40 | 88 | 923764 | AC006179 | 5567 | 1-358 |
| HCHAD40 | 88 | 923764 | U82205 | 5568 | 1-2213 |
| HCHAD40 | 88 | 923764 | U82208 | 5569 | 1-2212 |
| HCHAD40 | 88 | 923764 | AC006171 | 5570 | 1-2213 |
| HCHAD40 | 88 | 923764 | AC006177 | 5571 | 1-67 |
| | | | | | 1558-1614 |
| | | | | | 1692-2134 |
| | | | | | 2610-2767 |
| | | | | | 4075-4344 |
| | | | | | 5072-5484 |
| | | | | | 5971-6837 |
| | | | | | 7042-7752 |
| HCHAD40 | 88 | 923764 | AC006180 | 5572 | 1-2213 |
| HCHAD40 | 88 | 923764 | AC006171 | 5573 | 1-794 |
| HCHAD40 | 88 | 923764 | AC006185 | 5574 | 1-2206 |
| HCHAD40 | 88 | 923764 | AC006184 | 5575 | 1-130 |
| HCHAD40 | 88 | 923764 | AC006172 | 5576 | 1-2211 |
| HCHAD40 | 88 | 923764 | AC006099 | 5577 | 1-2212 |
| HCHAD40 | 88 | 923764 | AC006103 | 5578 | 1-2213 |
| HCHAD40 | 88 | 923764 | AC006098 | 5579 | 1-2212 |
| HCHAR16 | 89 | 675465 | AC068327 | 5580 | 1-402 |
| | | | | | 667-3113 |
| HCHAR43 | 90 | 715128 | AC003036 | 5581 | 1-444 |
| | | | | | 4270-4530 |
| | | | | | 7834-7966 |
| | | | | | 8367-8509 |
| | | | | | 9404-9466 |
| | | | | | 9576-9674 |
| HCHAR43 | 90 | 715128 | AC003036 | 5582 | 1-550 |
| HCHBQ03 | 92 | 923763 | AC006106 | 5583 | 1-240 |
| | | | | | 736-1423 |
| HCHBQ03 | 92 | 923763 | U82205 | 5584 | 1-255 |
| | | | | | 736-849 |
| | | | | | 1023-1457 |
| HCHBQ03 | 92 | 923763 | U82208 | 5585 | 1-240 |
| | | | | | 736-1425 |
| HCHBQ03 | 92 | 923763 | AC006186 | 5586 | 1-2213 |
| | | | | | 2217-2456 |
| | | | | | 2952-4550 |
| | | | | | 4562-4643 |
| | | | | | 4906-5701 |
| HCHBQ03 | 92 | 923763 | AC006171 | 5587 | 1-240 |
| | | | | | 736-1540 |
| | | | | | 7244-8075 |
| | | | | | 8087-8167 |
| HCHBQ03 | 92 | 923763 | AC006177 | 5588 | 1-2212 |
| | | | | | 2216-2455 |
| | | | | | 2951-4547 |
| | | | | | 4559-4639 |
| | | | | | 4902-5697 |
| HCHBQ03 | 92 | 923763 | AC006180 | 5589 | 1-240 |
| | | | | | 736-1625 |
| HCHBQ03 | 92 | 923763 | U82210 | 5590 | 1-2210 |
| | | | | | 2214-2453 |
| | | | | | 2949-4547 |
| | | | | | 4559-4614 |
| | | | | | 4899-5620 |
| HCHBQ03 | 92 | 923763 | AC006185 | 5591 | 1-240 |
| | | | | | 736-1359 |
| HCHBQ03 | 92 | 923763 | AC006184 | 5592 | 1-2204 |
| | | | | | 2208-2447 |
| | | | | | 2943-3574 |
| | | | | | 3724-4540 |
| | | | | | 4552-4633 |
| | | | | | 4896-5715 |
| HCHBQ03 | 92 | 923763 | AC006172 | 5593 | 1-240 |
| | | | | | 847-1425 |
| HCHBQ03 | 92 | 923763 | AC006099 | 5594 | 1-240 |
| | | | | | 736-1424 |
| HCHBQ03 | 92 | 923763 | AC006103 | 5595 | 1-240 |
| | | | | | 737-2325 |
| HCHBQ03 | 92 | 923763 | AC006098 | 5596 | 1-240 |
| | | | | | 736-1424 |
| HCHBQ03 | 92 | 923763 | AC006106 | 5597 | 1-2215 |
| HCHBQ03 | 92 | 923763 | U82205 | 5598 | 1-2213 |
| HCHBQ03 | 92 | 923763 | U82208 | 5599 | 1-2212 |
| HCHBQ03 | 92 | 923763 | AC006171 | 5600 | 1-2213 |
| HCHBQ03 | 92 | 923763 | AC006177 | 5601 | 1-67 |
| | | | | | 1558-1614 |
| | | | | | 1692-2134 |
| | | | | | 2610-2767 |
| | | | | | 4075-4344 |
| | | | | | 5072-5484 |
| | | | | | 5971-6837 |
| | | | | | 7042-7752 |
| HCHBQ03 | 92 | 923763 | AC006180 | 5602 | 1-2213 |
| HCHBQ03 | 92 | 923763 | AC006171 | 5603 | 1-794 |
| HCHBQ03 | 92 | 923763 | AC006185 | 5604 | 1-2206 |
| HCHBQ03 | 92 | 923763 | AC006184 | 5605 | 1-130 |
| HCHBQ03 | 92 | 923763 | AC006172 | 5606 | 1-2211 |
| HCHBQ03 | 92 | 923763 | AC006099 | 5607 | 1-2212 |
| HCHBQ03 | 92 | 923763 | AC006103 | 5608 | 1-2213 |
| HCHBQ03 | 92 | 923763 | AC006098 | 5609 | 1-2212 |
| HCHOA76 | 95 | 740102 | AL355975 | 5610 | 1-322 |
| HCHOA76 | 95 | 740102 | AC022795 | 5611 | 1-300 |
| HCHOA76 | 95 | 740102 | AL353577 | 5612 | 1-279 |
| HCHOA76 | 95 | 740102 | AC026144 | 5613 | 1-183 |
| HCHOA76 | 95 | 740102 | AC011036 | 5614 | 1-193 |
| HCHOA76 | 95 | 740102 | AC068519 | 5615 | 1-312 |
| HCHOA76 | 95 | 740102 | AL353701 | 5616 | 1-168 |
| HCHOA76 | 95 | 740102 | AC068755 | 5617 | 1-190 |
| HCHOA76 | 95 | 740102 | AC009899 | 5618 | 1-175 |
| HCHOA76 | 95 | 740102 | AC021616 | 5619 | 1-57 |
| HCHOA76 | 95 | 740102 | AC068196 | 5620 | 1-316 |
| HCHOA76 | 95 | 740102 | AL162741 | 5621 | 1-45 |
| HCHOA76 | 95 | 740102 | AC011994 | 5622 | 1-154 |
| | | | | | 930-1106 |
| | | | | | 1119-1633 |
| | | | | | 2173-2298 |
| HCHOA76 | 95 | 740102 | AC002369 | 5623 | 1-586 |
| | | | | | 2559-2651 |
| | | | | | 3329-3426 |
| | | | | | 3756-5088 |
| HCHOA76 | 95 | 740102 | AC068196 | 5624 | 1-214 |
| HCHOA76 | 95 | 740102 | AL162741 | 5625 | 1-102 |
| HCHOA76 | 95 | 740102 | AC002369 | 5626 | 1-228 |
| HCHOD89 | 96 | 954866 | AC025769 | 5627 | 1-58 |
| | | | | | 297-454 |
| | | | | | 1087-1366 |
| | | | | | 2938-3671 |
| | | | | | 3704-3938 |
| | | | | | 3973-5157 |
| | | | | | 5160-7151 |
| | | | | | 7263-7543 |
| | | | | | 7894-8226 |
| | | | | | 9524-9649 |
| | | | | | 11707-11942 |
| | | | | | 12187-13327 |
| HCHOD89 | 96 | 954866 | AC008537 | 5628 | 1-1186 |
| HCHOD89 | 96 | 954866 | AC019337 | 5629 | 1-1182 |
| HCHOD89 | 96 | 954866 | AC008537 | 5630 | 1-1993 |
| | | | | | 2105-2385 |
| | | | | | 2736-3068 |
| | | | | | 4364-4489 |
| | | | | | 6546-6781 |
| | | | | | 7025-8165 |
| HCHOD89 | 96 | 954866 | AC019337 | 5631 | 1-1991 |
| | | | | | 2103-2383 |
| | | | | | 2734-3066 |
| | | | | | 4360-4485 |
| | | | | | 6541-6776 |
| | | | | | 7021-8159 |
| HCHOD89 | 96 | 954866 | AC008537 | 5632 | 1-734 |
| | | | | | 767-1001 |
| HCHOD89 | 96 | 954866 | AC019337 | 5633 | 1-158 |
| | | | | | 291-565 |
| | | | | | 598-832 |
| HCHQB06 | 98 | 934941 | AC073251 | 5634 | 1-409 |
| HCOMZ41 | 100 | 932878 | AC006512 | 5635 | 1-83 |
| | | | | | 936-1185 |
| HCOMZ41 | 100 | 932878 | U47924 | 5636 | 1-459 |
| | | | | | 955-1204 |
| HCOMZ41 | 100 | 932878 | AC006512 | 5637 | 1-158 |
| | | | | | 424-946 |
| | | | | | 1266-1460 |
| | | | | | 1769-1850 |
| | | | | | 2324-2667 |
| | | | | | 4720-5597 |
| | | | | | 7030-7663 |
| | | | | | 8193-8438 |
| | | | | | 8565-8902 |
| | | | | | 9074-9181 |
| | | | | | 9552-9638 |
| | | | | | 9830-9997 |
| | | | | | 11068-11206 |
| | | | | | 11336-11497 |
| | | | | | 12752-13412 |
| | | | | | 13503-13691 |
| | | | | | 13754-13853 |
| | | | | | 14203-14738 |
| HCOMZ41 | 100 | 932878 | AC006512 | 5638 | 1-818 |
| | | | | | 963-1440 |
| | | | | | 1469-1958 |
| | | | | | 2220-3076 |
| | | | | | 3455-3663 |
| | | | | | 3931-4285 |
| | | | | | 4549-4632 |
| | | | | | 4696-5069 |
| | | | | | 5245-5337 |
| | | | | | 5461-5775 |
| HCOMZ41 | 100 | 932878 | U47924 | 5639 | 1-158 |
| | | | | | 424-946 |
| | | | | | 1266-1460 |
| | | | | | 1769-1850 |
| | | | | | 2324-2667 |
| | | | | | 4720-5597 |
| | | | | | 7030-7663 |
| | | | | | 8193-8438 |
| | | | | | 8565-8902 |
| | | | | | 9074-9181 |
| | | | | | 9552-9638 |
| | | | | | 9830-9997 |
| | | | | | 11068-11206 |
| | | | | | 11336-11497 |
| | | | | | 12752-13412 |
| | | | | | 13503-13691 |
| | | | | | 13754-13853 |
| | | | | | 14203-14738 |
| HCOMZ41 | 100 | 932878 | U47924 | 5640 | 1-818 |
| | | | | | 963-1440 |
| | | | | | 1469-3076 |
| | | | | | 3455-3663 |
| | | | | | 3931-4285 |
| | | | | | 4549-4632 |
| | | | | | 4806-4965 |
| | | | | | 4979-5001 |
| | | | | | 5245-5337 |
| | | | | | 5461-5775 |
| HCOOG04 | 101 | 925748 | AC012589 | 5641 | 1-524 |
| HCOOG04 | 101 | 925748 | AC012589 | 5642 | 1-2408 |
| | | | | | 3890-4040 |
| | | | | | 4216-4268 |
| | | | | | 7091-7175 |
| HCOOI07 | 102 | 951665 | AC074191 | 5643 | 1-710 |
| HCOOI07 | 102 | 951665 | AC022240 | 5644 | 1-710 |
| HCOOM77 | 103 | 969161 | AC025572 | 5645 | 1-516 |
| HCOOX10 | 104 | 961595 | AC005005 | 5646 | 1-484 |
| | | | | | 517-1142 |
| | | | | | 2842-3176 |
| | | | | | 3376-3493 |
| | | | | | 3575-3740 |
| | | | | | 3873-4227 |
| | | | | | 4728-4935 |
| | | | | | 5074-5351 |
| | | | | | 5446-5564 |
| | | | | | 5772-5960 |
| | | | | | 7287-7627 |
| | | | | | 7721-8097 |
| | | | | | 8218-9325 |
| | | | | | 12098-12161 |
| | | | | | 12780-13266 |
| | | | | | 13482-13666 |
| | | | | | 13748-13817 |
| | | | | | 14445-14519 |
| | | | | | 14595-14928 |
| | | | | | 15658-15754 |
| | | | | | 15848-15923 |
| | | | | | 16016-16112 |
| | | | | | 16512-16660 |
| | | | | | 21313-21448 |
| | | | | | 21710-21870 |
| | | | | | 21899-22470 |
| | | | | | 22634-22787 |
| | | | | | 23169-23307 |
| HCOOX10 | 104 | 961595 | AC005005 | 5647 | 1-368 |
| | | | | | 1579-2971 |
| HCOOZ11 | 105 | 965306 | AL022238 | 5648 | 1-121 |
| | | | | | 899-983 |
| | | | | | 1445-1513 |
| | | | | | 2166-3430 |
| | | | | | 3550-3763 |
| | | | | | 3859-3972 |
| | | | | | 4449-4595 |
| | | | | | 4960-5152 |
| | | | | | 5385-5529 |
| | | | | | 5744-5972 |
| | | | | | 6327-7067 |
| | | | | | 7097-7152 |
| | | | | | 7210-8073 |
| | | | | | 8079-8680 |
| | | | | | 8772-11399 |
| | | | | | 12956-13517 |
| | | | | | 13736-14155 |
| | | | | | 14311-14753 |
| | | | | | 16294-16357 |
| | | | | | 16648-16806 |
| | | | | | 16874-17059 |
| | | | | | 17685-17787 |
| HCOOZ11 | 105 | 965306 | AL022238 | 5649 | 1-540 |
| HCOOZ11 | 105 | 965306 | AL022238 | 5650 | 1-665 |
| HCOQE11 | 107 | 965299 | AL132777 | 5651 | 1-788 |
| | | | | | 884-2272 |
| HCOQE11 | 107 | 965299 | AL132777 | 5652 | 1-312 |
| HCOQQ07 | 109 | 951658 | AC013267 | 5653 | 1-734 |
| | | | | | 831-1524 |
| HCOQQ07 | 109 | 951658 | AC013267 | 5654 | 1-103 |
| HCOQQ07 | 109 | 951658 | AC013267 | 5655 | 1-620 |
| HE8SG46 | 110 | 961388 | AC022598 | 5656 | 1-2668 |
| HE8SG46 | 110 | 961388 | AC022598 | 5657 | 1-144 |
| | | | | | 199-788 |
| HEAAB77 | 112 | 574510 | AC063924 | 5658 | 1-365 |
| HEAAB77 | 112 | 574510 | AC009248 | 5659 | 1-365 |
| HEAAK46 | 113 | 574232 | AC023160 | 5660 | 1-864 |
| HEAAK46 | 113 | 574232 | AC023157 | 5661 | 1-675 |
| HEAAK46 | 113 | 574232 | AC023157 | 5662 | 1-413 |
| HEAAM16 | 114 | 574008 | AC036239 | 5663 | 1-354 |
| HEAAV10 | 120 | 968200 | AL031178 | 5664 | 1-591 |
| | | | | | 631-1516 |
| | | | | | 1572-2046 |
| | | | | | 2329-2724 |
| | | | | | 3570-3721 |
| | | | | | 4393-5225 |
| | | | | | 5256-5351 |
| | | | | | 5672-6501 |
| | | | | | 6686-7086 |
| | | | | | 8367-8855 |
| | | | | | 9380-9440 |
| HEAAV10 | 120 | 968200 | AL031178 | 5665 | 1-343 |
| | | | | | 411-542 |
| HEAAV10 | 120 | 968200 | AL031178 | 5666 | 1-1427 |
| HEEAD64 | 123 | 741305 | AC011457 | 5667 | 1-795 |
| | | | | | 2400-2512 |
| HEEAD64 | 123 | 741305 | AC006116 | 5668 | 1-795 |
| | | | | | 2400-2512 |
| HEEAD64 | 123 | 741305 | AC011457 | 5669 | 1-391 |
| HEEAD64 | 123 | 741305 | AC006116 | 5670 | 1-391 |
| HEEAH07 | 124 | 851219 | AC019039 | 5671 | 1-112 |
| HEEAK84 | 128 | 780838 | AC004549 | 5672 | 1-570 |
| HEEAK84 | 128 | 780838 | AC004549 | 5673 | 1-873 |
| HEEAL31 | 129 | 887312 | AP000872 | 5674 | 1-1131 |
| HEEAL31 | 129 | 887312 | AP001533 | 5675 | 1-1134 |
| HEEAL31 | 129 | 887312 | AC020735 | 5676 | 1-1130 |
| HEEAL31 | 129 | 887312 | AP000872 | 5677 | 1-523 |
| HEEAL31 | 129 | 887312 | AP001533 | 5678 | 1-527 |
| HEEAL31 | 129 | 887312 | AP001533 | 5679 | 1-330 |
| HEEAL31 | 129 | 887312 | AC020735 | 5680 | 1-330 |
| HEEAL31 | 129 | 887312 | AC020735 | 5681 | 1-527 |
| HEEAN24 | 130 | 676721 | AC073835 | 5682 | 1-519 |
| HEEAN24 | 130 | 676721 | AC012366 | 5683 | 1-656 |
| HEEAN24 | 130 | 676721 | AC012366 | 5684 | 1-633 |
| | | | | | 782-1160 |
| HEEAN24 | 130 | 676721 | AC073835 | 5685 | 1-379 |
| HEEAS58 | 131 | 735620 | AC022730 | 5686 | 1-562 |
| HEEAU79 | 132 | 706935 | AC069419 | 5687 | 1-744 |
| HEEAU79 | 132 | 706935 | AC011311 | 5688 | 1-744 |
| HEEAU79 | 132 | 706935 | AC011311 | 5689 | 1-316 |
| HEEAU79 | 132 | 706935 | AC011311 | 5690 | 1-500 |
| | | | | | 3112-3179 |
| | | | | | 3264-3366 |
| | | | | | 4303-4458 |
| | | | | | 5803-5999 |
| | | | | | 6173-6605 |
| | | | | | 7699-7818 |
| | | | | | 8085-8264 |
| | | | | | 12380-13064 |
| | | | | | 13449-14180 |
| | | | | | 14198-14750 |
| | | | | | 15016-15543 |
| | | | | | 15578-15659 |
| | | | | | 16183-16694 |
| | | | | | 17010-19286 |
| HBEAW01 | 133 | 851213 | AC003117 | 5691 | 1-384 |
| HEEAW01 | 133 | 851213 | AC003117 | 5692 | 1-289 |
| HEEAW13 | 134 | 656299 | AC005344 | 5693 | 1-1022 |
| HEEAW13 | 134 | 656299 | AC005344 | 5694 | 1-612 |
| HEEAW13 | 134 | 656299 | AC005344 | 5695 | 1-569 |
| HEGAA24 | 135 | 676716 | AC015818 | 5696 | 1-416 |
| HEGAA24 | 135 | 676716 | AC022319 | 5697 | 1-416 |
| HEGAA24 | 135 | 676716 | AC022596 | 5698 | 1-429 |
| HEGAA24 | 135 | 676716 | AC005324 | 5699 | 1-419 |
| HEGAA24 | 135 | 676716 | AL353996 | 5700 | 1-429 |
| HEGAA24 | 135 | 676716 | AC015818 | 5701 | 1-435 |
| HEGAA24 | 135 | 676716 | AC022596 | 5702 | 1-435 |
| HEGAA24 | 135 | 676716 | AC022319 | 5703 | 1-435 |
| HEGAA24 | 135 | 676716 | AC005324 | 5704 | 1-435 |
| HEGAA24 | 135 | 676716 | AL353996 | 5705 | 1-434 |
| HEGAB84 | 137 | 823900 | AC007040 | 5706 | 1-750 |
| | | | | | 1028-1687 |
| | | | | | 2050-2327 |
| | | | | | 3305-3352 |
| HEGAB84 | 137 | 823900 | AC007040 | 5707 | 1-513 |
| HEGAB84 | 137 | 823900 | AC007040 | 5708 | 1-745 |
| | | | | | 1107-1335 |
| HEGAC95 | 139 | 965183 | AC073320 | 5709 | 1-215 |
| | | | | | 450-550 |
| | | | | | 751-963 |
| | | | | | 1947-2154 |
| | | | | | 3417-3891 |
| | | | | | 4361-4477 |
| | | | | | 4682-5067 |
| | | | | | 5123-5417 |
| | | | | | 5449-5561 |
| | | | | | 5673-6658 |
| HEGAC95 | 139 | 965183 | AC073320 | 5710 | 1-100 |
| HEGAI82 | 140 | 955291 | AP000714 | 5711 | 1-650 |
| HEGAI82 | 140 | 955291 | AP000846 | 5712 | 1-115 |
| | | | | | 271-361 |
| | | | | | 1605-1883 |
| | | | | | 4909-5743 |
| | | | | | 6439-7086 |
| HEGAI82 | 140 | 955291 | AP000869 | 5713 | 1-113 |
| | | | | | 274-364 |
| | | | | | 1609-1887 |
| | | | | | 4913-5749 |
| | | | | | 6445-7388 |
| HEGAI82 | 140 | 955291 | AP000941 | 5714 | 1-316 |
| | | | | | 353-846 |
| | | | | | 1544-2355 |
| HEGAI82 | 140 | 955291 | AP000714 | 5715 | 1-104 |
| HEGAI82 | 140 | 955291 | AP000846 | 5716 | 1-421 |
| HEGAI82 | 140 | 955291 | AP000869 | 5717 | 1-421 |
| HEGAK04 | 141 | 887299 | AP001319 | 5718 | 1-790 |
| HEGAK04 | 141 | 887299 | AP000485 | 5719 | 1-789 |
| HEGAK04 | 141 | 887299 | AP001319 | 5720 | 1-471 |
| | | | | | 761-1159 |
| | | | | | 2076-2471 |
| | | | | | 3129-4172 |
| | | | | | 5710-6153 |
| HEGAK04 | 141 | 887299 | AP000485 | 5721 | 1-471 |
| HEGAK04 | 141 | 887299 | AP001319 | 5722 | 1-106 |
| HEGAK04 | 141 | 887299 | AP000485 | 5723 | 1-106 |
| HEGAO83 | 142 | 780837 | AC024009 | 5724 | 1-880 |
| | | | | | 1967-2289 |
| | | | | | 2746-2890 |
| | | | | | 3236-3284 |
| HEGAO83 | 142 | 780837 | AC040991 | 5725 | 1-880 |
| | | | | | 1967-2288 |
| | | | | | 2745-2889 |
| | | | | | 3235-3283 |
| HEGAO83 | 142 | 780837 | AC040991 | 5726 | 1-176 |
| HEGAP06 | 143 | 934705 | AC016324 | 5727 | 1-870 |
| HLGAP06 | 143 | 934705 | AC016324 | 5728 | 1-465 |
| HEGAP31 | 144 | 697419 | U73167 | 5729 | 1-462 |
| | | | | | 537-572 |
| | | | | | 1142-1632 |
| | | | | | 1720-2993 |
| | | | | | 3778-4687 |
| | | | | | 5675-5764 |
| | | | | | 5875-6565 |
| HEGAP31 | 144 | 697419 | U90094 | 5730 | 1-462 |
| | | | | | 537-572 |
| | | | | | 1142-1632 |
| | | | | | 1720-2993 |
| | | | | | 3778-4687 |
| | | | | | 5675-5764 |
| | | | | | 5875-6565 |
| HEGAP31 | 144 | 697419 | U73167 | 5731 | 1-47 |
| | | | | | 235-1145 |
| HEGAP31 144 | 697419 | U73167 | 5732 | 1-463 | |
| | | | | | 947-1439 |
| | | | | | 1459-1899 |
| | | | | | 1984-2068 |
| | | | | | 2160-2287 |
| | | | | | 2366-3007 |
| | | | | | 3094-3248 |
| | | | | | 3517-3657 |
| | | | | | 3744-3873 |
| | | | | | 3944-4147 |
| | | | | | 4183-4867 |
| HEGAP31 | 144 | 697419 | U90094 | 5733 | 1-463 |
| | | | | | 947-1439 |
| | | | | | 1459-1899 |
| | | | | | 1984-2068 |
| | | | | | 2160-2287 |
| | | | | | 2366-3007 |
| | | | | | 3094-3248 |
| | | | | | 3517-3657 |
| | | | | | 3744-3873 |
| | | | | | 3944-4147 |
| | | | | | 4183-4867 |
| HEGAP31 | 144 | 697419 | U90094 | 5734 | 1-47 |
| | | | | | 235-1145 |
| HEGAP36 | 145 | 706951 | AL160314 | 5735 | 1-558 |
| HEGAP36 | 145 | 706951 | AC023226 | 5736 | 1-558 |
| HEGAP36 | 145 | 706951 | AL160314 | 5737 | 1-316 |
| HEGAP36 | 145 | 706951 | AC023226 | 5738 | 1-194 |
| HEGAY32 | 147 | 699906 | AP000759 | 5739 | 1-156 |
| | | | | | 199-2013 |
| HEGAY52 | 148 | 726316 | AC004863 | 5740 | 1-272 |
| | | | | | 2151-2257 |
| | | | | | 4711-4808 |
| | | | | | 5669-5932 |
| HEGAY52 | 148 | 726316 | AC004863 | 5741 | 1-517 |
| HEGAY52 | 148 | 726316 | AC004863 | 5742 | 1-307 |
| HEPAA44 | 150 | 509456 | AP002440 | 5743 | 1-554 |
| HEPAD40 | 153 | 509002 | AC022486 | 5744 | 1-599 |
| HEPAD40 | 153 | 509002 | AC007379 | 5745 | 1-599 |
| HEPAD40 | 153 | 509002 | AC068541 | 5746 | 1-599 |
| HEPAD82 | 154 | 509452 | AC012054 | 5747 | 1-199 |
| HEPAD82 | 154 | 509452 | AC012054 | 5748 | 1-367 |
| HEPAK41 | 157 | 925146 | AL355987 | 5749 | 1-1171 |
| | | | | | 2141-2215 |
| | | | | | 2661-2998 |
| | | | | | 3515-3894 |
| HEPAK41 | 157 | 925146 | AL355987 | 5750 | 1-412 |
| HEPAM29 | 158 | 508706 | AC068515 | 5751 | 1-403 |
| HEPAM29 | 158 | 508706 | AC012256 | 5752 | 1-629 |
| HEPAN19 | 159 | 508694 | AC018422 | 5753 | 1-656 |
| HEPAN19 | 159 | 508694 | AC018422 | 5754 | 1-488 |
| HEPAP02 | 160 | 926914 | AC005041 | 5755 | 1-68 |
| | | | | | 87-493 |
| | | | | | 711-838 |
| | | | | | 997-1167 |
| | | | | | 2227-2960 |
| | | | | | 3326-4641 |
| | | | | | 4768-5786 |
| HEPAP02 | 160 | 926914 | AC005041 | 5756 | 1-2920 |
| | | | | | 3439-3667 |
| | | | | | 3839-4332 |
| HEPAP02 | 160 | 926914 | AC005041 | 5757 | 1-143 |
| HEPAP12 | 161 | 968771 | AC022123 | 5758 | 1-704 |
| HEPAS44 | 162 | 884083 AC005042 | 5759 | 1-526 | |
| | | | | | 2088-2310 |
| | | | | | 2826-3158 |
| | | | | | 3165-3449 |
| | | | | | 3645-4062 |
| | | | | | 5680-6042 |
| | | | | | 9261-9489 |
| | | | | | 9723-10014 |
| | | | | | 10575-10710 |
| | | | | | 12839-14011 |
| | | | | | 17421-17570 |
| | | | | | 17625-17808 |
| | | | | | 19953-20102 |
| | | | | | 20972-21402 |
| | | | | | 21801-22496 |
| | | | | | 23146-23452 |
| | | | | | 25891-26147 |
| | | | | | 27915-28163 |
| | | | | | 36900-37086 |
| | | | | | 40102-40222 |
| | | | | | 40334-40438 |
| | | | | | 41262-41858 |
| | | | | | 42042-42215 |
| | | | | | 44623-45334 |
| | | | | | 45461-45648 |
| | | | | | 47989-48685 |
| | | | | | 52151-52529 |
| | | | | | 52651-52771 |
| | | | | | 55505-56703 |
| | | | | | 57348-57424 |
| | | | | | 58261-58444 |
| | | | | | 58449-58644 |
| | | | | | 58759-59136 |
| | | | | | 59195-60637 |
| HEPAS44 | 162 | 884083 | AC005042 | 5760 | 1-505 |
| HEPBB24 | 164 | 508684 | AC010862 | 5761 | 1-649 |
| HEPBB24 | 164 | 508684 | AC010862 | 5762 | 1-345 |
| HEPBB60 | 165 | 855597 | AC021139 | 5763 | 1-570 |
| HEPBB60 | 165 | 855597 | AC021139 | 5764 | 1-373 |
| HEPBG26 | 166 | 967921 | AL117692 | 5765 | 1-362 |
| HEPBG26 | 166 | 967921 | AL117692 | 5766 | 1-680 |
| HEPBG35 | 167 | 508686 | AL390242 | 5767 | 1-235 |
| HEPBG35 | 167 | 508686 | AC073965 | 5768 | 1-758 |
| HEPBG35 | 167 | 508686 | AL357055 | 5769 | 1-522 |
| HEPBG35 | 167 | 508686 | AC006286 | 5770 | 1-759 |
| HEPBG35 | 167 | 508686 | AL357055 | 5771 | 1-307 |
| HEPBG35 | 167 | 508686 | AC073965 | 5772 | 1-308 |
| HEPBG35 | 167 | 508686 | AC006286 | 5773 | 1-307 |
| HEPBH38 | 169 | 707524 | AC021881 | 5774 | 1-353 |
| HEPBO69 | 171 | 888697 | AC004464 | 5775 | 1-565 |
| HEPBQ47 | 172 | 713836 | AC015624 | 5776 | 1-243 |
| HEPBQ47 | 172 | 713836 | AC011743 | 5777 | 1-94 |
| | | | | | 853-988 |
| | | | | | 2270-2334 |
| | | | | | 3850-4276 |
| | | | | | 4554-4835 |
| | | | | | 5824-5974 |
| | | | | | 7894-8034 |
| | | | | | 9229-9353 |
| | | | | | 10526-10939 |
| | | | | | 11126-11250 |
| | | | | | 12266-13223 |
| HEPBQ47 | 172 | 713836 | AC009948 | 5778 | 1-125 |
| | | | | | 1141-2098 |
| HEPBQ47 | 172 | 713836 | AC011743 | 5779 | 1-238 |
| HEPBQ47 | 172 | 713836 | AC009948 | 5780 | 1-414 |
| HEPBQ47 | 172 | 713836 | AC011743 | 5781 | 1-914 |
| HEPBQ47 | 172 | 713836 | AC009948 | 5782 | 1-914 |
| HEPBQ69 | 173 | 888693 | AC011799 | 5783 | 1-573 |
| HEPBQ69 | 173 | 888693 | AC011799 | 5784 | 1-413 |
| HEPCD36 | 176 | 523670 | AC009789 | 5785 | 1-379 |
| | | | | | 503-587 |
| | | | | | 1930-2188 |
| | | | | | 3201-5184 |
| HEPCD36 | 176 | 523670 | AC009789 | 5786 | 1-513 |
| HEPCD36 | 176 | 523670 | AC009789 | 5787 | 1-270 |
| HEPCE25 | 177 | 529343 | AL121747 | 5788 | 1-823 |
| HEPCE25 | 177 | 529343 | AL034548 | 5789 | 1-823 |
| HEPCE25 | 177 | 529343 | AL121747 | 5790 | 1-277 |
| HEPCE25 | 177 | 529343 | AL034548 | 5791 | 1-277 |
| HEPCE25 | 177 | 529343 | AL121747 | 5792 | 1-2350 |
| HEPCE25 | 177 | 529343 | AL034548 | 5793 | 1-2350 |
| HEPCO59 | 178 | 761094 | AC025879 | 5794 | 1-1719 |
| HEPCO59 | 178 | 761094 | AC025879 | 5795 | 1-457 |
| HEPCT32 | 179 | 947081 | AC010458 | 5796 | 1-95 |
| HETAD29 | 186 | 509311 | AP001043 | 5797 | 1-816 |
| HETAD29 | 186 | 509311 | AP001042 | 5798 | 1-810 |
| HETAD29 | 186 | 509311 | AF017257 | 5799 | 1-816 |
| HETAF20 | 187 | 509308 | AC002357 | 5800 | 1-143 |
| | | | | | 3480-3539 |
| | | | | | 5870-5907 |
| | | | | | 9786-9929 |
| | | | | | 11763-11888 |
| | | | | | 14141-14317 |
| | | | | | 14874-15265 |
| | | | | | 16913-17243 |
| | | | | | 17405-17765 |
| | | | | | 18111-18491 |
| | | | | | 18570-19232 |
| | | | | | 19921-20301 |
| | | | | | 20521-21086 |
| | | | | | 21437-21767 |
| | | | | | 22569-25231 |
| HETAF89 | 189 | 509300 | AF209069 | 5801 | 1-42 |
| | | | | | 627-676 |
| | | | | | 926-1197 |
| | | | | | 2577-2756 |
| | | | | | 3159-3250 |
| | | | | | 3354-3404 |
| | | | | | 3563-3766 |
| | | | | | 4737-4811 |
| | | | | | 4915-5019 |
| | | | | | 5614-5717 |
| | | | | | 5891-6054 |
| | | | | | 6953-10137 |
| | | | | | 10601-11304 |
| HETAF89 | 189 | 509300 | AF209069 | 5802 | 1-282 |
| HETAH66 | 191 | 799665 | AL359837 | 5803 | 1-152 |
| | | | | | 1095-1459 |
| | | | | | 1529-1686 |
| | | | | | 1768-2184 |
| | | | | | 3567-3774 |
| HETAH66 | 191 | 799665 | AC022000 | 5804 | 1-152 |
| | | | | | 1095-1459 |
| | | | | | 1529-1686 |
| | | | | | 1768-2183 |
| | | | | | 3566-3773 |
| HETAH66 | 191 | 799665 | AL359837 | 5805 | 1-219 |
| HETAH66 | 191 | 799665 | AC022000 | 5806 | 1-219 |
| HETAJ26 | 193 | 508994 | AC020735 | 5807 | 1-319 |
| HETAJ26 | 193 | 508994 | AP000625 | 5808 | 1-319 |
| HETAJ26 | 193 | 508994 | AP001316 | 5809 | 1-319 |
| HETAJ26 | 193 | 508994 | AP000625 | 5810 | 1-235 |
| HETAJ26 | 193 | 508994 | AC020735 | 5811 | 1-235 |
| HETAJ26 | 193 | 508994 | AP001316 | 5812 | 1-235 |
| HETAN20 | 195 | 535359 | AC008073 | 5813 | 1-1294 |
| | | | | | 3599-3707 |
| | | | | | 4513-4798 |
| | | | | | 5381-5564 |
| | | | | | 5925-6561 |
| | | | | | 8244-8701 |
| | | | | | 8863-8961 |
| | | | | | 10664-10831 |
| | | | | | 11576-11793 |
| | | | | | 12389-12512 |
| | | | | | 13290-13372 |
| | | | | | 16310-16396 |
| | | | | | 16608-17366 |
| | | | | | 17426-17785 |
| | | | | | 17827-19011 |
| HETAN20 | 195 | 535359 | AC009228 | 5814 | 1-1294 |
| | | | | | 3599-3707 |
| | | | | | 4513-4798 |
| | | | | | 5381-5564 |
| | | | | | 5925-6561 |
| | | | | | 8244-8701 |
| | | | | | 8863-8961 |
| | | | | | 10664-10831 |
| | | | | | 11576-11793 |
| | | | | | 12389-12512 |
| | | | | | 13290-13372 |
| | | | | | 16310-16396 |
| | | | | | 16608-17366 |
| | | | | | 17426-17785 |
| | | | | | 17827-19011 |
| HETAN20 | 195 | 535359 | AC008073 | 5815 | 1-164 |
| HETAN20 | 195 | 535359 | AC009228 | 5816 | 1-164 |
| HETAN20 | 195 | 535359 | AC008073 | 5817 | 1-276 |
| HETAN20 | 195 | 535359 | AC009228 | 5818 | 1-276 |
| HETAP59 | 196 | 509118 | AL133312 | 5819 | 1-1081 |
| HETAP59 | 196 | 509118 | AL135752 | 5820 | 1-743 |
| | | | | | 933-2013 |
| HETAP59 | 196 | 509118 | AL135752 | 5821 | 1-90 |
| | | | | | 528-930 |
| | | | | | 3903-3971 |
| HETAR06 | 198 | 960839 | AC022399 | 5822 | 1-734 |
| | | | | | 1441-2849 |
| HETAR06 | 198 | 960839 | AP000893 | 5823 | 1-735 |
| | | | | | 1442-2850 |
| HETAR60 | 199 | 934444 | AC026407 | 5824 | 1-219 |
| | | | | | 636-859 |
| | | | | | 1024-1742 |
| | | | | | 1914-2559 |
| | | | | | 3181-3527 |
| | | | | | 3853-5646 |
| HETAR60 | 199 | 934444 | AC011394 | 5825 | 1-646 |
| | | | | | 1267-1613 |
| | | | | | 1934-3732 |
| HETAR60 | 199 | 934444 | AC011394 | 5826 | 1-719 |
| HETAZ13 | 201 | 536192 | AL359915 | 5827 | 1-328 |
| HETAZ13 | 201 | 536192 | AL359915 | 5828 | 1-183 |
| HETAZ13 | 201 | 536192 | AL359915 | 5829 | 1-540 |
| HETBA01 | 202 | 509189 | AL356965 | 5830 | 1-286 |
| | | | | | 549-787 |
| | | | | | 873-1395 |
| | | | | | 4371-5746 |
| HETBA01 | 202 | 509189 | AL356965 | 5831 | 1-608 |
| HETBF45 | 203 | 508655 | AC025187 | 5832 | 1-330 |
| HETBF45 | 203 | 508655 | AC034218 | 5833 | 1-330 |
| HETBF45 | 203 | 508655 | AC025187 | 5834 | 1-145 |
| HETBF45 | 203 | 508655 | AC034218 | 5835 | 1-145 |
| HETBH48 | 204 | 720853 | AC021230 | 5836 | 1-311 |
| HETBH48 | 204 | 720853 | AL390840 | 5837 | 1-311 |
| HETBH48 | 204 | 720853 | AL355523 | 5838 | 1-311 |
| HETBH48 | 204 | 720853 | AC021230 | 5839 | 1-264 |
| HETBH48 | 204 | 720853 | AL390840 | 5840 | 1-264 |
| HETBH48 | 204 | 720853 | AC021230 | 5841 | 1-353 |
| HETBH48 | 204 | 720853 | AL355523 | 5842 | 1-264 |
| HETBH48 | 204 | 720853 | AL390840 | 5843 | 1-354 |
| HETBH48 | 204 | 720853 | AL355523 | 5844 | 1-236 |
| | | | | | 264-294 |
| HETCH92 | 210 | 921390 | AC019233 | 5845 | 1-244 |
| HETCH92 | 210 | 921390 | AC019233 | 5846 | 1-193 |
| HETDD18 | 213 | 509110 | AC072058 | 5847 | 1-421 |
| HETDD18 | 213 | 509110 | AC025218 | 5848 | 1-421 |
| HETDD18 | 213 | 509110 | AC025218 | 5849 | 1-1149 |
| HETDE67 | 214 | 883018 | AC037444 | 5850 | 1-531 |
| HETDE67 | 214 | 883018 | AC010679 | 5851 | 1-531 |
| HETDE67 | 214 | 883018 | AC037444 | 5852 | 1-604 |
| | | | | | 1500-1699 |
| | | | | | 2148-2589 |
| | | | | | 2820-3674 |
| | | | | | 3750-4272 |
| | | | | | 4335-4872 |
| | | | | | 5843-6194 |
| | | | | | 6565-6670 |
| | | | | | 6675-7299 |
| | | | | | 7494-8026 |
| | | | | | 8163-8907 |
| HETDE67 | 214 | 883018 | AC010679 | 5853 | 1-604 |
| | | | | | 1500-1699 |
| | | | | | 2148-2589 |
| | | | | | 2820-3674 |
| | | | | | 3750-4272 |
| | | | | | 4335-4872 |
| | | | | | 5843-6194 |
| | | | | | 6565-6670 |
| | | | | | 6675-7299 |
| | | | | | 7494-8026 |
| | | | | | 8163-8907 |
| HETDL92 | 218 | 508990 | AC074236 | 5854 | 1-264 |
| HETDL92 | 218 | 508990 | AC074236 | 5855 | 1-435 |
| HETDN90 | 219 | 695021 | AC025545 | 5856 | 1-259 |
| HETDN90 | 219 | 695021 | AC069523 | 5857 | 1-258 |
| HETDN90 | 219 | 695021 | AC025545 | 5858 | 1-465 |
| | | | | | 616-1158 |
| HETDN90 | 219 | 695021 | AC069523 | 5859 | 1-114 |
| | | | | | 2644-2745 |
| HETDN90 | 219 | 695021 | AC069523 | 5860 | 1-791 |
| | | | | | 942-1485 |
| HETDW59 | 222 | 827093 | AL121780 | 5861 | 1-284 |
| HETDW59 | 222 | 827093 | AL121900 | 5862 | 1-284 |
| HETDW59 | 222 | 827093 | AL121780 | 5863 | 1-465 |
| HETDW59 | 222 | 827093 | AL121780 | 5864 | 1-310 |
| HETDW59 | 222 | 827093 | AL121900 | 5865 | 1-465 |
| HETDW59 | 222 | 827093 | AL121900 | 5866 | 1-310 |
| HETEB68 | 223 | 917400 | AC011031 | 5867 | 1-102 |
| | | | | | 1406-1757 |
| | | | | | 2809-2924 |
| | | | | | 3135-3217 |
| | | | | | 3311-4155 |
| HETEB68 | 223 | 917400 | AC011031 | 5868 | 1-568 |
| | | | | | 768-1144 |
| HETEB68 | 223 | 917400 | AC011031 | 5869 | 1-182 |
| HETEZ43 | 225 | 529591 | AL034400 | 5870 | 1-163 |
| | | | | | 5267-5398 |
| | | | | | 5504-5654 |
| | | | | | 6565-6700 |
| | | | | | 7275-7412 |
| | | | | | 8080-8260 |
| | | | | | 8342-10872 |
| HETEZ43 | 225 | 529591 | AL034400 | 5871 | 1-497 |
| HETFA40 | 226 | 523112 | AL358813 | 5872 | 1-474 |
| HETFA40 | 226 | 523112 | AC025992 | 5873 | 1-1759 |
| HETFA40 | 226 | 523112 | AL162612 | 5874 | 1-1431 |
| | | | | | 1501-1692 |
| | | | | | 1855-3146 |
| | | | | | 3686-4006 |
| | | | | | 4703-6498 |
| HETFA40 | 226 | 523112 | AL356957 | 5875 | 1-502 |
| HETFA40 | 226 | 523112 | AC018593 | 5876 | 1-1430 |
| | | | | | 1500-1691 |
| | | | | | 1854-3144 |
| | | | | | 3684-3985 |
| | | | | | 4696-6493 |
| HETFA40 | 226 | 523112 | AL137798 | 5877 | 1-1194 |
| HETFA40 | 226 | 523112 | AL021920 | 5878 | 1-1194 |
| HETFA40 | 226 | 523112 | AC021338 | 5879 | 1-1194 |
| HETFA40 | 226 | 523112 | AL358813 | 5880 | 1-756 |
| HETFA40 | 226 | 523112 | AC025992 | 5881 | 1-302 |
| HETFA40 | 226 | 523112 | AL162612 | 5882 | 1-384 |
| HETFA40 | 226 | 523112 | AL162612 | 5883 | 1-850 |
| HETFA40 | 226 | 523112 | AL356957 | 5884 | 1-321 |
| HETFA40 | 226 | 523112 | AL356957 | 5885 | 1-415 |
| HETFA40 | 226 | 523112 | AC018593 | 5886 | 1-332 |
| HETFA40 | 226 | 523112 | AL137798 | 5887 | 1-144 |
| | | | | | 677-1009 |
| HETFA40 | 226 | 523112 | AC018593 | 5888 | 1-1496 |
| HETFA40 | 226 | 523112 | AL137798 | 5889 | 1-266 |
| HETFA40 | 226 | 523112 | AL021920 | 5890 | 1-130 |
| HETFA40 | 226 | 523112 | AL021920 | 5891 | 1-266 |
| HETFA40 | 226 | 523112 | AC021338 | 5892 | 1-340 |
| HETFC82 | 227 | 799658 | AC003117 | 5893 | 1-798 |
| HETFC82 | 227 | 799658 | AC003117 | 5894 | 1-4842 |
| HETFI81 | 231 | 523398 | AC007405 | 5895 | 1-39 |
| | | | | | 892-1999 |
| | | | | | 2103-2501 |
| | | | | | 3264-3326 |
| | | | | | 6690-6768 |
| | | | | | 7849-8001 |
| | | | | | 8366-8551 |
| | | | | | 8558-8601 |
| | | | | | 9768-9873 |
| | | | | | 10994-11103 |
| | | | | | 12261-12621 |
| | | | | | 12779-12873 |
| | | | | | 13681-15129 |
| HETFI81 | 231 | 523398 | AC007405 | 5896 | 1-194 |
| HETHD30 | 241 | 935175 | AC021808 | 5897 | 1-330 |
| | | | | | 1298-2514 |
| | | | | | 2943-2975 |
| HETHD30 | 241 | 935175 | AC021808 | 5898 | 1-312 |
| HETHE56 | 242 | 974348 | AC007334 | 5899 | 1-1691 |
| HETHE56 | 242 | 974348 | AC007608 | 5900 | 1-1691 |
| HETHE56 | 242 | 974348 | AC007334 | 5901 | 1-1017 |
| | | | | | 1671-2298 |
| | | | | | 2580-3268 |
| HETHE56 | 242 | 974348 | AC007334 | 5902 | 1-56 |
| | | | | | 840-2379 |
| HETHE56 | 242 | 974348 | AC007608 | 5903 | 1-1017 |
| | | | | | 1671-2298 |
| | | | | | 2580-3268 |
| HETHE56 | 242 | 974348 | AC007608 | 5904 | 1-56 |
| | | | | | 840-2379 |
| HETHH49 | 243 | 967737 | AC015645 | 5905 | 1-627 |
| HETHH49 | 243 | 967737 | AC009700 | 5906 | 1-77 |
| | | | | | 214-306 |
| | | | | | 404-519 |
| | | | | | 1182-1825 |
| | | | | | 6494-6614 |
| HETHH49 | 243 | 967737 | AC009700 | 5907 | 1-322 |
| HETHH49 | 243 | 967737 | AC009700 | 5908 | 1-309 |
| HETHO78 | 245 | 963592 | AC009789 | 5909 | 1-1348 |
| HETHO78 | 245 | 963592 | AC009789 | 5910 | 1-517 |
| HETHR24 | 246 | 851412 | AC024555 | 5911 | 1-65 |
| | | | | | 1322-1814 |
| | | | | | 1879-2084 |
| | | | | | 2488-3174 |
| | | | | | 3624-4306 |
| | | | | | 4653-4875 |
| | | | | | 5942-7911 |
| HETHR24 | 246 | 851412 | AL356796 | 5912 | 1-206 |
| | | | | | 610-1296 |
| | | | | | 1746-2428 |
| | | | | | 2774-2996 |
| | | | | | 4063-5628 |
| HETHR24 | 246 | 851412 | AL356796 | 5913 | 1-493 |
| HETHT53 | 247 | 974555 | AL049750 | 5914 | 1-611 |
| HETHT53 | 247 | 974555 | Z69905 | 5915 | 1-611 |
| HETIF01 | 248 | 966185 | AC016135 | 5916 | 1-845 |
| HETIF01 | 248 | 966185 | AC018512 | 5917 | 1-776 |
| HETIF01 | 248 | 966185 | AC002518 | 5918 | 1-150 |
| HETIG71 | 249 | 974359 | AC009528 | 5919 | 1-558 |
| | | | | | 1659-1824 |
| HETIG71 | 249 | 974359 | AC009528 | 5920 | 1-316 |
| HETIU60 | 253 | 739804 | AC022922 | 5921 | 1-726 |
| HETIU60 | 253 | 739804 | AC022922 | 5922 | 1-103 |
| HETJD86 | 256 | 909130 | AC019027 | 5923 | 1-675 |
| HETJD86 | 256 | 909130 | AL049869 | 5924 | 1-233 |
| | | | | | 2467-2605 |
| | | | | | 3956-4685 |
| | | | | | 4819-5326 |
| | | | | | 5669-6024 |
| | | | | | 6878-10901 |
| HETJD86 | 256 | 909130 | AC019027 | 5925 | 1-3169 |
| HETJD86 | 256 | 909130 | AL049869 | 5926 | 1-165 |
| HETJI32 | 258 | 806435 | AL021997 | 5927 | 1-1175 |
| HETJI32 | 258 | 806435 | AL358785 | 5928 | 1-1175 |
| HETJK67 | 259 | 751072 | AL158821 | 5929 | 1-506 |
| HETIN51 | 260 | 767932 | AC012135 | 5930 | 1-562 |
| HETIN51 | 260 | 767932 | AL160153 | 5931 | 1-562 |
| HETIN51 | 260 | 767932 | AC012135 | 5932 | 1-469 |
| HETIN51 | 260 | 767932 | AC012135 | 5933 | 1-58 |
| | | | | | 2070-2379 |
| | | | | | 2778-3068 |
| | | | | | 3566-4200 |
| | | | | | 4240-6571 |
| | | | | | 6587-7743 |
| | | | | | 7870-9821 |
| HETIN51 | 260 | 767932 | AL160153 | 5934 | 1-58 |
| | | | | | 2070-2379 |
| | | | | | 2778-3068 |
| | | | | | 3566-4200 |
| | | | | | 4240-6572 |
| | | | | | 6588-7744 |
| | | | | | 7871-9824 |
| HETIN51 | 260 | 767932 | AL160153 | 5935 | 1-469 |
| HETJT95 | 261 | 789310 | AP001961 | 5936 | 1-788 |
| | | | | | 872-1462 |
| HETJT95 | 261 | 789310 | AP001961 | 5937 | 1-158 |
| | | | | | 423-565 |
| | | | | | 2290-2739 |
| HETJX04 | 262 | 927120 | AL390040 | 5938 | 1-54 |
| | | | | | 340-441 |
| | | | | | 969-1131 |
| | | | | | 3544-3961 |
| | | | | | 5786-5896 |
| | | | | | 7026-7372 |
| | | | | | 7541-8076 |
| | | | | | 8303-8737 |
| | | | | | 10369-10513 |
| | | | | | 10949-11077 |
| | | | | | 11323-13046 |
| HETJX04 | 262 | 927120 | AL390040 | 5939 | 1-616 |
| | | | | | 881-994 |
| HETJY11 | 263 | 966194 | AC016653 | 5940 | 1-112 |
| HETJY11 | 263 | 966194 | AL353659 | 5941 | 1-44 |
| | | | | | 263-3729 |
| HETKG67 | 265 | 974355 | AC055774 | 5942 | 1-732 |
| HETKH01 | 266 | 915320 | AC022922 | 5943 | 1-726 |
| HETKH01 | 266 | 915320 | AC022922 | 5944 | 1-103 |
| HETKQ65 | 269 | 855449 | AC002098 | 5945 | 1-106 |
| | | | | | 632-766 |
| | | | | | 1032-1392 |
| | | | | | 1896-2014 |
| | | | | | 2340-2921 |
| | | | | | 3822-3955 |
| HETKQ65 | 269 | 855449 | AC002320 | 5946 | 1-103 |
| | | | | | 629-763 |
| | | | | | 1029-1389 |
| | | | | | 1893-2007 |
| | | | | | 2337-2918 |
| | | | | | 3819-3952 |
| HETKX91 | 271 | 789797 | AC026967 | 5947 | 1-641 |
| HETKX91 | 271 | 789797 | AC073356 | 5948 | 1-641 |
| HETKX91 | 271 | 789797 | AC068762 | 5949 | 1-641 |
| HETLB04 | 273 | 920894 | AC019073 | 5950 | 1-780 |
| | | | | | 5430-5615 |
| | | | | | 7641-7685 |
| | | | | | 10826-10887 |
| | | | | | 11255-11332 |
| | | | | | 12359-12669 |
| | | | | | 13590-13776 |
| | | | | | 16097-16197 |
| | | | | | 16225-16569 |
| | | | | | 17409-17588 |
| | | | | | 17614-18145 |
| | | | | | 18212-18277 |
| | | | | | 20025-20135 |
| | | | | | 21203-21289 |
| | | | | | 21668-21798 |
| | | | | | 22067-22836 |
| | | | | | 22902-23233 |
| | | | | | 23289-24983 |
| HETLB04 | 273 | 920894 | AC009079 | 5951 | 1-780 |
| | | | | | 1966-2659 |
| | | | | | 5432-5617 |
| | | | | | 7643-7687 |
| | | | | | 10830-10891 |
| | | | | | 11259-11336 |
| | | | | | 12363-12673 |
| | | | | | 13594-13780 |
| | | | | | 16101-16201 |
| | | | | | 16229-16573 |
| | | | | | 17510-17593 |
| | | | | | 17618-18149 |
| | | | | | 18216-18281 |
| | | | | | 20020-20130 |
| | | | | | 21198-21284 |
| | | | | | 21663-21793 |
| | | | | | 22060-22829 |
| | | | | | 22895-23226 |
| | | | | | 23282-24977 |
| HETLB04 | 273 | 920894 | AC019073 | 5952 | 1-464 |
| HETLB04 | 273 | 920894 | AC009079 | 5953 | 1-454 |
| HETLH89 | 274 | 786458 | AC067828 | 5954 | 1-788 |
| HETLH89 | 274 | 786458 | AC019036 | 5955 | 1-788 |
| HETLH89 | 274 | 786458 | AC067828 | 5956 | 1-1399 |
| HETLH89 | 274 | 786458 | AC019036 | 5957 | 1-1399 |
| HETLM46 | 275 | 974361 | AC006478 | 5958 | 1-445 |
| HETLM46 | 275 | 974361 | AC018701 | 5959 | 1-445 |
| HETLM46 | 275 | 974361 | AC006478 | 5960 | 1-564 |
| HETLM46 | 275 | 974361 | AC018701 | 5961 | 1-564 |
| HJMAZ84 | 277 | 919847 | AC026443 | 5962 | 1-611 |
| | | | | | 670-740 |
| | | | | | 1340-1557 |
| | | | | | 3026-3108 |
| | | | | | 3944-4508 |
| HJMAZ84 | 277 | 919847 | AC025183 | 5963 | 1-611 |
| | | | | | 670-740 |
| | | | | | 1340-1557 |
| | | | | | 3025-3107 |
| | | | | | 3942-5084 |
| HJMAZ84 | 277 | 919847 | AC025181 | 5964 | 1-611 |
| | | | | | 670-740 |
| | | | | | 1342-1559 |
| | | | | | 3027-3109 |
| | | | | | 3945-5087 |
| HJMAZ84 | 277 | 919847 | AC025183 | 5965 | 1-468 |
| HJMAZ84 | 277 | 919847 | AC026443 | 5966 | 1-775 |
| HJMAZ84 | 277 | 919847 | AC025181 | 5967 | 1-468 |
| HJMAZ84 | 277 | 919847 | AC025183 | 5968 | 1-775 |
| HJMAZ84 | 277 | 919847 | AC025181 | 5969 | 1-775 |
| HLMNG77 | 279 | 675752 | AC020663 | 5970 | 1-984 |
| | | | | | 1841-2130 |
| | | | | | 2448-2547 |
| | | | | | 2956-3100 |
| | | | | | 4344-4618 |
| | | | | | 5421-5525 |
| | | | | | 5635-6174 |
| | | | | | 6314-6432 |
| | | | | | 6805-7332 |
| | | | | | 8210-8382 |
| | | | | | 8813-9096 |
| | | | | | 9125-9321 |
| | | | | | 9861-10195 |
| | | | | | 11530-11672 |
| | | | | | 12829-13010 |
| | | | | | 14776-14925 |
| HLMNG77 | 279 | 675752 | AC020663 | 5971 | 1-265 |
| HLWAB50 | 280 | 856552 | AC016118 | 5972 | 1-100 |
| | | | | | 169-643 |
| | | | | | 832-1541 |
| HLWAB50 | 280 | 856552 | AC008728 | 5973 | 1-100 |
| | | | | | 169-643 |
| | | | | | 832-1541 |
| HLWAB50 | 280 | 856552 | AC016118 | 5974 | 1-377 |
| HLWAB50 | 280 | 856552 | AC008728 | 5975 | 1-377 |
| HLWAB50 | 280 | 856552 | AC016118 | 5976 | 1-456 |
| HLWAB50 | 280 | 856552 | AC008728 | 5977 | 1-456 |
| HLWAG51 | 282 | 964389 | AJ011929 | 5978 | 1-5280 |
| | | | | | 5382-8031 |
| HLWAG51 | 282 | 964389 | AJ011929 | 5979 | 1-670 |
| HLWAG51 | 282 | 964389 | AJ011929 | 5980 | 1-1129 |
| HLWAI13 | 284 | 920690 | AC004231 | 5981 | 1-312 |
| | | | | | 317-624 |
| | | | | | 688-1215 |
| | | | | | 5956-6044 |
| | | | | | 6120-6407 |
| | | | | | 7321-7475 |
| | | | | | 8363-8506 |
| | | | | | 8805-8969 |
| | | | | | 9050-9175 |
| | | | | | 10077-10484 |
| | | | | | 11276-11769 |
| | | | | | 11834-12061 |
| | | | | | 12345-12806 |
| | | | | | 12905-12943 |
| | | | | | 13049-13430 |
| | | | | | 13835-14718 |
| HLWAI13 | 284 | 920690 | AC004231 | 5982 | 1-101 |
| HLWAK94 | 287 | 715727 | AC006513 | 5983 | 1-457 |
| | | | | | 2320-4404 |
| | | | | | 4427-5879 |
| | | | | | 5900-7022 |
| | | | | | 7041-9197 |
| | | | | | 9625-9717 |
| HLWAR78 | 289 | 723330 | AC008741 | 5984 | 1-554 |
| | | | | | 1019-1282 |
| HLWAR78 | 289 | 723330 | AC011271 | 5985 | 1-554 |
| | | | | | 1019-1282 |
| HLWAR78 | 289 | 723330 | AC008741 | 5986 | 1-7073 |
| HLWAR78 | 289 | 723330 | AC011271 | 5987 | 1-7072 |
| HLWAR78 | 289 | 723330 | AC008741 | 5988 | 1-331 |
| HLWAR78 | 289 | 723330 | AC011271 | 5989 | 1-331 |
| HLWAU18 | 290 | 666273 | AC023255 | 5990 | 1-153 |
| HLWAU18 | 290 | 666273 | AC016839 | 5991 | 1-163 |
| HLWAU18 | 290 | 666273 | AC009648 | 5992 | 1-182 |
| HLWAU18 | 290 | 666273 | AC007194 | 5993 | 1-134 |
| HLWAU18 | 290 | 666273 | AC040991 | 5994 | 1-110 |
| HLWAU18 | 290 | 666273 | AC016839 | 5995 | 1-365 |
| HLWBA25 | 292 | 677944 | AP001629 | 5996 | 1-789 |
| | | | | | 792-2201 |
| HLWBA25 | 292 | 677944 | AP001629 | 5997 | 1-168 |
| HLWBE31 | 293 | 934562 | AC018355 | 5998 | 1-334 |
| HLWBE31 | 293 | 934562 | AC034187 | 5999 | 1-334 |
| HLWBE31 | 293 | 934562 | AC025210 | 6000 | 1-334 |
| HLWBE31 | 293 | 934562 | AC018355 | 6001 | 1-415 |
| HLWBE31 | 293 | 934562 | AC034187 | 6002 | 1-472 |
| HLWBE31 | 293 | 934562 | AC025210 | 6003 | 1-415 |
| HLWBE31 | 293 | 934562 | AC018355 | 6004 | 1-472 |
| HLWBE31 | 293 | 934562 | AC034187 | 6005 | 1-415 |
| HLWBE31 | 293 | 934562 | AC025210 | 6006 | 1-471 |
| HLWBE92 | 294 | 791362 | AC020779 | 6007 | 1-1023 |
| | | | | | 1224-2000 |
| HLWBE92 | 294 | 791362 | AC020779 | 6008 | 1-469 |
| HLWBE92 | 294 | 791362 | AC020779 | 6009 | 1-292 |
| HLWBJ02 | 295 | 919639 | AL133404 | 6010 | 1-377 |
| HLWBJ02 | 295 | 919639 | AL133404 | 6011 | 1-1203 |
| HLWBK40 | 296 | 711000 | AP000813 | 6012 | 1-438 |
| HLWBK40 | 296 | 711000 | AP001001 | 6013 | 1-438 |
| HLWBK40 | 296 | 711000 | AP000813 | 6014 | 1-302 |
| HLWBK40 | 296 | 711000 | AP001001 | 6015 | 1-864 |
| HLWBK40 | 296 | 711000 | AP001001 | 6016 | 1-302 |
| HLWBO68 | 298 | 529323 | AC007782 | 6017 | 1-359 |
| HLWBO68 | 298 | 529323 | AC007782 | 6018 | 1-283 |
| HLWBQ86 | 300 | 703465 | AL022097 | 6019 | 1-467 |
| HLWBQ86 | 300 | 703465 | AL022097 | 6020 | 1-142 |
| HLWBS14 | 301 | 925300 | AC022536 | 6021 | 1-307 |
| HLWBS14 | 301 | 925300 | AC022536 | 6022 | 1-817 |
| HLWBS43 | 302 | 774175 | AL122017 | 6023 | 1-563 |
| HLWBS43 | 302 | 774175 | AL122017 | 6024 | 1-266 |
| HLWBS43 | 302 | 774175 | AL122017 | 6025 | 1-1023 |
| HLWBZ74 | 303 | 679215 | AC005281 | 6026 | 1-1106 |
| HLWCM44 | 305 | 727699 | AL121578 | 6027 | 1-324 |
| HLWCM44 | 305 | 727699 | AL121578 | 6028 | 1-1169 |
| HLWCO66 | 307 | 750779 | AC019228 | 6029 | 1-528 |
| HLWCQ53 | 308 | 869700 | AC022784 | 6030 | 1-873 |
| HLWCQ62 | 309 | 742778 | AC010092 | 6031 | 1-865 |
| | | | | | 912-3137 |
| | | | | | 3529-4043 |
| | | | | | 5834-5942 |
| | | | | | 6891-7010 |
| HLWCQ76 | 310 | 768018 | AL121897 | 6032 | 1-127 |
| | | | | | 1795-2076 |
| | | | | | 2480-2735 |
| | | | | | 3715-3979 |
| | | | | | 6143-10331 |
| HLWCQ76 | 310 | 768018 | AL121897 | 6033 | 1-302 |
| HLWCQ76 | 310 | 768018 | AL121897 | 6034 | 1-518 |
| HLWDD02 | 313 | 953283 | AL139317 | 6035 | 1-425 |
| HLWDD02 | 313 | 953283 | AL139317 | 6036 | 1-464 |
| HLWDD02 | 313 | 953283 | AL139317 | 6037 | 1-157 |
| HLWDE60 | 314 | 868276 | AL355379 | 6038 | 1-184 |
| | | | | | 893-1005 |
| | | | | | 2129-2607 |
| | | | | | 3137-3804 |
| | | | | | 5061-5704 |
| HLWDE60 | 314 | 868276 | AL355379 | 6039 | 1-761 |
| HLWEE76 | 316 | 973315 | AC025868 | 6040 | 1-156 |
| | | | | | 181-506 |
| | | | | | 667-1063 |
| | | | | | 1498-1959 |
| HLWEE76 | 316 | 973315 | AC025868 | 6041 | 1-202 |
| HLWEE76 | 316 | 973315 | AC025868 | 6042 | 1-216 |
| HLWFG82 | 317 | 929647 | AC024009 | 6043 | 1-1072 |
| | | | | | 1285-1807 |
| | | | | | 2970-3240 |
| | | | | | 3323-3578 |
| | | | | | 3718-4021 |
| | | | | | 4167-4681 |
| | | | | | 4900-4999 |
| | | | | | 5291-5493 |
| | | | | | 5601-6055 |
| | | | | | 7662-8405 |
| | | | | | 8579-8892 |
| | | | | | 9250-9591 |
| HLWFG82 | 317 | 929647 | AC040991 | 6044 | 1-1072 |
| | | | | | 1285-1807 |
| | | | | | 2969-3239 |
| | | | | | 3322-3578 |
| | | | | | 3718-4021 |
| | | | | | 4166-4680 |
| | | | | | 5290-5492 |
| | | | | | 5600-6054 |
| | | | | | 7661-8403 |
| | | | | | 8577-8890 |
| | | | | | 9248-9589 |
| | | | | | 11692-12415 |
| HLWFG82 | 317 | 929647 | AC009955 | 6045 | 1-1072 |
| | | | | | 1285-1807 |
| | | | | | 2969-3239 |
| | | | | | 3322-3578 |
| | | | | | 3718-4021 |
| | | | | | 4166-4680 |
| | | | | | 4899-4998 |
| | | | | | 5290-5492 |
| | | | | | 5600-6054 |
| | | | | | 7661-8404 |
| | | | | | 8578-8891 |
| | | | | | 9249-9590 |
| | | | | | 11693-12416 |
| | | | | | 12628-13109 |
| | | | | | 13182-13470 |
| | | | | | 13675-13945 |
| | | | | | 14072-16144 |
| | | | | | 16553-16761 |
| | | | | | 18342-18428 |
| | | | | | 18598-18758 |
| | | | | | 19030-19180 |
| | | | | | 19452-19907 |
| | | | | | 20007-20565 |
| HLWFG82 | 317 | 929647 | AC040991 | 6046 | 1-1023 |
| | | | | | 1743-2217 |
| | | | | | 2502-2917 |
| | | | | | 3075-3422 |
| HLWFG82 | 317 | 929647 | AC009955 | 6047 | 1-604 |
| | | | | | 2136-3385 |
| | | | | | 3537-4031 |
| | | | | | 5661-5910 |
| | | | | | 6207-7370 |
| | | | | | 8204-9136 |
| | | | | | 9469-9651 |
| | | | | | 9951-11649 |
| HLWFG82 | 317 | 929647 | AC009955 | 6048 | 1-1023 |
| | | | | | 1743-2217 |
| | | | | | 2502-2917 |
| | | | | | 3075-3422 |
| HMVDU41 | 319 | 957804 | AC019103 | 6049 | 1-431 |
| HMVDU41 | 319 | 957804 | AC019103 | 6050 | 1-148 |
| | | | | | 496-727 |
| HNBTP01 | 320 | 914428 | AL022238 6051 | 1-121 | |
| | | | | | 899-983 |
| | | | | | 1445-1513 |
| | | | | | 2166-3430 |
| | | | | | 3550-3763 |
| | | | | | 3859-3972 |
| | | | | | 4449-4595 |
| | | | | | 4960-5152 |
| | | | | | 5385-5529 |
| | | | | | 5744-5972 |
| | | | | | 6327-7067 |
| | | | | | 7097-7152 |
| | | | | | 7210-8073 |
| | | | | | 8079-8680 |
| | | | | | 8772-11399 |
| | | | | | 12956-13517 |
| | | | | | 13736-14155 |
| | | | | | 14311-14753 |
| | | | | | 16294-16357 |
| | | | | | 16648-16806 |
| | | | | | 16874-17059 |
| | | | | | 17685-17787 |
| HNBTP01 | 320 | 914428 | AL022238 | 6052 | 1-540 |
| HNBTP01 | 320 | 914428 | AL022238 | 6053 | 1-665 |
| HNBUR07 | 324 | 951814 | AP000424 | 6054 | 1-418 |
| HNBUR07 | 324 | 951814 | AF205591 | 6055 | 1-417 |
| HNBUR07 | 324 | 951814 | AP000424 | 6056 | 1-828 |
| | | | | | 1172-1743 |
| HNBUR07 | 324 | 951814 | AF205591 | 6057 | 1-670 |
| | | | | | 1172-1746 |
| HNNNA06 | 326 | 917723 | AC067780 | 6058 | 1-2013 |
| HNNNA06 | 326 | 917723 | AC067780 | 6059 | 1-175 |
| HNNNA77 | 328 | 917725 | AC067780 | 6060 | 1-2013 |
| HNNNA77 | 328 | 917725 | AC067780 | 6061 | 1-175 |
| KNOAS06 | 329 | 933730 | AL358215 | 6062 | 1-856 |
| HNOAS06 | 329 | 933730 | AL390797 | 6063 | 1-856 |
| HNOAS06 | 329 | 933730 | AL390797 | 6064 | 1-317 |
| HNOBF57 | 331 | 927903 | AP000045 | 6065 | 1-141 |
| | | | | | 1793-1919 |
| | | | | | 2337-3020 |
| | | | | | 3519-3910 |
| | | | | | 5158-5639 |
| | | | | | 8419-8529 |
| | | | | | 9247-9333 |
| | | | | | 10820-11221 |
| | | | | | 13144-13201 |
| | | | | | 17419-17975 |
| | | | | | 18062-20146 |
| | | | | | 21788-21913 |
| HNOBF57 | 331 | 927903 | AP000113 | 6066 | 1-141 |
| | | | | | 1793-1919 |
| | | | | | 2337-3020 |
| | | | | | 3519-3910 |
| | | | | | 5158-5639 |
| | | | | | 8419-8529 |
| | | | | | 9247-9333 |
| | | | | | 10820-11221 |
| | | | | | 13144-13201 |
| | | | | | 17419-17975 |
| | | | | | 18062-20146 |
| | | | | | 21788-21913 |
| KNOBF57 | 331 | 927903 | AP000189 | 6067 | 1-141 |
| | | | | | 1793-1919 |
| | | | | | 2337-3020 |
| | | | | | 3519-3910 |
| | | | | | 5158-5639 |
| | | | | | 8419-8529 |
| | | | | | 9247-9333 |
| | | | | | 10820-11221 |
| | | | | | 13144-13201 |
| | | | | | 17419-17975 |
| | | | | | 18062-20146 |
| | | | | | 21788-21913 |
| HNOBF57 | 331 | 927903 | AP000045 | 6068 | 1-187 |
| HNOBF57 | 331 | 927903 | AP000113 | 6069 | 1-187 |
| HNOBF57 | 331 | 927903 | AP000189 | 6070 | 1-187 |
| HNOCT39 | 333 | 952611 | AC025840 | 6071 | 1-733 |
| HNOCT39 | 333 | 952611 | AC025840 | 6072 | 1-476 |
| HOCPJ03 | 336 | 917484 | AC036229 | 6073 | 1-440 |
| | | | | | 602-656 |
| | | | | | 1173-1559 |
| | | | | | 1846-2263 |
| | | | | | 2281-2450 |
| | | | | | 2778-3266 |
| HOCPJ03 | 336 | 917484 | AC036229 | 6074 | 1-779 |
| HODAD73 | 337 | 973463 | AC076959 | 6075 | 1-515 |
| HODAD73 | 337 | 973463 | AC004889 | 6076 | 1-515 |
| HODAD73 | 337 | 973463 | AC076959 | 6077 | 1-370 |
| HODAD73 | 337 | 973463 | AC004889 | 6078 | 1-370 |
| HODAD95 | 338 | 974043 | Z93783 | 6079 | 1-726 |
| HODAD95 | 338 | 974043 | Z93783 | 6080 | 1-229 |
| HODAD95 | 338 | 974043 | Z93783 | 6081 | 1-307 |
| HODAG37 | 339 | 529410 | AC069320 | 6082 | 1-230 |
| HODAG37 | 339 | 529410 | AC069320 | 6083 | 1-376 |
| HODAH32 | 340 | 859509 | AC004976 | 6084 | 1-324 |
| HODAH32 | 340 | 859509 | AC004976 | 6085 | 1-298 |
| HODAJ35 | 342 | 529405 | AC008781 | 6086 | 1-333 |
| HODAJ35 | 342 | 529405 | AC005618 | 6087 | 1-333 |
| HODAJ35 | 342 | 529405 | AC008781 | 6088 | 1-326 |
| HODAJ35 | 342 | 529405 | AC008781 | 6089 | 1-125 |
| HODAJ35 | 342 | 529405 | AC005618 | 6090 | 1-326 |
| HODAJ35 | 342 | 529405 | AC005618 | 6091 | 1-125 |
| HODAK38 | 343 | 529404 | AC068204 | 6092 | 1-383 |
| HODAK95 | 344 | 960179 | AC010271 | 6093 | 1-75 |
| | | | | | 266-889 |
| | | | | | 1331-1431 |
| | | | | | 2199-2234 |
| | | | | | 2779-3277 |
| | | | | | 3445-3965 |
| | | | | | 4895-5797 |
| HODAK95 | 344 | 960179 | AC010271 | 6094 | 1-136 |
| | | | | | 2057-2217 |
| | | | | | 3443-3543 |
| | | | | | 4471-4543 |
| | | | | | 6172-7809 |
| HODAV80 | 347 | 859519 | AC010761 | 6095 | 1-364 |
| HODAV80 | 347 | 859519 | AP000878 | 6096 | 1-364 |
| HODAV80 | 347 | 859519 | AC010761 | 6097 | 1-812 |
| HODAV80 | 347 | 859519 | AP000878 | 6098 | 1-767 |
| | | | | | 917-1223 |
| | | | | | 1455-2831 |
| HODAW84 | 349 | 775425 | AC074185 | 6099 | 1-1154 |
| | | | | | 1220-1578 |
| | | | | | 1593-2367 |
| | | | | | 2514-3351 |
| HODAW84 | 349 | 775425 | AC019096 | 6100 | 1-1208 |
| | | | | | 1356-2248 |
| HODAW84 | 349 | 775425 | AC018738 | 6101 | 1-82 |
| | | | | | 829-1986 |
| | | | | | 2050-2409 |
| | | | | | 2424-3174 |
| | | | | | 3345-4236 |
| HODAW84 | 349 | 775425 | AC017104 | 6102 | 1-774 |
| | | | | | 922-1813 |
| HODAW84 | 349 | 775425 | AC019096 | 6103 | 1-392 |
| HODAW84 | 349 | 775425 | AC018738 | 6104 | 1-401 |
| HODAW84 | 349 | 775425 | AC017104 | 6105 | 1-392 |
| HODBC01 | 350 | 921662 | AC022088 | 6106 | 1-887 |
| HODBC01 | 350 | 921662 | AC012589 | 6107 | 1-887 |
| HODBC01 | 350 | 921662 | AC022088 | 6108 | 1-123 |
| H0DBC01 | 350 | 921662 | AC012589 | 6109 | 1-123 |
| HODBC01 | 350 | 921662 | AC022088 | 6110 | 1-662 |
| HODBC01 | 350 | 921662 | AC012589 | 6111 | 1-662 |
| HODBC07 | 351 | 954161 | AC055755 | 6112 | 1-340 |
| HODBC07 | 351 | 954161 | AP000767 | 6113 | 1-340 |
| HODBC07 | 351 | 954161 | AP000645 | 6114 | 1-340 |
| HODBC07 | 351 | 954161 | AP000767 | 6115 | 1-346 |
| HODBC07 | 351 | 954161 | AP000645 | 6116 | 1-346 |
| HODBC07 | 351 | 954161 | AC055755 | 6117 | 1-346 |
| HODBC07 | 351 | 954161 | AP000767 | 6118 | 1-861 |
| HODBC07 | 351 | 954161 | AP000645 | 6119 | 1-861 |
| HODBE01 | 352 | 921655 | AC023783 | 6120 | 1-180 |
| HODBE01 | 352 | 921655 | AC023783 | 6121 | 1-180 |
| HODBH16 | 353 | 927781 | AC008826 | 6122 | 1-286 |
| HODBH16 | 353 | 927781 | AC016613 | 6123 | 1-286 |
| HODBT58 | 355 | 678444 | AC027551 | 6124 | 1-100 |
| HODBT58 | 355 | 678444 | AC021649 | 6125 | 1-376 |
| HODBT58 | 355 | 678444 | AC008557 | 6126 | 1-376 |
| HODBT58 | 355 | 678444 | AC022493 | 6127 | 1-311 |
| HODBT58 | 355 | 678444 | AC008557 | 6128 | 1-338 |
| HODBT58 | 355 | 678444 | AC022493 | 6129 | 1-338 |
| HODBV71 | 357 | 761447 | AC026372 | 6130 | 1-1224 |
| HODBV71 | 357 | 761447 | AC044856 | 6131 | 1-1147 |
| HODBV71 | 357 | 761447 | AC073288 | 6132 | 1-1147 |
| HODBV71 | 357 | 761447 | AC044856 | 6133 | 1-166 |
| HODBV71 | 357 | 761447 | AC073288 | 6134 | 1-150 |
| HODBV71 | 357 | 761447 | AC026372 | 6135 | 1-424 |
| HODBV71 | 357 | 761447 | AC044856 | 6136 | 1-425 |
| HODBV71 | 357 | 761447 | AC073288 | 6137 | 1-425 |
| HODCA11 | 358 | 967732 | AC006977 | 6138 | 1-383 |
| | | | | | 394-499 |
| | | | | | 2564-2769 |
| | | | | | 3617-3753 |
| | | | | | 3863-4531 |
| | | | | | 5760-6332 |
| | | | | | 8307-8374 |
| | | | | | 8604-8902 |
| | | | | | 9558-9675 |
| | | | | | 11022-11171 |
| | | | | | 12838-12958 |
| | | | | | 13542-13671 |
| | | | | | 13770-13950 |
| | | | | | 14233-14631 |
| | | | | | 14669-14765 |
| | | | | | 17151-17350 |
| | | | | | 18504-18643 |
| | | | | | 20745-20834 |
| | | | | | 22291-22452 |
| | | | | | 26464-26681 |
| | | | | | 26756-26866 |
| | | | | | 28190-28224 |
| | | | | | 29994-30139 |
| | | | | | 30933-31056 |
| HODCJ11 | 362 | 967320 | AC025415 | 6139 | 1-477 |
| HODCJ11 | 362 | 967320 | AC025415 | 6140 | 1-431 |
| HODCJ42 | 363 | 932638 | AC011618 | 6141 | 1-697 |
| HODCJ42 | 363 | 932638 | AC011618 | 6142 | 1-323 |
| HODCL88 | 364 | 529334 | AC026046 | 6143 | 1-398 |
| | | | | | 848-1362 |
| HODCL88 | 364 | 529334 | AC026046 | 6144 | 1-797 |
| HODCL88 | 364 | 529334 | AC026046 | 6145 | 1-290 |
| HODCM62 | 365 | 859556 | AC018774 | 6146 | 1-302 |
| HODCO09 | 366 | 573202 | AC069378 | 6147 | 1-412 |
| HODCO09 | 366 | 573202 | AC012425 | 6148 | 1-412 |
| HODCO09 | 366 | 573202 | AL132661 | 6149 | 1-412 |
| HODCO09 | 366 | 573202 | AC044855 | 6150 | 1-412 |
| HODCO09 | 366 | 573202 | AC069378 | 6151 | 1-411 |
| HODCO09 | 366 | 573202 | AC012425 | 6152 | 1-338 |
| HODCO09 | 366 | 573202 | AL132661 | 6153 | 1-411 |
| HODCO09 | 366 | 573202 | AC044855 | 6154 | 1-338 |
| HODCO09 | 366 | 573202 | AC069378 | 6155 | 1-338 |
| HODCO09 | 366 | 573202 | AC012425 | 6156 | 1-411 |
| HODCO09 | 366 | 573202 | AL132661 | 6157 | 1-338 |
| HODCO09 | 366 | 573202 | AC044855 | 6158 | 1-411 |
| HODCO46 | 367 | 573200 | AC006407 | 6159 | 1-316 |
| HODCO82 | 368 | 573195 | AC009834 | 6160 | 1-500 |
| | | | | | 4451-4574 |
| | | | | | 8243-8369 |
| | | | | | 9901-10227 |
| | | | | | 10315-10434 |
| HODC082 | 368 | 573195 | AC009834 | 6161 | 1-87 |
| | | | | | 799-918 |
| | | | | | 3613-3738 |
| | | | | | 7543-7694 |
| | | | | | 8075-8140 |
| | | | | | 8384-8501 |
| | | | | | 10749-10867 |
| | | | | | 12458-12594 |
| | | | | | 14660-14793 |
| | | | | | 16991-17117 |
| | | | | | 17690-17895 |
| | | | | | 19598-19726 |
| | | | | | 19971-20125 |
| | | | | | 21034-21516 |
| | | | | | 23395-23513 |
| | | | | | 23775-23907 |
| | | | | | 24646-24777 |
| | | | | | 28056-28291 |
| | | | | | 28749-28822 |
| | | | | | 29696-29930 |
| | | | | | 30554-30819 |
| | | | | | 32721-32911 |
| | | | | | 34077-37157 |
| HODCP69 | 369 | 507249 | AC022080 | 6162 | 1-333 |
| HODCP69 | 369 | 507249 | AC068293 | 6163 | 1-333 |
| HODCP69 | 369 | 507249 | AC019255 | 6164 | 1-333 |
| HODCR43 | 370 | 529332 | AC023162 | 6165 | 1-431 |
| HODCR43 | 370 | 529332 | AC000380 | 6166 | 1-430 |
| HODCR43 | 370 | 529332 | AC000380 | 6167 | 1-379 |
| HODCT07 | 371 | 954149 | AC016510 | 6168 | 1-293 |
| HODCU01 | 372 | 917270 | AL355822 | 6169 | 1-1563 |
| HODCU01 | 372 | 917270 | AL355822 | 6170 | 1-132 |
| HODCU01 | 372 | 917270 | AL355822 | 6171 | 1-83 |
| HODCU02 | 373 | 920698 | AC018633 | 6172 | 1-627 |
| HODCU02 | 373 | 920698 | AC018633 | 6173 | 1-648 |
| HODCU02 | 373 | 920698 | AC018633 | 6174 | 1-190 |
| HODCU62 | 374 | 524314 | AC078826 | 6175 | 1-462 |
| HODCU62 | 374 | 524314 | AC009246 | 6176 | 1-463 |
| HODCU62 | 374 | 524314 | AC078826 | 6177 | 1-106 |
| HODCU62 | 374 | 524314 | AC009246 | 6178 | 1-405 |
| HODCV09 | 375 | 973487 | AC021721 | 6179 | 1-603 |
| HODCW17 | 376 | 960051 | AC023483 | 6180 | 1-375 |
| HODCW17 | 376 | 960051 | AC016092 | 6181 | 1-375 |
| HODCW17 | 376 | 960051 | AC018822 | 6182 | 1-375 |
| HODDD20 | 379 | 933726 | AC023483 | 6183 | 1-319 |
| HODDD20 | 379 | 933726 | AC024636 | 6184 | 1-319 |
| HODDD20 | 379 | 933726 | AC024898 | 6185 | 1-319 |
| HODDD20 | 379 | 933726 | AC023483 | 6186 | 1-261 |
| HODDD20 | 379 | 933726 | AC024636 | 6187 | 1-261 |
| HODDD20 | 379 | 933726 | AC024898 | 6188 | 1-261 |
| HODDD41 | 380 | 529390 | AL357497 | 6189 | 1-70 |
| | | | | | 2356-2495 |
| | | | | | 2576-2678 |
| HODDE28 | 381 | 529169 | AC008063 | 6190 | 1-369 |
| HODDE28 | 381 | 529169 | AC008063 | 6191 | 1-411 |
| HODDE28 | 381 | 529169 | AC008063 | 6192 | 1-106 |
| HODDE51 | 382 | 937759 | AC012362 | 6193 | 1-258 |
| HODDF51 | 382 | 937759 | AC012362 | 6194 | 1-466 |
| HODDG57 | 383 | 806204 | AC068404 | 6195 | 1-659 |
| | | | | | 762-1460 |
| HODDG57 | 383 | 806204 | AC068404 | 6196 | 1-405 |
| HODDN59 | 389 | 975437 | AL160155 | 6197 | 1-630 |
| HODDN59 | 389 | 975437 | AL136961 | 6198 | 1-630 |
| HODDN59 | 389 | 975437 | AL160155 | 6199 | 1-540 |
| HODDN59 | 389 | 975437 | AL136961 | 6200 | 1-540 |
| HODDN59 | 389 | 975437 | AL160155 | 6201 | 1-114 |
| HODDN59 | 389 | 975437 | AL136961 | 6202 | 1-114 |
| HODDN93 | 390 | 891236 | AC024502 | 6203 | 1-190 |
| | | | | | 2311-2654 |
| | | | | | 2971-3108 |
| | | | | | 4195-4501 |
| | | | | | 4743-5311 |
| | | | | | 5569-6222 |
| | | | | | 6284-6596 |
| | | | | | 6791-10462 |
| HODDN93 | 390 | 891236 | AC024502 | 6204 | 1-298 |
| HODDQ02 | 391 | 920962 | AC069225 | 6205 | 1-560 |
| | | | | | 762-909 |
| | | | | | 1004-1333 |
| | | | | | 1711-2220 |
| | | | | | 3050-3742 |
| | | | | | 3856-3961 |
| HODDQ02 | 391 | 920962 | AC016138 | 6206 | 1-560 |
| | | | | | 762-909 |
| | | | | | 1004-1333 |
| | | | | | 1711-2220 |
| | | | | | 3050-3742 |
| | | | | | 3856-3961 |
| HODDQ02 | 391 | 920962 | AC069225 | 6207 | 1-531 |
| HODDQ02 | 391 | 920962 | AC069225 | 6208 | 1-403 |
| HODDQ02 | 391 | 920962 | AC016138 | 6209 | 1-531 |
| HODDQ02 | 391 | 920962 | AC016138 | 6210 | 1-403 |
| HODDR13 | 393 | 529640 | AC021663 | 6211 | 1-271 |
| HODDR13 | 393 | 529640 | AC021663 | 6212 | 1-297 |
| HODDS67 | 394 | 567197 | AC012186 | 6213 | 1-101 |
| | | | | | 1432-1773 |
| | | | | | 2108-2234 |
| | | | | | 2755-2942 |
| | | | | | 4452-4677 |
| | | | | | 6207-6294 |
| | | | | | 6910-7030 |
| | | | | | 8184-8720 |
| | | | | | 8935-9043 |
| | | | | | 9126-9538 |
| | | | | | 9680-10164 |
| | | | | | 11135-11344 |
| | | | | | 11744-11906 |
| | | | | | 14393-14679 |
| | | | | | 20063-20220 |
| | | | | | 20444-20625 |
| | | | | | 20961-21364 |
| | | | | | 21744-21893 |
| | | | | | 22016-22076 |
| | | | | | 22652-22911 |
| | | | | | 22942-24288 |
| | | | | | 24334-25010 |
| | | | | | 25159-25619 |
| HODDS67 | 394 | 567197 | AC009066 | 6214 | 1-106 |
| | | | | | 191-603 |
| | | | | | 745-1229 |
| | | | | | 2199-2408 |
| | | | | | 2808-2970 |
| | | | | 5666-5770 | |
| HODDS67 | 394 | 567197 | AC007225 | 6215 | 1-70 |
| | | | | | 5595-5695 |
| | | | | | 7026-7367 |
| | | | | | 7702-7828 |
| | | | | | 8349-8536 |
| | | | | | 10046-10271 |
| | | | | | 11801-11888 |
| | | | | | 12504-12624 |
| | | | | | 13778-14314 |
| | | | | | 14529-14637 |
| | | | | | 14720-15132 |
| | | | | | 15274-15758 |
| | | | | | 16729-16938 |
| | | | | | 17338-17500 |
| | | | | | 20149-20272 |
| HODDS67 | 394 | 567197 | AC009066 | 6216 | 1-538 |
| HODDS67 | 394 | 567197 | AC007225 | 6217 | 1-938 |
| | | | | | 1722-1783 |
| | | | | | 2310-2378 |
| | | | | | 2720-2838 |
| | | | | | 2989-3336 |
| | | | | | 3777-4575 |
| | | | | | 4756-5304 |
| | | | | | 5852-6014 |
| | | | | | 7274-7609 |
| | | | | | 7649-7873 |
| | | | | | 7897-8059 |
| | | | | | 8624-8742 |
| HODDU70 | 395 | 529290 | AC067917 | 6218 | 1-348 |
| HODDU70 | 395 | 529290 | AC002075 | 6219 | 1-348 |
| HODDU70 | 395 | 529290 | AC067917 | 6220 | 1-218 |
| HODDU70 | 395 | 529290 | AC002075 | 6221 | 1-218 |
| HODEA90 | 397 | 782242 | AL355491 | 6222 | 1-899 |
| HODEA90 | 397 | 782242 | AL356112 | 6223 | 1-899 |
| HODEA90 | 397 | 782242 | AL355491 | 6224 | 1-416 |
| HODEA90 | 397 | 782242 | AL355491 | 6225 | 1-301 |
| HODEA90 | 397 | 782242 | AL356112 | 6226 | 1-288 |
| HODEA90 | 397 | 782242 | AL356112 | 6227 | 1-416 |
| HODEB04 | 398 | 927022 | AL161737 | 6228 | 1-785 |
| HODEB04 | 398 | 927022 | AF011889 | 6229 | 1-293 |
| | | | | | 352-1342 |
| | | | | | 1367-1727 |
| | | | | | 2768-3573 |
| | | | | | 3651-3720 |
| | | | | | 4597-4939 |
| | | | | | 4948-5114 |
| | | | | | 5138-5904 |
| | | | | | 6223-6559 |
| | | | | | 7550-7748 |
| | | | | | 8482-8578 |
| | | | | | 9047-9160 |
| | | | | | 9246-9515 |
| | | | | | 10516-10659 |
| | | | | | 11070-11151 |
| | | | | | 11548-11722 |
| | | | | | 26922-26988 |
| | | | | | 27692-27813 |
| | | | | | 28609-28753 |
| | | | | | 30932-30969 |
| | | | | | 31104-31225 |
| | | | | | 32671-32835 |
| | | | | | 37466-37786 |
| | | | | | 38294-38928 |
| HODEG86 | 405 | 784833 | AC013281 | 6247 | 1-277 |
| HODEG86 | 405 | 784833 | AC013281 | 6248 | 1-175 |
| HODEG86 | 405 | 784833 | AC018988 | 6249 | 1-147 |
| HODEG86 | 405 | 784833 | AC018988 | 6250 | 1-277 |
| HODEH22 | 407 | 974329 | AC068231 | 6251 | 1-437 |
| HODEH22 | 407 | 974329 | AL357752 | 6252 | 1-437 |
| HODEH22 | 407 | 974329 | AC068231 | 6253 | 1-287 |
| HODEH22 | 407 | 974329 | AL357752 | 6254 | 1-287 |
| HODEI13 | 408 | 859318 | AC046158 | 6255 | 1-591 |
| HODEI13 | 408 | 859318 | AC046158 | 6256 | 1-409 |
| HODEJ13 | 408 | 859318 | AC046158 | 6257 | 1-433 |
| HODEK50 | 410 | 859307 | AC007075 | 6258 | 1-729 |
| HODEK50 | 410 | 859307 | AC007075 | 6259 | 1-401 |
| HODEL92 | 411 | 859313 | AL139296 | 6260 | 1-470 |
| HODEO87 | 413 | 930735 | AC069316 | 6261 | 1-660 |
| HODEO87 | 413 | 930735 | AP002762 | 6262 | 1-660 |
| HODEO87 | 413 | 930735 | AC069316 | 6263 | 1-253 |
| HODEO87 | 413 | 930735 | AP002762 | 6264 | 1-253 |
| HODEO87 | 413 | 930735 | AC069316 | 6265 | 1-84 |
| HODEO87 | 413 | 930735 | AP002762 | 6266 | 1-84 |
| HODEP12 | 415 | 965534 | AC012659 | 6267 | 1-490 |
| HODEP12 | 415 | 965534 | AJ132410 | 6268 | 1-490 |
| HODEP12 | 415 | 965534 | AJ132411 | 6269 | 1-490 |
| HODEP12 | 415 | 965534 | AC012659 | 6270 | 1-363 |
| HODEP12 | 415 | 965534 | AJ132410 | 6271 | 1-363 |
| HODEP12 | 415 | 965534 | AJ132411 | 6272 | 1-363 |
| HODEP12 | 415 | 965534 | AJ132410 | 6273 | 1-352 |
| HODEP86 | 416 | 784846 | AC068146 | 6274 | 1-512 |
| HODEP86 | 416 | 784846 | AC009292 | 6275 | 1-512 |
| HODEP86 | 416 | 784846 | AC068146 | 6276 | 1-366 |
| HODEP86 | 416 | 784846 | AC068146 | 6277 | 1-252 |
| HODEP86 | 416 | 784846 | AC009292 | 6278 | 1-252 |
| HODEP86 | 416 | 784846 | AC009292 | 6279 | 1-366 |
| HODEQ79 | 418 | 859287 | AL049820 | 6280 | 1-599 |
| HODEQ79 | 418 | 859287 | AL049820 | 6281 | 1-107 |
| HODEQ79 | 418 | 859287 | AL049820 | 6282 | 1-373 |
| HODER91 | 419 | 789661 | AL136109 | 6283 | 1-3030 |
| | | | | | 3212-3814 |
| | | | | | 9089-9408 |
| | | | | | 11724-12242 |
| | | | | | 12308-12959 |
| | | | | | 23153-23254 |
| | | | | | 24314-26013 |
| HODER91 | 419 | 789661 | AC023147 | 6284 | 1-3041 |
| | | | | | 3223-3825 |
| | | | | | 9096-9415 |
| | | | | | 11730-12248 |
| | | | | | 12314-12965 |
| | | | | | 23152-23259 |
| | | | | | 24319-26018 |
| HODER91 | 419 | 789661 | AC022219 | 6285 | 1-3030 |
| | | | | | 3212-3814 |
| | | | | | 9084-9403 |
| | | | | | 11717-12235 |
| | | | | | 12301-12952 |
| | | | | | 23145-23246 |
| | | | | | 24307-26006 |
| HODER91 | 419 | 789661 | AL136109 | 6286 | 1-344 |
| HODER91 | 419 | 789661 | AL136109 | 6287 | 1-174 |
| HODER91 | 419 | 789661 | AC023147 | 6288 | 1-122 |
| HODER91 | 419 | 789661 | AC022219 | 6289 | 1-191 |
| HODER91 | 419 | 789661 | AC022219 | 6290 | 1-344 |
| HODES86 | 420 | 784815 | AC023311 | 6291 | 1-1229 |
| HODES86 | 420 | 784815 | AC068764 | 6292 | 1-1429 |
| HODEY08 | 425 | 972984 | AC025975 | 6293 | 1-155 |
| | | | | | 3629-3751 |
| | | | | | 4620-4829 |
| | | | | | 6019-6195 |
| | | | | | 7728-8138 |
| | | | | | 9330-9484 |
| | | | | | 9973-11639 |
| HODEY08 | 425 | 972984 | AC025975 | 6294 | 1-422 |
| HODEY08 | 425 | 972984 | AC025975 | 6295 | 1-624 |
| HODEY13 | 426 | 859323 | AC023757 | 6296 | 1-683 |
| HODEY13 | 426 | 859323 | AC023757 | 6297 | 1-304 |
| HODEY13 | 426 | 859323 | AC023757 | 6298 | 1-279 |
| HODEY80 | 427 | 859296 | AL049821 | 6299 | 1-892 |
| HODEZ02 | 428 | 918672 | AC058817 | 6300 | 1-78 |
| | | | | | 1016-1502 |
| HODEZ02 | 428 | 918672 | AL356311 | 6301 | 1-635 |
| | | | | | 1058-1135 |
| | | | | | 2074-2560 |
| | | | | | 3280-3551 |
| HODEZ02 | 428 | 918672 | AL356311 | 6302 | 1-650 |
| HODEZ11 | 429 | 952166 | AL049780 | 6303 | 1-79 |
| | | | | | 1741-2345 |
| | | | | | 2372-4365 |
| | | | | | 4520-4951 |
| | | | | | 4965-5086 |
| | | | | | 8909-9080 |
| | | | | | 9623-9884 |
| | | | | | 11171-11276 |
| | | | | | 11444-11552 |
| | | | | | 12317-12505 |
| | | | | | 12525-12605 |
| | | | | | 13051-13119 |
| | | | | | 13647-13742 |
| | | | | | 14956-15395 |
| | | | | | 15412-15622 |
| | | | | | 16059-16168 |
| | | | | | 17969-18042 |
| | | | | | 18135-18576 |
| | | | | | 18752-19394 |
| | | | | | 20745-21012 |
| | | | | | 21580-21955 |
| | | | | | 26195-26275 |
| | | | | | 27457-27874 |
| | | | | | 28194-28464 |
| | | | | | 28567-28646 |
| | | | | | 30337-30467 |
| | | | | | 30873-31422 |
| | | | | | 32480-32632 |
| | | | | | 33300-33564 |
| | | | | | 33909-33994 |
| | | | | | 34103-34189 |
| | | | | | 34258-35147 |
| HODEZ11 | 429 | 952166 | AC006530 | 6304 | 1-79 |
| | | | | | 1741-2345 |
| | | | | | 2372-4365 |
| | | | | | 4520-4951 |
| | | | | | 4965-5086 |
| | | | | | 8909-9080 |
| | | | | | 9623-9884 |
| | | | | | 10977-11278 |
| | | | | | 11446-11554 |
| | | | | | 12290-12489 |
| | | | | | 12509-12589 |
| | | | | | 13035-13103 |
| | | | | | 14941-15380 |
| | | | | | 15397-15607 |
| | | | | | 17239-17337 |
| | | | | | 17953-18026 |
| | | | | | 18119-18560 |
| | | | | | 18736-19378 |
| | | | | | 20729-20996 |
| | | | | | 21563-21938 |
| | | | | | 24485-24568 |
| | | | | | 26177-26257 |
| | | | | | 26973-27081 |
| | | | | | 27090-27231 |
| | | | | | 27439-27856 |
| | | | | | 28176-28446 |
| | | | | | 28549-28628 |
| | | | | | 30319-30449 |
| | | | | | 30855-31404 |
| | | | | | 32460-32612 |
| | | | | | 33295-33452 |
| | | | | | 33889-34006 |
| | | | | | 34238-35127 |
| HODEZ11 | 429 | 952166 | AL049780 | 6305 | 1-76 |
| | | | | | 1605-2548 |
| | | | | | 2583-4747 |
| HODEZ11 | 429 | 952166 | AL049780 | 6306 | 1-1091 |
| HODEZ11 | 429 | 952166 | AC006530 | 6307 | 1-1090 |
| HODEZ11 | 429 | 952166 | AC006530 | 6308 | 1-269 |
| HODFA38 | 430 | 934266 | AC016992 | 6309 | 1-649 |
| HODFB88 | 433 | 792979 | AC008651 | 6310 | 1-368 |
| | | | | | 2142-2889 |
| | | | | | 3649-3930 |
| | | | | | 5148-5773 |
| | | | | | 6717-7220 |
| | | | | | 7679-8094 |
| | | | | | 8917-9211 |
| | | | | | 9671-9754 |
| | | | | | 10002-10093 |
| HODFB88 | 433 | 792979 | AC008651 | 6311 | 1-83 |
| HODFD08 | 434 | 958371 | AL354943 | 6312 | 1-396 |
| HODFD08 | 434 | 958371 | AL354943 | 6313 | 1-322 |
| HODFD45 | 436 | 780531 | AC009263 | 6314 | 1-401 |
| HODFD45 | 436 | 780531 | AC009263 | 6315 | 1-316 |
| HODFH02 | 439 | 915257 | AC025139 | 6316 | 1-706 |
| HODFJ01 | 441 | 859549 | AC073389 | 6317 | 1-509 |
| HODFJ01 | 441 | 859549 | AC073389 | 6318 | 1-401 |
| FODFK18 | 442 | 974313 | AC068404 | 6319 | 1-1251 |
| HODFK18 | 442 | 974313 | AC068404 | 6320 | 1-405 |
| HODFO03 | 447 | 859329 | AC002044 | 6321 | 1-530 |
| HODFP40 | 449 | 921651 | AC074386 | 6322 | 1-622 |
| | | | | | 2363-6063 |
| HODFP40 | 449 | 921651 | AC004889 | 6323 | 1-622 |
| | | | | | 2363-6063 |
| HODFP40 | 449 | 921651 | AC074386 | 6324 | 1-93 |
| HODFP40 | 449 | 921651 | AC074386 | 6325 | 1-1213 |
| HODFP40 | 449 | 921651 | AC004889 | 6326 | 1-1213 |
| HODFP40 | 449 | 921651 | AC004889 | 6327 | 1-93 |
| HODFQ06 | 451 | 934304 | AL365325 | 6328 | 1-529 |
| HODFQ06 | 451 | 934304 | AL356748 | 6329 | 1-529 |
| HODFQ06 | 451 | 934304 | AC005815 | 6330 | 1-529 |
| HODFQ06 | 451 | 934304 | AL365325 | 6331 | 1-290 |
| HODFQ06 | 451 | 934304 | AL356748 | 6332 | 1-290 |
| HODFQ06 | 451 | 934304 | AC005815 | 6333 | 1-290 |
| HODFT52 | 452 | 915232 | AC069418 | 6334 | 1-988 |
| HODFT52 | 452 | 915232 | AC078803 | 6335 | 1-994 |
| HODFU02 | 453 | 918536 | AC027603 | 6336 | 1-601 |
| HODFU02 | 453 | 918536 | AC011319 | 6337 | 1-601 |
| HODFU02 | 453 | 918536 | AC011319 | 6338 | 1-515 |
| HODFU02 | 453 | 918536 | AC027603 | 6339 | 1-515 |
| HODFU47 | 455 | 806232 | AC069029 | 6340 | 1-1072 |
| HODFU47 | 455 | 806232 | AC055807 | 6341 | 1-1072 |
| HODFU47 | 455 | 806232 | AC069029 | 6342 | 1-383 |
| HODFU47 | 455 | 806232 | AC055807 | 6343 | 1-383 |
| HODFU54 | 456 | 965526 | AC022944 | 6344 | 1-584 |
| HODFU54 | 456 | 965526 | AC022944 | 6345 | 1-105 |
| HODFU54 | 456 | 965526 | AC022944 | 6346 | 1-199 |
| HODFW17 | 457 | 859322 | AC012240 | 6347 | 1-592 |
| HODFW17 | 457 | 859322 | AC018633 | 6348 | 1-612 |
| HODFW17 | 457 | 859322 | AC018633 | 6349 | 1-82 |
| | | | | | 84-446 |
| HODFW17 | 457 | 859322 | AC018633 | 6350 | 1-173 |
| HODFX57 | 458 | 975259 | AC026229 | 6351 | 1-420 |
| HODFX57 | 458 | 975259 | AC022108 | 6352 | 1-421 |
| HODFX57 | 458 | 975259 | AC026229 | 6353 | 1-294 |
| HODFX57 | 458 | 975259 | AC022108 | 6354 | 1-295 |
| HODFX57 | 458 | 975259 | AC026229 | 6355 | 1-309 |
| HODFX57 | 458 | 975259 | AC022108 | 6356 | 1-697 |
| HODFY16 | 459 | 958329 | AL138499 | 6357 | 1-74 |
| | | | | | 1171-1414 |
| | | | | | 2003-2145 |
| | | | | | 5281-5390 |
| | | | | | 6571-6708 |
| | | | | | 7273-8042 |
| | | | | | 8498-8581 |
| | | | | | 9242-9411 |
| | | | | | 9823-9893 |
| | | | | | 11229-11269 |
| | | | | | 11959-12050 |
| | | | | | 12418-12490 |
| | | | | | 12981-13017 |
| | | | | | 13172-13255 |
| | | | | | 13739-13807 |
| | | | | | 16333-16490 |
| | | | | | 16856-16966 |
| | | | | | 17025-17457 |
| | | | | | 19018-19053 |
| | | | | | 19571-19708 |
| | | | | | 19739-20018 |
| | | | | | 20071-20166 |
| | | | | | 20847-20919 |
| | | | | | 21057-21542 |
| | | | | | 21820-21861 |
| | | | | | 22375-22563 |
| | | | | | 22606-22687 |
| | | | | | 23332-23536 |
| | | | | | 23934-23974 |
| | | | | | 24441-25133 |
| | | | | | 25607-26151 |
| | | | | | 27567-27728 |
| | | | | | 28089-28180 |
| | | | | | 30591-30662 |
| | | | | | 31711-31750 |
| | | | | | 32025-32303 |
| | | | | | 32728-33189 |
| | | | | | 33569-33660 |
| | | | | | 34582-35243 |
| | | | | | 36002-36089 |
| | | | | | 37700-38027 |
| | | | | | 38479-39379 |
| | | | | | 39447-39994 |
| | | | | | 39996-40412 |
| | | | | | 40939-41175 |
| | | | | | 42777-42859 |
| | | | | | 43613-43709 |
| | | | | | 43834-43926 |
| | | | | | 44676-44750 |
| | | | | | 44978-45061 |
| | | | | | 45219-45304 |
| | | | | | 45604-46116 |
| | | | | | 46592-46981 |
| | | | | | 47116-47969 |
| | | | | | 49128-49249 |
| | | | | | 49765-50272 |
| | | | | | 50400-50495 |
| | | | | | 50679-50942 |
| | | | | | 51613-51736 |
| | | | | | 52713-52789 |
| | | | | | 54124-54402 |
| | | | | | 54837-55118 |
| | | | | | 55215-55764 |
| | | | | | 56143-56632 |
| HODFY16 | 459 | 958329 | AL138499 | 6358 | 1-386 |
| | | | | | 635-1149 |
| HODFY79 | 460 | 975253 | AC027445 | 6359 | 1-644 |
| HODFY79 | 460 | 975253 | AC061706 | 6360 | 1-644 |
| HODFY79 | 460 | 975253 | AC027445 | 6361 | 1-477 |
| HODGC04 | 462 | 926863 | AC019014 | 6362 | 1-244 |
| HODGC61 | 463 | 973449 | AC020695 | 6363 | 1-663 |
| HODGC61 | 463 | 973449 | AC017086 | 6364 | 1-663 |
| HODGC61 | 463 | 973449 | AL135932 | 6365 | 1-663 |
| HODGC61 | 463 | 973449 | AC020695 | 6366 | 1-340 |
| HODGC61 | 463 | 973449 | AC017086 | 6367 | 1-340 |
| HODGC61 | 463 | 973449 | AL135932 | 6368 | 1-340 |
| HODGD05 | 464 | 931071 | AL355304 | 6369 | 1-176 |
| HODGD05 | 464 | 931071 | AL355307 | 6370 | 1-176 |
| HODGD05 | 464 | 931071 | AL355304 | 6371 | 1-90 |
| HODGD05 | 464 | 931071 | AL355307 | 6372 | 1-90 |
| HODGD05 | 464 | 931071 | AL355307 | 6373 | 1-408 |
| HODGH11 | 468 | 965105 | AL133463 | 6374 | 1-642 |
| HODGH11 | 468 | 965105 | AL050320 | 6375 | 1-642 |
| HODGH91 | 469 | 968794 | AL033547 | 6376 | 1-520 |
| HODGH91 | 469 | 968794 | AL033547 | 6377 | 1-567 |
| HODGH91 | 469 | 968794 | AL033547 | 6378 | 1-429 |
| HODGJ67 | 471 | 974297 | AL356804 | 6379 | 1-414 |
| HODGL54 | 472 | 859303 | AC023785 | 6380 | 1-300 |
| | | | | | 990-1082 |
| | | | | | 1263-1944 |
| | | | | | 3930-3960 |
| | | | | | 4456-4565 |
| | | | | | 4991-5162 |
| | | | | | 7643-7924 |
| | | | | | 8196-8928 |
| | | | | | 10082-10445 |
| HODGL54 | 472 | 859303 | AC023785 | 6381 | 1-484 |
| | | | | | 1470-1673 |
| HODGL54 | 472 | 859303 | AC023785 | 6382 | 1-576 |
| HODGM46 | 473 | 974051 | AC002351 | 6383 | 1-1278 |
| | | | | | 2155-2236 |
| HODGM46 | 473 | 974051 | AC002369 | 6384 | 1-586 |
| | | | | | 2559-2651 |
| | | | | | 3329-3426 |
| | | | | | 3756-5088 |
| HODGM46 | 473 | 974051 | AC002351 | 6385 | 1-115 |
| HODGM46 | 473 | 974051 | AC002369 | 6386 | 1-228 |
| HODGO46 | 474 | 883087 | AC037489 | 6387 | 1-346 |
| | | | | | 1670-2284 |
| | | | | | 2466-2854 |
| | | | | | 4400-4511 |
| | | | | | 6053-6599 |
| | | | | | 7153-7508 |
| | | | | | 8502-8724 |
| | | | | | 9716-10001 |
| | | | | | 11982-12304 |
| HODGO46 | 474 | 883087 | AC019171 | 6388 | 1-669 |
| | | | | | 797-1185 |
| | | | | | 2733-2844 |
| | | | | | 4386-4932 |
| | | | | | 5136-5165 |
| HODGO46 | 474 | 883087 | AC037489 | 6389 | 1-1408 |
| HODGO46 | 474 | 883087 | AC037489 | 6390 | 1-175 |
| HODGO46 | 474 | 883087 | AC019171 | 6391 | 1-356 |
| HODGO46 | 474 | 883087 | AC019171 | 6392 | 1-345 |
| HODGP37 | 475 | 974293 | AC023592 | 6393 | 1-570 |
| HODGP37 | 475 | 974293 | AC069441 | 6394 | 1-570 |
| HODGP83 | 476 | 889967 | AC013723 | 6395 | 1-110 |
| | | | | | 1542-2027 |
| | | | | | 3382-3689 |
| | | | | | 5800-5966 |
| HODGP83 | 476 | 889967 | AC009973 | 6396 | 1-74 |
| | | | | | 1507-2339 |
| | | | | | 3336-3657 |
| | | | | | 5766-5932 |
| HODGP83 | 476 | 889967 | AC013723 | 6397 | 1-499 |
| HODGP83 | 476 | 889967 | AC013723 | 6398 | 1-314 |
| HODGP83 | 476 | 889967 | AC009973 | 6399 | 1-314 |
| HODGP83 | 476 | 889967 | AC009973 | 6400 | 1-499 |
| HODGQ08 | 478 | 958237 | AC026000 | 6401 | 1-509 |
| HODGQ08 | 478 | 958237 | AC025510 | 6402 | 1-509 |
| HODGQ32 | 480 | 974294 | AC024497 | 6403 | 1-705 |
| HODGQ32 | 480 | 974294 | AC024497 | 6404 | 1-3866 |
| HODGQ92 | 481 | 894368 | AP000751 | 6405 | 1-96 |
| | | | | | 1450-1596 |
| | | | | | 2035-2116 |
| HODGQ92 | 481 | 894368 | AP000751 | 6406 | 1-369 |
| HODGT62 | 482 | 974052 | AC011008 | 6407 | 1-731 |
| HODGT62 | 482 | 974052 | AC044783 | 6408 | 1-731 |
| HODGW08 | 483 | 958277 | AL121966 | 6409 | 1-562 |
| HODGW08 | 483 | 958277 | AC025054 | 6410 | 1-562 |
| HODGW08 | 483 | 958277 | AC009425 | 6411 | 1-562 |
| HODGW08 | 483 | 958277 | AL121966 | 6412 | 1-485 |
| HODGW08 | 483 | 958277 | AC025054 | 6413 | 1-409 |
| HODGW08 | 483 | 958277 | AL121966 | 6414 | 1-409 |
| HODGW08 | 483 | 958277 | AC025054 | 6415 | 1-485 |
| HODGW08 | 483 | 958277 | AC009425 | 6416 | 1-485 |
| HODGW08 | 483 | 958277 | AC009425 | 6417 | 1-409 |
| HODGZ06 | 486 | 933783 | AC007685 | 6418 | 1-452 |
| | | | | | 497-619 |
| | | | | | 1248-2116 |
| | | | | | 2423-2493 |
| | | | | | 2610-2725 |
| | | | | | 3566-3716 |
| | | | | | 4422-4552 |
| | | | | | 6708-7287 |
| | | | | | 12653-12705 |
| | | | | | 12963-13427 |
| | | | | | 17808-17904 |
| HODGZ06 | 486 | 933783 | AC007685 | 6419 | 1-160 |
| HODGZ06 | 486 | 933783 | AC007685 | 6420 | 1-2806 |
| | | | | | 2896-4507 |
| HODGZ10 | 487 | 961977 | AC064861 | 6421 | 1-85 |
| | | | | | 1146-1687 |
| HODGZ10 | 487 | 961977 | AC073838 | 6422 | 1-86 |
| | | | | | 1147-1688 |
| HODGZ10 | 487 | 961977 | AC064861 | 6423 | 1-399 |
| HODGZ10 | 487 | 961977 | AC073838 | 6424 | 1-399 |
| HODHC03 | 488 | 922987 | AC009237 | 6425 | 1-1362 |
| HODHC03 | 488 | 922987 | AC009237 | 6426 | 1-720 |
| HODHC03 | 488 | 922987 | AC009237 | 6427 | 1-307 |
| | | | | | 580-1408 |
| HODHD16 | 489 | 974924 | AL162431 | 6428 | 1-42 |
| | | | | | 915-1065 |
| | | | | | 1167-1633 |
| | | | | | 2254-2484 |
| | | | | | 3637-4873 |
| HODHD16 | 489 | 974924 | AC064851 | 6429 | 1-42 |
| | | | | | 915-1057 |
| | | | | | 1167-1633 |
| | | | | | 2254-2484 |
| | | | | | 3637-7666 |
| | | | | | 7672-7821 |
| | | | | | 7877-10024 |
| HODHD16 | 489 | 974924 | AC064851 | 6430 | 1-188 |
| HODHD16 | 489 | 974924 | AL162431 | 6431 | 1-413 |
| | | | | | 1767-2068 |
| HODHD16 | 489 | 974924 | AC064851 | 6432 | 1-413 |
| | | | | | 1767-2068 |
| HODHK02 | 494 | 918613 | AC009944 | 6433 | 1-301 |
| HODHK02 | 494 | 918613 | AC019299 | 6434 | 1-301 |
| HODHK02 | 494 | 918613 | AC009822 | 6435 | 1-301 |
| HODHK02 | 494 | 918613 | AC019299 | 6436 | 1-483 |
| HODHK02 | 494 | 918613 | AC009944 | 6437 | 1-483 |
| HODHK02 | 494 | 918613 | AC009822 | 6438 | 1-483 |
| HODHL56 | 496 | 847724 | AF236876 | 6439 | 1-935 |
| HODHL56 | 496 | 847724 | AC019257 | 6440 | 1-935 |
| HODHL56 | 496 | 847724 | AF236876 | 6441 | 1-493 |
| HODHL56 | 496 | 847724 | AC019257 | 6442 | 1-493 |
| HODHO11 | 497 | 965529 | AC027399 | 6443 | 1-317 |
| HODHO11 | 497 | 965529 | AC027399 | 6444 | 1-318 |
| HODHS34 | 498 | 965460 | AC022665 | 6445 | 1-532 |
| HODHS34 | 498 | 965460 | AL078646 | 6446 | 1-317 |
| | | | | | 372-1502 |
| HODHS34 | 498 | 965460 | AL117349 | 6447 | 1-317 |
| | | | | | 372-1502 |
| HODHS34 | 498 | 965460 | AL078646 | 6448 | 1-615 |
| HODHS34 | 498 | 965460 | AL117349 | 6449 | 1-615 |
| HODHY53 | 499 | 914554 | AC026367 | 6450 | 1-669 |
| HODHY53 | 499 | 914554 | AC027063 | 6451 | 1-669 |
| HODJZ90 | 502 | 965049 | AC009118 | 6452 | 1-155 |
| | | | | | 657-767 |
| | | | | | 862-1035 |
| | | | | | 1706-2237 |
| | | | | | 2902-3158 |
| | | | | | 3800-4185 |
| | | | | | 4530-4783 |
| | | | | | 5286-5461 |
| | | | | | 6519-6695 |
| | | | | | 6845-6976 |
| | | | | | 7956-8460 |
| | | | | | 8578-8682 |
| | | | | | 10277-10454 |
| | | | | | 12772-12939 |
| | | | | | 13545-13749 |
| | | | | | 14101-14364 |
| | | | | | 15084-15617 |
| | | | | | 16693-17078 |
| | | | | | 17284-17820 |
| | | | | | 17893-18820 |
| HODJZ90 | 502 | 965049 | AC068659 | 6453 | 1-168 |
| | | | | | 775-979 |
| | | | | | 1331-1594 |
| | | | | | 2315-2847 |
| | | | | | 3900-4316 |
| | | | | | 4491-5027 |
| | | | | | 5100-7427 |
| | | | | | 7603-8027 |
| | | | | | 8209-8523 |
| | | | | | 9220-9673 |
| | | | | | 9808-9950 |
| | | | | | 10065-10377 |
| HODJZ90 | 502 | 965049 | AC010287 | 6454 | 1-152 |
| | | | | | 1091-1213 |
| | | | | | 1460-1748 |
| | | | | | 2882-3432 |
| | | | | | 5178-5410 |
| | | | | | 5727-5869 |
| | | | | | 7099-7282 |
| | | | | | 8390-8552 |
| | | | | | 9319-9434 |
| | | | | | 9703-9816 |
| | | | | | 10255-10328 |
| | | | | | 10502-10681 |
| | | | | | 11511-11641 |
| | | | | | 13098-13673 |
| | | | | | 14293-14594 |
| | | | | | 14667-14772 |
| | | | | | 15383-15627 |
| | | | | | 17040-17237 |
| | | | | | 18114-18254 |
| | | | | | 18756-18866 |
| | | | | | 18961-19136 |
| | | | | | 19803-20334 |
| | | | | | 20999-21280 |
| | | | | | 21897-22282 |
| | | | | | 22627-22880 |
| | | | | | 23383-23641 |
| | | | | | 24623-24788 |
| | | | | | 24938-25069 |
| | | | | | 26048-26552 |
| | | | | | 26670-26774 |
| | | | | | 28368-28545 |
| | | | | | 30865-31032 |
| | | | | | 31639-31843 |
| | | | | | 32195-32458 |
| | | | | | 33179-33711 |
| | | | | | 34763-35179 |
| | | | | | 35354-35890 |
| | | | | | 35963-38290 |
| | | | | | 38466-38890 |
| | | | | | 39072-39386 |
| | | | | | 40083-40535 |
| | | | | | 40670-40812 |
| | | | | | 40927-41239 |
| HODJZ90 | 502 | 965049 | AC068659 | 6455 | 1-374 |
| HODJZ90 | 502 | 965049 | AC010287 | 6456 | 1-374 |
| HODJZ90 | 502 | 965049 | AC010287 | 6457 | 1-552 |
| HOFAE61 | 509 | 707359 | AC015841 | 6458 | 1-522 |
| | | | | | 624-2029 |
| HOFAE61 | 509 | 707359 | AC015841 | 6459 | 1-454 |
| HOFAE61 | 509 | 707359 | AC015841 | 6460 | 1-146 |
| | | | | | 1533-2211 |
| | | | | | 2325-2545 |
| HOFMA24 | 511 | 782275 | AC027590 | 6461 | 1-150 |
| | | | | | 819-1344 |
| HOFMA24 | 511 | 782275 | AC027590 | 6462 | 1-309 |
| HOGCX95 | 591 | 890607 | AC024052 | 6463 | 1-1585 |
| HOGCX95 | 591 | 890607 | AC026640 | 6464 | 1-1585 |
| HOGCX95 | 591 | 890607 | AC026640 | 6465 | 1-593 |
| HOGCX95 | 591 | 890607 | AC024052 | 6466 | 1-593 |
| HOOJQ59 | 594 | 965013 | AC011773 | 6467 | 1-112 |
| | | | | | 958-1122 |
| | | | | | 2276-2368 |
| | | | | | 2434-2591 |
| | | | | | 5326-5394 |
| | | | | | 6480-6792 |
| | | | | | 7058-7324 |
| | | | | | 8121-8598 |
| | | | | | 8781-9141 |
| | | | | | 10080-10113 |
| | | | | | 11282-13254 |
| | | | | | 13555-13984 |
| | | | | | 13987-14323 |
| | | | | | 14474-14670 |
| | | | | | 14730-16350 |
| | | | | | 16725-16864 |
| | | | | | 17843-17908 |
| HOOJQ59 | 594 | 965013 | AC011773 | 6468 | 1-268 |
| | | | | | 1581-1897 |
| | | | | | 4118-4159 |
| HOVAF17 | 595 | 576627 | AC010907 | 6469 | 1-430 |
| HOVAF17 | 595 | 576627 | AC010907 | 6470 | 1-131 |
| HOVAG49 | 597 | 927320 | AL355615 | 6471 | 1-1030 |
| | | | | | 1130-1727 |
| HOVAG49 | 597 | 927320 | AL136082 | 6472 | 1-1030 |
| | | | | | 1130-1727 |
| HOVAG49 | 597 | 927320 | AL355615 | 6473 | 1-392 |
| HOVAG49 | 597 | 927320 | AL136082 | 6474 | 1-392 |
| HOVAI41 | 598 | 670963 | AL136419 | 6475 | 1-100 |
| HOVAI41 | 598 | 670963 | AL136419 | 6476 | 1-146 |
| HOVBQ10 | 601 | 964671 | AL078474 | 6477 | 1-789 |
| HOVBQ10 | 601 | 964671 | AL078474 | 6478 | 1-284 |
| HOVBQ10 | 601 | 964671 | AL078474 | 6479 | 1-69 |
| | | | | | 687-1133 |
| | | | | | 2574-2676 |
| | | | | | 3006-3363 |
| | | | | | 3826-3975 |
| | | | | | 4852-5112 |
| | | | | | 5737-6317 |
| HOVBY34 | 602 | 706816 | AC006512 | 6480 | 1-247 |
| | | | | | 2812-2918 |
| | | | | | 3488-3953 |
| | | | | | 3964-4527 |
| | | | | | 4683-5151 |
| | | | | | 5330-9121 |
| | | | | | 9884-10335 |
| | | | | | 10748-10781 |
| | | | | | 10960-11055 |
| | | | | | 11323-12111 |
| | | | | | 12127-12791 |
| | | | | | 12911-13262 |
| | | | | | 13266-13791 |
| | | | | | 14696-14866 |
| | | | | | 15107-15207 |
| | | | | | 16551-16955 |
| | | | | | 17174-17614 |
| | | | | | 18504-18749 |
| | | | | | 19392-19660 |
| | | | | | 19720-20075 |
| | | | | | 20785-21233 |
| | | | | | 21290-21733 |
| | | | | | 23618-23649 |
| | | | | | 23982-24188 |
| | | | | | 24481-24573 |
| | | | | | 24741-25003 |
| | | | | | 26591-26705 |
| | | | | | 26738-27249 |
| | | | | | 28479-28858 |
| | | | | | 29065-31669 |
| | | | | | 31926-32887 |
| | | | | | 33667-34293 |
| | | | | | 35229-35682 |
| | | | | | 38114-38771 |
| HOVBY34 | 602 | 706816 | AC025550 | 6481 | 1-405 |
| HOVBY34 | 602 | 706816 | AC002357 | 6482 | 1-1186 |
| HOVBY34 | 602 | 706816 | AC006512 | 6483 | 1-818 |
| | | | | | 963-1440 |
| | | | | | 1469-1958 |
| | | | | | 2220-3076 |
| | | | | | 3455-3663 |
| | | | | | 3931-4285 |
| | | | | | 4549-4632 |
| | | | | | 4696-5069 |
| | | | | | 5245-5337 |
| | | | | | 5461-5775 |
| HOVBY34 | 602 | 706816 | AC006512 | 6484 | 1-738 |
| HOVCA52 | 604 | 727170 | AC025741 | 6485 | 1-696 |
| HOVCI76 | 606 | 858845 | AL049694 | 6486 | 1-469 |
| HOVCI76 | 606 | 858845 | AL049694 | 6487 | 1-476 |
| HOVCJ24 | 608 | 858844 | AC005096 | 6488 | 1-364 |
| HOVCJ24 | 608 | 858844 | AC005096 | 6489 | 1-452 |
| HOVCJ24 | 608 | 858844 | AC005096 | 6490 | 1-161 |
| HOVCM22 | 609 | 674177 | AC008636 | 6491 | 1-1708 |
| | | | | | 1746-1835 |
| | | | | | 2249-2976 |
| HOVCM22 | 609 | 674177 | AC008675 | 6492 | 1-1708 |
| | | | | | 1746-1835 |
| | | | | | 2249-2976 |
| HOVCM22 | 609 | 674177 | AC008625 | 6493 | 1-1712 |
| | | | | | 1750-1839 |
| | | | | | 2253-2980 |
| HOVCM22 | 609 | 674177 | AC018757 | 6494 | 1-700 |
| HOVCM22 | 609 | 674177 | AC008636 | 6495 | 1-399 |
| HOVCM22 | 609 | 674177 | AC008636 | 6496 | 1-512 |
| HOVCM22 | 609 | 674177 | AC008675 | 6497 | 1-512 |
| HOVCM22 | 609 | 674177 | AC008625 | 6498 | 1-512 |
| HOVCM22 | 609 | 674177 | AC008675 | 6499 | 1-400 |
| HOVCM22 | 609 | 674177 | AC008625 | 6500 | 1-399 |
| HOVCM22 | 609 | 674177 | AC018757 | 6501 | 1-955 |
| HOVCO11 | 610 | 970814 | AC004520 | 6502 | 1-3242 |
| HOVCO11 | 610 | 970814 | AC010677 | 6503 | 1-1724 |
| | | | | | 1877-2444 |
| | | | | | 2754-3600 |
| | | | | | 3759-3976 |
| | | | | | 4113-4236 |
| | | | | | 4295-4403 |
| | | | | | 4868-5153 |
| | | | | | 5486-5685 |
| | | | | | 5729-6209 |
| | | | | | 6382-6482 |
| | | | | | 6747-7765 |
| | | | | | 7838-11596 |
| HOVCO11 | 610 | 970814 | AC004520 | 6504 | 1-423 |
| HOVCO11 | 610 | 970814 | AC010677 | 6505 | 1-41 |
| | | | | | 3758-5500 |
| | | | | | 5561-8116 |
| | | | | | 8808-8972 |
| | | | | | 10854-11380 |
| | | | | | 13142-13690 |
| | | | | | 14343-15093 |
| | | | | | 15286-15643 |
| | | | | | 15801-16163 |
| HOVCO58 | 611 | 736065 | AC018665 | 6506 | 1-416 |
| HOVCQ47 | 612 | 496190 | AL354979 | 6507 | 1-1421 |
| HOVEK70 | 615 | 909138 | AC016877 | 6508 | 1-369 |
| | | | | | 817-2106 |
| | | | | | 2511-2860 |
| | | | | | 4380-5157 |
| | | | | | 6201-6321 |
| | | | | | 7064-7649 |
| | | | | | 11036-11360 |
| HOVEK70 | 615 | 909138 | AC016877 | 6509 | 1-139 |
| HOVJA10 | 617 | 961467 | AL160290 | 6510 | 1-442 |
| HOVJA10 | 617 | 961467 | AL160290 | 6511 | 1-119 |
| HPCAH88 | 622 | 953808 | AL356212 | 6512 | 1-835 |
| HPCAH88 | 622 | 953808 | AL356212 | 6513 | 1-1422 |
| HPCAI68 | 624 | 655536 | AC026134 | 6514 | 1-354 |
| HPCAK16 | 625 | 662121 | AL139185 | 6515 | 1-716 |
| HPCAK16 | 625 | 662121 | AL139181 | 6516 | 1-135 |
| | | | | | 185-285 |
| | | | | | 3899-4614 |
| | | | | | 4653-4942 |
| | | | | | 5462-5478 |
| HPCAK16 | 625 | 662121 | AL139185 | 6517 | 1-290 |
| HPCAK16 | 625 | 662121 | AL139181 | 6518 | 1-724 |
| HPCAK16 | 625 | 662121 | AL139181 | 6519 | 1-554 |
| HPCAK57 | 626 | 734931 | AL136531 | 6520 | 1-430 |
| HPCAK57 | 626 | 734931 | AL031665 | 6521 | 1-430 |
| HPCAK57 | 626 | 734931 | AL136531 | 6522 | 1-378 |
| HPCAK57 | 626 | 734931 | AL136531 | 6523 | 1-396 |
| HPCAK57 | 626 | 734931 | AL031665 | 6524 | 1-396 |
| HPCAK57 | 626 | 734931 | AL031665 | 6525 | 1-378 |
| HPCAL60 | 627 | 655723 | AC009896 | 6526 | 1-1578 |
| | | | | | 1640-1954 |
| | | | | | 2042-2612 |
| HPCAL60 | 627 | 655723 | AC068429 | 6527 | 1-980 |
| HPCAL60 | 627 | 655723 | AC009896 | 6528 | 1-119 |
| HPCAL60 | 627 | 655723 | AC068429 | 6529 | 1-119 |
| HPCAL60 | 627 | 655723 | AC068429 | 6530 | 1-1030 |
| HPCAL86 | 628 | 924709 | AC073027 | 6531 | 1-307 |
| HPCAL86 | 628 | 924709 | AC026874 | 6532 | 1-307 |
| HPCAM22 | 629 | 655607 | AC002381 | 6533 | 1-421 |
| HPCAM22 | 629 | 655607 | AC002381 | 6534 | 1-746 |
| HPCAM22 | 629 | 655607 | AC002381 | 6535 | 1-357 |
| HPCAN59 | 630 | 655742 | AL358075 | 6536 | 1-295 |
| HPCAN59 | 630 | 655742 | AC053512 | 6537 | 1-295 |
| HPCAN59 | 630 | 655742 | AL358075 | 6538 | 1-430 |
| HPCAN59 | 630 | 655742 | AC053512 | 6539 | 1-430 |
| HPCAO04 | 631 | 655732 | AL390024 | 6540 | 1-664 |
| HPCAO04 | 631 | 655732 | AL160060 | 6541 | 1-663 |
| HPCAO04 | 631 | 655732 | AL390024 | 6542 | 1-320 |
| HPCAO04 | 631 | 655732 | AL160060 | 6543 | 1-320 |
| KPCPO07 | 633 | 951826 | AC010595 | 6544 | 1-512 |
| HPCPO07 | 633 | 951826 | AC021175 | 6545 | 1-512 |
| HPDOY06 | 636 | 929318 | AC024534 | 6546 | 1-472 |
| HPDOY06 | 636 | 929318 | AC068222 | 6547 | 1-670 |
| | | | | | 818-1289 |
| | | | | | 1297-1525 |
| HPDOY06 | 636 | 929318 | AC068222 | 6548 | 1-119 |
| HPDOY06 | 636 | 929318 | AC024534 | 6549 | 1-670 |
| HPDPK12 | 638 | 969340 | AC016737 | 6550 | 1-1302 |
| HPDPK12 | 638 | 969340 | AC016737 | 6551 | 1-241 |
| HPDPQ40 | 639 | 922464 | AC016731 | 6552 | 1-608 |
| HPDPQ40 | 639 | 922464 | AC073119 | 6553 | 1-608 |
| HPDPQ40 | 639 | 922464 | AC016731 | 6554 | 1-603 |
| HPDRB01 | 641 | 914437 | AC016032 | 6555 | 1-483 |
| | | | | | 1320-3926 |
| | | | | | 4782-5528 |
| | | | | | 6670-6715 |
| HPDRB01 | 641 | 914437 | AC040994 | 6556 | 1-541 |
| HPDRD28 | 642 | 957791 | AL139377 | 6557 | 1-483 |
| HPDRD28 | 642 | 957791 | AL139377 | 6558 | 1-412 |
| HPDRD28 | 642 | 957791 | AL139377 | 6559 | 1-411 |
| HPDRG92 | 643 | 967704 | AC069546 | 6560 | 1-131 |
| | | | | | 220-297 |
| | | | | | 620-921 |
| | | | | | 1555-1722 |
| | | | | | 1899-2066 |
| | | | | | 2727-3464 |
| | | | | | 4649-5150 |
| HPDRG92 | 643 | 967704 | AC012683 | 6561 | 1-131 |
| | | | | | 220-297 |
| | | | | | 620-921 |
| | | | | | 1555-1722 |
| | | | | | 1899-2066 |
| | | | | | 2727-3464 |
| | | | | | 4650-5151 |
| HPDRG92 | 643 | 967704 | AC069546 | 6562 | 1-116 |
| HPDRG92 | 643 | 967704 | AC012683 | 6563 | 1-861 |
| HPDRG92 | 643 | 967704 | AC012683 | 6564 | 1-45 |
| | | | | | 915-1022 |
| HPDRO20 | 644 | 957678 | AC027421 | 6565 | 1-426 |
| HPDRO20 | 644 | 957678 | AL353622 | 6566 | 1-172 |
| | | | | | 180-293 |
| | | | | | 2209-2873 |
| | | | | | 2876-3301 |
| | | | | | 4705-6461 |
| | | | | | 6539-6708 |
| HPDRO20 | 644 | 957678 | AC025860 | 6567 | 1-426 |
| HPDRO20 | 644 | 957678 | AC027421 | 6568 | 1-527 |
| HPDRO20 | 644 | 957678 | AC025860 | 6569 | 1-665 |
| HPDVF03 | 647 | 922193 | AC022084 | 6570 | 1-147 |
| | | | | | 388-490 |
| | | | | | 560-958 |
| | | | | | 1148-1479 |
| | | | | | 2004-4169 |
| HPDVF03 | 647 | 922193 | AC027140 | 6571 | 1-147 |
| | | | | | 388-490 |
| | | | | | 560-1021 |
| | | | | | 1138-1469 |
| | | | | | 1993-4158 |
| HPDVF03 | 647 | 922193 | AC022084 | 6572 | 1-453 |
| HPDVY17 | 650 | 955902 | AC007009 | 6573 | 1-435 |
| HPEAF19 | 651 | 867892 | AC024132 | 6574 | 1-344 |
| HPEBA06 | 652 | 960802 | AL359892 | 6575 | 1-655 |
| HPEBA06 | 652 | 960802 | AL031777 | 6576 | 1-655 |
| HPEBA06 | 652 | 960802 | AL359892 | 6577 | 1-802 |
| HPEBA06 | 652 | 960802 | AL359892 | 6578 | 1-345 |
| | | | | | 1680-2328 |
| HPEBA06 | 652 | 960802 | AL031777 | 6579 | 1-340 |
| | | | | | 1677-2325 |
| HPEBA06 | 652 | 960802 | AL031777 | 6580 | 1-545 |
| HPEBA51 | 653 | 723298 | AL353788 | 6581 | 1-434 |
| HPEBA51 | 653 | 723298 | AL139184 | 6582 | 1-434 |
| HPEBA51 | 653 | 723298 | AL353788 | 6583 | 1-143 |
| HPEBA51 | 653 | 723298 | AL139184 | 6584 | 1-143 |
| HPEBD31 | 654 | 655760 | AC018761 | 6585 | 1-538 |
| HPEBD31 | 654 | 655760 | AC020934 | 6586 | 1-538 |
| HPEBD31 | 654 | 655760 | AC018761 | 6587 | 1-263 |
| HPEBD31 | 654 | 655760 | AC020934 | 6588 | 1-736 |
| | | | | | 792-957 |
| | | | | | 1232-1693 |
| | | | | | 1845-2006 |
| | | | | | 2206-2481 |
| | | | | | 2621-3482 |
| | | | | | 3536-3786 |
| | | | | | 3815-4535 |
| | | | | | 4695-5049 |
| HPEBD31 | 654 | 655760 | AC018761 | 6589 | 1-736 |
| | | | | | 792-957 |
| | | | | | 1232-1693 |
| | | | | | 1845-2006 |
| | | | | | 2206-2481 |
| | | | | | 2621-3482 |
| | | | | | 3548-3786 |
| | | | | | 3815-4535 |
| | | | | | 4695-5049 |
| HPEBD31 | 654 | 655760 | AC020934 | 6590 | 1-263 |
| HPEKJ42 | 657 | 922391 | AC078803 | 6591 | 1-384 |
| | | | | | 393-809 |
| | | | | | 961-1370 |
| HPEKJ42 | 657 | 922391 | AC069418 | 6592 | 1-384 |
| | | | | | 393-809 |
| | | | | | 961-1370 |
| HPEKJ42 | 657 | 922391 | AC078803 | 6593 | 1-167 |
| HPEKJ42 | 657 | 922391 | AC069418 | 6594 | 1-167 |
| HPEKJ42 | 657 | 922391 | AC078803 | 6595 | 1-262 |
| HPEKJ42 | 657 | 922391 | AC069418 | 6596 | 1-262 |
| HPEKU27 | 658 | 921663 | AC011939 | 6597 | 1-647 |
| HPEKU27 | 658 | 921663 | AC011939 | 6598 | 1-313 |
| HPFAA06 | 660 | 960801 | AC004111 | 6599 | 1-863 |
| | | | | | 3429-4124 |
| HPFAA06 | 660 | 960801 | AC010277 | 6600 | 1-863 |
| | | | | | 3424-4119 |
| HPFAA06 | 660 | 960801 | AC004111 | 6601 | 1-667 |
| HPFAA06 | 660 | 960801 | AC004111 | 6602 | 1-522 |
| HPFAA06 | 660 | 960801 | AC010277 | 6603 | 1-667 |
| HPFAA06 | 660 | 960801 | AC010277 | 6604 | 1-401 |
| HPFCA36 | 661 | 524720 | AC007065 | 6605 | 1-340 |
| | | | | | 351-738 |
| | | | | | 1335-1773 |
| | | | | | 3899-4267 |
| | | | | | 14595-14825 |
| | | | | | 18322-18557 |
| | | | | | 19664-20128 |
| | | | | | 20663-20915 |
| | | | | | 22067-22299 |
| HPFCA36 | 661 | 524720 | AC007065 | 6606 | 1-495 |
| HPFCA36 | 661 | 524720 | AC007065 | 6607 | 1-483 |
| HPFCA71 | 662 | 655596 | AC018681 | 6608 | 1-364 |
| HPFCF09 | 663 | 536666 | AC022417 | 6609 | 1-174 |
| | | | | | 1973-2115 |
| | | | | | 2563-3003 |
| | | | | | 3442-3591 |
| | | | | | 4140-4231 |
| | | | | | 5955-6389 |
| | | | | | 6564-7100 |
| | | | | | 8645-8708 |
| | | | | | 8978-9101 |
| | | | | | 10914-11290 |
| | | | | | 11985-12297 |
| | | | | | 13345-13410 |
| | | | | | 14962-15695 |
| | | | | | 18991-19133 |
| | | | | | 20469-22756 |
| HPFCF09 | 663 | 536666 | AC022417 | 6610 | 1-104 |
| HPFCF24 | 664 | 655744 | AL160279 | 6611 | 1-398 |
| HPFCF24 | 664 | 655744 | AL160279 | 6612 | 1-313 |
| HPFCF83 | 666 | 781490 | AC036220 | 6613 | 1-327 |
| HPFCF83 | 666 | 781490 | AC026273 | 6614 | 1-327 |
| HPFCF83 | 666 | 781490 | AC018963 | 6615 | 1-369 |
| HPFCF83 | 666 | 781490 | AC023099 | 6616 | 1-369 |
| | | | | | 627-1264 |
| | | | | | 1708-2248 |
| HPFCF83 | 666 | 781490 | AC016424 | 6617 | 1-393 |
| HPFCF83 | 666 | 781490 | AC008776 | 6618 | 1-369 |
| HPFCF83 | 666 | 781490 | AC022264 | 6619 | 1-369 |
| | | | | | 627-1264 |
| | | | | | 1708-2248 |
| HPFCF83 | 666 | 781490 | AC024972 | 6620 | 1-390 |
| HPFCF83 | 666 | 781490 | AC036220 | 6621 | 1-1419 |
| HPFCF83 | 666 | 781490 | AC026273 | 6622 | 1-1420 |
| HPFCF83 | 666 | 781490 | AC023099 | 6623 | 1-1529 |
| HPFCF83 | 666 | 781490 | AC016424 | 6624 | 1-612 |
| HPFCF83 | 666 | 781490 | AC008776 | 6625 | 1-339 |
| | | | | | 4826-4859 |
| HPFCF83 | 666 | 781490 | AC018963 | 6626 | 1-1382 |
| | | | | | 1384-1518 |
| HPFCF83 | 666 | 781490 | AC023099 | 6627 | 1-434 |
| HPFCF83 | 666 | 781490 | AC016424 | 6628 | 1-1527 |
| HPFCF83 | 666 | 781490 | AC022264 | 6629 | 1-1529 |
| HPFCF83 | 666 | 781490 | AC022264 | 6630 | 1-434 |
| HPFCF83 | 666 | 781490 | AC024972 | 6631 | 1-1524 |
| HPFCF83 | 666 | 781490 | AC024972 | 6632 | 1-612 |
| HPFCH15 | 667 | 655768 | AC068428 | 6633 | 1-352 |
| HPFCH89 | 668 | 655538 | AC012589 | 6634 | 1-227 |
| HPFCH89 | 668 | 655538 | AC022088 | 6635 | 1-227 |
| HPFCH89 | 668 | 655538 | AC012589 | 6636 | 1-250 |
| HPFCH89 | 668 | 655538 | AC022088 | 6637 | 1-250 |
| HPFCM41 | 669 | 655736 | AC008278 | 6638 | 1-348 |
| HPFCM41 | 669 | 655736 | AC008271 | 6639 | 1-348 |
| HPFCM41 | 669 | 655736 | AC008278 | 6640 | 1-471 |
| HPFCM41 | 669 | 655736 | AC008271 | 6641 | 1-471 |
| HPFCM87 | 670 | 925495 | AC004479 | 6642 | 1-318 |
| HPFCM87 | 670 | 925495 | AC004480 | 6643 | 1-318 |
| HPFCM87 | 670 | 925495 | AC004479 | 6644 | 1-155 |
| HPFCM87 | 670 | 925495 | AC004480 | 6645 | 1-155 |
| HPFCO02 | 672 | 867871 | AC019103 | 6646 | 1-1224 |
| HPFCO67 | 673 | 867880 | AC024489 | 6647 | 1-302 |
| HPFCR21 | 675 | 655621 | AC066603 | 6648 | 1-448 |
| HPFCR21 | 675 | 655621 | AC066603 | 6649 | 1-326 |
| HPFCT53 | 678 | 974257 | AC078894 | 6650 | 1-654 |
| HPFCT53 | 678 | 974257 | AC026815 | 6651 | 1-654 |
| HPFCT53 | 678 | 974257 | AC034258 | 6652 | 1-648 |
| HPFCT53 | 678 | 974257 | AC078893 | 6653 | 1-640 |
| HPFCT53 | 678 | 974257 | AC068667 | 6654 | 1-654 |
| HPFCT53 | 678 | 974257 | AC073166 | 6655 | 1-640 |
| HPFCT53 | 678 | 974257 | AC074226 | 6656 | 1-640 |
| HPFCT53 | 678 | 974257 | AC027037 | 6657 | 1-640 |
| HPFCT53 | 678 | 974257 | AC078898 | 6658 | 1-640 |
| HPFCT53 | 678 | 974257 | AC068924 | 6659 | 1-640 |
| HPFCT62 | 679 | 655432 | AC016767 | 6660 | 1-689 |
| HPFCT62 | 679 | 655432 | AC026369 | 6661 | 1-689 |
| HPFCT62 | 679 | 655432 | AL078621 | 6662 | 1-689 |
| HPFCT62 | 679 | 655432 | AC016767 | 6663 | 1-653 |
| HPFCT62 | 679 | 655432 | AC026369 | 6664 | 1-104 |
| | | | | | 117-884 |
| | | | | | 890-1137 |
| HPFCT62 | 679 | 655432 | AL078621 | 6665 | 1-1121 |
| HPFCV71 | 681 | 525554 | AL133410 | 6666 | 1-957 |
| | | | | | 1117-1339 |
| | | | | | 1594-1735 |
| | | | | | 2021-2186 |
| | | | | | 2430-2526 |
| | | | | | 2791-2922 |
| | | | | | 3026-3179 |
| | | | | | 3416-3562 |
| | | | | | 3669-3799 |
| | | | | | 3855-4635 |
| | | | | | 4830-4891 |
| | | | | | 5448-6268 |
| | | | | | 6357-7105 |
| HPFCV71 | 681 | 525554 | AL133410 | 6667 | 1-189 |
| HPFCV71 | 681 | 525554 | AL133410 | 6668 | 1-85 |
| | | | | | 1082-1951 |
| | | | | | 2761-3118 |
| HPFCX18 | 682 | 655588 | AC022598 | 6669 | 1-559 |
| HPFCX18 | 682 | 655588 | AC024367 | 6670 | 1-559 |
| HPFCX18 | 682 | 655588 | AC022598 | 6671 | 1-484 |
| | | | | | 539-645 |
| HPFCX18 | 682 | 655588 | AC022598 | 6672 | 1-421 |
| HPFCX18 | 682 | 655588 | AC024367 | 6673 | 1-421 |
| HPFCX18 | 682 | 655588 | AC024367 | 6674 | 1-484 |
| | | | | | 539-645 |
| HPFDD06 | 683 | 960700 | AL359314 | 6675 | 1-282 |
| HPFDD06 | 683 | 960700 | AL390239 | 6676 | 1-418 |
| HPFDD06 | 683 | 960700 | AL390239 | 6677 | 1-157 |
| | | | | | 634-1162 |
| HPFDE38 | 684 | 655704 | AC073616 | 6678 | 1-615 |
| HPFDE38 | 684 | 655704 | AC061966 | 6679 | 1-615 |
| HPFDE38 | 684 | 655704 | AC061966 | 6680 | 1-957 |
| HPFDE38 | 684 | 655704 | AC061966 | 6681 | 1-396 |
| HPFDF79 | 686 | 973732 | AL139240 | 6682 | 1-600 |
| HPFDF79 | 686 | 973732 | AL139240 | 6683 | 1-497 |
| HPFDG58 | 687 | 655610 | AC021557 | 6684 | 1-358 |
| HPFDG58 | 687 | 655610 | AC021557 | 6685 | 1-308 |
| HPFDI23 | 688 | 655549 | AC044876 | 6686 | 1-351 |
| HPFDI23 | 688 | 655549 | AC010983 | 6687 | 1-351 |
| HPFDI23 | 688 | 655549 | AC010983 | 6688 | 1-1694 |
| HPFDL90 | 689 | 954333 | U73330 | 6689 | 1-204 |
| HPFDL90 | 689 | 954333 | AL137143 | 6690 | 1-204 |
| HPFDL90 | 689 | 954333 | AL137143 | 6691 | 1-114 |
| HPFDS59 | 690 | 655543 | AC004111 | 6692 | 1-279 |
| HPFDS59 | 690 | 655543 | AC004111 | 6693 | 1-429 |
| HPFDT17 | 691 | 581133 | AC021972 | 6694 | 1-360 |
| HPFDT17 | 691 | 581133 | AC023961 | 6695 | 1-360 |
| HPFDT17 | 691 | 581133 | AC023961 | 6696 | 1-493 |
| HPFDT54 | 692 | 655530 | AC078787 | 6697 | 1-337 |
| HPFDT54 | 692 | 655530 | AC068844 | 6698 | 1-337 |
| HPFDT54 | 692 | 655530 | AC068844 | 6699 | 1-156 |
| | | | | | 307-357 |
| HPFDT61 | 693 | 974569 | AC012456 | 6700 | 1-429 |
| HPFDT61 | 693 | 974569 | AC012456 | 6701 | 1-508 |
| HPFDU30 | 694 | 522113 | AL079301 | 6702 | 1-353 |
| HPFDU30 | 694 | 522113 | AL079301 | 6703 | 1-368 |
| HPFDU30 | 694 | 522113 | AL079301 | 6704 | 1-477 |
| HPFDU38 | 695 | 867879 | AP001816 | 6705 | 1-357 |
| HPFDU38 | 695 | 867879 | AC013785 | 6706 | 1-357 |
| HPFDU38 | 695 | 867879 | AP001816 | 6707 | 1-1082 |
| HPFDU38 | 695 | 867879 | AP001816 | 6708 | 1-605 |
| HPFDU38 | 695 | 867879 | AC013785 | 6709 | 1-1082 |
| HPFDU38 | 695 | 867879 | AC013785 | 6710 | 1-605 |
| HPFDV71 | 697 | 867870 | AC004170 | 6711 | 1-90 |
| HPFDV71 | 697 | 867870 | AC004170 | 6712 | 1-498 |
| | | | | | 742-1013 |
| | | | | | 1596-1878 |
| | | | | | 2017-2131 |
| | | | | | 2550-3098 |
| HPFDX13 | 698 | 655571 | AC015499 | 6713 | 1-163 |
| | | | | | 842-1416 |
| | | | | | 1593-1862 |
| | | | | | 2203-2279 |
| | | | | | 3755-4525 |
| | | | | | 4585-5183 |
| | | | | | 5285-5721 |
| HPFDX13 | 698 | 655571 | AC034139 | 6714 | 1-163 |
| | | | | | 842-1416 |
| | | | | | 1593-1862 |
| | | | | | 2203-2279 |
| | | | | | 3755-4525 |
| | | | | | 4585-5183 |
| | | | | | 5285-5721 |
| HPFDX13 | 698 | 655571 | AC015499 | 6715 | 1-274 |
| HPFDX13 | 698 | 655571 | AC034139 | 6716 | 1-250 |
| | | | | | 370-1118 |
| HPFDX13 | 698 | 655571 | AC034139 | 6717 | 1-195 |
| HPFDZ20 | 699 | 655764 | AC026262 | 6718 | 1-320 |
| HPFDZ20 | 699 | 655764 | AC026262 | 6719 | 1-145 |
| HPFDZ20 | 699 | 655764 | AC026262 | 6720 | 1-394 |
| HPFEA08 | 700 | 960372 | AL158145 | 6721 | 1-102 |
| | | | | | 605-988 |
| | | | | | 994-1149 |
| | | | | | 1496-1658 |
| | | | | | 1689-2232 |
| | | | | | 2888-3316 |
| | | | | | 4118-5228 |
| | | | | | 5538-5638 |
| | | | | | 8075-8374 |
| | | | | | 9151-9248 |
| | | | | | 10537-10628 |
| | | | | | 14985-15054 |
| HPFEA08 | 700 | 960372 | AL158145 | 6722 | 1-101 |
| HPFEA32 | 701 | 925499 | AF228661 | 6723 | 1-296 |
| HPFEA32 | 701 | 925499 | AF215845 | 6724 | 1-296 |
| HPIAE79 | 704 | 655748 | AC011234 | 6725 | 1-367 |
| HPIAQ49 | 706 | 919469 | AL161913 | 6726 | 1-434 |
| HPIAQ49 | 706 | 919469 | AC007951 | 6727 | 1-434 |
| HPIAS40 | 708 | 928614 | AC005606 | 6728 | 1-237 |
| | | | | | 839-1786 |
| | | | | | 1974-2464 |
| HPIAS40 | 708 | 928614 | AC005363 | 6729 | 1-237 |
| | | | | | 839-1786 |
| | | | | | 1974-2464 |
| HPIAS40 | 708 | 928614 | AC005606 | 6730 | 1-517 |
| HPIAS40 | 708 | 928614 | AC005606 | 6731 | 1-1306 |
| | | | | | 1548-1968 |
| | | | | | 2231-2776 |
| HPIAS40 | 708 | 928614 | AC005363 | 6732 | 1-517 |
| HPIAS40 | 708 | 928614 | AC005363 | 6733 | 1-1306 |
| | | | | | 1548-1968 |
| | | | | | 2231-2776 |
| HPTAV80 | 709 | 615007 | AC011747 | 6734 | 1-316 |
| | | | | | 562-618 |
| | | | | | 724-1313 |
| | | | | | 1814-2395 |
| HPJAV80 | 709 | 615007 | AC012495 | 6735 | 1-316 |
| | | | | | 562-618 |
| | | | | | 724-1313 |
| | | | | | 1814-2395 |
| HPJAV80 | 709 | 615007 | AC011747 | 6736 | 1-1776 |
| HPJAV80 | 709 | 615007 | AC012495 | 6737 | 1-133 |
| | | | | | 239-638 |
| | | | | | 2245-2345 |
| | | | | | 3320-3556 |
| | | | | | 5015-8143 |
| HPIAZ37 | 711 | 655753 | AC018613 | 6738 | 1-357 |
| | | | | | 1494-1815 |
| | | | | | 2463-5309 |
| | | | | | 5330-8041 |
| HPJAZ37 | 711 | 655753 | AL356099 | 6739 | 1-357 |
| | | | | | 1495-1816 |
| | | | | | 2464-5308 |
| | | | | | 5330-8041 |
| | | | | | 16792-21577 |
| HPIAZ37 | 711 | 655753 | AL355474 | 6740 | 1-357 |
| | | | | | 1494-1815 |
| | | | | | 2463-5308 |
| | | | | | 5329-8041 |
| HPIBT49 | 714 | 655719 | AC068558 | 6741 | 1-468 |
| HPJAB19 | 717 | 655540 | AC027164 | 6742 | 1-422 |
| HPJAB19 | 717 | 655540 | AC024388 | 6743 | 1-422 |
| HPJAB19 | 717 | 655540 | AC027164 | 6744 | 1-325 |
| HPJAB19 | 717 | 655540 | AC024388 | 6745 | 1-325 |
| HPJAB84 | 718 | 655531 | AC013471 | 6746 | 1-335 |
| HPJAC36 | 719 | 655601 | AC073476 | 6747 | 1-107 |
| | | | | | 2096-2450 |
| | | | | | 3106-3182 |
| | | | | | 3643-3787 |
| | | | | | 4316-4982 |
| | | | | | 5399-5724 |
| | | | | | 6657-7075 |
| | | | | | 7479-7686 |
| | | | | | 9286-9495 |
| | | | | | 9701-9784 |
| | | | | | 10235-10339 |
| HPJAC92 | 720 | 867831 | AP001374 | 6748 | 1-441 |
| HPJAC92 | 720 | 867831 | AP001845 | 6749 | 1-441 |
| HPJAC92 | 720 | 867831 | AP001374 | 6750 | 1-370 |
| HPJAC92 | 720 | 867831 | AP001845 | 6751 | 1-370 |
| HPJAD09 | 721 | 655712 | AL356873 | 6752 | 1-341 |
| HPJAD09 | 721 | 655712 | AL080239 | 6753 | 1-341 |
| HPJAD66 | 722 | 655694 | Z83851 | 6754 | 1-375 |
| HPJAD82 | 723 | 655765 | AC023550 | 6755 | 1-599 |
| HPJAD82 | 723 | 655765 | AC078819 | 6756 | 1-599 |
| HPJAD82 | 723 | 655765 | AC023550 | 6757 | 1-262 |
| HPJAD82 | 723 | 655765 | AC078819 | 6758 | 1-180 |
| HPJAD82 | 723 | 655765 | AC023550 | 6759 | 1-180 |
| HPJAD82 | 723 | 655765 | AC078819 | 6760 | 1-262 |
| HPJAV07 | 724 | 952852 | AC022990 | 6761 | 1-330 |
| HPJAV07 | 724 | 952852 | AC022990 | 6762 | 1-338 |
| HPJAW56 | 725 | 823393 | AL133367 | 6763 | 1-165 |
| | | | | | 783-1556 |
| | | | | | 1977-2558 |
| | | | | | 2777-3332 |
| | | | | | 5836-5901 |
| | | | | | 6380-6716 |
| | | | | | 8410-8804 |
| | | | | | 8835-9058 |
| | | | | | 9117-9251 |
| | | | | | 9256-9300 |
| | | | | | 11060-11133 |
| | | | | | 11732-12384 |
| | | | | | 12444-12715 |
| | | | | | 13449-13561 |
| | | | | | 13987-14379 |
| | | | | | 14896-15192 |
| | | | | | 15858-15966 |
| | | | | | 16321-16773 |
| | | | | | 18398-18513 |
| | | | | | 19468-19712 |
| | | | | | 19813-20395 |
| | | | | | 20559-20943 |
| | | | | | 20993-22107 |
| | | | | | 22393-22611 |
| | | | | | 24662-24850 |
| | | | | | 24956-25724 |
| | | | | | 25847-26145 |
| | | | | | 28326-28682 |
| | | | | | 31448-31886 |
| | | | | | 32028-32113 |
| | | | | | 35668-35923 |
| | | | | | 36174-36274 |
| | | | | | 36661-36791 |
| | | | | | 37689-37782 |
| | | | | | 38775-39150 |
| | | | | | 41192-41636 |
| | | | | | 41806-41916 |
| | | | | | 42383-42524 |
| | | | | | 42541-45950 |
| | | | | | 47201-47609 |
| | | | | | 47660-48144 |
| | | | | | 50495-50598 |
| | | | | | 50986-51806 |
| | | | | | 52416-52442 |
| | | | | | 52518-52822 |
| | | | | | 53922-54114 |
| | | | | | 54796-54941 |
| | | | | | 55169-55725 |
| | | | | | 55755-56418 |
| | | | | | 56558-57751 |
| KPJAW56 | 725 | 823393 | AL133367 | 6764 | 1-115 |
| HPJAW56 | 725 | 823393 | AL133367 | 6765 | 1-324 |
| HPJBI17 | 726 | 655761 | AC018493 | 6766 | 1-433 |
| HPJBI17 | 726 | 655761 | AC018840 | 6767 | 1-433 |
| HPJBI17 | 726 | 655761 | AC011327 | 6768 | 1-433 |
| HPJBI17 | 726 | 655761 | AC023514 | 6769 | 1-433 |
| HPJBI17 | 726 | 655761 | AC018493 | 6770 | 1-4779 |
| HPJBI17 | 726 | 655761 | AC018840 | 6771 | 1-4959 |
| | | | | | 7250-7380 |
| HPJBI17 | 726 | 655761 | AC011327 | 6772 | 1-4926 |
| | | | | | 7254-7384 |
| HPJBI17 | 726 | 655761 | AC023514 | 6773 | 1-559 |
| HPJBI89 | 727 | 655708 | AC006071 | 6774 | 1-97 |
| | | | | | 806-944 |
| | | | | | 2874-2923 |
| | | | | | 3012-3124 |
| | | | | | 4930-5376 |
| | | | | | 7132-7248 |
| | | | | | 8149-8301 |
| | | | | | 11085-11487 |
| | | | | | 12690-12774 |
| | | | | | 13247-13392 |
| HPJBI89 | 727 | 655708 | AC002092 | 6775 | 1-50 |
| | | | | | 768-905 |
| | | | | | 2835-2884 |
| | | | | | 2973-3083 |
| | | | | | 4894-5636 |
| | | | | | 7096-7212 |
| | | | | | 8116-8253 |
| HPJBI89 | 727 | 655708 | AC006071 | 6776 | 1-676 |
| HPJBK52 | 728 | 655751 | AC026458 | 6777 | 1-635 |
| HPJBK52 | 728 | 655751 | AC026957 | 6778 | 1-519 |
| HPJBK52 | 728 | 655751 | AC068974 | 6779 | 1-638 |
| HPJBK52 | 728 | 655751 | AC022770 | 6780 | 1-638 |
| HPJBK52 | 728 | 655751 | AF271408 | 6781 | 1-519 |
| HPJBK52 | 728 | 655751 | AC000378 | 6782 | 1-636 |
| HPJBK52 | 728 | 655751 | AF165177 | 6783 | 1-637 |
| HPJBK52 | 728 | 655751 | AF284563 | 6784 | 1-438 |
| HPJBK52 | 728 | 655751 | AC026957 | 6785 | 1-1148 |
| HPJBK52 | 728 | 655751 | AC068974 | 6786 | 1-170 |
| HPJBK52 | 728 | 655751 | AC068974 | 6787 | 1-674 |
| HPJBK52 | 728 | 655751 | AC022770 | 6788 | 1-632 |
| HPJBK52 | 728 | 655751 | AF271408 | 6789 | 1-512 |
| HPJBK52 | 728 | 655751 | AC000378 | 6790 | 1-336 |
| HPJBK52 | 728 | 655751 | AE165177 | 6791 | 1-666 |
| HPJBK52 | 728 | 655751 | AE284563 | 6792 | 1-672 |
| HPJBU08 | 729 | 958979 | AC034223 | 6793 | 1-365 |
| HPJBU08 | 729 | 958979 | AC025459 | 6794 | 1-365 |
| HPJBU08 | 729 | 958979 | AC034223 | 6795 | 1-470 |
| HPJBU08 | 729 | 958979 | AC025459 | 6796 | 1-470 |
| HPJBV17 | 730 | 655729 | AC007394 | 6797 | 1-300 |
| HPJCC04 | 731 | 926787 | AC020746 | 6798 | 1-402 |
| HPJCC04 | 731 | 926787 | AC020746 | 6799 | 1-137 |
| | | | | | 996-1100 |
| HPJCC04 | 731 | 926787 | AC020746 | 6800 | 1-305 |
| HPJCP10 | 732 | 964259 | AC010384 | 6801 | 1-482 |
| HPJCP10 | 732 | 964259 | AC010471 | 6802 | 1-482 |
| HPJCP10 | 732 | 964259 | AL161724 | 6803 | 1-482 |
| HPJCP11 | 733 | 966676 | AC027746 | 6804 | 1-338 |
| HPJCP11 | 733 | 966676 | AC007962 | 6805 | 1-2776 |
| HPJCP11 | 733 | 966676 | AC007962 | 6806 | 1-912 |
| HPJCV50 | 735 | 968095 | AC024179 | 6807 | 1-560 |
| HPJCV50 | 735 | 968095 | AC005923 | 6808 | 1-37 |
| | | | | | 647-1206 |
| | | | | | 1576-1798 |
| HPJCV50 | 735 | 968095 | AC024179 | 6809 | 1-721 |
| HPJCV50 | 735 | 968095 | AC005923 | 6810 | 1-749 |
| HPJCV50 | 735 | 968095 | AC005923 | 6811 | 1-57 |
| | | | | | 649-810 |
| | | | | | 915-1002 |
| HPJCX26 | 737 | 655600 | AL354668 | 6812 | 1-350 |
| HPJCY70 | 738 | 655569 | AC073576 | 6813 | 1-378 |
| HPJCY70 | 738 | 655569 | AL355916 | 6814 | 1-378 |
| HPJCZ03 | 739 | 922850 | AC019301 | 6815 | 1-322 |
| HPJCZ03 | 739 | 922850 | AC019301 | 6816 | 1-115 |
| HPJCZ03 | 739 | 922850 | AC019301 | 6817 | 1-117 |
| HPJCZ06 | 740 | 934170 | AC012101 | 6818 | 1-434 |
| HPJCZ06 | 740 | 934170 | AC012101 | 6819 | 1-261 |
| HPJDX94 | 744 | 838748 | AC027752 | 6820 | 1-385 |
| HPJDX94 | 744 | 838748 | AC024033 | 6821 | 1-385 |
| HPJEE38 | 745 | 954970 | AC013693 | 6822 | 1-1366 |
| | | | | | 2356-2591 |
| | | | | | 2984-3479 |
| | | | | | 3997-4331 |
| | | | | | 4805-5239 |
| | | | | | 6918-7038 |
| | | | | | 7281-7378 |
| | | | | | 7510-7940 |
| | | | | | 8150-8312 |
| | | | | | 8749-8898 |
| | | | | | 8979-9407 |
| HPJEI55 | 746 | 926815 | AC012141 | 6823 | 1-464 |
| HPJEI55 | 746 | 926815 | AL138843 | 6824 | 1-464 |
| HPJEI55 | 746 | 926815 | AL138787 | 6825 | 1-464 |
| HPJEI55 | 746 | 926815 | AC012141 | 6826 | 1-643 |
| HPJEI55 | 746 | 926815 | AL138843 | 6827 | 1-206 |
| | | | | | 2313-2650 |
| | | | | | 3456-4431 |
| HPJEI55 | 746 | 926815 | AC012141 | 6828 | 1-976 |
| HPJEI55 | 746 | 926815 | AL138843 | 6829 | 1-643 |
| HPJEI55 | 746 | 926815 | AL138787 | 6830 | 1-206 |
| | | | | | 2313-2650 |
| | | | | | 3456-4433 |
| HPJEI55 | 746 | 926815 | AL138787 | 6831 | 1-643 |
| HPJEJ39 | 747 | 930988 | AL162551 | 6832 | 1-605 |
| HPJEJ39 | 747 | 930988 | AL121576 | 6833 | 1-605 |
| HPJEQ22 | 749 | 867725 | AC021715 | 6834 | 1-639 |
| HPJEQ22 | 749 | 867725 | AL163052 | 6835 | 1-639 |
| HPJEV06 | 751 | 934096 | AP000773 | 6836 | 1-769 |
| HPJEV06 | 751 | 934096 | AC018708 | 6837 | 1-768 |
| HPJEV06 | 751 | 934096 | AC011207 | 6838 | 1-768 |
| HPJEV06 | 751 | 934096 | AP000773 | 6839 | 1-495 |
| | | | | | 909-997 |
| | | | | | 1276-1446 |
| HPJEV06 | 751 | 934096 | AC018708 | 6840 | 1-409 |
| HPJEV06 | 751 | 934096 | AP000773 | 6841 | 1-409 |
| HPJEV06 | 751 | 934096 | AC018708 | 6842 | 1-495 |
| | | | | | 909-997 |
| | | | | | 1276-1446 |
| HPJEV06 | 751 | 934096 | AC011207 | 6843 | 1-409 |
| HPJEV06 | 751 | 934096 | AC011207 | 6844 | 1-495 |
| | | | | | 909-997 |
| | | | | | 1276-1446 |
| HPLAR41 | 753 | 557554 | AC025660 | 6845 | 1-878 |
| | | | | | 932-1290 |
| | | | | | 1376-4492 |
| HPLAR41 | 753 | 557554 | AC025660 | 6846 | 1-378 |
| HPLBB50 | 754 | 503751 | AC063933 | 6847 | 1-352 |
| HPLBB50 | 754 | 503751 | AC063933 | 6848 | 1-129 |
| HPLBL31 | 755 | 503732 | AC025504 | 6849 | 1-95 |
| | | | | | 214-573 |
| | | | | | 1821-2446 |
| | | | | | 2525-3036 |
| | | | | | 3115-3492 |
| HPLBL31 | 755 | 503732 | AL139138 | 6850 | 1-807 |
| | | | | | 2652-2751 |
| | | | | | 2986-3064 |
| | | | | | 4764-4858 |
| | | | | | 4976-5335 |
| | | | | | 6582-7207 |
| | | | | | 7300-7599 |
| HPLBL57 | 756 | 503730 | AC026812 | 6851 | 1-273 |
| HPLBL57 | 756 | 503730 | AC002427 | 6852 | 1-273 |
| HPLBO61 | 757 | 558187 | AC004604 | 6853 | 1-1105 |
| HPLBO61 | 757 | 558187 | AC004555 | 6854 | 1-3035 |
| | | | | | 3284-3602 |
| | | | | | 4172-4261 |
| | | | | | 4501-5491 |
| | | | | | 8136-8894 |
| | | | | | 9100-9670 |
| | | | | | 10426-10533 |
| HPLBO61 | 757 | 558187 | AC004555 | 6855 | 1-241 |
| HPMBK34 | 760 | 954057 | AC067815 | 6856 | 1-784 |
| HPMBK34 | 760 | 954057 | AC005940 | 6857 | 1-784 |
| HPMBK34 | 760 | 954057 | AC067815 | 6858 | 1-2349 |
| HPMBK34 | 760 | 954057 | AC005940 | 6859 | 1-2349 |
| HPMBK34 | 760 | 954057 | AC005940 | 6860 | 1-1408 |
| HPMBK49 | 761 | 577661 | AC032007 | 6861 | 1-1545 |
| HPMBK49 | 761 | 577661 | AC032007 | 6862 | 1-350 |
| HPMBK49 | 761 | 577661 | AC032007 | 6863 | 1-756 |
| HPMBU81 | 767 | 557870 | AL356789 | 6864 | 1-490 |
| HPMBU81 | 767 | 557870 | AL357313 | 6865 | 1-491 |
| HPMBU81 | 767 | 557870 | AL356789 | 6866 | 1-298 |
| HPMBU81 | 767 | 557870 | AL357313 | 6867 | 1-475 |
| HPMBX35 | 768 | 531058 | AC025273 | 6868 | 1-202 |
| | | | | | 641-759 |
| | | | | | 1106-1412 |
| | | | | | 2149-2340 |
| | | | | | 3181-3506 |
| | | | | | 3552-3829 |
| | | | | | 4051-4415 |
| | | | | | 5783-6248 |
| | | | | | 7556-8169 |
| | | | | | 10620-10984 |
| | | | | | 11384-11500 |
| | | | | | 11517-11876 |
| | | | | | 12821-12929 |
| | | | | | 14588-14653 |
| | | | | | 15115-15821 |
| | | | | | 18702-18895 |
| | | | | | 21135-21421 |
| | | | | | 23417-24021 |
| | | | | | 26437-26746 |
| | | | | | 26819-26923 |
| | | | | | 29864-30165 |
| | | | | | 30638-31071 |
| | | | | | 31388-31737 |
| | | | | | 32445-32589 |
| | | | | | 33347-33643 |
| | | | | | 33675-34651 |
| | | | | | 34798-35053 |
| | | | | | 35667-36376 |
| HLPMBX35 | 768 | 531058 | AC008915 | 6869 | 1-466 |
| | | | | | 1774-2387 |
| | | | | | 4838-5202 |
| | | | | | 5602-5718 |
| | | | | | 5735-6094 |
| | | | | | 7039-7201 |
| | | | | | 8806-8871 |
| | | | | | 9333-10039 |
| | | | | | 12900-13093 |
| | | | | | 15330-15616 |
| | | | | | 17613-18217 |
| | | | | | 20634-20943 |
| | | | | | 21016-21120 |
| | | | | | 24061-24362 |
| | | | | | 24833-25267 |
| | | | | | 25584-25933 |
| | | | | | 26641-26785 |
| | | | | | 27543-27839 |
| | | | | | 27871-28847 |
| | | | | | 28994-29249 |
| | | | | | 29863-30573 |
| HPMBY83 | 771 | 527006 | AC011200 | 6870 | 1-433 |
| HPMBY83 | 771 | 527006 | AC011618 | 6871 | 1-433 |
| HPMBY83 | 771 | 527006 | AC011200 | 6872 | 1-1097 |
| HPMBY83 | 771 | 527006 | AC011200 | 6873 | 1-105 |
| HPMBY83 | 771 | 527006 | AC011618 | 6874 | 1-278 |
| HPMCB65 | 773 | 531289 | AL354833 | 6875 | 1-316 |
| | | | | | 564-1413 |
| | | | | | 1607-1800 |
| | | | | | 2119-2419 |
| | | | | | 3091-4057 |
| | | | | | 4252-4680 |
| | | | | | 7398-7790 |
| | | | | | 8083-8259 |
| | | | | | 8450-8642 |
| | | | | | 9096-11423 |
| | | | | | 11866-13435 |
| HPMCB65 | 773 | 531289 | AL354833 | 6876 | 1-121 |
| HPMCC73 | 774 | 531066 | AC023287 | 6877 | 1-1159 |
| HPMCC73 | 774 | 531066 | AC012118 | 6878 | 1-1128 |
| HPMCC73 | 774 | 531066 | AC023287 | 6879 | 1-422 |
| HPMCC73 | 774 | 531066 | AC012118 | 6880 | 1-422 |
| HPMCJ14 | 778 | 524768 | AL031591 | 6881 | 1-403 |
| HPMCJ14 | 778 | 524768 | AC000105 | 6882 | 1-403 |
| HPMCJ14 | 778 | 524768 | AC004032 | 6883 | 1-403 |
| HPMCJ19 | 779 | 531279 | AC026226 | 6884 | 1-344 |
| HPMCJ19 | 779 | 531279 | AC026392 | 6885 | 1-242 |
| HPMCJ48 | 780 | 577601 | AL158821 | 6886 | 1-324 |
| HPMCK65 | 781 | 742095 | AL023807 | 6887 | 1-607 |
| | | | | | 627-906 |
| | | | | | 1769-2194 |
| HPMCK65 | 781 | 742095 | AL023807 | 6888 | 1-251 |
| HPMCK65 | 781 | 742095 | AL023807 | 6889 | 1-331 |
| HPMCS65 | 783 | 961250 | AC024179 | 6890 | 1-84 |
| | | | | | 1500-1981 |
| | | | | | 2066-2205 |
| | | | | | 3722-3803 |
| | | | | | 3983-4228 |
| | | | | | 4311-4461 |
| | | | | | 4734-4797 |
| | | | | | 5290-5391 |
| | | | | | 5475-5582 |
| | | | | | 5743-5809 |
| | | | | | 6736-6830 |
| | | | | | 6910-7020 |
| | | | | | 7399-7656 |
| | | | | | 7668-8575 |
| | | | | | 8766-8820 |
| | | | | | 9097-9235 |
| | | | | | 9337-9733 |
| HPMCS65 | 783 | 961250 | AC005923 | 6891 | 1-84 |
| | | | | | 1500-1981 |
| | | | | | 2067-2206 |
| | | | | | 2587-2955 |
| | | | | | 3726-3807 |
| | | | | | 3987-4231 |
| | | | | | 4314-4464 |
| | | | | | 4737-4800 |
| | | | | | 5293-5394 |
| | | | | | 5478-5585 |
| | | | | | 5746-5812 |
| | | | | | 6740-6834 |
| | | | | | 6914-7024 |
| | | | | | 7404-7661 |
| | | | | | 7673-8580 |
| | | | | | 8771-8825 |
| | | | | | 9102-9240 |
| | | | | | 9342-9738 |
| HPMCS65 | 783 | 961250 | AC005923 | 6892 | 1-163 |
| | | | | | 669-841 |
| | | | | | 1063-1188 |
| | | | | | 1281-1537 |
| | | | | | 1717-1896 |
| | | | | | 2103-2213 |
| | | | | | 2634-2715 |
| | | | | | 3253-3377 |
| | | | | | 3848-3964 |
| | | | | | 4045-4195 |
| | | | | | 4444-4664 |
| | | | | | 4920-5082 |
| | | | | | 5400-5604 |
| | | | | | 6369-7256 |
| | | | | | 8698-10467 |
| HPMCW53 | 786 | 727392 | AC027281 | 6893 | 1-549 |
| HPMCW53 | 786 | 727392 | AC027281 | 6894 | 1-98 |
| HPMCW53 | 786 | 727392 | AC027281 | 6895 | 1-471 |
| HPMCY35 | 790 | 571411 | AC008265 | 6896 | 1-1277 |
| HPMCY35 | 790 | 571411 | AC013429 | 6897 | 1-1277 |
| HPMCY35 | 790 | 571411 | AC008265 | 6898 | 1-838 |
| HPMCY35 | 790 | 571411 | AC008265 | 6899 | 1-308 |
| HPMCY35 | 790 | 571411 | AC013429 | 6900 | 1-303 |
| HPMCY35 | 790 | 571411 | AC013429 | 6901 | 1-838 |
| HPMDJ09 | 791 | 582594 | AC007378 | 6902 | 1-437 |
| HPMDJ09 | 791 | 582594 | AC007378 | 6903 | 1-416 |
| HPMDL78 | 792 | 577590 | AC023015 | 6904 | 1-417 |
| HPMDL78 | 792 | 577590 | AL162505 | 6905 | 1-645 |
| | | | | | 747-1164 |
| | | | | | 2179-2511 |
| | | | | | 3184-3519 |
| | | | | | 4234-4475 |
| | | | | | 4615-4830 |
| | | | | | 4894-5310 |
| | | | | | 6227-6832 |
| | | | | | 6887-6920 |
| | | | | | 7700-7958 |
| | | | | | 8747-8978 |
| | | | | | 9761-9969 |
| HPMDL78 | 792 | 577590 | AL355392 | 6906 | 1-645 |
| | | | | | 747-1164 |
| | | | | | 2180-2512 |
| | | | | | 3185-3520 |
| | | | | | 4235-4476 |
| | | | | | 4616-4831 |
| | | | | | 4895-5228 |
| | | | | | 6228-6833 |
| | | | | | 6888-6921 |
| | | | | | 7701-7959 |
| | | | | | 8748-8979 |
| | | | | | 9762-9970 |
| | | | | | 12013-12114 |
| | | | | | 14227-14369 |
| | | | | | 14379-14518 |
| | | | | | 15453-15685 |
| | | | | | 16116-16381 |
| | | | | | 21268-21424 |
| | | | | | 22341-22479 |
| | | | | | 22922-23004 |
| | | | | | 23493-23659 |
| | | | | | 23843-24090 |
| | | | | | 27959-28266 |
| | | | | | 30963-31074 |
| | | | | | 35359-35938 |
| HPMDL78 | 792 | 577590 | AC023015 | 6907 | 1-649 |
| | | | | | 751-1168 |
| | | | | | 2183-2515 |
| | | | | | 3188-3523 |
| | | | | | 4345-4479 |
| | | | | | 4628-4786 |
| HPMDL78 | 792 | 577590 | AL162505 | 6908 | 1-426 |
| HPMDL78 | 792 | 577590 | AL355392 | 6909 | 1-426 |
| HPMDL78 | 792 | 577590 | AL355392 | 6910 | 1-485 |
| HPMDO39 | 793 | 531275 | AC064796 | 6911 | 1-299 |
| HPMDO39 | 793 | 531275 | AC064796 | 6912 | 1-321 |
| HPMDO39 | 793 | 531275 | AC064796 | 6913 | 1-334 |
| HPMDT91 | 795 | 745346 | AL136332 | 6914 | 1-116 |
| | | | | | 244-618 |
| | | | | | 1399-1481 |
| | | | | | 2637-2724 |
| | | | | | 2842-2957 |
| | | | | | 3010-3244 |
| | | | | | 3302-3740 |
| | | | | | 3879-4367 |
| | | | | | 4407-4484 |
| | | | | | 4783-5307 |
| | | | | | 5981-6056 |
| | | | | | 6472-6806 |
| | | | | | 6903-7024 |
| | | | | | 7110-7225 |
| | | | | | 7843-8458 |
| | | | | | 8924-9255 |
| | | | | | 10786-10887 |
| | | | | | 12006-12616 |
| | | | | | 13979-15061 |
| HPMDT91 | 795 | 745346 | AL136332 | 6915 | 1-140 |
| HPMDU19 | 796 | 577626 | AC005281 | 6916 | 1-276 |
| | | | | | 835-5981 |
| | | | | | 5998-8928 |
| HPMDU19 | 796 | 577626 | AC005281 | 6917 | 1-529 |
| HPMDZ62 | 798 | 531276 | AL157392 | 6918 | 1-371 |
| HPMEB66 | 799 | 531349 | AL139145 | 6919 | 1-406 |
| HPMEB66 | 799 | 531349 | AC006S00 | 6920 | 1-406 |
| HPMEB66 | 799 | 531349 | AL139145 | 6921 | 1-891 |
| HPMEB66 | 799 | 531349 | AC006S00 | 6922 | 1-891 |
| HPMEC16 | 800 | 867658 | AC068884 | 6923 | 1-309 |
| HPMEC16 | 800 | 867658 | AC016772 | 6924 | 1-306 |
| HPMEC16 | 800 | 867658 | AC068884 | 6925 | 1-325 |
| HPMEC16 | 800 | 867658 | AC068884 | 6926 | 1-608 |
| | | | | | 1128-1552 |
| HPMEC16 | 800 | 867658 | AC016772 | 6927 | 1-325 |
| HPMEC36 | 801 | 668897 | AC016526 | 6928 | 1-870 |
| HPMEC36 | 801 | 668897 | AC016526 | 6929 | 1-586 |
| HPMEC69 | 802 | 702501 | AC012513 | 6930 | 1-424 |
| | | | | | 586-1132 |
| | | | | | 1352-1892 |
| | | | | | 2036-2445 |
| HPMEC69 | 802 | 702501 | AC008123 | 6931 | 1-424 |
| | | | | | 586-1132 |
| | | | | | 1352-1892 |
| | | | | | 2036-2445 |
| HPMEC69 | 802 | 702501 | AC009521 | 6932 | 1-424 |
| | | | | | 586-1132 |
| | | | | | 1352-1892 |
| | | | | | 2036-2445 |
| HPMEC69 | 802 | 702501 | AC012513 | 6933 | 1-324 |
| HPMEC69 | 802 | 702501 | AC012513 | 6934 | 1-148 |
| HPMEC69 | 802 | 702501 | AC008123 | 6935 | 1-324 |
| HPMEC69 | 802 | 702501 | AC008123 | 6936 | 1-148 |
| HPMEC69 | 802 | 702501 | AC009521 | 6937 | 1-324 |
| HPMEC69 | 802 | 702501 | AC009521 | 6938 | 1-148 |
| HPMED52 | 803 | 531347 | AC005004 | 6939 | 1-1352 |
| HPMED52 | 803 | 531347 | AC005004 | 6940 | 1-184 |
| HPMED52 | 803 | 531347 | AC005004 | 6941 | 1-149 |
| HPMFB28 | 809 | 575934 | AC010446 | 6942 | 1-329 |
| HPMFB37 | 810 | 575620 AC018900 | 6943 | 1-70 | |
| | | | | | 504-564 |
| | | | | | 2078-2335 |
| | | | | | 2559-3145 |
| | | | | | 4386-4975 |
| | | | | | 5038-5201 |
| | | | | | 5354-6773 |
| HPMFB37 | 810 | 575620 | AC013334 | 6944 | 1-70 |
| | | | | | 500-560 |
| | | | | | 2071-2328 |
| | | | | | 2552-3138 |
| | | | | | 4380-4969 |
| | | | | | 5032-5195 |
| | | | | | 5348-6767 |
| HPMFB37 | 810 | 575620 | AC018900 | 6945 | 1-1338 |
| HPMFB37 | 810 | 575620 | AC013334 | 6946 | 1-1340 |
| HPMFB37 | 810 | 575620 | AC018900 | 6947 | 1-65 |
| | | | | | 175-275 |
| | | | | | 505-590 |
| | | | | | 1039-1164 |
| | | | | | 1861-1949 |
| | | | | | 2695-2914 |
| | | | | | 3021-3150 |
| | | | | | 3483-3638 |
| | | | | | 3728-4338 |
| HPMFB37 | 810 | 575620 | AC013334 | 6948 | 1-111 |
| | | | | | 444-599 |
| | | | | | 689-1288 |
| HPMFB75 | 811 | 526594 | AC021754 | 6949 | 1-657 |
| | | | | | 732-1324 |
| | | | | | 1332-1738 |
| | | | | | 1760-1883 |
| | | | | | 2721-2831 |
| | | | | | 2913-3037 |
| | | | | | 4456-4576 |
| | | | | | 4601-5008 |
| | | | | | 5171-5281 |
| HPMFB75 | 811 | 526594 | AC021754 | 6950 | 1-352 |
| HPMFE60 | 814 | 577636 | AL139005 | 6951 | 1-431 |
| HPMFJ55 | 818 | 577588 | AC026634 | 6952 | 1-457 |
| HPMFJ55 | 818 | 577588 | AC026634 | 6953 | 1-884 |
| HPMFL08 | 819 | 959569 | Z93016 | 6954 | 1-477 |
| HPMFL08 | 819 | 959569 | Z93016 | 6955 | 1-650 |
| HPMFL80 | 820 | 874359 | AC004841 | 6956 | 1-2013 |
| | | | | | 2041-2324 |
| | | | | | 2337-2413 |
| | | | | | 3586-3800 |
| | | | | | 3839-4574 |
| | | | | | 4894-5336 |
| | | | | | 5361-5776 |
| | | | | | 5997-6491 |
| | | | | | 6570-6838 |
| | | | | | 7577-7687 |
| | | | | | 7777-8676 |
| | | | | | 9682-9806 |
| | | | | | 9879-10148 |
| | | | | | 11341-11493 |
| | | | | | 13101-13238 |
| | | | | | 15431-15566 |
| | | | | | 15940-16011 |
| | | | | | 16119-16181 |
| HPMFL80 | 820 | 874359 | AC004841 | 6957 | 1-561 |
| HPMFL80 | 820 | 874359 | AC004841 | 6958 | 1-356 |
| HPMFM29 | 821 | 582595 | AC026558 | 6959 | 1-1062 |
| HPMFM29 | 821 | 582595 | AC023973 | 6960 | 1-1062 |
| HPMFM29 | 821 | 582595 | AC026558 | 6961 | 1-1331 |
| HPMFM29 | 821 | 582595 | AC023973 | 6962 | 1-127 |
| HPMFM29 | 821 | 582595 | AC023973 | 6963 | 1-1332 |
| HPMFP30 | 824 | 577629 | AC008072 | 6964 | 1-322 |
| HPMFP30 | 824 | 577629 | AC008072 | 6965 | 1-258 |
| HPMFP38 | 825 | 575914 | AC006121 | 6966 | 1-76 |
| | | | | | 283-455 |
| | | | | | 1081-2096 |
| | | | | | 2241-2468 |
| | | | | | 3824-3881 |
| | | | | | 4776-4998 |
| | | | | | 5882-6048 |
| | | | | | 7438-7572 |
| | | | | | 8605-8867 |
| | | | | | 8905-9483 |
| | | | | | 9616-9748 |
| | | | | | 10809-11421 |
| | | | | | 12429-12580 |
| | | | | | 12991-13310 |
| | | | | | 14224-14404 |
| | | | | | 15332-16217 |
| | | | | | 18288-18453 |
| | | | | | 18666-19007 |
| | | | | | 19613-20374 |
| | | | | | 20936-21073 |
| | | | | | 21639-22085 |
| | | | | | 22088-22332 |
| | | | | | 22816-22950 |
| | | | | | 24715-24977 |
| | | | | | 25733-26161 |
| | | | | | 26930-27124 |
| | | | | | 27348-27453 |
| | | | | | 28458-28682 |
| | | | | | 28764-28863 |
| | | | | | 31423-31717 |
| | | | | | 32555-32715 |
| | | | | | 32956-33127 |
| | | | | | 33269-33545 |
| | | | | | 33919-34319 |
| | | | | | 36103-38140 |
| HPMFP38 | 825 | 575914 | AL109797 | 6967 | 1-76 |
| | | | | | 283-455 |
| | | | | | 1081-2096 |
| | | | | | 2241-2468 |
| | | | | | 2777-2914 |
| | | | | | 3824-3881 |
| | | | | | 4776-4998 |
| | | | | | 5882-6048 |
| | | | | | 7438-7572 |
| | | | | | 8605-8867 |
| | | | | | 8905-9483 |
| | | | | | 9614-9744 |
| | | | | | 10810-11422 |
| | | | | | 12430-12580 |
| | | | | | 12992-13311 |
| | | | | | 14225-14405 |
| | | | | | 15333-16218 |
| | | | | | 18289-18454 |
| | | | | | 18667-19008 |
| | | | | | 19614-20375 |
| | | | | | 20937-21074 |
| | | | | | 21640-22086 |
| | | | | | 22089-22333 |
| | | | | | 22817-22951 |
| | | | | | 25734-26162 |
| | | | | | 26931-27125 |
| | | | | | 27349-27454 |
| | | | | | 28228-28352 |
| | | | | | 28459-28683 |
| | | | | | 28765-28864 |
| | | | | | 31425-31718 |
| | | | | | 32476-32792 |
| | | | | | 32957-33128 |
| | | | | | 33270-33546 |
| | | | | | 33920-34321 |
| | | | | | 35214-35796 |
| | | | | | 36099-38136 |
| HPMFP38 | 825 | 575914 | AL109797 | 6968 | 1-108 |
| HPMFP38 | 825 | 575914 | AL109797 | 6969 | 1-112 |
| HPMFS41 | 827 | 711640 | Z95331 | 6970 | 1-438 |
| HPMES41 | 827 | 711640 | Z95331 | 6971 | 1-83 |
| HPMFT04 | 828 | 916662 | AC016813 | 6972 | 1-324 |
| HPMFT04 | 828 | 916662 | AC016813 | 6973 | 1-213 |
| HPMFU89 | 829 | 575894 | AC022210 | 6974 | 1-350 |
| HPMFU89 | 829 | 575894 | AC022210 | 6975 | 1-17 |
| | | | | | 420-840 |
| | | | | | 1098-1343 |
| HPMFV82 | 831 | 575911 | AL160231 | 6976 | 1-560 |
| HPMFV82 | 831 | 575911 | AL160231 | 6977 | 1-708 |
| HPMFV82 | 831 | 575911 | AL160231 | 6978 | 1-521 |
| HPMFW78 | 834 | 932529 | AC012221 | 6979 | 1-535 |
| HPMFW78 | 834 | 932529 | AC012221 | 6980 | 1-617 |
| HPMFX13 | 835 | 575908 | AL050350 | 6981 | 1-1168 |
| HPMFX13 | 835 | 575908 | AL050350 | 6982 | 1-100 |
| HPMFX65 | 836 | 867657 | AL031282 | 6983 | 1-384 |
| HPMFX65 | 836 | 867657 | AL031282 | 6984 | 1-338 |
| HPMFX65 | 836 | 867657 | AL031282 | 6985 | 1-106 |
| HPMFX70 | 837 | 577642 | AL355303 | 6986 | 1-194 |
| | | | | | 314-437 |
| | | | | | 554-905 |
| | | | | | 1348-2897 |
| HPMFX70 | 837 | 577642 | AC005383 | 6987 | 1-207 |
| | | | | | 626-768 |
| | | | | | 1716-1898 |
| | | | | | 2187-2745 |
| | | | | | 5326-5413 |
| | | | | | 7250-7333 |
| | | | | | 7857-7962 |
| | | | | | 10837-11049 |
| | | | | | 13284-13428 |
| | | | | | 14141-14415 |
| | | | | | 14983-15389 |
| | | | | | 15403-15573 |
| | | | | | 15659-16177 |
| | | | | | 16352-16519 |
| | | | | | 18351-18547 |
| | | | | | 18667-18797 |
| | | | | | 18907-19257 |
| | | | | | 19618-20898 |
| | | | | | 21036-22585 |
| HPMFX70 | 837 | 577642 | AL355303 | 6988 | 1-534 |
| HPMFX70 | 837 | 577642 | AC005383 | 6989 | 1-534 |
| HPMGC23 | 842 | 703835 | AC020907 | 6990 | 1-135 |
| | | | | | 159-1252 |
| | | | | | 1476-1903 |
| | | | | | 2786-3156 |
| | | | | | 4700-5283 |
| | | | | | 6295-6413 |
| | | | | | 7252-7356 |
| | | | | | 7441-7616 |
| | | | | | 7703-7789 |
| HPMGC23 | 842 | 703835 | AC020907 | 6991 | 1-201 |
| HPMGE31 | 843 | 867648 | AC009032 | 6992 | 1-426 |
| HPMGE31 | 843 | 867648 | AC010537 | 6993 | 1-424 |
| HPMGE31 | 843 | 867648 | AC009032 | 6994 | 1-99 |
| HPMGE31 | 843 | 867648 | AC009032 | 6995 | 1-233 |
| HPMGE31 | 843 | 867648 | AC010537 | 6996 | 1-162 |
| HPMGE95 | 844 | 873392 | AC018523 | 6997 | 1-1418 |
| | | | | | 1445-3328 |
| HPMGE95 | 844 | 873392 | AC018523 | 6998 | 1-336 |
| HPMGE95 | 844 | 873392 | AC018523 | 6999 | 1-2444 |
| | | | | | 2484-2659 |
| | | | | | 2757-3196 |
| HPMGF32 | 846 | 577615 | AC006960 | 7000 | 1-349 |
| HPMGF32 | 846 | 577615 | AC008266 | 7001 | 1-351 |
| HPMGH16 | 847 | 577641 | AC026354 | 7002 | 1-412 |
| HPMGH16 | 847 | 577641 | AC060225 | 7003 | 1-412 |
| HPMGH16 | 847 | 577641 | AC060225 | 7004 | 1-67 |
| | | | | | 2876-4493 |
| HPMGH16 | 847 | 577641 | AC026354 | 7005 | 1-1619 |
| HPMGJ93 | 850 | 864040 | AC024452 | 7006 | 1-340 |
| HPMGJ93 | 850 | 864040 | AC024452 | 7007 | 1-201 |
| HPMGJ93 | 850 | 864040 | AC024452 | 7008 | 1-184 |
| | | | | | 727-1343 |
| HPMGK37 | 851 | 575924 | AC018458 | 7009 | 1-432 |
| HPMGK37 | 851 | 575924 | AC026202 | 7010 | 1-432 |
| HPMGK37 | 851 | 575924 | AC026164 | 7011 | 1-432 |
| HPMGK37 | 851 | 575924 | AC018821 | 7012 | 1-432 |
| HPMGK37 | 851 | 575924 | AC026202 | 7013 | 1-602 |
| HPMGK37 | 851 | 575924 | AC026164 | 7014 | 1-602 |
| HPMGK37 | 851 | 575924 | AC018821 | 7015 | 1-602 |
| HPMGM33 | 854 | 854081 | AL139128 | 7016 | 1-1034 |
| | | | | | 1667-4615 |
| HPMGM33 | 854 | 854081 | AL355388 | 7017 | 1-79 |
| | | | | | 566-783 |
| | | | | | 904-1201 |
| | | | | | 4573-4703 |
| | | | | | 5038-5120 |
| | | | | | 5447-5492 |
| | | | | | 5543-5733 |
| | | | | | 7057-8087 |
| | | | | | 8125-8544 |
| | | | | | 8570-8782 |
| | | | | | 9084-9384 |
| | | | | | 10191-10361 |
| | | | | | 10724-10789 |
| | | | | | 11224-11492 |
| | | | | | 12498-12550 |
| | | | | | 12578-13870 |
| | | | | | 13968-14197 |
| | | | | | 15423-15860 |
| | | | | | 16293-16606 |
| | | | | | 16737-17790 |
| | | | | | 18448-18541 |
| | | | | | 18829-21371 |
| HPMGM33 | 854 | 854081 | AL356483 | 7018 | 1-1035 |
| | | | | | 1668-4614 |
| HPMGM33 | 854 | 854081 | AL139128 | 7019 | 1-314 |
| HPMGM33 | 854 | 854081 | AL355388 | 7020 | 1-154 |
| | | | | | 482-945 |
| HPMGM33 | 854 | 854081 | AL356483 | 7021 | 1-156 |
| | | | | | 459-950 |
| | | | | | 984-1425 |
| | | | | | 1512-2292 |
| | | | | | 2727-2831 |
| | | | | | 2935-3193 |
| | | | | | 3462-3591 |
| | | | | | 3910-4153 |
| | | | | | 5779-6160 |
| | | | | | 6294-6711 |
| | | | | | 6899-7110 |
| | | | | | 7935-8034 |
| | | | | | 8100-8383 |
| | | | | | 9023-9448 |
| | | | | | 10580-11838 |
| HPMGM33 | 854 | 854081 | AL355388 | 7022 | 1-439 |
| HPMGM33 | 854 | 854081 | AL356483 | 7023 | 1-314 |
| HPMGS09 | 857 | 575951 | AL136104 | 7024 | 1-124 |
| HPMGS09 | 857 | 575951 | AL136104 | 7025 | 1-1395 |
| HPMGS09 | 857 | 575951 | AL136104 | 7026 | 1-1459 |
| | | | | | 1662-2293 |
| | | | | | 2447-2939 |
| HPMGT67 | 859 | 970815 | AC026510 | 7027 | 1-472 |
| HPMGT67 | 859 | 970815 | AC011475 | 7028 | 1-282 |
| | | | | | 1124-1308 |
| | | | | | 1546-1804 |
| | | | | | 1827-2190 |
| | | | | | 2230-2278 |
| | | | | | 2928-3041 |
| | | | | | 3534-3792 |
| | | | | | 5844-6161 |
| | | | | | 8497-8748 |
| | | | | | 9331-9380 |
| | | | | | 10799-10874 |
| | | | | | 10999-11084 |
| | | | | | 12851-12954 |
| | | | | | 13819-14099 |
| | | | | | 14137-14220 |
| | | | | | 14349-14465 |
| | | | | | 14554-14614 |
| | | | | | 14705-14829 |
| | | | | | 14948-15030 |
| | | | | | 15120-15236 |
| | | | | | 15511-15622 |
| | | | | | 17054-17141 |
| | | | | | 17265-17558 |
| | | | | | 17590-18154 |
| | | | | | 18240-18344 |
| | | | | | 18509-18594 |
| | | | | | 19012-19140 |
| | | | | | 19156-19666 |
| | | | | | 19732-19835 |
| | | | | | 20721-20826 |
| | | | | | 20934-21008 |
| | | | | | 21073-21555 |
| | | | | | 22855-22984 |
| | | | | | 23820-24828 |
| | | | | | 24885-24945 |
| | | | | | 25448-25538 |
| | | | | | 25979-27641 |
| | | | | | 29246-29604 |
| | | | | | 30552-30715 |
| | | | | | 33941-34095 |
| | | | | | 34383-34495 |
| HPMGT67 | 859 | 970815 | AC011475 | 7029 | 1-1999 |
| HPMGT67 | 859 | 970815 | AC011475 | 7030 | 1-302 |
| HPMGV12 | 860 | 968364 | AL355172 | 7031 | 1-294 |
| HPMGV12 | 860 | 968364 | AL139117 | 7032 | 1-351 |
| HPMGV12 | 860 | 968364 | AC009892 | 7033 | 1-351 |
| HPMGV12 | 860 | 968364 | AL139117 | 7034 | 1-294 |
| RPMGV12 | 860 | 968364 | AC009892 | 7035 | 1-294 |
| HPMGV15 | 861 | 582596 | AC025175 | 7036 | 1-269 |
| HPMGV15 | 861 | 582596 | AC008792 | 7037 | 1-269 |
| HPMGV15 | 861 | 582596 | AC024571 | 7038 | 1-269 |
| HPMGV15 | 861 | 582596 | AC025175 | 7039 | 1-191 |
| HPMGV15 | 861 | 582596 | AC024571 | 7040 | 1-276 |
| HPMHA80 | 865 | 970813 | AC010097 | 7041 | 1-3752 |
| HPMHA80 | 865 | 970813 | AL162633 | 7042 | 1-3615 |
| HPMHA80 | 865 | 970813 | AL355073 | 7043 | 1-393 |
| | | | | | 610-3614 |
| HPMHA80 | 865 | 970813 | AC010097 | 7044 | 1-813 |
| HPMHA80 | 865 | 970813 | AL162633 | 7045 | 1-303 |
| HPMHA80 | 865 | 970813 | AL355073 | 7046 | 1-812 |
| HPMHA80 | 865 | 970813 | AL162633 | 7047 | 1-813 |
| HPMHA80 | 865 | 970813 | AL355073 | 7048 | 1-303 |
| HPMHC74 | 868 | 577631 | AL020990 | 7049 | 1-111 |
| | | | | | 8823-9073 |
| | | | | | 9156-9257 |
| | | | | | 9325-9625 |
| | | | | | 10063-10160 |
| | | | | | 11212-11268 |
| | | | | | 12867-12926 |
| | | | | | 14379-14996 |
| | | | | | 15086-15475 |
| | | | | | 16330-16435 |
| | | | | | 22187-22316 |
| | | | | | 22890-22955 |
| | | | | | 23988-24998 |
| | | | | | 27029-27304 |
| | | | | | 42968-43219 |
| HPMHC74 | 868 | 577631 | AL020990 | 7050 | 1-102 |
| HPMHC74 | 868 | 577631 | AL020990 | 7051 | 1-95 |
| HPMHD66 | 869 | 928433 | AL138976 | 7052 | 1-963 |
| HPMHD66 | 869 | 928433 | AL161669 | 7053 | 1-963 |
| HPMHD66 | 869 | 928433 | AL138976 | 7054 | 1-188 |
| HPMHD66 | 869 | 928433 | AL161669 | 7055 | 1-407 |
| HPMJC01 | 871 | 914759 | AC005484 | 7056 | 1-304 |
| HPMJC01 | 871 | 914759 | AC005484 | 7057 | 1-1308 |
| HPMJC01 | 871 | 914759 | AC005484 | 7058 | 1-615 |
| HPMJC05 | 872 | 930844 | AC006977 | 7059 | 1-442 |
| HPMJC05 | 872 | 930844 | AC006977 | 7060 | 1-832 |
| | | | | | 960-1178 |
| | | | | | 1319-1872 |
| HPMJD88 | 873 | 930806 | AC023991 | 7061 | 1-808 |
| HPMJD88 | 873 | 930806 | AC023991 | 7062 | 1-450 |
| HPMJF76 | 875 | 965642 | AC022895 | 7063 | 1-540 |
| HPMJI81 | 876 | 930873 | AC024077 | 7064 | 1-186 |
| | | | | | 1433-2325 |
| | | | | | 2647-2920 |
| | | | | | 3296-3891 |
| | | | | | 3988-4080 |
| | | | | | 4970-5592 |
| | | | | | 5628-5875 |
| | | | | | 7059-7342 |
| | | | | | 7610-9228 |
| | | | | | 9250-10341 |
| | | | | | 10502-13042 |
| | | | | | 13065-13884 |
| | | | | | 13886-14217 |
| | | | | | 14240-15236 |
| | | | | | 15301-15756 |
| | | | | | 16091-16176 |
| | | | | | 16422-17010 |
| | | | | | 17039-17874 |
| | | | | | 18020-18491 |
| | | | | | 18833-19353 |
| | | | | | 19410-19966 |
| | | | | | 21020-21557 |
| | | | | | 22200-22259 |
| HPMJI81 | 876 | 930873 | AC005392 | 7065 | 1-348 |
| | | | | | 659-2096 |
| | | | | | 2271-2669 |
| | | | | | 2824-3667 |
| | | | | | 3888-4178 |
| | | | | | 4322-5035 |
| | | | | | 5652-6162 |
| | | | | | 6409-6997 |
| | | | | | 7026-7710 |
| | | | | | 8011-8481 |
| HPMJI81 | 876 | 930873 | AC005337 | 7066 | 1-110 |
| | | | | | 275-3654 |
| | | | | | 3656-3945 |
| | | | | | 4101-5543 |
| | | | | | 5862-5946 |
| | | | | | 6198-6781 |
| | | | | | 6815-7548 |
| | | | | | 7784-8246 |
| HPMJI81 | 876 | 930873 | AC004603 | 7067 | 1-353 |
| | | | | | 499-1948 |
| | | | | | 2094-3422 |
| | | | | | 5084-5621 |
| | | | | | 6279-6331 |
| HPMJI81 | 876 | 930873 | AC024077 | 7068 | 1-407 |
| HPMJI81 | 876 | 930873 | AC005392 | 7069 | 1-557 |
| HPMJI81 | 876 | 930873 | AC005392 | 7070 | 1-524 |
| HPMJI81 | 876 | 930873 | AC005337 | 7071 | 1-521 |
| HPMJI81 | 876 | 930873 | AC004603 | 7072 | 1-407 |
| HPMJI81 | 876 | 930873 | AC004603 | 7073 | 1-1485 |
| HPMJN59 | 877 | 946876 | AC011846 | 7074 | 1-137 |
| | | | | | 1376-1529 |
| | | | | | 3692-3832 |
| | | | | | 4686-4797 |
| HPMJV08 | 880 | 958001 | AC027776 | 7075 | 1-524 |
| HPMJV08 | 880 | 958001 | AC011087 | 7076 | 1-531 |
| HPMJV08 | 880 | 958001 | AC011087 | 7077 | 1-313 |
| HPMJV08 | 880 | 958001 | AC011087 | 7078 | 1-858 |
| HPMKB19 | 882 | 969478 | AC068403 | 7079 | 1-803 |
| HPMKB19 | 882 | 969478 | AC006453 | 7080 | 1-806 |
| HPMKB19 | 882 | 969478 | AC068403 | 7081 | 1-1328 |
| HPMKB19 | 882 | 969478 | AC006453 | 7082 | 1-1333 |
| HPMKI53 | 883 | 957997 | AC023331 | 7083 | 1-126 |
| | | | | | 310-498 |
| | | | | | 668-972 |
| | | | | | 1409-1497 |
| | | | | | 3701-4076 |
| HPMKI53 | 883 | 957997 | AL358236 | 7084 | 1-305 |
| HPMKI53 | 883 | 957997 | AL359374 | 7085 | 1-126 |
| | | | | | 310-486 |
| | | | | | 668-972 |
| | | | | | 1409-1497 |
| | | | | | 3704-4079 |
| HPMKI53 | 883 | 957997 | AC023331 | 7086 | 1-332 |
| HPMKI53 | 883 | 957997 | AL358236 | 7087 | 1-189 |
| HPMKI53 | 883 | 957997 | AL359374 | 7088 | 1-355 |
| HPMKI53 | 883 | 957997 | AL359374 | 7089 | 1-87 |
| HPMKM81 | 884 | 894416 | AC004774 | 7090 | 1-741 |
| | | | | | 2632-2831 |
| | | | | | 3934-4654 |
| HPMRM81 | 884 | 894416 | AC004774 | 7091 | 1-239 |
| HPMLE04 | 886 | 867533 | AC011374 | 7092 | 1-81 |
| | | | | | 1539-1599 |
| | | | | | 2994-3084 |
| | | | | | 4479-4645 |
| | | | | | 6408-7106 |
| | | | | | 7597-8047 |
| | | | | | 8608-8758 |
| | | | | | 9415-9596 |
| | | | | | 9701-10049 |
| | | | | | 10092-10403 |
| | | | | | 10435-10769 |
| | | | | | 11974-12131 |
| | | | | | 12474-14769 |
| HPMLE04 | 886 | 867533 | AC011374 | 7093 | 1-465 |
| HPMLE04 | 886 | 867533 | AC011374 | 7094 | 1-174 |
| HPMLK02 | 887 | 918123 | Z93244 | 7095 | 1-730 |
| HPMLK02 | 887 | 918123 | Z93244 | 7096 | 1-137 |
| HPMLK02 | 887 | 918123 | Z93244 | 7097 | 1-329 |
| HPMLW10 | 890 | 963037 | Z71183 | 7098 | 1-650 |
| | | | | | 910-1011 |
| | | | | | 1092-1374 |
| | | | | | 1570-3575 |
| | | | | | 4833-5148 |
| | | | | | 5950-6339 |
| | | | | | 6825-8772 |
| HPMLW10 | 890 | 963037 | Z71183 | 7099 | 1-370 |
| HPMLW10 | 890 | 963037 | Z71183 | 7100 | 1-547 |
| HPMSF86 | 891 | 509490 | AC073118 | 7101 | 1-332 |
| HPMSF86 | 891 | 509490 | AC073118 | 7102 | 1-416 |
| HPRAU45 | 894 | 536630 | AL358777 | 7103 | 1-228 |
| HPRAU45 | 894 | 536630 | AL358777 | 7104 | 1-130 |
| | | | | | 421-904 |
| | | | | | 1651-2220 |
| HPRAZ10 | 895 | 968692 | AP002391 | 7105 | 1-684 |
| HPRAZ10 | 895 | 968692 | AP001813 | 7106 | 1-684 |
| HPRAZ10 | 895 | 968692 | AP001354 | 7107 | 1-684 |
| HPRAZ10 | 895 | 968692 | AP001813 | 7108 | 1-801 |
| HPRAZ10 | 895 | 968692 | AP001354 | 7109 | 1-801 |
| HPRAZ10 | 895 | 968692 | AP002391 | 7110 | 1-812 |
| HPRBA65 | 896 | 655537 | AC00S1S6 | 7111 | 1-75 |
| | | | | | 210-244 |
| | | | | | 676-737 |
| | | | | | 1197-1292 |
| | | | | | 2540-2624 |
| | | | | | 3457-4334 |
| | | | | | 5676-5802 |
| | | | | | 6374-6668 |
| | | | | | 7168-7566 |
| | | | | | 8477-9182 |
| | | | | | 9877-10179 |
| | | | | | 10809-11521 |
| | | | | | 11664-11764 |
| | | | | | 12167-15152 |
| | | | | | 15313-17601 |
| HPRBA65 | 896 | 655537 | AC005156 | 7112 | 1-384 |
| HPRBL91 | 898 | 655693 | AC027598 | 7113 | 1-287 |
| HPRBL91 | 898 | 655693 | AC002366 | 7114 | 1-1471 |
| | | | | | 2332-2618 |
| | | | | | 2700-3922 |
| HPRBL91 | 898 | 655693 | AC027598 | 7115 | 1-213 |
| HPRBL91 | 898 | 655693 | AC002366 | 7116 | 1-649 |
| HPRCB11 | 899 | 960316 | AC027430 | 7117 | 1-1109 |
| HPRCB11 | 899 | 960316 | AC025060 | 7118 | 1-1109 |
| HPRCB11 | 899 | 960316 | AL356216 | 7119 | 1-1109 |
| HPRCB11 | 899 | 960316 | AC027430 | 7120 | 1-283 |
| | | | | | 1252-1520 |
| | | | | | 3140-3531 |
| | | | | | 3872-4195 |
| | | | | | 5194-5332 |
| HPRCB11 | 899 | 960316 | AC025060 | 7121 | 1-325 |
| | | | | | 1292-1560 |
| | | | | | 3180-3571 |
| | | | | | 3912-4235 |
| | | | | | 5234-5372 |
| HPRCB11 | 899 | 960316 | AL356216 | 7122 | 1-165 |
| | | | | | 983-1294 |
| | | | | | 2273-2541 |
| | | | | | 4161-4552 |
| | | | | | 4893-5211 |
| | | | | | 6214-6352 |
| HPRCB21 | 900 | 655725 | AL359979 | 7123 | 1-462 |
| HPRCB21 | 900 | 655725 | AC007198 | 7124 | 1-38 |
| | | | | | 1466-1583 |
| | | | | | 3807-4268 |
| | | | | | 5971-6192 |
| | | | | | 8369-8478 |
| | | | | | 8487-8559 |
| | | | | | 8759-8854 |
| | | | | | 10151-10561 |
| | | | | | 10604-10767 |
| HPRCB21 | 900 | 655725 | AC007198 | 7125 | 1-375 |
| HPRCN41 | 903 | 655554 | AL118505 | 7126 | 1-340 |
| HPRSB16 | 905 | 666295 | AC025744 | 7127 | 1-600 |
| HPRSB16 | 905 | 666295 | AC009532 | 7128 | 1-600 |
| HPRTL26 | 906 | 849081 | AC023670 | 7129 | 1-494 |
| HPRTL26 | 906 | 849081 | AC006209 | 7130 | 1-494 |
| HPRTL26 | 906 | 849081 | AC023670 | 7131 | 1-421 |
| HPRTL26 | 906 | 849081 | AC023670 | 7132 | 1-143 |
| HPRTL26 | 906 | 849081 | AC006209 | 7133 | 1-421 |
| HPRTL26 | 906 | 849081 | AC006209 | 7134 | 1-316 |
| HPVAB11 | 908 | 967944 | AL132765 | 7135 | 1-317 |
| | | | | | 513-1129 |
| | | | | | 1393-1812 |
| | | | | | 2172-2279 |
| | | | | | 3387-3604 |
| | | | | | 3756-4196 |
| | | | | | 4605-5222 |
| | | | | | 6088-7636 |
| | | | | | 8449-9183 |
| HPVAH36 | 911 | 525537 | AC069506 | 7136 | 1-484 |
| HPVAH36 | 911 | 525537 | AC069506 | 7137 | 1-109 |
| HPWAF85 | 912 | 655691 | AC067852 | 7138 | 1-269 |
| | | | | | 1060-1197 |
| | | | | | 2413-2501 |
| | | | | | 2742-2824 |
| | | | | | 3029-3345 |
| | | | | | 3516-3646 |
| | | | | | 4050-5214 |
| HPWAF85 | 912 | 655691 | AC067852 | 7139 | 1-462 |
| HPWAF85 | 912 | 655691 | AC067852 | 7140 | 1-1449 |
| HPWAH48 | 913 | 655527 | AC021302 | 7141 | 1-771 |
| HPWAH48 | 913 | 655527 | AP002410 | 7142 | 1-771 |
| HPWAH48 | 913 | 655527 | AC027229 | 7143 | 1-771 |
| HPWAH48 | 913 | 655527 | AC021302 | 7144 | 1-577 |
| HPWAH48 | 913 | 655527 | AC027229 | 7145 | 1-577 |
| HPWAS77 | 914 | 908450 | AL360009 | 7146 | 1-899 |
| HPWAS77 | 914 | 908450 | AL360009 | 7147 | 1-439 |
| HPWBA33 | 915 | 655733 | AC011893 | 7148 | 1-218 |
| | | | | | 363-880 |
| HPWBA33 | 915 | 655733 | AC008693 | 7149 | 1-475 |
| | | | | | 551-760 |
| HPWBA33 | 915 | 655733 | AC008793 | 7150 | 1-218 |
| HPWBO84 | 916 | 867289 | AC019236 | 7151 | 1-123 |
| | | | | | 882-1040 |
| | | | | | 2914-3294 |
| | | | | | 3442-3565 |
| | | | | | 3817-3937 |
| HPWCJ27 | 918 | 655614 | AC013537 | 7152 | 1-478 |
| HPWDA86 | 922 | 961529 | AC025052 | 7153 | 1-252 |
| HPWDA86 | 922 | 961529 | AC007908 | 7154 | 1-423 |
| HPWDA86 | 922 | 961529 | AC060805 | 7155 | 1-509 |
| HPWDA86 | 922 | 961529 | AC073210 | 7156 | 1-508 |
| HPWDA86 | 922 | 961529 | AC024972 | 7157 | 1-602 |
| HPWDA86 | 922 | 961529 | AC016424 | 7158 | 1-424 |
| HPWDA86 | 922 | 961529 | AC026106 | 7159 | 1-204 |
| HPWDA86 | 922 | 961529 | AF254982 | 7160 | 1-201 |
| HPWDA86 | 922 | 961529 | AC006352 | 7161 | 1-1265 |
| | | | | | 1916-2604 |
| | | | | | 2661-3249 |
| | | | | | 3978-4705 |
| | | | | | 4940-6193 |
| | | | | | 6404-6826 |
| | | | | | 8773-10518 |
| | | | | | 10889-11233 |
| | | | | | 11898-12329 |
| | | | | | 12356-12820 |
| | | | | | 15993-16294 |
| | | | | | 24465-25008 |
| | | | | | 25659-25803 |
| | | | | | 26371-27137 |
| | | | | | 29043-29527 |
| | | | | | 32143-32572 |
| | | | | | 33008-33621 |
| | | | | | 35141-35475 |
| | | | | | 36748-37095 |
| | | | | | 38180-38873 |
| | | | | | 38879-39078 |
| | | | | | 39939-40330 |
| | | | | | 40474-41066 |
| | | | | | 41075-41810 |
| | | | | | 41904-42646 |
| | | | | | 43264-47127 |
| | | | | | 47426-49777 |
| HPWDA86 | 922 | 961529 | AC002038 | 7162 | 1-203 |
| HPWDA86 | 922 | 961529 | AC002041 | 7163 | 1-423 |
| HPWDA86 | 922 | 961529 | AC007882 | 7164 | 1-423 |
| HPWDA86 | 922 | 961529 | AC025052 | 7165 | 1-352 |
| HPWDA86 | 922 | 961529 | AC007908 | 7166 | 1-1951 |
| HPWDA86 | 922 | 961529 | AC060805 | 7167 | 1-369 |
| HPWDA86 | 922 | 961529 | AC073210 | 7168 | 1-333 |
| HPWDA86 | 922 | 961529 | AC024972 | 7169 | 1-1002 |
| HPWDA86 | 922 | 961529 | AC060805 | 7170 | 1-1004 |
| | | | | | 1014-1114 |
| HPWDA86 | 922 | 961529 | AC073210 | 7171 | 1-960 |
| HPWDA86 | 922 | 961529 | AC024972 | 7172 | 1-2119 |
| HPWDA86 | 922 | 961529 | AC016424 | 7173 | 1-1103 |
| HPWDA86 | 922 | 961529 | AC016424 | 7174 | 1-1003 |
| HPWDA86 | 922 | 961529 | AC026106 | 7175 | 1-426 |
| HPWDA86 | 922 | 961529 | AC006352 | 7176 | 1-661 |
| | | | | | 844-1386 |
| HPWDA86 | 922 | 961529 | AF254982 | 7177 | 1-824 |
| | | | | | 831-1109 |
| HPWDA86 | 922 | 961529 | AC006352 | 7178 | 1-247 |
| | | | | | 320-743 |
| | | | | | 1068-1252 |
| | | | | | 1590-2004 |
| | | | | | 2516-2705 |
| | | | | | 3290-3582 |
| | | | | | 3755-4299 |
| | | | | | 4884-5079 |
| HPWDA86 | 922 | 961529 | AC002041 | 7179 | 1-1951 |
| HPWDA86 | 922 | 961529 | AC002038 | 7180 | 1-1110 |
| HPWDA86 | 922 | 961529 | AC002041 | 7181 | 1-959 |
| HPWDA86 | 922 | 961529 | AC007882 | 7182 | 1-1951 |
| HPWDA86 | 922 | 961529 | AC007882 | 7183 | 1-959 |
| HPWDD72 | 923 | 537333 | AC005189 | 7184 | 1-799 |
| HPWDD72 | 923 | 537333 | AC005189 | 7185 | 1-411 |
| HPWDD72 | 923 | 537333 | AC005189 | 7186 | 1-619 |
| KPWSB35 | 924 | 655713 | AC026075 | 7187 | 1-358 |
| | | | | | 393-922 |
| HPWSB35 | 924 | 655713 | AC026075 | 7188 | 1-100 |
| HPZAB38 | 925 | 655591 | AC008954 | 7189 | 1-263 |
| HPZAB38 | 925 | 655591 | AC026707 | 7190 | 1-263 |
| HPZAB38 | 925 | 655591 | AC008971 | 7191 | 1-263 |
| HPZAB38 | 925 | 655591 | AC026707 | 7192 | 1-186 |
| HPZAB38 | 925 | 655591 | AC008971 | 7193 | 1-180 |
| HSWAD39 | 927 | 705322 | AC010076 | 7194 | 1-1083 |
| HSWAD39 | 927 | 705322 | AC010076 | 7195 | 1-625 |
| HSWBD86 | 928 | 785439 | AC009700 | 7196 | 1-859 |
| HSWBD86 | 928 | 785439 | AC051619 | 7197 | 1-143 |
| | | | | | 2883-3799 |
| | | | | | 3860-4084 |
| | | | | | 4588-4731 |
| | | | | | 4805-5240 |
| | | | | | 5789-6236 |
| | | | | | 6303-6916 |
| | | | | | 7595-7957 |
| | | | | | 10174-11092 |
| HSWBD86 | 928 | 785439 | AC009700 | 7198 | 1-1558 |
| | | | | | 2105-2231 |
| | | | | | 2334-2387 |
| HSWBD86 | 928 | 785439 | AC051619 | 7199 | 1-1558 |
| | | | | | 2093-2219 |
| | | | | | 2322-2375 |
| HSWBD86 | 928 | 785439 | AC051619 | 7200 | 1-155 |
| HSWBJ40 | 929 | 711066 | AC046165 | 7201 | 1-782 |
| HSW3J40 | 929 | 711066 | AC034220 | 7202 | 1-782 |
| HSWBJ40 | 929 | 711066 | AC034220 | 7203 | 1-545 |
| | | | | | 914-1407 |
| HSWBJ40 | 929 | 711066 | AC046165 | 7204 | 1-87 |
| | | | | | 410-529 |
| | | | | | 561-954 |
| HSWBJ40 | 929 | 711066 | AC034220 | 7205 | 1-168 |
| | | | | | 3854-3951 |
| | | | | | 6063-6447 |
| | | | | | 7841-7908 |
| | | | | | 8322-8502 |
| | | | | | 8704-8877 |
| | | | | | 9198-9318 |
| | | | | | 9350-9743 |
| HTEAD95 | 934 | 961232 | AC006445 | 7206 | 1-1321 |
| HTEAF26 | 936 | 537271 | AC022988 | 7207 | 1-319 |
| HTEAG50 | 937 | 787500 | AC026462 | 7208 | 1-310 |
| HTEAG50 | 937 | 787500 | AC026462 | 7209 | 1-250 |
| HTEAR84 | 941 | 783328 | AL133353 | 7210 | 1-222 |
| | | | | | 225-361 |
| | | | | | 2796-2928 |
| | | | | | 4044-4119 |
| | | | | | 5719-5962 |
| | | | | | 7512-7571 |
| | | | | | 10952-11165 |
| | | | | | 11840-11870 |
| | | | | | 15055-15191 |
| | | | | | 17157-17497 |
| | | | | | 18170-18193 |
| | | | | | 19594-20180 |
| | | | | | 20819-21289 |
| | | | | | 21499-22434 |
| | | | | | 22520-23934 |
| HTEAR84 | 941 | 783328 | AL133353 | 7211 | 1-200 |
| | | | | | 456-609 |
| | | | | | 5860-5998 |
| | | | | | 6526-6629 |
| | | | | | 8425-8724 |
| | | | | | 9151-9625 |
| | | | | | 12117-12252 |
| | | | | | 15026-15571 |
| | | | | | 15654-16121 |
| | | | | | 16221-16852 |
| | | | | | 19264-19592 |
| | | | | | 21596-21794 |
| | | | | | 22707-22795 |
| | | | | | 23248-23407 |
| | | | | | 23487-23890 |
| | | | | | 25183-26429 |
| | | | | | 26561-27890 |
| | | | | | 28380-28908 |
| | | | | | 28953-29430 |
| | | | | | 29490-32385 |
| | | | | | 32577-35455 |
| | | | | | 36789-37427 |
| | | | | | 37736-38206 |
| | | | | | 38250-38308 |
| | | | | | 38867-39048 |
| | | | | | 39075-39236 |
| | | | | | 39491-39811 |
| | | | | | 39971-40302 |
| | | | | | 40401-40871 |
| | | | | | 41105-41186 |
| | | | | | 41719-41801 |
| | | | | | 43440-43567 |
| | | | | | 43732-44141 |
| | | | | | 44689-44855 |
| | | | | | 46395-46619 |
| | | | | | 47357-47643 |
| | | | | | 47700-47887 |
| | | | | | 48174-48294 |
| | | | | | 48469-48728 |
| | | | | | 50284-50469 |
| | | | | | 52382-52845 |
| HTEAR84 | 941 | 783328 | AL133353 | 7212 | 1-445 |
| HTEAV43 | 942 | 927010 | AL365184 | 7213 | 1-577 |
| HTEAZ54 | 944 | 793441 | AC024644 | 7214 | 1-521 |
| HTEAZ54 | 944 | 793441 | AC008555 | 7215 | 1-797 |
| | | | | | 1423-1942 |
| | | | | | 2185-2716 |
| | | | | | 2806-4251 |
| HTEAZ54 | 944 | 793441 | AC024644 | 7216 | 1-97 |
| HTEBC74 | 945 | 887782 | AC022247 | 7217 | 1-148 |
| | | | | | 2458-2630 |
| HTEBD35 | 946 | 967959 | AC072024 | 7218 | 1-317 |
| HTEBD35 | 946 | 967959 | AL353796 | 7219 | 1-317 |
| HTEBD35 | 946 | 967959 | AL360172 | 7220 | 1-317 |
| HTEBJ78 | 948 | 779265 | AP001177 | 7221 | 1-1021 |
| | | | | | 3487-4086 |
| | | | | | 4668-5157 |
| | | | | | 5193-5665 |
| | | | | | 5913-7625 |
| HTEBJ78 | 948 | 779265 | AC016186 | 7222 | 1-1021 |
| HTEBJ78 | 948 | 779265 | AC016127 | 7223 | 1-1021 |
| | | | | | 2300-2622 |
| | | | | | 3488-4067 |
| HTEBJ78 | 948 | 779265 | AP001164 | 7224 | 1-1021 |
| | | | | | 2463-2587 |
| | | | | | 3494-4093 |
| | | | | | 4675-5164 |
| | | | | | 5200-5672 |
| | | | | | 5920-7633 |
| HTEBJ78 | 948 | 779265 | AC023989 | 7225 | 1-1021 |
| | | | | | 2300-2622 |
| | | | | | 3488-4067 |
| HTEBJ78 | 948 | 779265 | AP001164 | 7226 | 1-340 |
| HTEBJ78 | 948 | 779265 | AC023989 | 7227 | 1-340 |
| HTEBJ78 | 948 | 779265 | AC016186 | 7228 | 1-340 |
| HTEBJ78 | 948 | 779265 | AC016127 | 7229 | 1-340 |
| HTEBJ78 | 948 | 779265 | AC023989 | 7230 | 1-490 |
| HTEBX62 | 953 | 508150 | AC068620 | 7231 | 1-584 |
| HTEBX62 | 953 | 508150 | AC068620 | 7232 | 1-2496 |
| | | | | | 2639-3538 |
| HTEBY15 | 955 | 526281 | AL117259 | 7233 | 1-260 |
| HTEBY41 | 957 | 711523 | AL357093 | 7234 | 1-229 |
| HTEBY41 | 957 | 711523 | AL157736 | 7235 | 1-229 |
| HTEBY41 | 957 | 711523 | AL357093 | 7236 | 1-142 |
| HTEBY41 | 957 | 711523 | AL357093 | 7237 | 1-455 |
| HTEBY41 | 957 | 711523 | AL157736 | 7238 | 1-142 |
| HTEBY41 | 957 | 711523 | AL157736 | 7239 | 1-455 |
| HTEBY61 | 958 | 967340 | AC020663 | 7240 | 1-150 |
| | | | | | 1916-2097 |
| | | | | | 3254-3396 |
| | | | | | 4731-5065 |
| | | | | | 5605-5801 |
| | | | | | 5830-6113 |
| | | | | | 6544-6716 |
| | | | | | 7594-8121 |
| | | | | | 8494-8612 |
| | | | | | 8752-9291 |
| | | | | | 9401-9505 |
| | | | | | 10308-10582 |
| | | | | | 11826-11970 |
| | | | | | 12379-12478 |
| | | | | | 12796-13085 |
| | | | | | 13942-14925 |
| HTEBY61 | 958 | 967340 | AC020663 | 7241 | 1-265 |
| HTEBZ21 | 959 | 958381 | AL390764 | 7242 | 1-101 |
| | | | | | 236-1007 |
| | | | | | 1038-1344 |
| | | | | | 1353-1493 |
| | | | | | 1641-1750 |
| | | | | | 1837-2006 |
| | | | | | 2542-2700 |
| | | | | | 3557-3720 |
| | | | | | 4326-9299 |
| | | | | | 9617-10008 |
| | | | | | 10623-11068 |
| | | | | | 11238-11714 |
| | | | | | 11800-11992 |
| | | | | | 12001-12566 |
| | | | | | 13314-15677 |
| | | | | | 15882-16457 |
| | | | | | 16614-17442 |
| | | | | | 17850-18427 |
| | | | | | 19713-19802 |
| HTEBZ21 | 959 | 958381 | AL135843 | 7243 | 1-32 |
| | | | | | 1420-1543 |
| | | | | | 2122-2266 |
| | | | | | 2730-3022 |
| | | | | | 3914-4068 |
| | | | | | 4197-4968 |
| | | | | | 4999-5305 |
| | | | | | 5314-5454 |
| | | | | | 5602-5711 |
| | | | | | 5798-5967 |
| | | | | | 6503-6661 |
| | | | | | 7518-7681 |
| | | | | | 8287-13260 |
| | | | | | 13578-13969 |
| | | | | | 14584-15029 |
| | | | | | 15199-15675 |
| | | | | | 15761-15953 |
| | | | | | 15962-16527 |
| | | | | | 17275-19638 |
| | | | | | 19843-20418 |
| | | | | | 20575-21403 |
| HTEBZ21 | 959 | 958381 | AL136105 | 7244 | 1-576 |
| HTEBZ21 | 959 | 958381 | AL359921 | 7245 | 1-703 |
| | | | | | 1021-1412 |
| | | | | | 2027-2470 |
| | | | | | 2640-3116 |
| | | | | | 3202-3394 |
| | | | | | 3403-3968 |
| | | | | | 4716-7079 |
| | | | | | 7284-7859 |
| | | | | | 8016-8844 |
| | | | | | 9252-9829 |
| | | | | | 11115-11204 |
| HTEBZ21 | 959 | 958381 | AL136105 | 7246 | 1-32 |
| | | | | | 1420-1543 |
| | | | | | 2122-2266 |
| | | | | | 2730-3022 |
| | | | | | 3914-4068 |
| | | | | | 4197-4968 |
| | | | | | 4999-5305 |
| | | | | | 5314-5454 |
| | | | | | 5602-5711 |
| | | | | | 5798-5967 |
| | | | | | 6503-6661 |
| | | | | | 7518-7681 |
| | | | | | 8287-13260 |
| | | | | | 13578-13969 |
| | | | | | 14584-15029 |
| | | | | | 15199-15675 |
| | | | | | 15761-15953 |
| | | | | | 15962-16527 |
| | | | | | 17275-19638 |
| | | | | | 19843-20418 |
| | | | | | 20575-21403 |
| | | | | | 21811-22388 |
| | | | | | 23674-23763 |
| HTEBZ21 | 959 | 958381 | AL136105 | 7247 | 1-311 |
| HTEBZ21 | 959 | 958381 | AL390764 | 7248 | 1-287 |
| HTEBZ21 | 959 | 958381 | AL135843 | 7249 | 1-302 |
| HTEBZ21 | 959 | 958381 | AL136105 | 7250 | 1-1122 |
| HTEBZ21 | 959 | 958381 | AL359921 | 7251 | 1-347 |
| | | | | | 661-1203 |
| | | | | | 1533-2057 |
| | | | | | 2287-2445 |
| | | | | | 3335-3716 |
| | | | | | 5741-6053 |
| HTEBZ21 | 959 | 958381 | AL136105 | 7252 | 1-347 |
| | | | | | 661-1203 |
| | | | | | 1533-2057 |
| | | | | | 2287-2445 |
| | | | | | 3335-3716 |
| | | | | | 5729-6044 |
| HTEBZ21 | 959 | 958381 | AL136105 | 7253 | 1-302 |
| HTECA16 | 961 | 764416 | AC011726 | 7254 | 1-470 |
| HTECA16 | 961 | 764416 | AC022911 | 7255 | 1-470 |
| HTECA16 | 961 | 764416 | AC011726 | 7256 | 1-500 |
| HTECA16 | 961 | 764416 | AC022911 | 7257 | 1-500 |
| HIECA51 | 964 | 708860 | AL035450 | 7258 | 1-93 |
| | | | | | 1880-3178 |
| HTECA51 | 964 | 708860 | AL035450 | 7259 | 1-105 |
| HTECC13 | 967 | 971673 | AC018638 | 7260 | 1-252 |
| | | | | | 3348-3556 |
| | | | | | 3720-3822 |
| | | | | | 3877-4004 |
| | | | | | 4927-5181 |
| | | | | | 5226-5736 |
| HTECC13 | 967 | 971673 | AC018638 | 7261 | 1-130 |
| HTECC37 | 969 | 508143 | AC073270 | 7262 | 1-416 |
| HTECC37 | 969 | 508143 | AC022202 | 7263 | 1-416 |
| HTECC80 | 972 | 796820 | AC016767 | 7264 | 1-35 |
| | | | | | 784-988 |
| | | | | | 1186-1254 |
| | | | | | 1854-2737 |
| HTECC80 | 972 | 796820 | AL353608 | 7265 | 1-140 |
| | | | | | 1348-1579 |
| | | | | | 1810-2502 |
| | | | | | 2585-2694 |
| | | | | | 2831-3054 |
| | | | | | 3202-3273 |
| | | | | | 3513-3903 |
| | | | | | 4019-4053 |
| | | | | | 4802-5008 |
| | | | | | 5205-5273 |
| | | | | | 5873-6756 |
| HTECC80 972 | 796820 | AL078621 | 7266 | 1-35 | |
| | | | | | 784-988 |
| | | | | | 1187-1255 |
| | | | | | 1855-2739 |
| HTECC80 | 972 | 796820 | AC016767 | 7267 | 1-103 |
| HTECC96 | 974 | 959874 | AC025977 | 7268 | 1-1286 |
| HTECC96 | 974 | 959874 | AC040170 | 7269 | 1-1286 |
| HTECC96 | 974 | 959874 | AC013513 | 7270 | 1-1286 |
| HTECD17 | 975 | 508108 | AC013812 | 7271 | 1-700 |
| HTECD17 | 975 | 508108 | AL136360 | 7272 | 1-707 |
| HTECD17 | 975 | 508108 | AL132868 | 7273 | 1-712 |
| HTECD17 | 975 | 508108 | AL136360 | 7274 | 1-263 |
| HTECD17 | 975 | 508108 | AL132868 | 7275 | 1-1166 |
| HTECD36 | 977 | 518124 | AL132780 | 7276 | 1-562 |
| | | | | | 736-1855 |
| | | | | | 1931-2051 |
| | | | | | 2232-2897 |
| | | | | | 3495-3673 |
| | | | | | 3759-3882 |
| | | | | | 3968-4030 |
| | | | | | 4121-4203 |
| | | | | | 4369-4532 |
| | | | | | 5620-6405 |
| | | | | | 7007-7151 |
| | | | | | 7615-7702 |
| | | | | | 7882-8106 |
| | | | | | 8655-8942 |
| HTECD36 | 977 | 518124 | AL132780 | 7277 | 1-1058 |
| | | | | | 1452-2073 |
| HTECE44 | 981 | 764830 | AC026957 | 7278 | 1-198 |
| | | | | | 2840-3137 |
| | | | | | 3146-3524 |
| | | | | | 3811-4890 |
| | | | | | 6360-6479 |
| | | | | | 7798-8125 |
| | | | | | 13068-13250 |
| | | | | | 14052-14252 |
| HTECE44 | 981 | 764830 | AC026957 | 7279 | 1-626 |
| | | | | | 1734-2270 |
| HTECE44 | 981 | 764830 | AC026957 | 7280 | 1-514 |
| HTECE91 | 984 | 522984 | AC021586 | 7281 | 1-1460 |
| | | | | | 4600-4966 |
| | | | | | 5827-6179 |
| | | | | | 6596-7246 |
| | | | | | 8893-9973 |
| | | | | | 9991-10696 |
| | | | | | 10851-11246 |
| | | | | | 11352-11783 |
| | | | | | 11934-12787 |
| | | | | | 12926-13555 |
| HTECE91 | 984 | 522984 | AC021586 | 7282 | 1-310 |
| HTECE91 | 984 | 522984 | AC021586 | 7283 | 1-227 |
| HTEDF13 | 985 | 522964 | AL133499 | 7284 | 1-370 |
| HTEDF13 | 985 | 522964 | AP001579 | 7285 | 1-370 |
| HTEDF13 | 985 | 522964 | AL133499 | 7286 | 1-373 |
| HTEDF13 | 985 | 522964 | AP001579 | 7287 | 1-373 |
| HTEDF76 | 988 | 522973 | AC073612 | 7288 | 1-445 |
| HTEDF76 | 988 | 522973 | AC011601 | 7289 | 1-445 |
| HTEDF76 | 988 | 522973 | AC073612 | 7290 | 1-1099 |
| HTEDF76 | 988 | 522973 | AC011601 | 7291 | 1-1099 |
| HTEDG16 | 989 | 925527 | AC008547 | 7292 | 1-196 |
| | | | | | 5138-6241 |
| HTEDG16 | 989 | 925527 | AC008547 | 7293 | 1-615 |
| HTEDI82 | 996 | 536477 | AL359455 | 7294 | 1-396 |
| | | | | | 561-837 |
| | | | | | 2703-2900 |
| | | | | | 3015-3099 |
| HTEDI82 | 996 | 536477 | AL359455 | 7295 | 1-99 |
| | | | | | 404-514 |
| | | | | | 597-985 |
| HTEDJ04 | 997 | 519940 | AL359767 | 7296 | 1-363 |
| | | | | | 411-960 |
| HTEDJ04 | 997 | 519940 | AL139377 | 7297 | 1-363 |
| | | | | | 411-960 |
| HTEDJ04 | 997 | 519940 | AL359767 | 7298 | 1-1831 |
| HTEDJ04 | 997 | 519940 | AL359767 | 7299 | 1-430 |
| HTEDJ04 | 997 | 519940 | AL139377 | 7300 | 1-27 |
| | | | | | 318-1304 |
| | | | | | 2398-3171 |
| | | | | | 3518-4027 |
| | | | | | 4716-4919 |
| | | | | | 6801-6956 |
| | | | | | 9618-9892 |
| | | | | | 9938-10400 |
| | | | | | 10485-11629 |
| | | | | | 14162-18670 |
| | | | | | 18980-19880 |
| | | | | | 20136-20686 |
| | | | | | 21997-22089 |
| | | | | | 23839-23999 |
| | | | | | 24083-24175 |
| | | | | | 25513-26022 |
| | | | | | 27060-27487 |
| | | | | | 27557-28168 |
| | | | | | 28906-29445 |
| | | | | | 31090-31363 |
| | | | | | 31403-31488 |
| | | | | | 31669-33499 |
| HTEDJ04 | 997 | 519940 | AL139377 | 7301 | 1-430 |
| HTEDJ30 | 998 | 771404 | AC009871 | 7302 | 1-1510 |
| HTEDJ30 | 998 | 771404 | AC009812 | 7303 | 1-1510 |
| HTEDJ30 | 998 | 771404 | AC009871 | 7304 | 1-448 |
| HTEDJ30 | 998 | 771404 | AC009812 | 7305 | 1-555 |
| HTEDM08 | 999 | 960303 | AF215848 | 7306 | 1-170 |
| | | | | | 294-404 |
| HTEDM08 | 999 | 960303 | AC009314 | 7307 | 1-171 |
| | | | | | 295-405 |
| HTEDM08 | 999 | 960303 | AF215848 | 7308 | 1-317 |
| HTEDM08 | 999 | 960303 | AC009314 | 7309 | 1-319 |
| HTEDO31 | 1000 | 870711 | AC066613 | 7310 | 1-279 |
| HTEDO31 | 1000 | 870711 | AC021238 | 7311 | 1-279 |
| HTEDO51 | 1001 | 530592 | AL390816 | 7312 | 1-67 |
| | | | | | 5510-5778 |
| HTEDO59 | 1002 | 964379 | AL0S0310 | 7313 | 1-421 |
| HTEDO59 | 1002 | 964379 | AL161442 | 7314 | 1-421 |
| HTEDO59 | 1002 | 964379 | AL050310 | 7315 | 1-860 |
| HTEDO59 | 1002 | 964379 | AL050310 | 7316 | 1-342 |
| HTEDO59 | 1002 | 964379 | AL161442 | 7317 | 1-518 |
| HTEDO59 | 1002 | 964379 | AL161442 | 7318 | 1-3019 |
| HTEDP15 | 1003 | 870675 | AC008119 | 7319 | 1-129 |
| | | | | | 1226-2057 |
| | | | | | 3894-4078 |
| | | | | | 4353-5054 |
| | | | | | 5261-6347 |
| | | | | | 6614-7200 |
| | | | | | 9168-9576 |
| | | | | | 10127-10285 |
| | | | | | 11014-11729 |
| | | | | | 11817-12350 |
| | | | | | 12430-12511 |
| | | | | | 12645-12705 |
| | | | | | 13644-13859 |
| | | | | | 15181-15386 |
| | | | | | 16010-16997 |
| | | | | | 17664-18577 |
| | | | | | 18904-19074 |
| | | | | | 20351-20663 |
| | | | | | 20725-20760 |
| | | | | | 22661-23119 |
| | | | | | 23379-23760 |
| | | | | | 24351-24525 |
| | | | | | 24708-25559 |
| | | | | | 25582-29154 |
| | | | | | 29209-29484 |
| | | | | | 29561-30822 |
| | | | | | 31196-31337 |
| | | | | | 31407-31850 |
| | | | | | 31943-32302 |
| | | | | | 33856-33927 |
| HTEDP15 | 1003 | 870675 | AC008119 | 7320 | 1-254 |
| HTEDP31 | 1004 | 870548 | AC004674 | 7321 | 1-660 |
| HTEDP31 | 1004 | 870548 | AC004674 | 7322 | 1-139 |
| HTEDQ30 | 1007 | 530589 | AC011181 | 7323 | 1-683 |
| HTEDQ30 | 1007 | 530589 | AC011181 | 7324 | 1-443 |
| HTEDQ30 | 1007 | 530589 | AC011181 | 7325 | 1-275 |
| HTEDQ83 | 1009 | 530586 | AC018935 | 7326 | 1-491 |
| HTEDR71 | 1010 | 761585 | AJ239328 | 7327 | 1-367 |
| | | | | | 884-2043 |
| | | | | | 2287-2859 |
| | | | | | 4457-4512 |
| | | | | | 4780-6360 |
| | | | | | 9237-9407 |
| | | | | | 10873-11661 |
| HTEDR71 | 1010 | 761585 | AP000219 | 7328 | 1-367 |
| | | | | | 884-2043 |
| | | | | | 2287-2859 |
| | | | | | 4457-4512 |
| | | | | | 4780-6360 |
| | | | | | 9237-9407 |
| | | | | | 10903-11691 |
| HTEDR71 | 1010 | 761585 | AP000341 | 7329 | 1-367 |
| | | | | | 884-2043 |
| | | | | | 2287-2859 |
| | | | | | 4457-4512 |
| | | | | | 4780-6360 |
| | | | | | 9237-9407 |
| | | | | | 10903-11691 |
| HTEDR71 | 1010 | 761585 | AJ239328 | 7330 | 1-241 |
| HTEDR71 | 1010 | 761585 | AP000219 | 7331 | 1-241 |
| HTEDR71 | 1010 | 761585 | AP000341 | 7332 | 1-241 |
| HTEDU48 | 1013 | 932315 | AC026083 | 7333 | 1-1222 |
| HTEDU48 | 1013 | 932315 | AC026083 | 7334 | 1-416 |
| HTEDU48 | 1013 | 932315 | AC026083 | 7335 | 1-442 |
| HTEEA03 | 1020 | 925399 | AC010934 | 7336 | 1-1173 |
| | | | | | 1296-2904 |
| | | | | | 2911-4546 |
| HTEEA03 | 1020 | 925399 | AC044879 | 7337 | 1-1173 |
| | | | | | 1296-2905 |
| | | | | | 2912-4547 |
| HTEEA03 | 1020 | 925399 | AC010934 | 7338 | 1-1008 |
| HTEEA03 | 1020 | 925399 | AC044879 | 7339 | 1-692 |
| HTEEA03 | 1020 | 925399 | AC010934 | 7340 | 1-692 |
| HTEEA03 | 1020 | 925399 | AC044879 | 7341 | 1-1008 |
| HTEEE65 | 1024 | 530157 | AC011830 | 7342 | 1-164 |
| | | | | | 2053-2094 |
| | | | | | 2375-2846 |
| HTEEE65 | 1024 | 530157 | AC018502 | 7343 | 1-164 |
| | | | | | 2053-2094 |
| | | | | | 2375-2846 |
| HTEEE65 | 1024 | 530157 | AC018499 | 7344 | 1-164 |
| | | | | | 2053-2094 |
| | | | | | 2375-2846 |
| HTEEE65 | 1024 | 530157 | AC018502 | 7345 | 1-2058 |
| HTEEU23 | 1027 | 524059 | AL355801 | 7346 | 1-359 |
| | | | | | 3545-3632 |
| | | | | | 6187-6329 |
| | | | | | 7609-7687 |
| HTEEU23 | 1027 | 524059 | AL355801 | 7347 | 1-939 |
| | | | | | 1454-1932 |
| | | | | | 2912-3240 |
| | | | | | 3284-3953 |
| HTEEW73 | 1032 | 917206 | AL355377 | 7348 | 1-83 |
| | | | | | 578-621 |
| | | | | | 1159-1219 |
| | | | | | 2182-2285 |
| | | | | | 2508-2616 |
| | | | | | 6024-6598 |
| HTEFJ53 | 1034 | 935982 | AC019031 | 7349 | 1-710 |
| HTEFJ53 | 1034 | 935982 | AC019031 | 7350 | 1-405 |
| HTEFO32 | 1037 | 529272 | AL133264 | 7351 | 1-190 |
| | | | | | 1330-1629 |
| | | | | | 2351-5250 |
| | | | | | 5255-5600 |
| | | | | | 5635-9271 |
| | | | | | 9938-10152 |
| | | | | | 10897-11597 |
| | | | | | 11951-12840 |
| | | | | | 13095-13296 |
| | | | | | 13340-13626 |
| | | | | | 13704-14430 |
| | | | | | 14536-14639 |
| | | | | | 15282-15909 |
| | | | | | 16437-16561 |
| | | | | | 18269-18449 |
| | | | | | 20662-21446 |
| | | | | | 21484-22073 |
| HTEFO76 | 1038 | 770270 | AC055733 | 7352 | 1-160 |
| | | | | | 888-1009 |
| | | | | | 1771-2022 |
| HTEFO76 | 1038 | 770270 | AC025148 | 7353 | 1-322 |
| | | | | | 946-1105 |
| | | | | | 1827-1948 |
| | | | | | 2710-2961 |
| HTEFO76 | 1038 | 770270 | AC025148 | 7354 | 1-924 |
| | | | | | 1228-1751 |
| | | | | | 1793-2057 |
| | | | | | 2224-2959 |
| | | | | | 3239-3297 |
| | | | | | 4754-4965 |
| | | | | | 5736-6035 |
| | | | | | 8675-9217 |
| | | | | | 10252-11580 |
| | | | | | 11720-11844 |
| | | | | | 12753-13021 |
| HTEFS60 | 1042 | 836010 | Z84469 | 7355 | 1-640 |
| HTEFW55 | 1044 | 787550 | AL138975 | 7356 | 1-703 |
| HTEFW55 | 1044 | 787550 | AC011190 | 7357 | 1-703 |
| HTEFW55 | 1044 | 787550 | AL162171 | 7358 | 1-118 |
| | | | | | 600-642 |
| | | | | | 4987-5103 |
| | | | | | 8034-8072 |
| | | | | | 8978-9174 |
| | | | | | 9525-9958 |
| | | | | | 10048-10357 |
| | | | | | 10648-11468 |
| | | | | | 11642-12760 |
| | | | | | 12786-12888 |
| | | | | | 13913-14249 |
| | | | | | 14931-15063 |
| | | | | | 15738-16168 |
| | | | | | 16205-16345 |
| | | | | | 17103-17538 |
| | | | | | 20097-20865 |
| | | | | | 21389-21912 |
| | | | | | 24378-24502 |
| | | | | | 24644-25083 |
| | | | | | 27767-28008 |
| | | | | | 28873-29360 |
| | | | | | 31358-32060 |
| | | | | | 36985-37295 |
| | | | | | 38992-39029 |
| | | | | | 39774-40017 |
| | | | | | 44189-44310 |
| | | | | | 44400-44530 |
| | | | | | 46199-46350 |
| | | | | | 46476-46750 |
| | | | | | 47107-47593 |
| | | | | | 47781-48000 |
| | | | | | 48185-48492 |
| | | | | | 48689-50784 |
| HTEFW55 | 1044 | 787550 | AL162171 | 7359 | 1-1502 |
| HTEFW55 | 1044 | 787550 | AL162171 | 7360 | 1-294 |
| | | | | | 309-744 |
| HTEFX53 | 1047 | 842047 | AC019054 | 7361 | 1-1177 |
| HTEFX53 | 1047 | 842047 | AC019054 | 7362 | 1-272 |
| HTEGA13 | 1048 | 656077 | AC016366 | 7363 | 1-124 |
| | | | | | 250-1075 |
| | | | | | 1645-1784 |
| | | | | | 3488-3903 |
| | | | | | 4325-4378 |
| | | | | | 5000-5066 |
| | | | | | 5729-5862 |
| HTEGA13 | 1048 | 656077 | AC005237 | 7364 | 1-129 |
| | | | | | 864-968 |
| | | | | | 2110-2704 |
| | | | | | 2874-3374 |
| | | | | | 3897-4026 |
| | | | | | 4152-4977 |
| | | | | | 5547-5686 |
| | | | | | 7392-7807 |
| | | | | | 8227-8285 |
| | | | | | 8903-8970 |
| | | | | | 9633-9766 |
| | | | | | 10230-10642 |
| | | | | | 10754-10917 |
| | | | | | 13200-13823 |
| | | | | | 15685-15784 |
| | | | | | 16202-16302 |
| | | | | | 16342-16496 |
| | | | | | 16754-16865 |
| | | | | | 17467-17820 |
| | | | | | 20203-20289 |
| | | | | | 25130-25260 |
| | | | | | 26385-26486 |
| | | | | | 28046-28566 |
| | | | | | 28884-28989 |
| | | | | | 30114-30820 |
| | | | | | 33068-33452 |
| HTEGA13 | 1048 | 656077 | AC005237 | 7365 | 1-592 |
| HTEGF95 | 1055 | 796660 | AC023097 | 7366 | 1-1019 |
| | | | | | 1110-1237 |
| | | | | | 1879-2520 |
| | | | | | 2630-2722 |
| | | | | | 2971-3623 |
| | | | | | 3632-3799 |
| | | | | | 4789-5451 |
| | | | | | 5681-5917 |
| | | | | | 6015-6176 |
| | | | | | 7511-7632 |
| | | | | | 7814-8250 |
| | | | | | 9336-9535 |
| | | | | | 9998-11067 |
| | | | | | 12025-12474 |
| | | | | | 14608-14706 |
| | | | | | 15489-15605 |
| | | | | | 16481-16607 |
| HTEGF95 | 1055 | 796660 | AC023097 | 7367 | 1-600 |
| HTEGF95 | 1055 | 796660 | AC023097 | 7368 | 1-388 |
| HTEGG07 | 1056 | 954115 | AC011842 | 7369 | 1-486 |
| HTEGG07 | 1056 | 954115 | AC011842 | 7370 | 1-606 |
| HTEGG61 | 1057 | 528007 | AC009220 | 7371 | 1-627 |
| HTEGG61 | 1057 | 528007 | AC009220 | 7372 | 1-303 |
| HTEGG61 | 1057 | 528007 | AC009220 | 7373 | 1-123 |
| HTEGK51 | 1058 | 520046 | AC008555 | 7374 | 1-797 |
| | | | | | 1423-1942 |
| | | | | | 2185-2716 |
| | | | | | 2806-4251 |
| HTEGU13 | 1071 | 520041 | AC036208 | 7375 | 1-388 |
| | | | | | 3367-3638 |
| | | | | | 4217-4390 |
| | | | | | 4594-4868 |
| | | | | | 6530-6680 |
| | | | | | 7892-7971 |
| | | | | | 9392-9567 |
| | | | | | 10136-10429 |
| HTEGU13 | 1071 | 520041 | AC036208 | 7376 | 1-156 |
| HTEGU62 | 1073 | 573885 | AC036238 | 7377 | 1-402 |
| HTEGU62 | 1073 | 573885 | AC036238 | 7378 | 1-256 |
| HTEGU62 | 1073 | 573885 | AC036238 | 7379 | 1-150 |
| HTEGU93 | 1074 | 764831 | AC026957 | 7380 | 1-198 |
| | | | | | 2840-3137 |
| | | | | | 3146-3524 |
| | | | | | 3811-4890 |
| | | | | | 6360-6479 |
| | | | | | 7798-8125 |
| | | | | | 13068-13250 |
| | | | | | 14052-14252 |
| HTEGU93 | 1074 | 764831 | AC026957 | 7381 | 1-626 |
| | | | | | 1734-2270 |
| HTEGU93 | 1074 | 764831 | AC026957 | 7382 | 1-514 |
| HTEGV60 | 1076 | 822954 | AC013414 | 7383 | 1-138 |
| | | | | | 550-714 |
| | | | | | 2702-3122 |
| | | | | | 3973-4262 |
| | | | | | 4649-4745 |
| | | | | | 5363-7228 |
| HTEGV60 | 1076 | 822954 | AC016171 | 7384 | 1-127 |
| | | | | | 1017-1306 |
| | | | | | 1693-1789 |
| | | | | | 2407-5049 |
| HTEGV60 | 1076 | 822954 | AC016171 | 7385 | 1-4710 |
| HTEGV84 | 1077 | 870240 | AC027120 | 7386 | 1-1730 |
| HTEGV84 | 1077 | 870240 | AC023877 | 7387 | 1-1730 |
| HTEGV84 | 1077 | 870240 | AC027120 | 7388 | 1-85 |
| HTEGV84 | 1077 | 870240 | AC023877 | 7389 | 1-85 |
| HTEGW41 | 1078 | 573880 | AL135939 | 7390 | 1-541 |
| HTEGW94 | 1079 | 794350 | AC022672 | 7391 | 1-1334 |
| | | | | | 1951-2103 |
| HTEGW94 | 1079 | 794350 | AC022672 | 7392 | 1-5446 |
| HTEGX74 | 1080 | 783829 | AC027396 | 7393 | 1-95 |
| | | | | | 227-318 |
| | | | | | 546-654 |
| | | | | | 669-792 |
| | | | | | 1355-1766 |
| HTEGX74 | 1080 | 783829 | AC027396 | 7394 | 1-1730 |
| HTEGY01 | 1081 | 917214 | AC009061 | 7395 | 1-123 |
| | | | | | 4295-4489 |
| | | | | | 5148-5404 |
| | | | | | 5536-5632 |
| HTEGY01 | 1081 | 917214 | AC009061 | 7396 | 1-101 |
| HTEHB07 | 1083 | 870707 | AC020575 | 7397 | 1-625 |
| | | | | | 1178-1625 |
| HTEHB07 | 1083 | 870707 | AC027000 | 7398 | 1-625 |
| | | | | | 1177-1624 |
| HTEHC60 | 1086 | 965998 | AC007343 | 7399 | 1-695 |
| HTEHC60 | 1086 | 965998 | AC018553 | 7400 | 1-695 |
| HTEHC60 | 1086 | 965998 | AC007343 | 7401 | 1-494 |
| HTEHC60 | 1086 | 965998 | AC018553 | 7402 | 1-494 |
| HTEHE60 | 1088 | 795264 | AC007114 | 7403 | 1-738 |
| HTEHE60 | 1088 | 795264 | AC007114 | 7404 | 1-359 |
| HTEHE78 | 1090 | 932312 | AC022621 | 7405 | 1-419 |
| HTEHE78 | 1090 | 932312 | AC022621 | 7406 | 1-634 |
| HTEHE78 | 1090 | 932312 | AC022621 | 7407 | 1-398 |
| HTEHF66 | 1093 | 836999 | AL109657 | 7408 | 1-67 |
| | | | | | 611-694 |
| | | | | | 1472-1552 |
| | | | | | 7387-7447 |
| | | | | | 7998-8086 |
| | | | | | 10739-10859 |
| HTEHI93 | 1099 | 870629 | AL121926 | 7409 | 1-402 |
| HTEHX32 | 1122 | 772643 | AL049742 | 7410 | 1-694 |
| HTETA80 | 1126 | 721831 | AC021473 | 7411 | 1-258 |
| HTEIA80 | 1126 | 721831 | AC016310 | 7412 | 1-257 |
| HTEIA80 | 1126 | 721831 | AC021473 | 7413 | 1-114 |
| HTEIA80 | 1126 | 721831 | AC016310 | 7414 | 1-114 |
| HTEIB14 | 1127 | 963099 | AC016877 | 7415 | 1-369 |
| | | | | | 817-2106 |
| | | | | | 2511-2860 |
| | | | | | 4380-5157 |
| | | | | | 6201-6321 |
| | | | | | 7064-7649 |
| | | | | | 11036-11360 |
| HTEIB14 | 1127 | 963099 | AC016877 | 7416 | 1-139 |
| HTEIF40 | 1128 | 958355 | AL157687 | 7417 | 1-40 |
| | | | | | 249-903 |
| | | | | | 1489-1913 |
| | | | | | 2058-2116 |
| | | | | | 2558-2733 |
| | | | | | 2737-2876 |
| | | | | | 3462-3623 |
| | | | | | 5522-5820 |
| | | | | | 5917-6004 |
| HTEIF40 | 1128 | 958355 | AL161668 | 7418 | 1-40 |
| | | | | | 249-903 |
| | | | | | 1489-1913 |
| | | | | | 2058-2116 |
| | | | | | 2558-2892 |
| | | | | | 3479-3633 |
| | | | | | 5532-5830 |
| | | | | | 5927-6014 |
| HTEIF40 | 1128 | 958355 | AL157687 | 7419 | 1-307 |
| HTETE40 | 1128 | 958355 | AL161668 | 7420 | 1-307 |
| HTEIF68 | 1129 | 573828 | AP001887 | 7421 | 1-311 |
| HTEIF68 | 1129 | 573828 | AP002008 | 7422 | 1-311 |
| HTETE68 | 1129 | 573828 | AP001887 | 7423 | 1-107 |
| HTETF68 | 1129 | 573828 | AP002008 | 7424 | 1-357 |
| HTEIF68 | 1129 | 573828 | AP001887 | 7425 | 1-357 |
| HTELF68 | 1129 | 573828 | AP002008 | 7426 | 1-107 |
| HTEIH70 | 1131 | 573826 | AC020908 | 7427 | 1-85 |
| | | | | | 759-1469 |
| | | | | | 2611-2787 |
| | | | | | 3133-3229 |
| | | | | | 3908-3972 |
| | | | | | 4076-4239 |
| | | | | | 5908-6009 |
| | | | | | 6780-6924 |
| | | | | | 8969-9104 |
| | | | | | 9180-9480 |
| | | | | | 9730-10047 |
| | | | | | 10173-10906 |
| | | | | | 12607-13024 |
| HTETH70 | 1131 | 573826 | AC020908 | 7428 | 1-183 |
| HTEIK11 | 1136 | 967431 | AC018924 | 7429 | 1-215 |
| | | | | | 1942-2409 |
| | | | | | 3011-3645 |
| | | | | | 4383-5366 |
| HTEIK11 | 1136 | 967431 | AC018924 | 7430 | 1-927 |
| HTEIK90 | 1138 | 789121 | AL161442 | 7431 | 1-380 |
| HTEIK90 | 1138 | 789121 | AL161442 | 7432 | 1-185 |
| | | | | | 1241-1480 |
| | | | | | 3780-4356 |
| | | | | | 5514-5666 |
| | | | | | 6203-6495 |
| | | | | | 6752-7126 |
| | | | | | 7461-7946 |
| | | | | | 10053-10148 |
| | | | | | 10892-10967 |
| | | | | | 12645-13553 |
| HTEIK90 | 1138 | 789121 | AL161442 | 7433 | 1-323 |
| HTEIL48 | 1140 | 523681 | AC026861 | 7434 | 1-38 |
| | | | | | 601-692 |
| | | | | | 1658-1810 |
| | | | | | 2194-2275 |
| HTEIO02 | 1145 | 920622 | AC010632 | 7435 | 1-38 |
| | | | | | 1512-1878 |
| | | | | | 2899-2944 |
| | | | | | 3751-4080 |
| HTEIO02 | 1145 | 920622 | AC010632 | 7436 | 1-523 |
| HTEIO02 | 1145 | 920622 | AC010632 | 7437 | 1-394 |
| HTEIO28 | 1147 | 573803 | AC067839 | 7438 | 1-489 |
| HTEIO28 | 1147 | 573803 | AC007898 | 7439 | 1-489 |
| HTEIO28 | 1147 | 573803 | AL359508 | 7440 | 1-346 |
| HTEIP88 | 1148 | 941155 | AC068659 | 7441 | 1-51 |
| | | | | | 583-821 |
| | | | | | 4529-4916 |
| | | | | | 5879-6079 |
| | | | | | 6298-6442 |
| | | | | | 7345-7447 |
| | | | | | 7836-8136 |
| | | | | | 8423-8833 |
| | | | | | 12525-12677 |
| | | | | | 13528-13727 |
| | | | | | 14268-14602 |
| | | | | | 14605-14655 |
| | | | | | 15410-15666 |
| | | | | | 17282-18408 |
| HTEIP88 | 1148 | 941155 | AC012183 | 7442 | 1-51 |
| | | | | | 583-821 |
| | | | | | 4528-4915 |
| | | | | | 5878-6078 |
| | | | | | 6297-6441 |
| | | | | | 7344-7446 |
| | | | | | 7835-8135 |
| | | | | | 8422-8832 |
| | | | | | 12525-12677 |
| | | | | | 13529-13728 |
| | | | | | 14269-14603 |
| | | | | | 14606-14656 |
| | | | | | 15410-15666 |
| | | | | | 17282-18408 |
| HTEIP88 | 1148 | 941155 | AC068659 | 7443 | 1-482 |
| HTEIP88 | 1148 | 941155 | AC012183 | 7444 | 1-482 |
| HTEIP88 | 1148 | 941155 | AC068659 | 7445 | 1-1254 |
| HTEIP88 | 1148 | 941155 | AC012183 | 7446 | 1-1254 |
| HTEIP92 | 1149 | 523892 | AC013252 | 7447 | 1-368 |
| HTEIP92 | 1149 | 523892 | AC013252 | 7448 | 1-952 |
| HTEIP92 | 1149 | 523892 | AC013252 | 7449 | 1-413 |
| HTEIQ74 | 1150 | 765794 | AC055815 | 7450 | 1-681 |
| HTEIQ74 | 1150 | 765794 | AC026801 | 7451 | 1-681 |
| HTEIQ74 | 1150 | 765794 | AC008690 | 7452 | 1-681 |
| HTEIQ74 | 1150 | 765794 | AC055815 | 7453 | 1-435 |
| HTEIQ74 | 1150 | 765794 | AC026801 | 7454 | 1-435 |
| HTEIQ74 | 1150 | 765794 | AC008690 | 7455 | 1-435 |
| HTEIR33 | 1151 | 928058 | AL139130 | 7456 | 1-164 |
| | | | | | 346-423 |
| | | | | | 545-673 |
| | | | | | 1188-1349 |
| | | | | | 3339-3655 |
| | | | | | 4129-4219 |
| | | | | | 6133-6265 |
| | | | | | 8323-8553 |
| HTEIR33 | 1151 | 928058 | AL139130 | 7457 | 1-196 |
| | | | | | 418-529 |
| | | | | | 695-927 |
| | | | | | 1596-1660 |
| | | | | | 1751-1803 |
| | | | | | 2056-2085 |
| | | | | | 2710-2770 |
| | | | | | 3176-4018 |
| | | | | | 5037-5258 |
| HTETU75 | 1153 | 779163 | AL390863 | 7458 | 1-51 |
| | | | | | 469-1032 |
| HTETU75 | 1153 | 779163 | AL136370 | 7459 | 1-51 |
| | | | | | 469-1032 |
| HTEIV86 | 1156 | 784657 | AC021467 | 7460 | 1-44 |
| | | | | | 1339-1503 |
| | | | | | 2150-2290 |
| | | | | | 3993-4708 |
| HTEJV86 | 1156 | 784657 | AC009761 | 7461 | 1-112 |
| | | | | | 759-899 |
| | | | | | 2602-3318 |
| HTEIX28 | 1159 | 836011 | AL356489 | 7462 | 1-445 |
| | | | | | 884-998 |
| | | | | | 1226-3051 |
| HTEIX28 | 1159 | 836011 | AL356489 | 7463 | 1-446 |
| | | | | | 885-999 |
| | | | | | 1227-1523 |
| | | | | | 1744-2100 |
| | | | | | 2129-2588 |
| | | | | | 2592-3047 |
| HTEIX28 | 1159 | 836011 | AL139008 | 7464 | 1-446 |
| | | | | | 885-999 |
| | | | | | 1227-1523 |
| | | | | | 1744-2100 |
| | | | | | 2129-2588 |
| | | | | | 2592-3047 |
| HTEIX28 | 1159 | 836011 | AL356489 | 7465 | 1-220 |
| HTEIX28 | 1159 | 836011 | AL356489 | 7466 | 1-1564 |
| HTEIX28 | 1159 | 836011 | AL356489 | 7467 | 1-671 |
| | | | | | 1240-1821 |
| | | | | | 2574-3013 |
| HTEIX28 | 1159 | 836011 | AL139008 | 7468 | 1-1564 |
| HTEIX28 | 1159 | 836011 | AL139008 | 7469 | 1-671 |
| | | | | | 1240-1821 |
| | | | | | 2574-3013 |
| HTEIX85 | 1160 | 864251 | AL161614 | 7470 | 1-2924 |
| | | | | | 3023-4030 |
| | | | | | 5001-5171 |
| | | | | | 7210-7434 |
| | | | | | 7618-7734 |
| | | | | | 9610-9764 |
| | | | | | 10165-10247 |
| | | | | | 11951-12426 |
| | | | | | 12489-12966 |
| | | | | | 12976-14097 |
| | | | | | 14682-14894 |
| | | | | | 15043-15480 |
| | | | | | 15790-16240 |
| | | | | | 18111-18240 |
| | | | | | 19064-19538 |
| | | | | | 21727-21871 |
| | | | | | 22803-22927 |
| HTEIY52 | 1161 | 963536 | AC067940 | 7471 | 1-358 |
| HTETY52 | 1161 | 963536 | AC067940 | 7472 | 1-304 |
| HTEIY69 | 1162 | 577783 | AC013615 | 7473 | 1-1089 |
| HTEIY69 | 1162 | 577783 | AC019281 | 7474 | 1-1089 |
| HTEIY69 | 1162 | 577783 | AC013615 | 7475 | 1-386 |
| HTEIY69 | 1162 | 577783 | AC019281 | 7476 | 1-386 |
| HTEJB81 | 1167 | 870644 | AC005230 | 7477 | 1-2439 |
| | | | | | 8407-8470 |
| | | | | | 9530-10042 |
| | | | | | 10151-10292 |
| | | | | | 10994-11489 |
| | | | | | 13344-13495 |
| | | | | | 13839-13947 |
| | | | | | 14210-14368 |
| | | | | | 14468-14896 |
| | | | | | 15070-15109 |
| | | | | | 16186-16476 |
| | | | | | 24845-25151 |
| | | | | | 28921-29859 |
| | | | | | 29894-29983 |
| | | | | | 30274-30383 |
| | | | | | 30713-30861 |
| | | | | | 35512-35834 |
| | | | | | 36301-36697 |
| | | | | | 38147-38284 |
| | | | | | 39209-39428 |
| | | | | | 40566-40976 |
| | | | | | 42730-43452 |
| | | | | | 44036-44488 |
| | | | | | 45502-45786 |
| | | | | | 46083-46155 |
| | | | | | 46163-46724 |
| HTEJB81 | 1167 | 870644 | AC005230 | 7478 | 1-395 |
| HTEJB81 | 1167 | 870644 | AC005230 | 7479 | 1-400 |
| HTEJC28 | 1168 | 573774 | AL358214 | 7480 | 1-298 |
| HTEJE15 | 1170 | 908360 | AC016632 | 7481 | 1-220 |
| | | | | | 361-469 |
| | | | | | 1509-2194 |
| HTEJE15 | 1170 | 908360 | AC016639 | 7482 | 1-220 |
| | | | | | 362-470 |
| | | | | | 1510-2195 |
| HTEJE15 | 1170 | 908360 | AC008914 | 7483 | 1-220 |
| | | | | | 361-469 |
| | | | | | 1512-2197 |
| HTEJG24 | 1173 | 526278 | AL139237 | 7484 | 1-430 |
| HTEJG24 | 1173 | 526278 | AC025004 | 7485 | 1-430 |
| HTEJG24 | 1173 | 526278 | AC021540 | 7486 | 1-430 |
| HTEJJ43 | 1174 | 774243 | AC018519 | 7487 | 1-214 |
| | | | | | 309-383 |
| | | | | | 1911-2211 |
| | | | | | 2693-2983 |
| | | | | | 3679-4166 |
| | | | | | 4899-4949 |
| | | | | | 9474-9544 |
| HTEJJ43 | 1174 | 774243 | AC018519 | 7488 | 1-611 |
| HTEJM56 | 1176 | 952255 | AC025036 | 7489 | 1-148 |
| HTEJM56 | 1176 | 952255 | AC027300 | 7490 | 1-158 |
| HTEJM56 | 1176 | 952255 | AC016327 | 7491 | 1-165 |
| HTEJM56 | 1176 | 952255 | AC016327 | 7492 | 1-195 |
| HTEJN49 | 1178 | 558383 | AL354888 | 7493 | 1-250 |
| HTEJN49 | 1178 | 558383 | AC067884 | 7494 | 1-250 |
| HTEJN49 | 1178 | 558383 | AL033527 | 7495 | 1-250 |
| HTEJN49 | 1178 | 558383 | AL354888 | 7496 | 1-391 |
| HTEJN49 | 1178 | 558383 | AC067884 | 7497 | 1-391 |
| HTEJN49 | 1178 | 558383 | AL033527 | 7498 | 1-392 |
| HTEJT37 | 1183 | 530596 | AC011318 | 7499 | 1-170 |
| | | | | | 4244-4812 |
| HTEJT37 | 1183 | 530596 | AC027296 | 7500 | 1-404 |
| HTEJT37 | 1183 | 530596 | AC012340 | 7501 | 1-404 |
| HTEJX78 | 1187 | 806395 | AL136373 | 7502 | 1-131 |
| | | | | | 694-1754 |
| HTEJX78 | 1187 | 806395 | AL357392 | 7503 | 1-112 |
| | | | | | 675-1735 |
| HTEJX78 | 1187 | 806395 | AC013593 | 7504 | 1-131 |
| | | | | | 694-1754 |
| HTEJX78 | 1187 | 806395 | AL357392 | 7505 | 1-3661 |
| | | | | | 5981-6371 |
| | | | | | 6517-7301 |
| | | | | | 8141-8268 |
| | | | | | 9332-9897 |
| | | | | | 11527-11603 |
| | | | | | 11625-11713 |
| | | | | | 13194-13546 |
| | | | | | 14430-14533 |
| | | | | | 16668-16939 |
| HTEJX78 | 1187 | 806395 | AL136373 | 7506 | 1-217 |
| HTEJX78 | 1187 | 806395 | AC013593 | 7507 | 1-3662 |
| | | | | | 5982-6372 |
| | | | | | 6518-7302 |
| | | | | | 8142-8269 |
| | | | | | 9333-9446 |
| | | | | | 9450-9898 |
| | | | | | 11528-11604 |
| | | | | | 11626-11714 |
| | | | | | 13195-13547 |
| | | | | | 14428-14534 |
| | | | | | 16669-16940 |
| | | | | | 18704-20067 |
| | | | | | 20193-20457 |
| | | | | | 20794-22689 |
| HTEKC07 | 1191 | 920925 | AL359708 | 7508 | 1-546 |
| HTEKC07 | 1191 | 920925 | AL139318 | 7509 | 1-546 |
| HTEKD04 | 1193 | 519938 | AC026525 | 7510 | 1-1001 |
| | | | | | 1500-1654 |
| | | | | | 1958-2325 |
| HTEKF35 | 1199 | 573749 | AC016878 | 7511 | 1-152 |
| | | | | | 2683-2792 |
| HTEKF35 | 1199 | 573749 | AC023911 | 7512 | 1-152 |
| | | | | | 2683-2792 |
| HTEKF35 | 1199 | 573749 | AC011272 | 7513 | 1-152 |
| | | | | | 2681-2790 |
| HTEKE35 | 1199 | 573749 | AC023911 | 7514 | 1-218 |
| HTEKF35 | 1199 | 573749 | AC011272 | 7515 | 1-218 |
| HTEKF68 | 1200 | 772997 | AL357117 | 7516 | 1-634 |
| HTEKF68 | 1200 | 772997 | AC023219 | 7517 | 1-634 |
| HTEKI70 | 1202 | 503039 | AC009648 | 7518 | 1-230 |
| | | | | | 1002-1211 |
| | | | | | 1349-1470 |
| | | | | | 2451-2575 |
| | | | | | 2924-3218 |
| | | | | | 3509-3805 |
| HTEKI70 | 1202 | 503039 | AC009648 | 7519 | 1-103 |
| | | | | | 188-274 |
| | | | | | 326-447 |
| | | | | | 2665-2749 |
| | | | | | 3400-4013 |
| HTEKO49 | 1205 | 723148 | AC021527 | 7520 | 1-159 |
| | | | | | 330-389 |
| | | | | | 747-1508 |
| | | | | | 1628-1889 |
| | | | | | 2484-3286 |
| HTEKO49 | 1205 | 723148 | AC006211 | 7521 | 1-159 |
| | | | | | 330-389 |
| | | | | | 747-1508 |
| | | | | | 1628-1889 |
| | | | | | 2484-3286 |
| HTEKO49 | 1205 | 723148 | AC021527 | 7522 | 1-233 |
| HTEKO49 | 1205 | 723148 | AC006211 | 7523 | 1-233 |
| HTEKQ26 | 1206 | 870627 | AC069404 | 7524 | 1-343 |
| HTEKQ85 | 1207 | 784444 | AP000879 | 7525 | 1-39 |
| | | | | | 770-842 |
| | | | | | 2822-3250 |
| | | | | | 3862-4296 |
| HTEKQ85 | 1207 | 784444 | AP000879 | 7526 | 1-355 |
| HTEKS20 | 1210 | 846714 | AL137023 | 7527 | 1-1052 |
| HTEKS20 | 1210 | 846714 | AL137023 | 7528 | 1-868 |
| | | | | | 1143-1650 |
| HTEKS76 | 1212 | 767658 | AC073366 | 7529 | 1-121 |
| | | | | | 756-1172 |
| HTEKS76 | 1212 | 767658 | AC012683 | 7530 | 1-121 |
| | | | | | 756-1172 |
| HTEKS76 | 1212 | 767658 | AC069546 | 7531 | 1-121 |
| | | | | | 756-1172 |
| HTEKX06 | 1213 | 935945 | AC020603 | 7532 | 1-434 |
| HTEKX06 | 1213 | 935945 | AC020603 | 7533 | 1-89 |
| HTEKX08 | 1214 | 959876 | AC064835 | 7534 | 1-2215 |
| HTEKX28 | 1215 | 920927 | AC027120 | 7535 | 1-1730 |
| HTEKX28 | 1215 | 920927 | AC069399 | 7536 | 1-1153 |
| HTEKX28 | 1215 | 920927 | AC023877 | 7537 | 1-1730 |
| HTEKX28 | 1215 | 920927 | AC027120 | 7538 | 1-85 |
| HTEKX28 | 1215 | 920927 | AC023877 | 7539 | 1-85 |
| HTEXZ50 | 1217 | 524054 | AC008552 | 7540 | 1-424 |
| HTEXZ50 | 1217 | 524054 | AC008385 | 7541 | 1-424 |
| HTEKZ50 | 1217 | 524054 | AC008385 | 7542 | 1-435 |
| HTELD47 | 1219 | 934272 | AC017113 | 7543 | 1-883 |
| | | | | | 888-1012 |
| | | | | | 1959-2108 |
| | | | | | 2538-3546 |
| | | | | | 5010-5154 |
| | | | | | 6554-6734 |
| HTELD47 | 1219 | 934272 | AL109804 | 7544 | 1-885 |
| | | | | | 890-1014 |
| | | | | | 1960-2109 |
| | | | | | 2553-3562 |
| | | | | | 5027-5172 |
| | | | | | 6576-6756 |
| HTELD47 | 1219 | 934272 | AC017113 | 7545 | 1-1019 |
| HTELD47 | 1219 | 934272 | AL109804 | 7546 | 1-493 |
| | | | | | 810-1071 |
| | | | | | 1154-2175 |
| HTELG47 | 1223 | 757740 | AC024231 | 7547 | 1-377 |
| | | | | | 458-535 |
| HTELG47 | 1223 | 757740 | AC016891 | 7548 | 1-377 |
| | | | | | 458-535 |
| HTELG47 | 1223 | 757740 | AC024231 | 7549 | 1-533 |
| HTELG47 | 1223 | 757740 | AC016891 | 7550 | 1-533 |
| HTELG57 | 1224 | 870621 | AL356494 | 7551 | 1-2375 |
| | | | | | 2863-3250 |
| | | | | | 3804-3987 |
| HTELG57 | 1224 | 870621 | AL353662 | 7552 | 1-2375 |
| | | | | | 2863-3250 |
| | | | | | 3804-3987 |
| HTELG57 | 1224 | 870621 | AL356494 | 7553 | 1-538 |
| HTELG57 | 1224 | 870621 | AL356494 | 7554 | 1-85 |
| | | | | | 637-1181 |
| HTELG57 | 1224 | 870621 | AL353662 | 7555 | 1-538 |
| HTELG57 | 1224 | 870621 | AL353662 | 7556 | 1-85 |
| | | | | | 637-1181 |
| HTELH44 | 1226 | 766462 | AC006480 | 7557 | 1-266 |
| | | | | | 1371-2150 |
| HTELH44 | 1226 | 766462 | AC006480 | 7558 | 1-369 |
| HTELI03 | 1227 | 923071 | AC068698 | 7559 | 1-587 |
| HTELI03 | 1227 | 923071 | AC005157 | 7560 | 1-587 |
| HTELI03 | 1227 | 923071 | AC068698 | 7561 | 1-276 |
| HTELI03 | 1227 | 923071 | AC068698 | 7562 | 1-527 |
| HTELI03 | 1227 | 923071 | AC005157 | 7563 | 1-527 |
| HTELI03 | 1227 | 923071 | AC005157 | 7564 | 1-273 |
| HTELJ89 | 1229 | 966134 | AL023585 | 7565 | 1-117 |
| | | | | | 211-466 |
| HTELJ89 | 1229 | 966134 | AC024690 | 7566 | 1-123 |
| | | | | | 217-474 |
| HTELJ89 | 1229 | 966134 | AL358783 | 7567 | 1-123 |
| | | | | | 217-474 |
| HTELJ89 | 1229 | 966134 | AL023585 | 7568 | 1-122 |
| | | | | | 217-474 |
| HTELJ89 | 1229 | 966134 | AL022101 | 7569 | 1-123 |
| | | | | | 217-474 |
| HTELK14 | 1230 | 794339 | Z99716 | 7570 | 1-56 |
| | | | | | 2209-2313 |
| | | | | | 3622-3727 |
| | | | | | 3907-4268 |
| | | | | | 5968-6088 |
| | | | | | 6723-7099 |
| HTELK14 | 1230 | 794339 | Z99716 | 7571 | 1-291 |
| HTELK14 | 1230 | 794339 | Z99716 | 7572 | 1-100 |
| | | | | | 161-616 |
| | | | | | 2777-2861 |
| | | | | | 3555-3660 |
| | | | | | 5314-5769 |
| HTELK50 | 1231 | 870552 | AC025953 | 7573 | 1-75 |
| | | | | | 1003-1162 |
| HTELK50 | 1231 | 870552 | AL355516 | 7574 | 1-77 |
| | | | | | 1002-1161 |
| HTELK50 | 1231 | 870552 | AC015873 | 7575 | 1-77 |
| | | | | | 1002-1161 |
| HTELK68 | 1232 | 923055 | AL110504 | 7576 | 1-658 |
| HTELK68 | 1232 | 923055 | AL110504 | 7577 | 1-346 |
| HTELK68 | 1232 | 923055 | AL110504 | 7578 | 1-420 |
| HTELL48 | 1233 | 783824 | AC027195 | 7579 | 1-649 |
| HTELL48 | 1233 | 783824 | AC027195 | 7580 | 1-105 |
| HTELL48 | 1233 | 783824 | AC027195 | 7581 | 1-729 |
| HTELO20 | 1237 | 926910 | AL031597 | 7582 | 1-346 |
| | | | | | 524-615 |
| HTELO73 | 1239 | 761806 | AL078613 | 7583 | 1-96 |
| | | | | | 242-666 |
| HTELO93 | 1240 | 934344 | AC012391 | 7584 | 1-400 |
| HTELO93 | 1240 | 934344 | AC023283 | 7585 | 1-270 |
| HTELO93 | 1240 | 934344 | AC012308 | 7586 | 1-400 |
| HTELO93 | 1240 | 934344 | AC023283 | 7587 | 1-314 |
| | | | | | 1245-1274 |
| HTELO93 | 1240 | 934344 | AC012308 | 7588 | 1-317 |
| HTELO93 | 1240 | 934344 | AC012308 | 7589 | 1-235 |
| HTELQ87 | 1243 | 761768 | AC024958 | 7590 | 1-404 |
| | | | | | 2868-3192 |
| HTELQ87 | 1243 | 761768 | AC018422 | 7591 | 1-404 |
| | | | | | 2868-3192 |
| HTELT72 | 1245 | 761598 | AC011237 | 7592 | 1-633 |
| | | | | | 697-899 |
| | | | | | 1405-1529 |
| | | | | | 1983-2165 |
| | | | | | 2371-2490 |
| | | | | | 4239-4353 |
| | | | | | 6793-6880 |
| | | | | | 6993-8390 |
| | | | | | 8442-8767 |
| | | | | | 9115-9434 |
| HTELT72 | 1245 | 761598 | AF214633 | 7593 | 1-633 |
| | | | | | 697-899 |
| | | | | | 1405-1529 |
| | | | | | 1983-2165 |
| | | | | | 2371-2490 |
| | | | | | 4239-4353 |
| | | | | | 6793-6880 |
| | | | | | 6993-8387 |
| | | | | | 8439-8764 |
| | | | | | 9112-9431 |
| HTELT72 | 1245 | 761598 | AC011237 | 7594 | 1-2683 |
| | | | | | 2788-2900 |
| | | | | | 3022-3162 |
| | | | | | 3429-3503 |
| | | | | | 3651-3777 |
| | | | | | 4664-5070 |
| | | | | | 5348-5888 |
| | | | | | 6053-6296 |
| | | | | | 6742-6875 |
| | | | | | 7101-7249 |
| | | | | | 7462-8011 |
| | | | | | 8400-9118 |
| | | | | | 9860-10566 |
| | | | | | 10670-11294 |
| HTELT72 | 1245 | 761598 | AF214633 | 7595 | 1-2685 |
| | | | | | 2790-2902 |
| | | | | | 3024-3164 |
| | | | | | 3431-3505 |
| | | | | | 3653-3779 |
| | | | | | 4666-5072 |
| | | | | | 5351-5891 |
| | | | | | 6056-6299 |
| | | | | | 6745-6878 |
| | | | | | 7104-7252 |
| | | | | | 7465-8014 |
| | | | | | 8403-9121 |
| | | | | | 9863-10569 |
| | | | | | 10673-11487 |
| | | | | | 12212-12665 |
| | | | | | 12994-13576 |
| | | | | | 14033-14265 |
| | | | | | 14998-15123 |
| HTELT72 | 1245 | 761598 | AC011237 | 7596 | 1-367 |
| HTELT72 | 1245 | 761598 | AF214633 | 7597 | 1-367 |
| HTELU01 | 1247 | 915339 | AL033517 | 7598 | 1-375 |
| HTELV10 | 1249 | 963576 | AC010339 | 7599 | 1-256 |
| HTELV10 | 1249 | 963576 | AC008674 | 7600 | 1-256 |
| HTELV10 | 1249 | 963576 | AC008674 | 7601 | 1-95 |
| HTELW29 | 1253 | 952241 | AC009131 | 7602 | 1-780 |
| HTELW29 | 1253 | 952241 | AC009131 | 7603 | 1-246 |
| HTELW29 | 1253 | 952241 | AC009131 | 7604 | 1-270 |
| HTELX52 | 1255 | 963506 | AL390858 | 7605 | 1-70 |
| | | | | | 733-1332 |
| HTELX52 | 1255 | 963506 | AC026025 | 7606 | 1-70 |
| | | | | | 733-1332 |
| HTELX52 | 1255 | 963506 | AL390858 | 7607 | 1-457 |
| HTELX52 | 1255 | 963506 | AC026025 | 7608 | 1-457 |
| HTELX72 | 1256 | 761599 | AC009682 | 7609 | 1-263 |
| HTELX72 | 1256 | 761599 | AL358940 | 7610 | 1-263 |
| HTELY64 | 1257 | 764834 | AL356056 | 7611 | 1-445 |
| HTELY64 | 1257 | 764834 | AL136982 | 7612 | 1-445 |
| HTELY64 | 1257 | 764834 | AL356056 | 7613 | 1-328 |
| HTELY64 | 1257 | 764834 | AL356056 | 7614 | 1-371 |
| HTELY64 | 1257 | 764834 | AL136982 | 7615 | 1-78 |
| | | | | | 179-861 |
| HTELY64 | 1257 | 764834 | AL136982 | 7616 | 1-371 |
| HTEMA54 | 1260 | 911666 | AL359692 | 7617 | 1-1487 |
| HTEMB26 | 1261 | 827055 | AC004900 | 7618 | 1-112 |
| HTEMB26 | 1261 | 827055 | AC004900 | 7619 | 1-2372 |
| | | | | | 2882-2974 |
| | | | | | 3048-3578 |
| | | | | | 4547-4806 |
| | | | | | 5624-6285 |
| | | | | | 7400-7547 |
| | | | | | 10800-11164 |
| | | | | | 11907-12010 |
| | | | | | 16372-16542 |
| | | | | | 17325-17552 |
| | | | | | 19368-19662 |
| | | | | | 22876-23302 |
| | | | | | 28256-28683 |
| | | | | | 31524-31990 |
| | | | | | 35872-36237 |
| | | | | | 36287-36728 |
| | | | | | 37997-38535 |
| | | | | | 38707-38829 |
| | | | | | 39160-39466 |
| | | | | | 40178-40339 |
| | | | | | 40353-40480 |
| | | | | | 40782-41520 |
| | | | | | 42009-42538 |
| HTEMB26 | 1261 | 827055 | AC004900 | 7620 | 1-1968 |
| HTEMB34 | 1263 | 870589 | AL354940 | 7621 | 1-649 |
| HTEMB34 | 1263 | 870589 | AL157708 | 7622 | 1-649 |
| HTEMB34 | 1263 | 870589 | AL359554 | 7623 | 1-649 |
| HTEMB83 | 1265 | 775593 | AL050341 | 7624 | 1-294 |
| | | | | | 621-1371 |
| | | | | | 3345-3753 |
| HTEMC75 | 1267 | 848193 | AC074117 | 7625 | 1-93 |
| | | | | | 317-475 |
| | | | | | 850-1162 |
| | | | | | 1511-2098 |
| | | | | | 2194-4316 |
| | | | | | 4373-4717 |
| | | | | | 4836-5053 |
| | | | | | 5192-5313 |
| | | | | | 5403-5497 |
| | | | | | 5798-6033 |
| | | | | | 6121-6210 |
| | | | | | 6370-6841 |
| | | | | | 7244-7310 |
| | | | | | 7582-7935 |
| | | | | | 8489-8606 |
| | | | | | 9212-9266 |
| HTEMC75 | 1267 | 848193 | AC074117 | 7626 | 1-70 |
| | | | | | 485-599 |
| | | | | | 880-966 |
| | | | | | 1279-1414 |
| | | | | | 2072-2489 |
| | | | | | 3066-3209 |
| | | | | | 3281-4159 |
| | | | | | 4400-4694 |
| | | | | | 4931-6271 |
| HTEMD10 | 1268 | 963546 | AC005858 | 7627 | 1-655 |
| HTEMJ34 | 1271 | 786377 | AC021491 | 7628 | 1-124 |
| | | | | | 290-781 |
| | | | | | 1447-1562 |
| | | | | | 1650-1767 |
| | | | | | 2309-2417 |
| | | | | | 3273-3466 |
| | | | | | 3935-4120 |
| | | | | | 5213-5358 |
| | | | | | 6216-6605 |
| | | | | | 7621-7744 |
| | | | | | 8491-8761 |
| | | | | | 9044-9175 |
| | | | | | 9353-9523 |
| | | | | | 9966-10843 |
| | | | | | 11395-11839 |
| HTEMJ34 | 1271 | 786377 | AC021491 | 7629 | 1-228 |
| | | | | | 3662-4225 |
| HTEMJ54 | 1272 | 963531 | AC026334 | 7630 | 1-1272 |
| | | | | | 1874-2420 |
| | | | | | 4782-5167 |
| | | | | | 5373-5502 |
| | | | | | 5508-5671 |
| | | | | | 5752-6010 |
| | | | | | 6478-6836 |
| | | | | | 7094-7292 |
| | | | | | 7526-8820 |
| | | | | | 9237-9731 |
| HTEMJ54 | 1272 | 963531 | AC060226 | 7631 | 1-1272 |
| HTEMJ54 | 1272 | 963531 | AC060226 | 7632 | 1-547 |
| HTEMJ54 | 1272 | 963531 | AC026334 | 7633 | 1-424 |
| HTEMJ54 | 1272 | 963531 | AC060226 | 7634 | 1-424 |
| HTEMN08 | 1275 | 958374 | AP001016 | 7635 | 1-248 |
| HTEMN08 | 1275 | 958374 | AC011077 | 7636 | 1-248 |
| HTEMN08 | 1275 | 958374 | AP002381 | 7637 | 1-248 |
| HTEMN08 | 1275 | 958374 | AC011077 | 7638 | 1-339 |
| HTEMN08 | 1275 | 958374 | AP001016 | 7639 | 1-339 |
| HTEMN08 | 1275 | 958374 | AP002381 | 7640 | 1-339 |
| HTEMN95 | 1276 | 789113 | AC005540 | 7641 | 1-157 |
| | | | | | 1565-1735 |
| HTEMP48 | 1279 | 767863 | AL121747 | 7642 | 1-181 |
| | | | | | 315-683 |
| | | | | | 1416-1776 |
| | | | | | 1804-2673 |
| | | | | | 2940-3611 |
| | | | | | 3880-4030 |
| | | | | | 4596-4924 |
| | | | | | 5925-6032 |
| | | | | | 6514-6965 |
| | | | | | 7032-7135 |
| | | | | | 7196-7771 |
| | | | | | 8229-8385 |
| | | | | | 9347-9435 |
| | | | | | 11732-13123 |
| HTEMP48 | 1279 | 767863 | AL049761 | 7643 | 1-573 |
| | | | | | 2229-2431 |
| | | | | | 2486-2797 |
| | | | | | 3011-3299 |
| | | | | | 3434-3924 |
| | | | | | 4487-4614 |
| | | | | | 5864-6151 |
| | | | | | 6385-6768 |
| | | | | | 6786-7099 |
| | | | | | 7437-7594 |
| | | | | | 7761-8029 |
| | | | | | 8318-9645 |
| | | | | | 9767-10324 |
| | | | | | 10882-10944 |
| | | | | | 11032-11505 |
| | | | | | 12853-13033 |
| | | | | | 13167-13535 |
| | | | | | 14268-14627 |
| | | | | | 14656-15525 |
| | | | | | 15792-16463 |
| | | | | | 16731-16911 |
| | | | | | 17448-17776 |
| | | | | | 18777-18886 |
| | | | | | 19366-19817 |
| | | | | | 19884-19987 |
| | | | | | 20048-20606 |
| | | | | | 21085-21248 |
| | | | | | 22199-22289 |
| | | | | | 24584-25975 |
| HTEMP48 | 1279 | 767863 | AL121747 | 7644 | 1-1738 |
| HTEMP48 | 1279 | 767863 | AL049761 | 7645 | 1-1738 |
| HTEMP48 | 1279 | 767863 | AL049761 | 7646 | 1-267 |
| HTEMP49 | 1280 | 932319 | AC005848 | 7647 | 1-50 |
| | | | | | 276-606 |
| | | | | | 3099-3179 |
| | | | | | 3390-3458 |
| | | | | | 4162-4388 |
| HTEMR65 | 1281 | 909280 | AC010547 | 7648 | 1-1542 |
| HTEMU17 | 1286 | 789623 | AL159141 | 7649 | 1-210 |
| | | | | | 345-515 |
| | | | | | 4335-4446 |
| | | | | | 9330-9443 |
| | | | | | 9841-9904 |
| | | | | | 11140-12334 |
| | | | | | 12776-13144 |
| | | | | | 13501-13916 |
| | | | | | 17369-18981 |
| HTEMU17 | 1286 | 789623 | AL118559 | 7650 | 1-369 |
| HTEMU17 | 1286 | 789623 | AL159141 | 7651 | 1-318 |
| HTEMU17 | 1286 | 789623 | AL118559 | 7652 | 1-416 |
| HTEMU17 | 1286 | 789623 | AL118559 | 7653 | 1-231 |
| HTEMZ04 | 1290 | 927021 | AC068707 | 7654 | 1-102 |
| | | | | | 574-851 |
| HTEMZ04 | 1290 | 927021 | AC068707 | 7655 | 1-202 |
| HTENB03 | 1292 | 923050 | AL157814 | 7656 | 1-490 |
| HTENB03 | 1292 | 923050 | AL157814 | 7657 | 1-30 |
| | | | | | 1784-1887 |
| | | | | | 2320-2867 |
| HTENB03 | 1292 | 923050 | AL157814 | 7658 | 1-550 |
| HTENC22 | 1293 | 775544 | AC069539 | 7659 | 1-890 |
| | | | | | 999-1314 |
| | | | | | 1794-4625 |
| HTENC22 | 1293 | 775544 | AC069539 | 7660 | 1-416 |
| HTENC22 | 1293 | 775544 | AC069539 | 7661 | 1-129 |
| HTENF08 | 1294 | 958378 | AC018682 | 7662 | 1-752 |
| HTENF08 | 1294 | 958378 | AC018682 | 7663 | 1-252 |
| HTENI58 | 1299 | 917213 | AL121980 | 7664 | 1-716 |
| HTENI58 | 1299 | 917213 | AL121980 | 7665 | 1-179 |
| | | | | | 373-573 |
| HTENK69 | 1303 | 844557 | AC063919 | 7666 | 1-696 |
| | | | | | 1146-1317 |
| | | | | | 1506-1768 |
| HTENK69 | 1303 | 844557 | AC073439 | 7667 | 1-696 |
| | | | | | 1146-1317 |
| | | | | | 1506-1768 |
| HTENO50 | 1305 | 969213 | AC009874 | 7668 | 1-315 |
| | | | | | 1284-1411 |
| | | | | | 1668-1749 |
| | | | | | 3993-4056 |
| | | | | | 4183-4346 |
| | | | | | 5547-6161 |
| | | | | | 6198-6612 |
| | | | | | 6660-6806 |
| | | | | | 7328-7394 |
| | | | | | 7459-7881 |
| | | | | | 8005-8503 |
| | | | | | 8700-8977 |
| | | | | | 9207-9362 |
| | | | | | 10056-10514 |
| | | | | | 12312-12436 |
| HTENO50 | 1305 | 969213 | AC009874 | 7669 | 1-1809 |
| | | | | | 1985-2077 |
| | | | | | 2851-7606 |
| HTENP80 | 1307 | 775387 | AL035453 | 7670 | 1-408 |
| | | | | | 4407-4511 |
| HTENP80 | 1307 | 775387 | AL035453 | 7671 | 1-342 |
| HTENQ05 | 1308 | 928244 | AC024952 | 7672 | 1-126 |
| | | | | | 1960-2212 |
| | | | | | 2845-2947 |
| | | | | | 6326-6450 |
| | | | | | 9966-10000 |
| | | | | | 12088-12311 |
| | | | | | 13031-13145 |
| | | | | | 13786-13869 |
| | | | | | 14356-14874 |
| HTENQ05 | 1308 | 928244 | AC018638 | 7673 | 1-123 |
| | | | | | 666-828 |
| | | | | | 4839-5113 |
| | | | | | 6402-6995 |
| | | | | | 7727-7910 |
| | | | | | 9744-9996 |
| | | | | | 10630-10732 |
| | | | | | 14112-14236 |
| | | | | | 17737-17771 |
| | | | | | 19858-20081 |
| | | | | | 20801-20915 |
| | | | | | 21556-21640 |
| | | | | | 22127-22645 |
| HTENQ05 | 1308 | 928244 | AC024952 | 7674 | 1-368 |
| HTENQ05 | 1308 | 928244 | AC018638 | 7675 | 1-368 |
| HTENQ05 | 1308 | 928244 | AC018638 | 7676 | 1-374 |
| HTENS22 | 1312 | 785996 | AP001034 | 7677 | 1-964 |
| | | | | | 1560-2151 |
| HTENS22 | 1312 | 785996 | AC015840 | 7678 | 1-965 |
| | | | | | 1070-1278 |
| | | | | | 1561-2152 |
| HTENS22 | 1312 | 785996 | AC015840 | 7679 | 1-422 |
| HTENS43 | 1313 | 784936 | AC011959 | 7680 | 1-189 |
| | | | | | 439-1562 |
| HTENS43 | 1313 | 784936 | AF131216 | 7681 | 1-188 |
| | | | | | 440-1562 |
| HTENS91 | 1314 | 870515 | AC016771 | 7682 | 1-688 |
| HTENS91 | 1314 | 870515 | AC048382 | 7683 | 1-1000 |
| HTENS91 | 1314 | 870515 | AC016771 | 7684 | 1-53 |
| | | | | | 468-636 |
| | | | | | 1619-1744 |
| | | | | | 2423-2651 |
| | | | | | 2790-3043 |
| | | | | | 4364-4636 |
| | | | | | 7345-7727 |
| HTENS91 | 1314 | 870515 | AC048382 | 7685 | 1-255 |
| HTENX77 | 1317 | 771409 | AP000484 | 7686 | 1-1719 |
| HTENX77 | 1317 | 771409 | AP000484 | 7687 | 1-255 |
| HTENX77 | 1317 | 771409 | AP000484 | 7688 | 1-103 |
| | | | | | 2060-2420 |
| | | | | | 4856-5151 |
| HTENY35 | 1319 | 884043 | AC006208 | 7689 | 1-1385 |
| | | | | | 1465-3044 |
| | | | | | 3323-3377 |
| | | | | | 3821-3917 |
| | | | | | 4057-4165 |
| | | | | | 4748-4778 |
| | | | | | 4805-5177 |
| | | | | | 5224-5464 |
| | | | | | 5956-6173 |
| | | | | | 6207-7085 |
| | | | | | 8138-8296 |
| | | | | | 8758-9056 |
| | | | | | 9162-9263 |
| | | | | | 9638-9764 |
| | | | | | 10225-10392 |
| | | | | | 10853-11247 |
| | | | | | 11548-12281 |
| | | | | | 12417-12970 |
| HTENY35 | 1319 | 884043 | AC006208 | 7690 | 1-1425 |
| | | | | | 1603-1678 |
| | | | | | 1783-1875 |
| | | | | | 2028-3154 |
| | | | | | 3258-3740 |
| | | | | | 3768-4488 |
| | | | | | 4764-4913 |
| | | | | | 5252-5382 |
| | | | | | 5827-5905 |
| | | | | | 6172-6319 |
| | | | | | 6397-6466 |
| | | | | | 6957-7076 |
| | | | | | 7473-7606 |
| | | | | | 8554-8608 |
| | | | | | 8714-8741 |
| | | | | | 8840-8984 |
| HTEOF91 | 1329 | 918571 | AL133387 | 7691 | 1-1187 |
| HTEOF91 | 1329 | 918571 | AL135794 | 7692 | 1-1189 |
| HTEOF91 | 1329 | 918571 | AL133387 | 7693 | 1-47 |
| | | | | | 231-264 |
| | | | | | 355-857 |
| HTEOF91 | 1329 | 918571 | AL135794 | 7694 | 1-146 |
| HTEOF91 | 1329 | 918571 | AL133387 | 7695 | 1-140 |
| HTEOF91 | 1329 | 918571 | AL135794 | 7696 | 1-47 |
| | | | | | 231-264 |
| | | | | | 355-857 |
| HTEOK02 | 1332 | 918590 | AL136084 | 7697 | 1-486 |
| HTEOK02 | 1332 | 918590 | AL136084 | 7698 | 1-181 |
| | | | | | 2911-3377 |
| HTEON67 | 1334 | 954114 | AC004533 | 7699 | 1-347 |
| HTEOU45 | 1335 | 915138 | AC016309 | 7700 | 1-708 |
| HTEOU45 | 1335 | 915138 | AC016309 | 7701 | 1-1634 |
| HTEOV90 | 1336 | 870532 | AL359092 | 7702 | 1-116 |
| HTEOV90 | 1336 | 870532 | AC009453 | 7703 | 1-143 |
| HTEOV90 | 1336 | 870532 | AC025036 | 7704 | 1-148 |
| HTEOV90 | 1336 | 870532 | AC011953 | 7705 | 1-126 |
| HTEOV90 | 1336 | 870532 | AC027300 | 7706 | 1-158 |
| HTEOV90 | 1336 | 870532 | AC022231 | 7707 | 1-151 |
| HTEOV90 | 1336 | 870532 | AC023242 | 7708 | 1-86 |
| HTEOV90 | 1336 | 870532 | AC048342 | 7709 | 1-130 |
| HTEOV90 | 1336 | 870532 | AL121656 | 7710 | 1-2346 |
| | | | | | 2487-3703 |
| | | | | | 3832-4167 |
| HTEOV90 | 1336 | 870532 | AC048342 | 7711 | 1-118 |
| HTEOW39 | 1338 | 870566 | AL356464 | 7712 | 1-142 |
| | | | | | 570-728 |
| | | | | | 1523-1638 |
| | | | | | 1741-1926 |
| HTEOW39 | 1338 | 870566 | AL356797 | 7713 | 1-142 |
| | | | | | 570-728 |
| | | | | | 1523-1638 |
| | | | | | 1741-1926 |
| HTEOW39 | 1338 | 870566 | Z98304 | 7714 | 1-142 |
| | | | | | 570-728 |
| | | | | | 1523-1638 |
| | | | | | 1742-1926 |
| HTE0W39 | 1338 | 870566 | AL356464 | 7715 | 1-538 |
| HTEOW39 | 1338 | 870566 | AL356464 | 7716 | 1-437 |
| HTEOW39 | 1338 | 870566 | AL356797 | 7717 | 1-136 |
| HTEOW39 | 1338 | 870566 | AL356797 | 7718 | 1-437 |
| HTEOW39 | 1338 | 870566 | Z98304 | 7719 | 1-538 |
| HTEOW39 | 1338 | 870566 | Z98304 | 7720 | 1-437 |
| HTEPA08 | 1340 | 958391 | AL133480 | 7721 | 1-918 |
| | | | | | 1739-2284 |
| | | | | | 2588-2821 |
| HTEPA08 | 1340 | 958391 | AC021645 | 7722 | 1-918 |
| | | | | | 1739-2284 |
| | | | | | 2588-2821 |
| HTEPA08 | 1340 | 958391 | AL133480 | 7723 | 1-640 |
| HTEPA08 | 1340 | 958391 | AL133480 | 7724 | 1-331 |
| HTEPA08 | 1340 | 958391 | AC021645 | 7725 | 1-331 |
| HTEPA08 | 1340 | 958391 | AC021645 | 7726 | 1-640 |
| HTEPC76 | 1344 | 767824 | AC008403 | 7727 | 1-270 |
| | | | | | 797-964 |
| | | | | | 1044-1123 |
| | | | | | 1229-1342 |
| | | | | | 1467-1845 |
| | | | | | 2640-2987 |
| | | | | | 3113-4431 |
| | | | | | 4439-4555 |
| | | | | | 5060-5233 |
| | | | | | 5373-5488 |
| | | | | | 6011-6410 |
| | | | | | 6946-7068 |
| | | | | | 7284-7513 |
| | | | | | 8720-8791 |
| | | | | | 8874-9044 |
| | | | | | 9864-10381 |
| | | | | | 10706-10846 |
| | | | | | 12118-12821 |
| | | | | | 12983-13117 |
| | | | | | 13377-14044 |
| | | | | | 14066-15218 |
| | | | | | 16961-17324 |
| HTEPC76 | 1344 | 767824 | AC008403 | 7728 | 1-1468 |
| HTEPC76 | 1344 | 767824 | AC008403 | 7729 | 1-583 |
| HTEPJ79 | 1352 | 774212 | AC073569 | 7730 | 1-370 |
| HTEPJ79 | 1352 | 774212 | AC073595 | 7731 | 1-371 |
| HTEPJ79 | 1352 | 774212 | AC007949 | 7732 | 1-371 |
| HTEPM33 | 1354 | 870561 | AL132776 | 7733 | 1-42 |
| | | | | | 1020-1195 |
| | | | | | 2173-2338 |
| | | | | | 6839-7029 |
| | | | | | 11880-12103 |
| HTEPM33 | 1354 | 870561 | AL132776 | 7734 | 1-173 |
| HTEPM33 | 1354 | 870561 | AL132776 | 7735 | 1-791 |
| HTEPM52 | 1355 | 806471 | AC022744 | 7736 | 1-600 |
| HTEPM52 | 1355 | 806471 | AC009588 | 7737 | 1-600 |
| HTEPM52 | 1355 | 806471 | AC022744 | 7738 | 1-197 |
| HTEPM52 | 1355 | 806471 | AC009588 | 7739 | 1-86 |
| | | | | | 404-641 |
| | | | | | 1062-1413 |
| | | | | | 1506-1869 |
| | | | | | 2725-3045 |
| | | | | | 3625-4106 |
| HTEPP29 | 1358 | 917207 | AC064831 | 7740 | 1-467 |
| HTEPP29 | 1358 | 917207 | AC023103 | 7741 | 1-470 |
| HTEPP29 | 1358 | 917207 | AC036199 | 7742 | 1-470 |
| HTEPT25 | 1363 | 870509 | AC074256 | 7743 | 1-408 |
| HTEPZ10 | 1368 | 963433 | AC011028 | 7744 | 1-543 |
| HTEQB03 | 1370 | 922941 | AC023331 | 7745 | 1-393 |
| HTEQB03 | 1370 | 922941 | AL358236 | 7746 | 1-391 |
| HTEQB03 | 1370 | 922941 | AL359374 | 7747 | 1-391 |
| HTEQB03 | 1370 | 922941 | AL358236 | 7748 | 1-220 |
| HTEQB03 | 1370 | 922941 | AC023331 | 7749 | 1-292 |
| HTEQB03 | 1370 | 922941 | AL359374 | 7750 | 1-116 |
| | | | | | 130-210 |
| HTEQB03 | 1370 | 922941 | AL359374 | 7751 | 1-290 |
| HTEQD40 | 1371 | 915198 | AL121906 | 7752 | 1-158 |
| | | | | | 414-924 |
| | | | | | 975-1601 |
| HTEQD40 | 1371 | 915198 | AL121906 7753 | 1-776 | |
| | | | | | 856-949 |
| | | | | | 1390-1468 |
| | | | | | 1591-2048 |
| | | | | | 2412-2463 |
| | | | | | 2503-2918 |
| | | | | | 3174-3270 |
| HTEQD40 | 1371 | 915198 | AL121906 | 7754 | 1-411 |
| HTEQD69 | 1372 | 918579 | AL157399 | 7755 | 1-712 |
| HTEQD69 | 1372 | 918579 | AC018476 | 7756 | 1-712 |
| HTEQD69 | 1372 | 918579 | AC007949 | 7757 | 1-711 |
| HTEQD69 | 1372 | 918579 | AC018476 | 7758 | 1-922 |
| | | | | | 1159-1246 |
| | | | | | 1288-1481 |
| | | | | | 1547-1649 |
| | | | | | 1673-1758 |
| | | | | | 2026-2482 |
| | | | | | 2668-3297 |
| HTEQD69 | 1372 | 918579 | AC018476 | 7759 | 1-145 |
| | | | | | 541-677 |
| | | | | | 1557-1852 |
| HTEQD69 | 1372 | 918579 | AC007949 | 7760 | 1-145 |
| | | | | | 541-677 |
| | | | | | 1555-1850 |
| HTEQD69 | 1372 | 918579 | AC007949 | 7761 | 1-314 |
| HTEQJ42 | 1377 | 806495 | AC007405 | 7762 | 1-510 |
| HTEQO81 | 1378 | 806504 | AC010766 | 7763 | 1-198 |
| | | | | | 316-378 |
| | | | | | 3441-3601 |
| HTEQO81 | 1378 | 806504 | AL163636 | 7764 | 1-198 |
| | | | | | 316-378 |
| | | | | | 3442-3602 |
| HTEQO81 | 1378 | 806504 | AL163195 | 7765 | 1-198 |
| | | | | | 316-378 |
| | | | | | 3442-3602 |
| HTEQO81 | 1378 | 806504 | AC010766 | 7766 | 1-301 |
| HTEQO81 | 1378 | 806504 | AC010766 | 7767 | 1-591 |
| HTEQO81 | 1378 | 806504 | AL163636 | 7768 | 1-591 |
| HTEQO81 | 1378 | 806504 | AL163636 | 7769 | 1-177 |
| HTEQO81 | 1378 | 806504 | AL163195 | 7770 | 1-293 |
| HTEQO81 | 1378 | 806504 | AL163195 | 7771 | 1-591 |
| HTEQR94 | 1382 | 966486 | AC010980 | 7772 | 1-1047 |
| HTEQT63 | 1383 | 924799 | AC026410 | 7773 | 1-1820 |
| HTLAB44 | 1385 | 530579 | AC006549 | 7774 | 1-530 |
| HTLAB44 | 1385 | 530579 | AC000097 | 7775 | 1-530 |
| HTLAB44 | 1385 | 530579 | AC006547 | 7776 | 1-530 |
| HTLAB44 | 1385 | 530579 | AC006549 | 7777 | 1-42 |
| | | | | | 147-212 |
| | | | | | 380-436 |
| | | | | | 699-747 |
| | | | | | 821-1197 |
| HTLAB44 | 1385 | 530579 | AC006549 | 7778 | 1-311 |
| HTLAB44 | 1385 | 530579 | AC000097 | 7779 | 1-42 |
| | | | | | 147-212 |
| | | | | | 380-436 |
| | | | | | 699-747 |
| | | | | | 821-1197 |
| HTLAB44 | 1385 | 530579 | AC000097 | 7780 | 1-311 |
| HTLAB44 | 1385 | 530579 | AC006547 | 7781 | 1-42 |
| | | | | | 147-212 |
| | | | | | 380-436 |
| | | | | | 699-747 |
| | | | | | 821-1197 |
| HTLAB44 | 1385 | 530579 | AC006547 | 7782 | 1-314 |
| HTLAB73 | 1386 | 575019 | AC000078 | 7783 | 1-341 |
| | | | | | 2484-3046 |
| | | | | | 3397-3489 |
| | | | | | 4877-5165 |
| | | | | | 5231-5303 |
| | | | | | 5477-5578 |
| | | | | | 6429-7030 |
| | | | | | 7187-7509 |
| | | | | | 7842-8148 |
| HTLAB73 | 1386 | 575019 | AC000078 | 7784 | 1-507 |
| HTLAC81 | 1387 | 679414 | AC019258 | 7785 | 1-200 |
| HTLAC81 | 1387 | 679414 | AP002807 | 7786 | 1-204 |
| HTLAC81 | 1387 | 679414 | AC034259 | 7787 | 1-204 |
| HTLAD21 | 1389 | 761758 | AC024029 | 7788 | 1-37 |
| | | | | | 1140-1255 |
| | | | | | 2004-2115 |
| | | | | | 2586-2801 |
| | | | | | 3347-3460 |
| | | | | | 4242-4320 |
| | | | | | 4959-5284 |
| HTLAD21 | 1389 | 761758 | AC019121 | 7789 | 1-37 |
| | | | | | 1140-1249 |
| | | | | | 2584-2799 |
| | | | | | 3342-3460 |
| | | | | | 4243-4321 |
| | | | | | 4956-5281 |
| HTLAD21 | 1389 | 761758 | AC019121 | 7790 | 1-336 |
| HTLAD21 | 1389 | 761758 | AC024029 | 7791 | 1-336 |
| HTLAV67 | 1392 | 530742 | AC005258 | 7792 | 1-326 |
| HTLAV67 | 1392 | 530742 | AC005258 | 7793 | 1-278 |
| HTLAV67 | 1392 | 530742 | AC005258 | 7794 | 1-89 |
| HTLBE55 | 1394 | 967408 | AC010325 | 7795 | 1-78 |
| | | | | | 167-227 |
| | | | | | 346-440 |
| HTLBF14 | 1396 | 971661 | AC018638 | 7796 | 1-252 |
| | | | | | 3348-3556 |
| | | | | | 3720-3822 |
| | | | | | 3877-4004 |
| | | | | | 4927-5181 |
| | | | | | 5226-5736 |
| HTLBF14 | 1396 | 971661 | AC018638 | 7797 | 1-130 |
| HTLBG83 | 1397 | 527942 | AP002840 | 7798 | 1-102 |
| | | | | | 1010-1888 |
| | | | | | 2064-2785 |
| HTLBG83 | 1397 | 527942 | AC016056 | 7799 | 1-290 |
| HTLBG83 | 1397 | 527942 | AC009466 | 7800 | 1-94 |
| | | | | | 1419-1520 |
| | | | | | 2428-3306 |
| | | | | | 3482-4203 |
| HTLBG83 | 1397 | 527942 | AP000880 | 7801 | 1-94 |
| | | | | | 1419-1520 |
| | | | | | 2428-3306 |
| | | | | | 3482-4203 |
| HTLBG83 | 1397 | 527942 | AC009466 | 7802 | 1-998 |
| HTLBG83 | 1397 | 527942 | AP002840 | 7803 | 1-368 |
| HTLBG83 | 1397 | 527942 | AP000880 | 7804 | 1-368 |
| HTLBG83 | 1397 | 527942 | AC009466 | 7805 | 1-368 |
| HTLBG83 | 1397 | 527942 | AP000880 | 7806 | 1-996 |
| HTLCA95 | 1398 | 911655 | AC012616 | 7807 | 1-1151 |
| HTLCA95 | 1398 | 911655 | AC012616 | 7808 | 1-284 |
| HTLCX76 | 1400 | 767667 | AC011736 | 7809 | 1-97 |
| | | | | | 612-718 |
| | | | | | 913-1065 |
| | | | | | 5655-5767 |
| | | | | | 6173-6351 |
| | | | | | 6803-6954 |
| | | | | | 9565-9706 |
| | | | | | 13178-13360 |
| | | | | | 13963-14058 |
| | | | | | 17351-17653 |
| | | | | | 19337-19476 |
| | | | | | 22288-22405 |
| | | | | | 22711-22769 |
| | | | | | 24564-24601 |
| | | | | | 25844-25947 |
| | | | | | 26983-27370 |
| | | | | | 28050-28233 |
| | | | | | 29000-29163 |
| HTLCX76 | 1400 | 767667 | AC027618 | 7810 | 1-97 |
| | | | | | 612-718 |
| | | | | | 913-1065 |
| | | | | | 5657-5768 |
| | | | | | 6174-6352 |
| | | | | | 6807-6958 |
| | | | | | 9568-9709 |
| | | | | | 13178-13216 |
| HTLCX76 | 1400 | 767667 | AC027618 | 7811 | 1-89 |
| HTLCX76 | 1400 | 767667 | AC011736 | 7812 | 1-152 |
| HTLCX76 | 1400 | 767667 | AC027618 | 7813 | 1-40 |
| | | | | | 3350-3648 |
| | | | | | 7546-7581 |
| HTLCY27 | 1401 | 682208 | AC021663 | 7814 | 1-1164 |
| HTLCZ48 | 1403 | 572959 | AC015497 | 7815 | 1-402 |
| HTLCZ48 | 1403 | 572959 | AL353695 | 7816 | 1-405 |
| HTLCZ48 | 1403 | 572959 | AC015497 | 7817 | 1-140 |
| HTLCZ48 | 1403 | 572959 | AL353695 | 7818 | 1-140 |
| HTLCZ96 | 1404 | 815897 | AL118498 | 7819 | 1-160 |
| | | | | | 1685-1871 |
| | | | | | 2742-2910 |
| | | | | | 5414-5599 |
| | | | | | 6883-6914 |
| | | | | | 8226-8271 |
| | | | | | 9277-9733 |
| | | | | | 11311-11543 |
| HTLDE64 | 1407 | 908613 | AC005087 | 7820 | 1-207 |
| | | | | | 524-773 |
| | | | | | 945-1056 |
| | | | | | 3251-3659 |
| HTLDE64 | 1407 | 908613 | AC005087 | 7821 | 1-232 |
| HTLDE64 | 1407 | 908613 | AC005087 | 7822 | 1-232 |
| HTLDO94 | 1413 | 915223 | AC053520 | 7823 | 1-163 |
| | | | | | 1175-1361 |
| | | | | | 1623-1701 |
| | | | | | 1971-2071 |
| | | | | | 2785-3328 |
| HTLDO94 | 1413 | 915223 | AC053520 | 7824 | 1-187 |
| HTLDO94 | 1413 | 915223 | AC053520 | 7825 | 1-216 |
| | | | | | 490-1016 |
| | | | | | 2053-2295 |
| HTLDQ25 | 1415 | 870057 | AL355315 | 7826 | 1-1401 |
| HTLDQ25 | 1415 | 870057 | AL359388 | 7827 | 1-1401 |
| HTLDQ25 | 1415 | 870057 | AL355315 | 7828 | 1-636 |
| HTLDQ25 | 1415 | 870057 | AL355315 | 7829 | 1-112 |
| | | | | | 128-185 |
| HTLDQ25 | 1415 | 870057 | AL359388 | 7830 | 1-112 |
| | | | | | 128-185 |
| HTLDQ25 | 1415 | 870057 | AL359388 | 7831 | 1-636 |
| HTLDS55 | 1416 | 891322 | AC020663 | 7832 | 1-64 |
| | | | | | 584-868 |
| | | | | | 2241-2367 |
| | | | | | 2459-2539 |
| | | | | | 4278-4416 |
| | | | | | 4580-4698 |
| | | | | | 4790-4886 |
| | | | | | 8560-8662 |
| | | | | | 9190-9487 |
| | | | | | 10204-10263 |
| | | | | | 10348-10678 |
| HTLDS55 | 1416 | 891322 | AC020663 | 7833 | 1-309 |
| HTLDS55 | 1416 | 891322 | AC020663 | 7834 | 1-304 |
| | | | | | 849-1240 |
| | | | | | 2947-3164 |
| HTLDV31 | 1420 | 867748 | AC022505 | 7835 | 1-547 |
| HTLDZ14 | 1423 | 573401 | AL133318 | 7836 | 1-403 |
| HTLDZ14 | 1423 | 573401 | AL133318 | 7837 | 1-353 |
| HTLDZ14 | 1423 | 573401 | AL133318 | 7838 | 1-381 |
| HTLEB14 | 1424 | 573464 | AL353647 | 7839 | 1-1046 |
| | | | | | 1485-1639 |
| HTLEB14 | 1424 | 573464 | AL138784 | 7840 | 1-1046 |
| | | | | | 1485-1639 |
| HTLEB14 | 1424 | 573464 | AC022786 | 7841 | 1-1046 |
| | | | | | 1485-1639 |
| HTLEB14 | 1424 | 573464 | AL353647 | 7842 | 1-116 |
| HTLEB14 | 1424 | 573464 | AL138784 | 7843 | 1-116 |
| HTLED72 | 1425 | 906989 | AC011442 | 7844 | 1-281 |
| HTLEG65 | 1427 | 870154 | AC026083 | 7845 | 1-1655 |
| HTLEG91 | 1428 | 870257 | AL031406 | 7846 | 1-114 |
| HTLEG91 | 1428 | 870257 | Z94160 | 7847 | 1-114 |
| HTLEG91 | 1428 | 870257 | AL031406 | 7848 | 1-945 |
| HTLEG91 | 1428 | 870257 | Z94160 | 7849 | 1-945 |
| HTLEI47 | 1430 | 573460 | AC025959 | 7850 | 1-307 |
| | | | | | 650-751 |
| | | | | | 1100-1209 |
| HTLEI47 | 1430 | 573460 | AC009451 | 7851 | 1-307 |
| | | | | | 650-751 |
| | | | | | 1100-1209 |
| HTLEI47 | 1430 | 573460 | AC025963 | 7852 | 1-307 |
| | | | | | 650-751 |
| | | | | | 1100-1209 |
| HTLEL01 | 1434 | 917022 | AC024631 | 7853 | 1-496 |
| | | | | | 699-1081 |
| | | | | | 1222-1331 |
| | | | | | 1385-1614 |
| | | | | | 1658-1771 |
| | | | | | 1784-2779 |
| | | | | | 3025-3737 |
| HTLEL01 | 1434 | 917022 | AC053481 | 7854 | 1-84 |
| | | | | | 142-371 |
| | | | | | 415-528 |
| | | | | | 541-1535 |
| | | | | | 1780-2492 |
| | | | | | 3204-3300 |
| | | | | | 3678-5015 |
| HTLEL01 | 1434 | 917022 | AC027821 | 7855 | 1-50 |
| | | | | | 213-300 |
| | | | | | 859-1126 |
| | | | | | 1195-1903 |
| | | | | | 2104-2487 |
| | | | | | 2628-2737 |
| | | | | | 2791-3020 |
| | | | | | 3064-3182 |
| | | | | | 3190-4185 |
| | | | | | 4433-5145 |
| | | | | | 5857-5953 |
| | | | | | 6331-7971 |
| | | | | | 7973-8232 |
| | | | | | 8452-8515 |
| HTLEL01 | 1434 | 917022 | AC036181 | 7856 | 1-84 |
| | | | | | 141-370 |
| | | | | | 414-532 |
| | | | | | 540-1535 |
| | | | | | 1776-2488 |
| | | | | | 3200-3296 |
| | | | | | 3674-5593 |
| | | | | | 5809-6696 |
| HTLEL01 | 1434 | 917022 | AC036181 | 7857 | 1-524 |
| | | | | | 687-774 |
| | | | | | 1333-1600 |
| | | | | | 1669-2377 |
| | | | | | 2578-2962 |
| | | | | | 3103-3212 |
| | | | | | 3266-3495 |
| | | | | | 3539-3657 |
| | | | | | 3665-4659 |
| | | | | | 4905-5617 |
| | | | | | 6332-6428 |
| | | | | | 6806-8442 |
| | | | | | 8444-8703 |
| | | | | | 8918-9805 |
| HTLEL01 | 1434 | 917022 | AC023133 | 7858 | 1-524 |
| | | | | | 688-775 |
| | | | | | 1333-1600 |
| | | | | | 1669-2321 |
| | | | | | 2574-2957 |
| | | | | | 3098-3207 |
| | | | | | 3261-3490 |
| | | | | | 3534-3652 |
| | | | | | 3660-4655 |
| | | | | | 4896-5608 |
| | | | | | 6320-6416 |
| | | | | | 6792-8432 |
| | | | | | 8434-8693 |
| | | | | | 8908-9796 |
| HTLEL01 | 1434 | 917022 | AC067923 | 7859 | 1-104 |
| | | | | | 267-354 |
| | | | | | 913-1180 |
| | | | | | 1249-1956 |
| | | | | | 2157-2540 |
| | | | | | 2681-2790 |
| | | | | | 2844-3073 |
| | | | | | 3117-3235 |
| | | | | | 3243-4238 |
| | | | | | 4484-5196 |
| | | | | | 5908-6004 |
| | | | | | 6382-8301 |
| | | | | | 8517-9404 |
| HTLEL01 | 1434 | 917022 | AC015818 | 7860 | 1-940 |
| HTLEL01 | 1434 | 917022 | AC003976 | 7861 | 1-524 |
| | | | | | 688-775 |
| | | | | | 1334-1601 |
| | | | | | 1670-2378 |
| | | | | | 2579-2962 |
| | | | | | 3103-3212 |
| | | | | | 3266-3495 |
| | | | | | 3539-3657 |
| | | | | | 3665-4659 |
| | | | | | 4905-5617 |
| | | | | | 6332-6428 |
| | | | | | 6806-8442 |
| | | | | | 8444-8703 |
| | | | | | 8918-9804 |
| HTLEL01 | 1434 | 917022 | AC021317 | 7862 | 1-529 |
| HTLEL01 | 1434 | 917022 | AC036181 | 7863 | 1-358 |
| HTLEL01 | 1434 | 917022 | AC053481 | 7864 | 1-297 |
| HTLEL01 | 1434 | 917022 | AC036181 | 7865 | 1-371 |
| HTLEL01 | 1434 | 917022 | AC036181 | 7866 | 1-371 |
| HTLEL01 | 1434 | 917022 | AC023133 | 7867 | 1-243 |
| HTLEL01 | 1434 | 917022 | AC036181 | 7868 | 1-243 |
| HTLEL01 | 1434 | 917022 | AC023133 | 7869 | 1-371 |
| HTLEL01 | 1434 | 917022 | AC067923 | 7870 | 1-371 |
| HTLEL01 | 1434 | 917022 | AC015818 | 7871 | 1-527 |
| HTLEL01 | 1434 | 917022 | AC015818 | 7872 | 1-554 |
| | | | | | 559-639 |
| HTLEL01 | 1434 | 917022 | AC003976 | 7873 | 1-371 |
| HTLEL01 | 1434 | 917022 | AC003976 | 7874 | 1-243 |
| HTLEL01 | 1434 | 917022 | AC021317 | 7875 | 1-1419 |
| | | | | | 1443-1741 |
| | | | | | 1748-2500 |
| HTLEL01 | 1434 | 917022 | AC021317 | 7876 | 1-103 |
| HTLEL07 | 1436 | 953712 | AC015936 | 7877 | 1-85 |
| | | | | | 1216-1369 |
| | | | | | 1748-1880 |
| | | | | | 2593-3004 |
| | | | | | 3388-3920 |
| | | | | | 4277-5617 |
| HTLEL07 | 1436 | 953712 | AC015936 | 7878 | 1-1765 |
| | | | | | 2427-2527 |
| | | | | | 3995-4672 |
| | | | | | 4991-5033 |
| | | | | | 5608-5837 |
| | | | | | 6046-6184 |
| | | | | | 6451-6567 |
| | | | | | 7324-7820 |
| | | | | | 8101-8200 |
| | | | | | 8402-8463 |
| | | | | | 9279-9875 |
| HTLEL31 | 1437 | 669950 | AF053356 | 7879 | 1-71 |
| | | | | | 234-304 |
| | | | | | 320-826 |
| | | | | | 878-1099 |
| | | | | | 1233-1683 |
| | | | | | 2077-3297 |
| HTLEL31 | 1437 | 669950 | AF053356 | 7880 | 1-434 |
| HTLEL31 | 1437 | 669950 | AF053356 | 7881 | 1-152 |
| HTLEQ07 | 1441 | 953706 | AC009485 | 7882 | 1-159 |
| | | | | | 352-455 |
| | | | | | 634-742 |
| | | | | | 1105-1433 |
| HTLEQ07 | 1441 | 953706 | AC009485 | 7883 | 1-550 |
| HTLES54 | 1443 | 574884 | AC007732 | 7884 | 1-694 |
| HTLES54 | 1443 | 574884 | AC007732 | 7885 | 1-102 |
| HTLES54 | 1443 | 574884 | AC007732 | 7886 | 1-1969 |
| HTLET56 | 1444 | 911654 | AL356984 | 7887 | 1-1371 |
| HTLET78 | 1445 | 836820 | AC048358 | 7888 | 1-64 |
| | | | | | 135-253 |
| | | | | | 439-619 |
| | | | | | 880-1007 |
| | | | | | 1334-1548 |
| | | | | | 1691-2473 |
| HTLET78 | 1445 | 836820 | AC027307 | 7889 | 1-64 |
| | | | | | 135-253 |
| | | | | | 439-619 |
| | | | | | 880-1007 |
| | | | | | 1335-1549 |
| | | | | | 1692-2474 |
| HTLET78 | 1445 | 836820 | AC027307 | 7890 | 1-80 |
| HTLET93 | 1446 | 573454 | AC021744 | 7891 | 1-105 |
| HTLEV33 | 1447 | 527956 | AC024257 | 7892 | 1-1156 |
| HTLEV33 | 1447 | 527956 | AC024257 | 7893 | 1-496 |
| HTLEV33 | 1447 | 527956 | AC024257 | 7894 | 1-529 |
| HTLEW12 | 1449 | 870255 | AC069004 | 7895 | 1-1937 |
| HTLEW12 | 1449 | 870255 | AC069004 | 7896 | 1-744 |
| HTLEW21 | 1450 | 573458 | AC008392 | 7897 | 1-80 |
| | | | | | 1758-1900 |
| | | | | | 3780-4202 |
| | | | | | 4434-4597 |
| | | | | | 4677-4747 |
| HTLEW21 | 1450 | 573458 | AC027218 | 7898 | 1-80 |
| | | | | | 1754-1896 |
| | | | | | 3776-4198 |
| | | | | | 4430-4593 |
| | | | | | 4673-4743 |
| HTLEW21 | 1450 | 573458 | AC027218 | 7899 | 1-872 |
| HTLEW21 | 1450 | 573458 | AC008392 | 7900 | 1-872 |
| HTLEY11 | 1451 | 967309 | AC036174 | 7901 | 1-88 |
| | | | | | 1369-1453 |
| | | | | | 2944-3069 |
| | | | | | 3655-4026 |
| HTLEZ14 | 1453 | 791662 | AC006549 | 7902 | 1-530 |
| HTLEZ14 | 1453 | 791662 | AC000097 | 7903 | 1-530 |
| HTLEZ14 | 1453 | 791662 | AC006547 | 7904 | 1-530 |
| HTLEZ14 | 1453 | 791662 | AC006549 | 7905 | 1-42 |
| | | | | | 147-212 |
| | | | | | 380-436 |
| | | | | | 699-747 |
| | | | | | 821-1197 |
| HTLEZ14 | 1453 | 791662 | AC006549 | 7906 | 1-311 |
| HTLEZ14 | 1453 | 791662 | AC000097 | 7907 | 1-42 |
| | | | | | 147-212 |
| | | | | | 380-436 |
| | | | | | 699-747 |
| | | | | | 821-1197 |
| HTLEZ14 | 1453 | 791662 | AC000097 | 7908 | 1-311 |
| HTLEZ14 | 1453 | 791662 | AC006547 | 7909 | 1-42 |
| | | | | | 147-212 |
| | | | | | 380-436 |
| | | | | | 699-747 |
| | | | | | 821-1197 |
| HTLEZ14 | 1453 | 791662 | AC006547 | 7910 | 1-314 |
| HTLEZ15 | 1454 | 934288 | AC021163 | 7911 | 1-212 |
| | | | | | 773-858 |
| | | | | | 1055-1178 |
| HTLEZ15 | 1454 | 934288 | AC011495 | 7912 | 1-210 |
| | | | | | 774-859 |
| | | | | | 1056-1155 |
| HTLEZ15 | 1454 | 934288 | AC021163 | 7913 | 1-150 |
| HTLEZ15 | 1454 | 934288 | AC021163 | 7914 | 1-334 |
| HTLEZ15 | 1454 | 934288 | AC011495 | 7915 | 1-150 |
| HTLEZ15 | 1454 | 934288 | AC011495 | 7916 | 1-325 |
| HTLFC20 | 1457 | 917128 | AL354944 | 7917 | 1-116 |
| | | | | | 1049-1279 |
| | | | | | 1947-2369 |
| | | | | | 2924-3064 |
| | | | | | 3498-9096 |
| | | | | | 10048-10150 |
| | | | | | 10917-11052 |
| | | | | | 11221-11920 |
| | | | | | 12125-12310 |
| | | | | | 12501-12633 |
| | | | | | 12868-13122 |
| | | | | | 13980-14176 |
| | | | | | 16118-16486 |
| | | | | | 16537-17101 |
| | | | | | 17616-18267 |
| | | | | | 18312-19168 |
| | | | | | 20650-20901 |
| | | | | | 21433-21866 |
| | | | | | 23387-23568 |
| | | | | | 23660-23748 |
| HTLFC20 | 1457 | 917128 | AL354944 | 7918 | 1-259 |
| HTLFC20 | 1457 | 917128 | AL354944 | 7919 | 1-101 |
| HTLGD25 | 1465 | 870136 | AC025865 | 7920 | 1-1491 |
| HTLGD25 | 1465 | 870136 | AC019225 | 7921 | 1-1491 |
| HTLGD25 | 1465 | 870136 | AL160006 | 7922 | 1-1491 |
| HTLGD25 | 1465 | 870136 | AC019225 | 7923 | 1-480 |
| HTLGD25 | 1465 | 870136 | AC025865 | 7924 | 1-481 |
| HTLGD25 | 1465 | 870136 | AL160006 | 7925 | 1-481 |
| HTLGD69 | 1466 | 835493 | AC013713 | 7926 | 1-1128 |
| HTLGD69 | 1466 | 835493 | AL157875 | 7927 | 1-1128 |
| HTLGD69 | 1466 | 835493 | AC013713 | 7928 | 1-362 |
| | | | | | 5379-5440 |
| HTLGD69 | 1466 | 835493 | AC013713 | 7929 | 1-493 |
| HTLGD69 | 1466 | 835493 | AL157875 | 7930 | 1-362 |
| | | | | | 5379-5440 |
| HTLGM07 | 1470 | 952254 | AC003688 | 7931 | 1-81 |
| | | | | | 236-691 |
| | | | | | 773-1054 |
| | | | | | 1662-1893 |
| | | | | | 2248-2282 |
| | | | | | 3053-3219 |
| | | | | | 3774-4061 |
| | | | | | 4238-4344 |
| | | | | | 4469-4939 |
| | | | | | 5460-5564 |
| | | | | | 5664-6980 |
| HTLGM07 | 1470 | 952254 | AC003688 | 7932 | 1-85 |
| | | | | | 509-995 |
| | | | | | 1324-1425 |
| | | | | | 1574-1640 |
| HTLGM07 | 1470 | 952254 | AC003688 | 7933 | 1-265 |
| HTLHE72 | 1475 | 963471 | AL353608 | 7934 | 1-510 |
| HTLHE72 | 1475 | 963471 | AL353608 | 7935 | 1-628 |
| HTLHE72 | 1475 | 963471 | AL353608 | 7936 | 1-907 |
| HTLHL82 | 1476 | 958334 | AL162377 | 7937 | 1-246 |
| | | | | | 3348-4249 |
| HTLHO94 | 1477 | 968685 | AC006445 | 7938 | 1-1321 |
| HTLHP80 | 1480 | 870156 | AL132868 | 7939 | 1-784 |
| HTLHP80 | 1480 | 870156 | AL132868 | 7940 | 1-135 |
| HTLIK11 | 1489 | 966043 | AC008649 | 7941 | 1-504 |
| | | | | | 1236-1319 |
| | | | | | 2515-2917 |
| | | | | | 4549-4998 |
| | | | | | 5053-5186 |
| | | | | | 5694-5778 |
| | | | | | 6477-6722 |
| | | | | | 9052-9536 |
| | | | | | 9591-9714 |
| | | | | | 9993-10115 |
| HTLIK11 | 1489 | 966043 | AC008649 | 7942 | 1-370 |
| | | | | | 376-776 |
| HTLIP19 | 1490 | 958351 | AC018595 | 7943 | 1-147 |
| | | | | | 393-578 |
| | | | | | 1688-1771 |
| | | | | | 4090-4246 |
| | | | | | 4573-4704 |
| | | | | | 5143-5249 |
| | | | | | 6244-6312 |
| | | | | | 6446-6554 |
| | | | | | 6763-6903 |
| HTLTP19 | 1490 | 958351 | AC018595 | 7944 | 1-140 |
| HTL1Y52 | 1495 | 942161 | AC011448 | 7945 | 1-194 |
| | | | | | 424-1198 |
| | | | | | 1938-2018 |
| | | | | | 3137-3317 |
| | | | | | 5423-5732 |
| | | | | | 5894-6019 |
| | | | | | 6299-6608 |
| | | | | | 7425-7771 |
| | | | | | 8216-8713 |
| | | | | | 9697-9815 |
| | | | | | 9872-9959 |
| | | | | | 10811-11127 |
| | | | | | 11264-11754 |
| | | | | | 11867-12454 |
| | | | | | 12539-13980 |
| | | | | | 14020-14373 |
| | | | | | 14522-15107 |
| | | | | | 15641-15786 |
| | | | | | 18585-22176 |
| | | | | | 22246-22801 |
| | | | | | 24994-25641 |
| | | | | | 26099-26401 |
| | | | | | 28795-29074 |
| | | | | | 29176-29432 |
| | | | | | 29653-29854 |
| | | | | | 31298-31468 |
| | | | | | 31507-32203 |
| | | | | | 32864-33359 |
| | | | | | 34805-34936 |
| | | | | | 35464-35750 |
| | | | | | 35878-36319 |
| | | | | | 36610-37065 |
| | | | | | 37680-38123 |
| | | | | | 38902-39124 |
| | | | | | 42685-42993 |
| | | | | | 43593-43745 |
| | | | | | 47682-47911 |
| | | | | | 48694-49237 |
| | | | | | 49352-49706 |
| | | | | | 52310-52618 |
| | | | | | 53725-54348 |
| | | | | | 54650-55016 |
| | | | | | 56425-56525 |
| | | | | | 56655-57164 |
| | | | | | 58248-59197 |
| | | | | | 59662-60112 |
| | | | | | 60732-61475 |
| | | | | | 62024-62173 |
| | | | | | 69325-69730 |
| HTLIY52 | 1495 | 942161 | AC011448 | 7946 | 1-544 |
| HTL1Y52 | 1495 | 942161 | AC011448 | 7947 | 1-293 |
| HTLJA24 | 1497 | 934279 | AC006237 | 7948 | 1-77 |
| | | | | | 1994-2263 |
| | | | | | 3098-3450 |
| | | | | | 3551-4203 |
| HTLJA24 | 1497 | 934279 | AC006237 | 7949 | 1-1048 |
| | | | | | 1633-2065 |
| | | | | | 2080-2333 |
| | | | | | 2374-2524 |
| | | | | | 4212-4459 |
| | | | | | 5299-5463 |
| | | | | | 7313-7346 |
| HTLJA24 | 1497 | 934279 | AC006237 | 7950 | 1-101 |
| HTLJC71 | 1498 | 922923 | AC009516 | 7951 | 1-2009 |
| HTLJC71 | 1498 | 922923 | AC007957 | 7952 | 1-1747 |
| HTLJC71 | 1498 | 922923 | AC018751 | 7953 | 1-2009 |
| HTLJC71 | 1498 | 922923 | AC023490 | 7954 | 1-2009 |
| HTLJC71 | 1498 | 922923 | AC009516 | 7955 | 1-375 |
| HTLJC71 | 1498 | 922923 | AC009516 | 7956 | 1-494 |
| HTLJC71 | 1498 | 922923 | AC007957 | 7957 | 1-205 |
| HTLJC71 | 1498 | 922923 | AC018751 | 7958 | 1-494 |
| HTLJC71 | 1498 | 922923 | AC023490 | 7959 | 1-375 |
| HTLJC71 | 1498 | 922923 | AC018751 | 7960 | 1-375 |
| HTLJJ75 | 1501 | 924755 | AL354888 | 7961 | 1-1283 |
| HTLJJ75 | 1501 | 924755 | AL033527 | 7962 | 1-448 |
| | | | | | 451-1733 |
| HTLJJ75 | 1501 | 924755 | AL354888 | 7963 | 1-699 |
| HTLJJ75 | 1501 | 924755 | AL033527 | 7964 | 1-696 |
| HTLJL23 | 1502 | 922994 | AL031587 | 7965 | 1-151 |
| | | | | | 441-552 |
| | | | | | 1214-1667 |
| | | | | | 1820-2290 |
| | | | | | 2375-2664 |
| | | | | | 4552-5062 |
| | | | | | 5224-5492 |
| | | | | | 6136-6319 |
| | | | | | 6684-7594 |
| | | | | | 7786-8096 |
| | | | | | 8297-8930 |
| | | | | | 8932-10855 |
| HTLJL23 | 1502 | 922994 | AL031587 | 7966 | 1-135 |
| | | | | | 2617-2705 |
| | | | | | 3232-3371 |
| | | | | | 5671-5793 |
| HTTAD55 | 1503 | 835652 | AC021558 | 7967 | 1-260 |
| HTTAD55 | 1503 | 835652 | AC021558 | 7968 | 1-599 |
| HTTAE49 | 1504 | 723331 | AC023266 | 7969 | 1-491 |
| HTTAE49 | 1504 | 723331 | AC023266 | 7970 | 1-276 |
| HTTAE49 | 1504 | 723331 | AC023266 | 7971 | 1-1777 |
| HTTAJ35 | 1506 | 707750 | AC022650 | 7972 | 1-77 |
| | | | | | 3371-4503 |
| HTTAJ35 | 1506 | 707750 | AC022650 | 7973 | 1-273 |
| HTTAJ50 | 1507 | 509657 | AC022148 | 7974 | 1-287 |
| HTTAJ50 | 1507 | 509657 | AC022148 | 7975 | 1-392 |
| HTTAN57 | 1508 | 509453 | AC010299 | 7976 | 1-304 |
| HTTAS96 | 1509 | 961057 | AC074073 | 7977 | 1-254 |
| HTTAS96 | 1509 | 961057 | AC022621 | 7978 | 1-320 |
| HTTAS96 | 1509 | 961057 | AC022621 | 7979 | 1-272 |
| HTTAS96 | 1509 | 961057 | AC022621 | 7980 | 1-195 |
| HTTAU82 | 1510 | 797726 | AC009618 | 7981 | 1-342 |
| HTTAU82 | 1510 | 797726 | AL390022 | 7982 | 1-510 |
| HTTAU82 | 1510 | 797726 | AC006517 | 7983 | 1-191 |
| | | | | | 443-741 |
| | | | | | 2568-2781 |
| | | | | | 3248-3544 |
| | | | | | 3716-3884 |
| HTTAU82 | 1510 | 797726 | AL137226 | 7984 | 1-342 |
| HTTAU82 | 1510 | 797726 | AL139165 | 7985 | 1-342 |
| HTTAU82 | 1510 | 797726 | AC006927 | 7986 | 1-191 |
| | | | | | 443-741 |
| | | | | | 2568-2778 |
| | | | | | 3317-3427 |
| | | | | | 3717-3885 |
| HTTAU82 | 1510 | 797726 | AC009618 | 7987 | 1-731 |
| HTTAU82 | 1510 | 797726 | AL390022 | 7988 | 1-728 |
| HTTAU82 | 1510 | 797726 | AC006517 | 7989 | 1-115 |
| HTTAU82 | 1510 | 797726 | AL390022 | 7990 | 1-383 |
| HTTAU82 | 1510 | 797726 | AC006517 | 7991 | 1-76 |
| | | | | | 848-890 |
| | | | | | 1618-2210 |
| HTTAU82 | 1510 | 797726 | AL137226 | 7992 | 1-731 |
| HTTAU82 | 1510 | 797726 | AL139165 | 7993 | 1-731 |
| HTTAU82 | 1510 | 797726 | AC006927 | 7994 | 1-89 |
| HTTAU82 | 1510 | 797726 | AC006927 | 7995 | 1-76 |
| | | | | | 848-890 |
| | | | | | 1618-2210 |
| HTTBH34 | 1512 | 530565 | AC008883 | 7996 | 1-1480 |
| | | | | | 1521-2216 |
| HTTBH34 | 1512 | 530565 | AC008401 | 7997 | 1-103 |
| | | | | | 795-938 |
| | | | | | 1928-3094 |
| HTTBH34 | 1512 | 530565 | AC008905 | 7998 | 1-527 |
| | | | | | 1329-1594 |
| | | | | | 2331-2573 |
| | | | | | 2841-2943 |
| | | | | | 3635-3778 |
| | | | | | 4769-6401 |
| | | | | | 6442-7129 |
| HTTBH34 | 1512 | 530565 | AC008865 | 7999 | 1-76 |
| | | | | | 1854-2048 |
| | | | | | 4402-4492 |
| | | | | | 5258-5784 |
| | | | | | 6586-6851 |
| | | | | | 7588-7830 |
| | | | | | 8098-8200 |
| | | | | | 8892-9035 |
| | | | | | 10026-11658 |
| | | | | | 11699-12384 |
| HTTBH34 | 1512 | 530565 | AC008883 | 8000 | 1-144 |
| HTTBH34 | 1512 | 530565 | AC008401 | 8001 | 1-244 |
| HTTBH41 | 1513 | 530562 | AL133215 | 8002 | 1-747 |
| | | | | | 955-1885 |
| | | | | | 2072-2316 |
| | | | | | 2864-3486 |
| | | | | | 4259-4395 |
| | | | | | 4625-4789 |
| | | | | | 5237-6834 |
| HTTBH41 | 1513 | 530562 | AL133215 | 8003 | 1-458 |
| HTTBH41 | 1513 | 530562 | AL133215 | 8004 | 1-187 |
| | | | | | 316-492 |
| | | | | | 663-724 |
| | | | | | 870-1310 |
| | | | | | 2217-2658 |
| | | | | | 2795-3946 |
| | | | | | 3989-5369 |
| | | | | | 5762-6797 |
| | | | | | 6802-6998 |
| HTTBH54 | 1514 | 530563 | AC013443 | 8005 | 1-305 |
| HTTBJ94 | 1515 | 530564 | AC012306 | 8006 | 1-371 |
| | | | | | 2517-2948 |
| | | | | | 3269-3389 |
| | | | | | 4036-4139 |
| | | | | | 4655-4747 |
| | | | | | 6026-6302 |
| | | | | | 6920-7056 |
| | | | | | 7205-7304 |
| | | | | | 8993-12574 |
| HTTBN67 | 1516 | 578085 | AF235102 | 8007 | 1-227 |
| HTTBN67 | 1516 | 578085 | AF235102 | 8008 | 1-117 |
| | | | | | 290-371 |
| | | | | | 1962-2328 |
| HTTCA15 | 1517 | 869705 | AC005833 | 8009 | 1-412 |
| HTTCA15 | 1517 | 869705 | AC005833 | 8010 | 1-559 |
| HTTCD71 | 1519 | 530393 | AL049844 | 8011 | 1-74 |
| | | | | | 381-637 |
| | | | | | 1227-1614 |
| | | | | | 1677-3333 |
| | | | | | 4088-4213 |
| | | | | | 4220-4876 |
| | | | | | 5053-5406 |
| | | | | | 5474-5917 |
| | | | | | 6045-6442 |
| HTTCD71 | 1519 | 530393 | AL049844 | 8012 | 1-263 |
| HTTCD71 | 1519 | 530393 | AL049844 | 8013 | 1-885 |
| HTTCL35 | 1520 | 529672 | AC024375 | 8014 | 1-253 |
| | | | | | 1273-1795 |
| HTTCL35 | 1520 | 529672 | AC024375 | 8015 | 1-418 |
| HTTDF50 | 1522 | 526385 | AC022335 | 8016 | 1-1306 |
| HTTDF50 | 1522 | 526385 | AC022335 | 8017 | 1-156 |
| HTTDI21 | 1525 | 869686 | AC074236 | 8018 | 1-485 |
| HTTDI21 | 1525 | 869686 | AC009269 | 8019 | 1-192 |
| | | | | | 206-468 |
| | | | | | 1229-1713 |
| | | | | | 2228-2407 |
| | | | | | 2998-3211 |
| | | | | | 3314-3817 |
| | | | | | 4343-4938 |
| | | | | | 5571-5768 |
| HTTDI21 | 1525 | 869686 | AC009269 | 8020 | 1-104 |
| HTTDI21 | 1525 | 869686 | AC009269 | 8021 | 1-559 |
| HTTDL45 | 1528 | 523452 | AC007390 | 8022 | 1-75 |
| | | | | | 417-583 |
| | | | | | 1679-1765 |
| | | | | | 2788-3466 |
| | | | | | 4413-4490 |
| | | | | | 4941-5105 |
| | | | | | 5400-5517 |
| | | | | | 6071-6185 |
| | | | | | 8399-8718 |
| | | | | | 9893-10500 |
| HTTDL45 | 1528 | 523452 | AC007390 | 8023 | 1-803 |
| HTTDL45 | 1528 | 523452 | AC007390 | 8024 | 1-186 |
| | | | | | 901-2187 |
| | | | | | 2559-2605 |
| | | | | | 2853-4188 |
| | | | | | 4215-6320 |
| | | | | | 6739-7105 |
| | | | | | 7892-8398 |
| | | | | | 8852-9356 |
| | | | | | 9561-10277 |
| | | | | | 10360-10560 |
| | | | | | 12504-12595 |
| | | | | | 13356-13552 |
| | | | | | 13845-13905 |
| | | | | | 15014-15064 |
| | | | | | 15377-15953 |
| | | | | | 16401-16466 |
| | | | | | 16831-17031 |
| | | | | | 17378-18339 |
| | | | | | 18502-18552 |
| | | | | | 19127-19426 |
| | | | | | 19501-19804 |
| | | | | | 20934-21502 |
| | | | | | 21567-21695 |
| | | | | | 21900-21988 |
| | | | | | 22836-23379 |
| | | | | | 23660-23743 |
| | | | | | 23890-24076 |
| | | | | | 24682-24916 |
| | | | | | 26831-27787 |
| | | | | | 28708-30551 |
| | | | | | 32927-33109 |
| HTTDL89 | 1529 | 959837 | AC004803 | 8025 | 1-376 |
| HTTDL89 | 1529 | 959837 | AC004765 | 8026 | 1-376 |
| | | | | | 471-1538 |
| | | | | | 2707-3361 |
| HTTDL89 | 1529 | 959837 | AC004803 | 8027 | 1-1068 |
| HTTDL89 | 1529 | 959837 | AC004803 | 8028 | 1-2019 |
| | | | | | 3153-3257 |
| | | | | | 3637-3880 |
| | | | | | 4449-4655 |
| | | | | | 4695-4983 |
| | | | | | 5401-6067 |
| | | | | | 7497-7573 |
| | | | | | 8470-8588 |
| | | | | | 8874-9327 |
| | | | | | 9904-10065 |
| | | | | | 11619-11681 |
| | | | | | 12466-12581 |
| | | | | | 12911-13213 |
| | | | | | 14830-14911 |
| | | | | | 16048-17861 |
| | | | | | 17889-18018 |
| | | | | | 18305-18362 |
| | | | | | 18566-18740 |
| | | | | | 19076-19167 |
| HTTDL89 | 1529 | 959837 | AC004765 | 8029 | 1-264 |
| HTTDN85 | 1531 | 783444 | AC078852 | 8030 | 1-442 |
| HTTDN85 | 1531 | 783444 | AC022763 | 8031 | 1-443 |
| HTTDN85 | 1531 | 783444 | AC078852 | 8032 | 1-538 |
| HTTDN85 | 1531 | 783444 | AC022763 | 8033 | 1-538 |
| HTTDR91 | 1534 | 790336 | AC005740 | 8034 | 1-176 |
| | | | | | 1646-1818 |
| | | | | | 4524-4697 |
| | | | | | 5747-5899 |
| | | | | | 8660-9945 |
| | | | | | 10558-10883 |
| | | | | | 11064-11295 |
| | | | | | 11314-11646 |
| | | | | | 14324-14496 |
| | | | | | 15739-15886 |
| | | | | | 16611-16794 |
| | | | | | 18676-21241 |
| | | | | | 22938-23085 |
| | | | | | 23224-24224 |
| | | | | | 24447-24843 |
| | | | | | 25199-25490 |
| | | | | | 25515-27062 |
| HTTDR91 | 1534 | 790336 | AC005740 | 8035 | 1-540 |
| HTTDR91 | 1534 | 790336 | AC005740 | 8036 | 1-398 |
| HTTDR92 | 1535 | 573666 | AC023098 | 8037 | 1-368 |
| HTTDR92 | 1535 | 573666 | AC003046 | 8038 | 1-368 |
| HTTDR92 | 1535 | 573666 | AC023098 | 8039 | 1-368 |
| HTTDR92 | 1535 | 573666 | AC023098 | 8040 | 1-62 |
| | | | | | 1717-2020 |
| | | | | | 2315-2432 |
| | | | | | 3271-3381 |
| | | | | | 4686-4832 |
| HTTDR92 | 1535 | 573666 | AC003046 | 8041 | 1-62 |
| | | | | | 1728-2020 |
| | | | | | 2315-2432 |
| | | | | | 3271-3381 |
| | | | | | 4686-4832 |
| HTTDR92 | 1535 | 573666 | AC003046 | 8042 | 1-368 |
| HTTDS02 | 1536 | 920589 | AL139100 | 8043 | 1-309 |
| | | | | | 2987-3113 |
| | | | | | 4207-4877 |
| | | | | | 5573-5677 |
| | | | | | 5684-5845 |
| | | | | | 9382-9495 |
| | | | | | 11034-11269 |
| | | | | | 14694-14786 |
| | | | | | 16010-16116 |
| | | | | | 16799-17013 |
| | | | | | 17078-17196 |
| | | | | | 18023-18134 |
| | | | | | 19046-19565 |
| | | | | | 20157-20645 |
| HTTDS02 | 1536 | 920589 | AL139100 | 8044 | 1-121 |
| HTTDX84 | 1537 | 921100 | AC016912 | 8045 | 1-137 |
| | | | | | 839-1199 |
| | | | | | 4679-4860 |
| HTTDX84 | 1537 | 921100 | AC018682 | 8046 | 1-137 |
| | | | | | 840-1200 |
| | | | | | 4680-4861 |
| HTTDZ91 | 1539 | 523206 | AL137229 | 8047 | 1-145 |
| | | | | | 572-661 |
| | | | | | 4888-5112 |
| | | | | | 6942-7339 |
| | | | | | 7820-7914 |
| | | | | | 8041-8423 |
| | | | | | 8957-9106 |
| | | | | | 11434-11806 |
| | | | | | 11986-12491 |
| | | | | | 13542-13680 |
| | | | | | 14277-16062 |
| HTTDZ91 | 1539 | 523206 | AL137229 | 8048 | 1-1790 |
| HTTEH58 | 1541 | 747943 | AC068781 | 8049 | 1-387 |
| HTTEH58 | 1541 | 747943 | AC068365 | 8050 | 1-387 |
| HTTEH58 | 1541 | 747943 | AC073466 | 8051 | 1-387 |
| HTTEH58 | 1541 | 747943 | AC068365 | 8052 | 1-813 |
| HTTEH58 | 1541 | 747943 | AC073466 | 8053 | 1-813 |
| HTTEH58 | 1541 | 747943 | AC068781 | 8054 | 1-813 |
| HTTEL50 | 1542 | 745985 | AL359551 | 8055 | 1-443 |
| HTTEL50 | 1542 | 745985 | AL360010 | 8056 | 1-227 |
| | | | | | 3577-4019 |
| | | | | | 4331-4797 |
| HTTEL50 | 1542 | 745985 | AL360010 | 8057 | 1-556 |
| HTTEV62 | 1544 | 573614 | AC018706 | 8058 | 1-120 |
| | | | | | 327-596 |
| HTTEY64 | 1545 | 974107 | AL121759 | 8059 | 1-457 |
| HTTEY64 | 1545 | 974107 | AL121759 | 8060 | 1-182 |
| | | | | | 1815-1886 |
| HTTEY64 | 1545 | 974107 | AL121759 | 8061 | 1-413 |
| HTTEY67 | 1546 | 917903 | AC012467 | 8062 | 1-174 |
| | | | | | 339-486 |
| | | | | | 2042-2214 |
| | | | | | 3686-3797 |
| | | | | | 4399-4507 |
| | | | | | 4767-4939 |
| | | | | | 5440-5530 |
| | | | | | 5625-5731 |
| | | | | | 6070-6204 |
| | | | | | 7501-7716 |
| | | | | | 7788-7943 |
| | | | | | 8041-8340 |
| | | | | | 9024-9118 |
| | | | | | 9626-9767 |
| | | | | | 10655-10995 |
| | | | | | 11935-12314 |
| | | | | | 12866-13125 |
| | | | | | 13129-15725 |
| | | | | | 15843-17466 |
| | | | | | 17604-18286 |
| | | | | | 18317-18594 |
| | | | | | 18649-19313 |
| | | | | | 20121-20283 |
| | | | | | 20736-23161 |
| | | | | | 23235-23790 |
| | | | | | 23989-24537 |
| | | | | | 25167-25310 |
| | | | | | 26353-26806 |
| | | | | | 26813-26872 |
| | | | | | 27021-27163 |
| | | | | | 29155-29282 |
| | | | | | 30027-30154 |
| | | | | | 32358-32499 |
| | | | | | 35505-35567 |
| HTTEY67 | 1546 | 917903 | AC012467 | 8063 | 1-150 |
| | | | | | 3016-3145 |
| | | | | | 3424-3525 |
| | | | | | 4978-5073 |
| | | | | | 5533-5878 |
| | | | | | 6004-6106 |
| | | | | | 6241-7612 |
| | | | | | 7874-8710 |
| HTTEY67 | 1546 | 917903 | AC012467 | 8064 | 1-527 |
| HTTEZ34 | 1547 | 771602 | AL356116 | 8065 | 1-508 |
| HTTEZ34 | 1547 | 771602 | AC017067 | 8066 | 1-244 |
| | | | | | 4587-5158 |
| | | | | | 5672-6138 |
| HTTEZ34 | 1547 | 771602 | AL356116 | 8067 | 1-467 |
| HTTFA16 | 1548 | 870198 | AC067749 | 8068 | 1-81 |
| | | | | | 610-1275 |
| | | | | | 1444-1660 |
| | | | | | 1750-2267 |
| | | | | | 2590-3070 |
| | | | | | 3195-3769 |
| | | | | | 3824-4507 |
| | | | | | 4543-4871 |
| | | | | | 4996-6355 |
| | | | | | 6426-6973 |
| | | | | | 6998-7524 |
| HTTFA16 | 1548 | 870198 | AC067749 | 8069 | 1-360 |
| HTTFB60 | 1549 | 869666 | AC023818 | 8070 | 1-2041 |
| | | | | | 2271-2442 |
| | | | | | 2475-6107 |
| HTTFB60 | 1549 | 869666 | AC023818 | 8071 | 1-353 |
| HTTFB60 | 1549 | 869666 | AC023818 | 8072 | 1-120 |
| HTTFG35 | 1550 | 778426 | AC019205 | 8073 | 1-231 |
| | | | | | 428-607 |
| HTTFG35 | 1550 | 778426 | AL133336 | 8074 | 1-231 |
| | | | | | 428-607 |
| HTTFG35 | 1550 | 778426 | AC068247 | 8075 | 1-231 |
| | | | | | 428-607 |
| HTTFG35 | 1550 | 778426 | AC019205 | 8076 | 1-974 |
| HTTFG35 | 1550 | 778426 | AL133336 | 8077 | 1-974 |
| HTTFG35 | 1550 | 778426 | AC068247 | 8078 | 1-974 |
| HTTFG83 | 1551 | 974284 | AL137128 | 8079 | 1-693 |
| HTTFG83 | 1551 | 974284 | AL137128 | 8080 | 1-413 |
| HTTFL89 | 1554 | 974346 | AC005551 | 8081 | 1-436 |
| HTTFL89 | 1554 | 974346 | AC005551 | 8082 | 1-135 |
| | | | | | 1535-1715 |
| | | | | | 2043-2114 |
| | | | | | 5528-6140 |
| HTTFM17 | 1555 | 750942 | AC009994 | 8083 | 1-422 |
| | | | | | 658-1260 |
| | | | | | 2947-3758 |
| HTTFM17 | 1555 | 750942 | AC009994 | 8084 | 1-155 |
| HTTFS59 | 1557 | 825922 | AP001332 | 8085 | 1-1736 |
| | | | | | 1937-2284 |
| | | | | | 2596-2760 |
| | | | | | 3034-3162 |
| | | | | | 4857-4934 |
| | | | | | 5196-5338 |
| | | | | | 6131-6244 |
| | | | | | 6276-6756 |
| | | | | | 7170-7308 |
| | | | | | 7537-7569 |
| | | | | | 7659-7709 |
| HTTFS59 | 1557 | 825922 | AC013606 | 8086 | 1-1738 |
| | | | | | 1938-2285 |
| | | | | | 2478-2580 |
| | | | | | 2594-2758 |
| | | | | | 3036-3160 |
| HTTFS59 | 1557 | 825922 | AC015685 | 8087 | 1-1737 |
| HTTFS59 | 1557 | 825922 | AC013606 | 8088 | 1-489 |
| HTTFS59 | 1557 | 825922 | AC015685 | 8089 | 1-487 |
| HTTFT08 | 1558 | 934460 | AC013726 | 8090 | 1-43 |
| | | | | | 317-418 |
| | | | | | 1097-2127 |
| | | | | | 2193-2346 |
| | | | | | 2456-2503 |
| | | | | | 2713-3159 |
| | | | | | 3231-6093 |
| HTTFT08 | 1558 | 934460 | AC013726 | 8091 | 1-536 |
| HTTFV93 | 1559 | 925544 | AL139410 | 8092 | 1-1222 |
| | | | | | 1338-1532 |
| HTTFV93 | 1559 | 925544 | AL353760 | 8093 | 1-1222 |
| | | | | | 1338-1532 |
| HTTFW03 | 1560 | 923105 | AC006566 | 8094 | 1-472 |
| HTTFX21 | 1561 | 924775 | AC026210 | 8095 | 1-1869 |
| HTTFX21 | 1561 | 924775 | AC026210 | 8096 | 1-150 |
| HTTFZ70 | 1562 | 974066 | AL355594 | 8097 | 1-115 |
| | | | | | 207-368 |
| | | | | | 516-876 |
| | | | | | 1441-1565 |
| | | | | | 2014-2187 |
| | | | | | 2404-2951 |
| | | | | | 3705-5973 |
| | | | | | 6008-8387 |
| HTTFZ70 | 1562 | 974066 | AL033383 | 8098 | 1-1004 |
| | | | | | 2982-3105 |
| | | | | | 3372-3514 |
| | | | | | 4034-4609 |
| | | | | | 5643-5817 |
| | | | | | 9019-9176 |
| | | | | | 10736-10817 |
| | | | | | 12053-12475 |
| | | | | | 13292-13391 |
| | | | | | 14259-14546 |
| | | | | | 15423-15497 |
| | | | | | 16340-16660 |
| | | | | | 17244-17630 |
| | | | | | 17683-17864 |
| | | | | | 17981-18128 |
| | | | | | 18264-18585 |
| | | | | | 18678-18767 |
| | | | | | 20206-20356 |
| | | | | | 20955-21122 |
| | | | | | 22834-23358 |
| | | | | | 23679-23944 |
| | | | | | 24217-24406 |
| | | | | | 24565-24684 |
| | | | | | 25085-25439 |
| | | | | | 26585-26758 |
| | | | | | 26975-27139 |
| | | | | | 28275-30550 |
| | | | | | 30582-33232 |
| | | | | | 36611-37091 |
| | | | | | 37344-38113 |
| | | | | | 46301-46465 |
| | | | | | 55718-55969 |
| | | | | | 66431-66687 |
| HTTFZ70 | 1562 | 974066 | AL138831 | 8099 | 1-1004 |
| | | | | | 2982-3105 |
| | | | | | 3372-3514 |
| | | | | | 4034-4609 |
| | | | | | 5643-5817 |
| | | | | | 9019-9176 |
| | | | | | 10736-10817 |
| | | | | | 12053-12475 |
| | | | | | 13292-13391 |
| | | | | | 14259-14546 |
| | | | | | 15423-15497 |
| | | | | | 16340-16660 |
| | | | | | 17244-17630 |
| | | | | | 17683-17864 |
| | | | | | 17981-18128 |
| | | | | | 18264-18585 |
| | | | | | 18678-18767 |
| | | | | | 20206-20356 |
| | | | | | 20955-21122 |
| | | | | | 22836-23360 |
| | | | | | 23681-23946 |
| | | | | | 24219-24408 |
| | | | | | 24567-24686 |
| | | | | | 24778-24939 |
| | | | | | 25087-25441 |
| | | | | | 26585-26758 |
| | | | | | 26975-27139 |
| | | | | | 28275-30550 |
| | | | | | 30582-33232 |
| | | | | | 36611-37091 |
| | | | | | 37344-38113 |
| | | | | | 46301-46465 |
| | | | | | 55718-55969 |
| | | | | | 66431-66687 |
| HTTFZ70 | 1562 | 974066 | AL033383 | 8100 | 1-375 |
| HTTFZ70 | 1562 | 974066 | AL355594 | 8101 | 1-266 |
| | | | | | 539-728 |
| HTTFZ70 | 1562 | 974066 | AL033383 | 8102 | 1-205 |
| HTTFZ70 | 1562 | 974066 | AL138831 | 8103 | 1-375 |
| HTTFZ70 | 1562 | 974066 | AL138831 | 8104 | 1-205 |
| HTTHU43 | 1564 | 953479 | AC008393 | 8105 | 1-1033 |
| HTTHU43 | 1564 | 953479 | AC010285 | 8106 | 1-1031 |
| HTTHU43 | 1564 | 953479 | AC010313 | 8107 | 1-1032 |
| HTTHU43 | 1564 | 953479 | AC010313 | 8108 | 1-217 |
| | | | | | 1839-2045 |
| | | | | | 2948-3521 |
| | | | | | 3767-4083 |
| | | | | | 5131-6402 |
| | | | | | 6992-7292 |
| | | | | | 8101-8167 |
| HTTHU43 | 1564 | 953479 | AC008393 | 8109 | 1-401 |
| HTTHU43 | 1564 | 953479 | AC010285 | 8110 | 1-401 |
| HTTIG04 | 1565 | 926752 | AC012609 | 8111 | 1-458 |
| HTTIG04 | 1565 | 926752 | AC026406 | 8112 | 1-458 |
| HTTIG04 | 1565 | 926752 | AC012609 | 8113 | 1-661 |
| HTTIG04 | 1565 | 926752 | AC026406 | 8114 | 1-661 |
| HTTIH23 | 1566 | 869636 | AC040970 | 8115 | 1-1041 |
| | | | | | 1186-1881 |
| | | | | | 2845-2973 |
| HTTIH23 | 1566 | 869636 | AC011676 | 8116 | 1-1041 |
| | | | | | 1185-1880 |
| | | | | | 2844-2972 |
| | | | | | 5523-5631 |
| | | | | | 6840-7111 |
| | | | | | 7196-7890 |
| | | | | | 8274-9038 |
| | | | | | 9916-10234 |
| HTTIH23 | 1566 | 869636 | AC040970 | 8117 | 1-740 |
| HTTIH23 | 1566 | 869636 | AC011676 | 8118 | 1-400 |
| HTTIH80 | 1567 | 869635 | AC006443 | 8119 | 1-385 |
| HTTIH80 | 1567 | 869635 | AC006443 | 8120 | 1-201 |
| HTTIN23 | 1569 | 869634 | AC002549 | 8121 | 1-566 |
| HTTIU05 | 1570 | 931015 | AC008663 | 8122 | 1-461 |
| | | | | | 3399-3527 |
| | | | | | 4652-5129 |
| | | | | | 5447-6031 |
| | | | | | 6123-6401 |
| | | | | | 6651-7418 |
| | | | | | 8095-9142 |
| HTTIU05 | 1570 | 931015 | AC010339 | 8123 | 1-76 |
| | | | | | 1203-1680 |
| | | | | | 1998-2582 |
| | | | | | 2674-2952 |
| | | | | | 3202-3969 |
| | | | | | 4646-5693 |
| HTTIU05 | 1570 | 931015 | AC022259 | 8124 | 1-585 |
| HTTTU05 | 1570 | 931015 | AC008663 | 8125 | 1-101 |
| HTTTU05 | 1570 | 931015 | AC008663 | 8126 | 1-130 |
| HITTU05 | 1570 | 931015 | AC010339 | 8127 | 1-130 |
| HITUJ05 | 1570 | 931015 | AC022259 | 8128 | 1-478 |
| HTTUJ05 | 1570 | 931015 | AC022259 | 8129 | 1-280 |
| HTTIW81 | 1571 | 922817 | AL357149 | 8130 | 1-433 |
| HTTIW81 | 1571 | 922817 | AL357149 | 8131 | 1-399 |
| HTTIZ05 | 1572 | 930994 | AC012246 | 8132 | 1-443 |
| HTTIZ05 | 1572 | 930994 | AC012246 | 8133 | 1-646 |
| HTTJA11 | 1573 | 839725 | AC068403 | 8134 | 1-440 |
| HTTJA11 | 1573 | 839725 | AC067775 | 8135 | 1-440 |
| HTTJA11 | 1573 | 839725 | AC068403 | 8136 | 1-288 |
| HTTJA11 | 1573 | 839725 | AC067775 | 8137 | 1-288 |
| HTTJA47 | 1574 | 869618 | AP002091 | 8138 | 1-276 |
| | | | | | 3023-3207 |
| HTTJA47 | 1574 | 869618 | AP002091 | 8139 | 1-149 |
| HTTJA47 | 1574 | 869618 | AP002091 | 8140 | 1-179 |
| HTTJH13 | 1575 | 869615 | AC013436 | 8141 | 1-324 |
| HTTJH13 | 1575 | 869615 | AC004859 | 8142 | 1-324 |
| HTTJH13 | 1575 | 869615 | AC013436 | 8143 | 1-209 |
| HTTJH13 | 1575 | 869615 | AC013436 | 8144 | 1-65 |
| | | | | | 191-304 |
| | | | | | 339-660 |
| | | | | | 712-888 |
| HTTJH13 | 1575 | 869615 | AC004859 | 8145 | 1-209 |
| HTTJH13 | 1575 | 869615 | AC004859 | 8146 | 1-65 |
| | | | | | 191-304 |
| | | | | | 339-660 |
| | | | | | 712-888 |
| HTTJM01 | 1576 | 913799 | AC009469 | 8147 | 1-310 |
| | | | | | 383-487 |
| HTTJQ06 | 1577 | 934130 | AC022202 | 8148 | 1-1086 |
| HTTJQ06 | 1577 | 934130 | AL136969 | 8149 | 1-308 |
| | | | | | 973-1308 |
| | | | | | 4938-4961 |
| | | | | | 8196-8326 |
| | | | | | 11508-12593 |
| | | | | | 13039-13501 |
| | | | | | 15003-15234 |
| | | | | | 17040-17530 |
| | | | | | 20304-20729 |
| | | | | | 25068-25578 |
| | | | | | 25828-26705 |
| | | | | | 26728-26816 |
| | | | | | 26831-27320 |
| | | | | | 28927-29311 |
| | | | | | 29405-29614 |
| | | | | | 30437-31474 |
| HTTJQ06 | 1577 | 934130 | AC022202 | 8150 | 1-461 |
| HTTJQ06 | 1577 | 934130 | AL136969 | 8151 | 1-98 |
| HTTJQ06 | 1577 | 934130 | AL136969 | 8152 | 1-377 |
| HTTJX68 | 1578 | 974063 | AC026318 | 8153 | 1-312 |
| | | | | | 987-1439 |
| | | | | | 3651-3801 |
| HTTJX68 | 1578 | 974063 | AC023910 | 8154 | 1-453 |
| HTTJX68 | 1578 | 974063 | AC026318 | 8155 | 1-241 |
| HTTJX68 | 1578 | 974063 | AC026318 | 8156 | 1-218 |
| HTTJY08 | 1579 | 958170 | AL355586 | 8157 | 1-453 |
| HTTJY08 | 1579 | 958170 | AL355307 | 8158 | 1-453 |
| HTTJY08 | 1579 | 958170 | AL023584 | 8159 | 1-453 |
| HTTJY08 | 1579 | 958170 | AL355586 | 8160 | 1-349 |
| HTTJY08 | 1579 | 958170 | AL355307 | 8161 | 1-349 |
| HTTJY08 | 1579 | 958170 | AL023584 | 8162 | 1-349 |
| HTTKF89 | 1581 | 960928 | AL035425 | 8163 | 1-524 |
| HTTKF89 | 1581 | 960928 | AL035425 | 8164 | 1-133 |
| HTTKF89 | 1581 | 960928 | AL035425 | 8165 | 1-418 |
| HTTKK06 | 1583 | 974311 | AC046137 | 8166 | 1-1282 |
| | | | | | 1645-2164 |
| | | | | | 3070-3680 |
| | | | | | 3888-3943 |
| | | | | | 3999-4329 |
| | | | | | 5064-5333 |
| | | | | | 6343-6658 |
| | | | | | 6733-6987 |
| | | | | | 7096-7247 |
| | | | | | 7432-7831 |
| | | | | | 8006-8123 |
| | | | | | 8293-8756 |
| | | | | | 9804-9858 |
| HTTKK06 | 1583 | 974311 | AL138965 | 8167 | 1-1284 |
| | | | | | 1646-2165 |
| | | | | | 3071-3681 |
| | | | | | 3889-3944 |
| | | | | | 4000-4499 |
| | | | | | 5065-5333 |
| | | | | | 6343-6662 |
| | | | | | 6733-6987 |
| | | | | | 7096-7247 |
| | | | | | 7432-7831 |
| | | | | | 8006-8123 |
| | | | | | 8293-8756 |
| | | | | | 9803-9857 |
| HTTRL80 | 1584 | 974316 | AC027572 | 8168 | 1-495 |
| HTTKN21 | 1585 | 974310 | AC024563 | 8169 | 1-495 |
| HTTKN21 | 1585 | 974310 | AC010318 | 8170 | 1-495 |
| HTTKN21 | 1585 | 974310 | AC008626 | 8171 | 1-495 |
| HTTKN21 | 1585 | 974310 | AC024563 | 8172 | 1-276 |
| HTTKN21 | 1585 | 974310 | AC010318 | 8173 | 1-276 |
| HTTKN21 | 1585 | 974310 | AC008626 | 8174 | 1-276 |
| HTTKS13 | 1588 | 926795 | AC023593 | 8175 | 1-494 |
| HTTKS13 | 1588 | 926795 | AC012406 | 8176 | 1-195 |
| | | | | | 510-647 |
| | | | | | 1298-1791 |
| | | | | | 2210-2419 |
| | | | | | 2689-2911 |
| | | | | | 3871-4132 |
| | | | | | 4236-4418 |
| | | | | | 5740-5922 |
| | | | | | 9461-9715 |
| | | | | | 10556-10634 |
| HTTKS13 | 1588 | 926795 | AC023593 | 8177 | 1-207 |
| | | | | | 480-702 |
| | | | | | 1662-1923 |
| NTTKS13 | 1588 | 926795 | AC012406 | 8178 | 1-87 |
| NTTKV17 | 1589 | 830008 | AC005027 | 8179 | 1-993 |
| | | | | | 2319-3110 |
| | | | | | 3184-3327 |
| | | | | | 3609-3791 |
| | | | | | 4475-4927 |
| | | | | | 8332-9120 |
| | | | | | 9164-9583 |
| | | | | | 10780-11193 |
| | | | | | 12543-14416 |
| HTTKV17 | 1589 | 830008 | AC005027 | 8180 | 1-2780 |
| HUDAM29 | 1590 | 529157 | AL161451 | 8181 | 1-354 |
| HUDAM29 | 1590 | 529157 | AL161451 | 8182 | 1-238 |
| HUDBZ78 | 1591 | 739638 | AC018638 | 8183 | 1-123 |
| | | | | | 666-828 |
| | | | | | 4839-5113 |
| | | | | | 6402-6995 |
| | | | | | 7727-7910 |
| | | | | | 9744-9996 |
| | | | | | 10630-10732 |
| | | | | | 14112-14236 |
| | | | | | 17737-17771 |
| | | | | | 19858-20081 |
| | | | | | 20801-20915 |
| | | | | | 21556-21640 |
| | | | | | 22127-22645 |
| HUDBZ78 | 1591 | 739638 | AC018638 | 8184 | 1-368 |
| HUDBZ78 | 1591 | 739638 | AC018638 | 8185 | 1-374 |
| HUKAA62 | 1592 | 503626 | AC009789 | 8186 | 1-298 |
| HUKAA62 | 1592 | 503626 | AC009789 | 8187 | 1-166 |
| HUKAC72 | 1594 | 966804 | AC040933 | 8188 | 1-747 |
| | | | | | 1785-1982 |
| | | | | | 2445-2506 |
| | | | | | 3235-3323 |
| | | | | | 3868-4360 |
| | | | | | 7129-7364 |
| | | | | | 8883-9903 |
| HUKAC72 | 1594 | 966804 | AC040933 | 8189 | 1-431 |
| HUKAM82 | 1595 | 954420 | AL096865 | 8190 | 1-323 |
| HUKAX07 | 1596 | 954359 | AL355773 | 8191 | 1-294 |
| HUKCC86 | 1597 | 529727 | AL359388 | 8192 | 1-226 |
| HUKCC86 | 1597 | 529727 | AL359388 | 8193 | 1-168 |
| HUKDH28 | 1598 | 531165 | AC006055 | 8194 | 1-975 |
| | | | | | 1001-1658 |
| | | | | | 3268-3377 |
| | | | | | 5231-5317 |
| | | | | | 5881-6170 |
| | | | | | 6180-6546 |
| | | | | | 6750-10147 |
| | | | | | 10463-11127 |
| HUKDH28 | 1598 | 531165 | AC006055 | 8195 | 1-344 |
| HUKDH50 | 1599 | 531163 | AL157414 | 8196 | 1-356 |
| HUKEH36 | 1600 | 531110 | AC009753 | 8197 | 1-279 |
| | | | | | 1685-1909 |
| | | | | | 3546-3709 |
| | | | | | 5906-6035 |
| | | | | | 6290-6604 |
| | | | | | 6687-6845 |
| | | | | | 9440-9473 |
| | | | | | 16009-16296 |
| | | | | | 20083-20229 |
| | | | | | 20650-20784 |
| | | | | | 22152-22256 |
| | | | | | 27158-27662 |
| | | | | | 27907-28244 |
| | | | | | 28359-28661 |
| | | | | | 30187-30275 |
| | | | | | 31177-31379 |
| | | | | | 31668-32105 |
| | | | | | 33142-33243 |
| | | | | | 38066-38199 |
| | | | | | 40117-40592 |
| | | | | | 45086-45120 |
| HUKEH36 | 1600 | 531110 | AC009851 | 8198 | 1-201 |
| | | | | | 752-1089 |
| | | | | | 1204-1522 |
| | | | | | 3032-3120 |
| | | | | | 4022-4224 |
| | | | | | 4513-4950 |
| | | | | | 5988-6089 |
| | | | | | 10911-11044 |
| | | | | | 12962-13437 |
| | | | | | 17931-17965 |
| HUKEH36 | 1600 | 531110 | AC009753 | 8199 | 1-101 |
| HUKEH36 | 1600 | 531110 | AC009753 | 8200 | 1-944 |
| HUKEH36 | 1600 | 531110 | AC009851 | 8201 | 1-944 |
| HUKEH50 | 1601 | 531108 | AC018782 | 8202 | 1-52 |
| | | | | | 517-603 |
| | | | | | 785-1153 |
| HUKEH50 | 1601 | 531108 | AC024575 | 8203 | 1-52 |
| | | | | | 518-604 |
| | | | | | 785-1153 |
| HUKEH50 1601 | 531108 | AC008481 | 8204 | 1-52 | |
| | | | | | 517-603 |
| | | | | | 784-1152 |
| HUKEH50 | 1601 | 531108 | AC024575 | 8205 | 1-115 |
| | | | | | 1178-1315 |
| | | | | | 1730-1957 |
| | | | | | 2076-2562 |
| | | | | | 2638-2854 |
| HUKEH50 | 1601 | 531108 | AC008481 | 8206 | 1-40 |
| | | | | | 503-612 |
| | | | | | 1674-1811 |
| | | | | | 2224-2446 |
| | | | | | 2570-3053 |
| | | | | | 3134-3271 |
| HUKEK55 | 1602 | 522213 | AL136295 | 8207 | 1-329 |
| | | | | | 621-1000 |
| | | | | | 1739-2035 |
| | | | | | 2395-3026 |
| | | | | | 3192-5637 |
| | | | | | 5774-6952 |
| | | | | | 7033-7120 |
| | | | | | 7249-7328 |
| | | | | | 7415-7456 |
| | | | | | 7876-8005 |
| | | | | | 8093-8272 |
| | | | | | 8521-8588 |
| | | | | | 8691-8796 |
| | | | | | 8883-8960 |
| | | | | | 9217-9387 |
| | | | | | 9492-9542 |
| | | | | | 9701-9811 |
| | | | | | 10103-10210 |
| | | | | | 10357-10490 |
| | | | | | 10690-10805 |
| | | | | | 10909-11022 |
| | | | | | 11253-11376 |
| | | | | | 11565-11674 |
| | | | | | 11773-11883 |
| | | | | | 11999-12082 |
| | | | | | 12157-12216 |
| | | | | | 12317-12421 |
| | | | | | 12502-12696 |
| | | | | | 12828-12881 |
| | | | | | 12913-13134 |
| | | | | | 13225-13394 |
| | | | | | 13509-13717 |
| | | | | | 13829-13964 |
| | | | | | 14050-14163 |
| | | | | | 14402-14637 |
| | | | | | 14749-15004 |
| | | | | | 15091-16277 |
| | | | | | 16464-17066 |
| | | | | | 17139-18207 |
| | | | | | 18288-18319 |
| | | | | | 18465-18527 |
| | | | | | 18767-18851 |
| | | | | | 18893-19292 |
| | | | | | 19548-20127 |
| | | | | | 22009-22378 |
| | | | | | 22471-22544 |
| | | | | | 22627-24028 |
| HUKEK55 | 1602 | 522213 | AL136295 | 8208 | 1-290 |
| HUKEK55 | 1602 | 522213 | AL136295 | 8209 | 1-102 |
| HUKES11 | 1604 | 967604 | AL358433 | 8210 | 1-339 |
| HUKES11 | 1604 | 967604 | AL358433 | 8211 | 1-2038 |
| HUKES11 | 1604 | 967604 | AL358433 | 8212 | 1-368 |
| HUKFL69 | 1605 | 526819 | AL365510 | 8213 | 1-392 |
| HUKFL69 | 1605 | 526819 | AC009564 | 8214 | 1-392 |
| HUNAD94 | 1608 | 575299 | AC024403 | 8215 | 1-115 |
| HUNAD94 | 1608 | 575299 | AL133238 | 8216 | 1-353 |
| HUVBB90 | 1609 | 503042 | AC020611 | 8217 | 1-340 |
| HUVBB90 | 1609 | 503042 | AC020611 | 8218 | 1-313 |
| | | | | | 880-916 |
| HUVBB93 | 1610 | 502903 | AL121603 | 8219 | 1-279 |
| HUVCS14 | 1614 | 914768 | AC011448 | 8220 | 1-194 |
| | | | | | 424-1198 |
| | | | | | 1938-2018 |
| | | | | | 3137-3317 |
| | | | | | 5423-5732 |
| | | | | | 5894-6019 |
| | | | | | 6299-6608 |
| | | | | | 7425-7771 |
| | | | | | 8216-8713 |
| | | | | | 9697-9815 |
| | | | | | 9872-9959 |
| | | | | | 10811-11127 |
| | | | | | 11264-11754 |
| | | | | | 11867-12454 |
| | | | | | 12539-13980 |
| | | | | | 14020-14373 |
| | | | | | 14522-15107 |
| | | | | | 15641-15786 |
| | | | | | 18585-22176 |
| | | | | | 22246-22801 |
| | | | | | 24994-25641 |
| | | | | | 26099-26401 |
| | | | | | 28795-29074 |
| | | | | | 29176-29432 |
| | | | | | 29653-29854 |
| | | | | | 31298-31468 |
| | | | | | 31507-32203 |
| | | | | | 32864-33359 |
| | | | | | 34805-34936 |
| | | | | | 35464-35750 |
| | | | | | 35878-36319 |
| | | | | | 36610-37065 |
| | | | | | 37680-38123 |
| | | | | | 38902-39124 |
| | | | | | 42685-42993 |
| | | | | | 43593-43745 |
| | | | | | 47682-47911 |
| | | | | | 48694-49237 |
| | | | | | 49352-49706 |
| | | | | | 52310-52618 |
| | | | | | 53725-54348 |
| | | | | | 54650-55016 |
| | | | | | 56425-56525 |
| | | | | | 56655-57164 |
| | | | | | 58248-59197 |
| | | | | | 59662-60112 |
| | | | | | 60732-61475 |
| | | | | | 62024-62173 |
| | | | | | 69325-69730 |
| HUVCS14 | 1614 | 914768 | AC011448 | 8221 | 1-544 |
| HUVCS14 | 1614 | 914768 | AC011448 | 8222 | 1-293 |
| HUVCU71 | 1615 | 968663 | AC005410 | 8223 | 1-26 |
| | | | | | 2590-2889 |
| | | | | | 3602-3771 |
| | | | | | 4339-5017 |
| | | | | | 6295-6485 |
| | | | | | 6909-6998 |
| | | | | | 7521-8143 |
| | | | | | 8433-8529 |
| | | | | | 9637-9899 |
| | | | | | 10563-10925 |
| | | | | | 11304-11768 |
| | | | | | 12104-12617 |
| | | | | | 13487-13648 |
| | | | | | 13989-14159 |
| | | | | | 15246-15413 |
| | | | | | 15996-16140 |
| | | | | | 16890-17029 |
| | | | | | 18712-20020 |
| HUVCU71 | 1615 | 968663 | AC005410 | 8224 | 1-1213 |
| | | | | | 1372-2983 |
| | | | | | 3192-3439 |
| | | | | | 4265-5250 |
| HUVCW62 | 1616 | 535361 | AL139384 | 8225 | 1-399 |
| HUVCW62 | 1616 | 535361 | AL139384 | 8226 | 1-245 |
| HUVCW62 | 1616 | 535361 | AL139384 | 8227 | 1-115 |
| HUVDB28 | 1617 | 535006 | AL078634 | 8228 | 1-139 |
| | | | | | 234-735 |
| | | | | | 1948-2046 |
| | | | | | 6359-6449 |
| | | | | | 8088-8267 |
| | | | | | 11305-11788 |
| | | | | | 11843-11990 |
| | | | | | 12405-12744 |
| HUVDB28 | 1617 | 535006 | AL078634 | 8229 | 1-312 |
| HUVDB53 | 1618 | 509119 | AC012265 | 8230 | 1-340 |
| HUVDD09 | 1620 | 707061 | AC020661 | 8231 | 1-143 |
| | | | | | 2042-2218 |
| | | | | | 2970-3063 |
| | | | | | 3209-3270 |
| | | | | | 3343-5080 |
| | | | | | 6183-6473 |
| | | | | | 6577-8040 |
| HUVDD09 | 1620 | 707061 | AC022835 | 8232 | 1-191 |
| HUVDD09 | 1620 | 707061 | AC025166 | 8233 | 1-1464 |
| HUVDD09 | 1620 | 707061 | AC022835 | 8234 | 1-310 |
| HUVDD09 | 1620 | 707061 | AC025166 | 8235 | 1-291 |
| HUVDD09 | 1620 | 707061 | AC020661 | 8236 | 1-270 |
| HUVDD09 | 1620 | 707061 | AC025166 | 8237 | 1-270 |
| HUVDF84 | 1622 | 526248 | AC005319 | 8238 | 1-500 |
| HUVDF84 | 1622 | 526248 | AC005319 | 8239 | 1-195 |
| HUVDI28 | 1624 | 530558 | AC019221 | 8240 | 1-1047 |
| | | | | | 1216-1744 |
| | | | | | 1897-2018 |
| | | | | | 2020-2411 |
| | | | | | 3079-3142 |
| | | | | | 4571-5609 |
| | | | | | 5750-5845 |
| | | | | | 7019-7362 |
| | | | | | 9012-9414 |
| | | | | | 10076-10170 |
| | | | | | 12381-12686 |
| | | | | | 13742-15856 |
| HUVDI28 | 1624 | 530558 | AC019072 | 8241 | 1-1043 |
| HUVDI28 | 1624 | 530558 | AC019221 | 8242 | 1-309 |
| HUVDI28 | 1624 | 530558 | AC019072 | 8243 | 1-526 |
| | | | | | 681-801 |
| HUVDL30 | 1626 | 530387 | AC012307 | 8244 | 1-412 |
| | | | | | 472-1744 |
| HUVDL30 | 1626 | 530387 | AC012307 | 8245 | 1-735 |
| HUVDO25 | 1627 | 679477 | AC023247 | 8246 | 1-639 |
| | | | | | 1201-1344 |
| HUVDO25 | 1627 | 679477 | AC004134 | 8247 | 1-639 |
| | | | | | 1201-1344 |
| HUVDO25 | 1627 | 679A77 | AC023247 | 8248 | 1-443 |
| HUVDO25 | 1627 | 679A77 | AC004134 | 8249 | 1-443 |
| HUVDP95 | 1628 | 530386 | AC016901 | 8250 | 1-102 |
| | | | | | 525-581 |
| | | | | | 2057-2142 |
| | | | | | 4836-4922 |
| | | | | | 7896-8518 |
| | | | | | 8902-9266 |
| | | | | | 9524-9956 |
| | | | | | 10085-10276 |
| | | | | | 10366-10523 |
| | | | | | 11312-11968 |
| HUVDP95 | 1628 | 530386 | AC020566 | 8251 | 1-622 |
| | | | | | 1005-1369 |
| | | | | | 1627-2060 |
| | | | | | 2189-2377 |
| | | | | | 2470-2626 |
| | | | | | 3415-4071 |
| HUVDP95 | 1628 | 530386 | AC016594 | 8252 | 1-102 |
| | | | | | 525-581 |
| | | | | | 2057-2142 |
| | | | | | 4836-4922 |
| | | | | | 7897-8519 |
| | | | | | 8903-9267 |
| | | | | | 9525-9957 |
| | | | | | 10086-10277 |
| | | | | | 10367-10524 |
| | | | | | 11313-11969 |
| | | | | | 12174-12740 |
| | | | | | 13281-14490 |
| | | | | | 15022-15220 |
| | | | | | 17186-17508 |
| | | | | | 17563-17615 |
| | | | | | 17759-18259 |
| | | | | | 18289-20530 |
| HUVDP95 | 1628 | 530386 | AC016901 | 8253 | 1-561 |
| HUVDP95 | 1628 | 530386 | AC020566 | 8254 | 1-671 |
| HUVDP95 | 1628 | 530386 | AC016901 | 8255 | 1-204 |
| HUVDP95 | 1628 | 530386 | AC020566 | 8256 | 1-183 |
| HUVDP95 | 1628 | 530386 | AC016594 | 8257 | 1-204 |
| HUVDP95 | 1628 | 530386 | AC016594 | 8258 | 1-1093 |
| | | | | | 1494-2538 |
| HUVDS26 | 1629 | 958027 | AC004111 | 8259 | 1-575 |
| HUVDS26 | 1629 | 958027 | AC004111 | 8260 | 1-327 |
| HUVDS26 | 1629 | 958027 | AC004111 | 8261 | 1-814 |
| HUVDU51 | 1630 | 868660 | AC025220 | 8262 | 1-289 |
| HUVDU51 | 1630 | 868660 | AC025225 | 8263 | 1-289 |
| HUVDU51 | 1630 | 868660 | AL009183 | 8264 | 1-638 |
| | | | | | 1698-1986 |
| | | | | | 2294-2509 |
| | | | | | 2514-2585 |
| | | | | | 3279-3605 |
| | | | | | 4335-5324 |
| | | | | | 5604-5876 |
| HUVDU51 | 1630 | 868660 | AC025225 | 8265 | 1-216 |
| | | | | | 221-292 |
| HUVDU51 | 1630 | 868660 | AC025220 | 8266 | 1-638 |
| HUVDU51 | 1630 | 868660 | AC025225 | 8267 | 1-637 |
| HUVDU51 | 1630 | 868660 | AL009183 | 8268 | 1-116 |
| HUVDU51 | 1630 | 868660 | AL009183 | 8269 | 1-122 |
| HUVED54 | 1632 | 534783 | AL035405 | 8270 | 1-372 |
| HUVED54 | 1632 | 534783 | AL035405 | 8271 | 1-261 |
| HUVED54 | 1632 | 534783 | AL035405 | 8272 | 1-102 |
| HUVED65 | 1633 | 527937 | AC036127 | 8273 | 1-458 |
| HUVED65 | 1633 | 527937 | AC036127 | 8274 | 1-149 |
| HUVED65 | 1633 | 527937 | AC036127 | 8275 | 1-416 |
| HUVFA55 | 1635 | 868779 | AC007378 | 8276 | 1-529 |
| HUVFA55 | 1635 | 868779 | AC007378 | 8277 | 1-208 |
| HUVFB48 | 1636 | 967815 | AL390961 | 8278 | 1-321 |
| HUVFB48 | 1636 | 967815 | AC022245 | 8279 | 1-342 |
| HUVFB48 | 1636 | 967815 | AL390961 | 8280 | 1-142 |
| HUVFB69 | 1637 | 868782 | AC022575 | 8281 | 1-620 |
| HUVFB69 | 1637 | 868782 | AC016032 | 8282 | 1-620 |
| HUVFB69 | 1637 | 868782 | AC073344 | 8283 | 1-620 |
| HUVFB69 | 1637 | 868782 | AC016032 | 8284 | 1-346 |
| HUVFB69 | 1637 | 868782 | AC073344 | 8285 | 1-346 |
| HUVFC07 | 1638 | 952080 | AC015900 | 8286 | 1-1535 |
| HUVFH03 | 1639 | 922064 | AC069496 | 8287 | 1-397 |
| HUVFH03 | 1639 | 922064 | AC069496 | 8288 | 1-525 |
| HUVFH32 | 1640 | 934003 | AC011077 | 8289 | 1-339 |
| HUVFH32 | 1640 | 934003 | AP001016 | 8290 | 1-339 |
| HUVFH32 | 1640 | 934003 | AP002381 | 8291 | 1-339 |
| HUVFH32 | 1640 | 934003 | AP001016 | 8292 | 1-248 |
| HUVFH32 | 1640 | 934003 | AC011077 | 8293 | 1-248 |
| HUVFH32 | 1640 | 934003 | AP002381 | 8294 | 1-248 |
| HUVFI03 | 1641 | 868776 | AC024712 | 8295 | 1-171 |
| HUVFK11 | 1642 | 965765 | AC055840 | 8296 | 1-95 |
| HUVFK11 | 1642 | 965765 | AL353807 | 8297 | 1-478 |
| HUVFK11 | 1642 | 965765 | AL353807 | 8298 | 1-459 |
| HUVFK11 | 1642 | 965765 | AL353807 | 8299 | 1-740 |
| HUVFK58 | 1643 | 868784 | AC024578 | 8300 | 1-787 |
| HUVFK58 | 1643 | 868784 | AC024578 | 8301 | 1-365 |
| HUVFK58 | 1643 | 868784 | AC024578 | 8302 | 1-455 |
| HUVFL71 | 1644 | 958059 | AL354673 | 8303 | 1-529 |
| HUVFL71 | 1644 | 958059 | AC024013 | 8304 | 1-529 |
| HUVFT28 | 1647 | 870617 | AC012600 | 8305 | 1-507 |
| | | | | | 2756-3737 |
| | | | | | 3755-4805 |
| HUVFT28 | 1647 | 870617 | AC012515 | 8306 | 1-604 |
| | | | | | 2978-3484 |
| | | | | | 5369-5489 |
| | | | | | 5732-6714 |
| | | | | | 6732-8593 |
| | | | | | 9071-9596 |
| | | | | | 10007-10688 |
| | | | | | 11077-11936 |
| | | | | | 11999-12352 |
| | | | | | 12393-12826 |
| | | | | | 12889-13172 |
| | | | | | 14459-14905 |
| | | | | | 15045-15332 |
| | | | | | 15471-15604 |
| | | | | | 16006-16132 |
| | | | | | 16983-17141 |
| | | | | | 18515-20238 |
| | | | | | 20365-20760 |
| | | | | | 21907-22420 |
| | | | | | 22584-23772 |
| | | | | | 24017-24060 |
| | | | | | 24693-24857 |
| | | | | | 25545-25576 |
| HUVFT28 | 1647 | 870617 AC008116 | 8307 | 1-604 | |
| | | | | | 1378-2594 |
| | | | | | 2980-3486 |
| | | | | | 5371-5491 |
| | | | | | 5735-6716 |
| | | | | | 6734-8595 |
| | | | | | 9073-9598 |
| | | | | | 10009-10690 |
| | | | | | 11079-11938 |
| | | | | | 12001-12354 |
| | | | | | 12395-12828 |
| | | | | | 12891-13175 |
| | | | | | 14461-14907 |
| | | | | | 15047-15334 |
| | | | | | 15473-15606 |
| | | | | | 16008-16134 |
| | | | | | 16985-17143 |
| | | | | | 18110-20236 |
| | | | | | 20363-20758 |
| | | | | | 21905-22418 |
| | | | | | 22582-23770 |
| | | | | | 24691-24846 |
| | | | | | 25543-25574 |
| HUVFT28 | 1647 | 870617 | AC012600 | 8308 | 1-1221 |
| HUVFT28 | 1647 | 870617 | AC012515 | 8309 | 1-107 |
| HUVFT28 | 1647 | 870617 | AC012515 | 8310 | 1-163 |
| HUVFT28 | 1647 | 870617 | AC008116 | 8311 | 1-163 |
| HUVFT28 | 1647 | 870617 | AC008116 | 8312 | 1-104 |
| HUVGZ77 | 1650 | 909169 | AC040977 | 8313 | 1-32 |
| | | | | | 411-784 |
| | | | | | 1015-1238 |
| HUVGZ77 | 1650 | 909169 | AC015918 | 8314 | 1-32 |
| | | | | | 411-784 |
| | | | | | 1015-1238 |
| | | | | | 1331-1701 |
| | | | | | 2014-2138 |
| HUVHB35 | 1651 | 868751 | AC005683 | 8315 | 1-196 |
| | | | | | 302-372 |
| | | | | | 839-1057 |
| | | | | | 1691-1918 |
| | | | | | 2676-2791 |
| | | | | | 3763-4031 |
| | | | | | 5738-6460 |
| | | | | | 7068-7266 |
| | | | | | 8789-9240 |
| | | | | | 10436-10852 |
| | | | | | 13855-14025 |
| | | | | | 17307-17855 |
| | | | | | 18105-18217 |
| | | | | | 22503-23073 |
| | | | | | 23416-24726 |
| | | | | | 25238-25727 |
| | | | | | 27347-27779 |
| | | | | | 34463-34627 |
| | | | | | 34784-36975 |
| HUVHB35 | 1651 | 868751 | AF172277 | 8316 | 1-196 |
| | | | | | 302-372 |
| | | | | | 896-1074 |
| | | | | | 1699-1926 |
| | | | | | 2684-2799 |
| | | | | | 3774-4042 |
| | | | | | 5750-6472 |
| | | | | | 7044-7312 |
| | | | | | 8835-9286 |
| | | | | | 10482-10898 |
| | | | | | 13901-14071 |
| | | | | | 17353-17901 |
| | | | | | 18151-18263 |
| | | | | | 22833-23407 |
| | | | | | 23750-25060 |
| | | | | | 25572-26061 |
| | | | | | 27681-28113 |
| | | | | | 34798-34962 |
| | | | | | 35119-37310 |
| HUVHB35 | 1651 | 868751 | AC005683 | 8317 | 1-527 |
| HUVHB35 | 1651 | 868751 | AF172277 | 8318 | 1-527 |
| HUVHB59 | 1652 | 963129 | AC011448 | 8319 | 1-406 |
| | | | | | 7558-7707 |
| | | | | | 8256-8999 |
| | | | | | 9619-10069 |
| | | | | | 10534-11483 |
| | | | | | 12567-13076 |
| | | | | | 13206-13306 |
| | | | | | 14715-15081 |
| | | | | | 15383-16006 |
| | | | | | 17113-17421 |
| | | | | | 20025-20379 |
| | | | | | 20494-21037 |
| | | | | | 21820-22049 |
| | | | | | 25986-26138 |
| | | | | | 26738-27046 |
| | | | | | 30607-30829 |
| | | | | | 31608-32051 |
| | | | | | 32666-33121 |
| | | | | | 33412-33853 |
| | | | | | 33981-34267 |
| | | | | | 34795-34926 |
| | | | | | 36372-36867 |
| | | | | | 37528-38224 |
| | | | | | 38263-38433 |
| | | | | | 39877-40078 |
| | | | | | 40299-40555 |
| | | | | | 40657-40936 |
| | | | | | 43330-43632 |
| | | | | | 44090-44737 |
| | | | | | 46930-47485 |
| | | | | | 47555-51146 |
| | | | | | 53945-54090 |
| | | | | | 54624-55209 |
| | | | | | 55358-55711 |
| | | | | | 55751-57192 |
| | | | | | 57277-57864 |
| | | | | | 57977-58467 |
| | | | | | 58604-58920 |
| | | | | | 59772-59859 |
| | | | | | 59916-60034 |
| | | | | | 61018-61515 |
| | | | | | 61960-62306 |
| | | | | | 63123-63432 |
| | | | | | 63712-63837 |
| | | | | | 63999-64308 |
| | | | | | 66414-66594 |
| | | | | | 67713-67793 |
| | | | | | 68533-69307 |
| | | | | | 69537-69730 |
| HUVHB59 | 1652 | 963129 | AC011448 | 8320 | 1-544 |
| HUVHB59 | 1652 | 963129 | AC011448 | 8321 | 1-293 |
| HUVHG80 | 1655 | 968507 | AC002076 | 8322 | 1-415 |
| HUVHG80 | 1655 | 968507 | AC002076 | 8323 | 1-1551 |
| HUVHG80 | 1655 | 968507 | AC002076 | 8324 | 1-118 |
| HUVHI07 | 1656 | 952090 | AC073334 | 8325 | 1-1383 |
| HUVHI07 | 1656 | 952090 | AC073334 | 8326 | 1-192 |
| HUVHU74 | 1658 | 868649 | AL355855 | 8327 | 1-478 |
| HUVHU74 | 1658 | 868649 | AC025405 | 8328 | 1-478 |
| HUVHU74 | 1658 | 868649 | AL355855 | 8329 | 1-1183 |
| HUVHU74 | 1658 | 868649 | AC025405 | 8330 | 1-1182 |
| HUVHU74 | 1658 | 868649 | AL355855 | 8331 | 1-443 |
| HUVHU74 | 1658 | 868649 | AC025405 | 8332 | 1-442 |
| HVCBV04 | 1660 | 925844 | AL358172 | 8333 | 1-717 |
| HVCBV04 | 1660 | 925844 | AL136370 | 8334 | 1-717 |
| HVCBV04 | 1660 | 925844 | AL358172 | 8335 | 1-356 |
| HVCBV04 | 1660 | 925844 | AL358172 | 8336 | 1-647 |
| HVCBV04 | 1660 | 925844 | AL136370 | 8337 | 1-356 |
| HVCBV04 | 1660 | 925844 | AL136370 | 8338 | 1-647 |
| HVCCK04 | 1662 | 925796 | AC009861 | 8339 | 1-1379 |
| HVCCK04 | 1662 | 925796 | AC016949 | 8340 | 1-1381 |
| HVCCK04 | 1662 | 925796 | AC009861 | 8341 | 1-743 |
| HVCCK04 | 1662 | 925796 | AC009861 | 8342 | 1-855 |
| HVCCK04 | 1662 | 925796 | AC016949 | 8343 | 1-855 |
| HVCCK04 | 1662 | 925796 | AC016949 | 8344 | 1-86 |
| | | | | | 589-770 |
| | | | | | 1468-2212 |
| | | | | | 2994-5375 |
| | | | | | 5393-7226 |
| | | | | | 7602-9856 |
| | | | | | 10092-10593 |
| | | | | | 11034-11679 |
| | | | | | 13908-14759 |
| HVVBK45 | 1667 | 964102 | AL162853 | 8345 | 1-3940 |
| HVVBK45 | 1667 | 964102 | AC068175 | 8346 | 1-1900 |
| HVVBK45 | 1667 | 964102 | Z98172 | 8347 | 1-100 |
| | | | | | 3320-6223 |
| | | | | | 6258-7123 |
| HVVBK45 | 1667 | 964102 | AL162853 | 8348 | 1-476 |
| HVVBK45 | 1667 | 964102 | AL162853 | 8349 | 1-1290 |
| | | | | | 1418-2787 |
| HVVBK45 | 1667 | 964102 | AC068175 | 8350 | 1-865 |
| HVVBK72 | 1668 | 933167 | AC008947 | 8351 | 1-125 |
| | | | | | 1365-2751 |
| HVVBK72 | 1668 | 933167 | AC016612 | 8352 | 1-633 |
| | | | | | 3297-3421 |
| | | | | | 4587-5973 |
| HVVBK72 | 1668 | 933167 | AC008860 | 8353 | 1-633 |
| | | | | | 3297-3421 |
| | | | | | 4588-5974 |
| HVVBK72 | 1668 | 933176 | AC008947 | 8354 | 1-489 |
| HVVBK72 | 1668 | 933176 | AC016612 | 8355 | 1-408 |
| HVVBK72 | 1668 | 933176 | AC016612 | 8356 | 1-500 |
| HVVBK72 | 1668 | 933176 | AC008860 | 8357 | 1-408 |
| HVVBK72 | 1668 | 933176 | AC008860 | 8358 | 1-500 |
| HVVBV44 | 1669 | 917559 | AC008719 | 8359 | 1-242 |
| HVVCO01 | 1670 | 913996 | AC053484 | 8360 | 1-889 |
| HVVCO01 | 1670 | 913996 | AC023961 | 8361 | 1-889 |
| HVVBM06 | 1674 | 933528 | AF188031 | 8362 | 1-186 |
| | | | | | 744-865 |
| | | | | | 3969-4014 |
| | | | | | 4551-4771 |
| | | | | | 5464-5965 |
| HVVBM06 | 1674 | 933528 | AF188031 | 8363 | 1-481 |
| HVVBM06 | 1674 | 933528 | AF188031 | 8364 | 1-292 |
| HUVHL82 | 1675 | 912011 | AC004596 | 8365 | 1-70 |
| | | | | | 786-966 |
| | | | | | 1113-1199 |
| | | | | | 1510-1580 |
| | | | | | 1841-1904 |
| | | | | | 2162-2231 |
| | | | | | 2325-2486 |
| | | | | | 2586-6603 |
| | | | | | 6650-8125 |
| | | | | | 8240-8441 |
| | | | | | 8573-10040 |
| HUVHL82 | 1675 | 912011 | AC004596 | 8366 | 1-386 |
| HUVHL82 | 1675 | 912011 | AC004596 | 8367 | 1-519 |
| | | | | | 1032-1253 |
| | | | | | 3288-3977 |
| | | | | | 4296-5037 |
| | | | | | 5065-6012 |
| | | | | | 6068-6617 |
| | | | | | 7947-8275 |
| | | | | | 8567-10680 |
| HUVHI06 | 1676 | 952479 | AP000876 | 8368 | 1-1990 |
| | | | | | 2006-5890 |
| HUVHI06 | 1676 | 952479 | AC006238 | 8369 | 1-2271 |
| | | | | | 2287-6172 |
| | | | | | 7457-7798 |
| | | | | | 8669-9191 |
| | | | | | 9453-9805 |
| HUVHI06 | 1676 | 952479 | AC006238 | 8370 | 1-439 |
| HUVGP05 | 1677 | 930892 | AC009871 | 8371 | 1-448 |
| HUVGP05 | 1677 | 930892 | AC009812 | 8372 | 1-555 |
| HUVGP05 | 1677 | 930892 | AC009871 | 8373 | 1-1510 |
| HUVGP05 | 1677 | 930892 | AC009812 | 8374 | 1-1510 |
| HUVFE03 | 1680 | 922889 | AL357621 | 8375 | 1-226 |
| | | | | | 244-695 |
| HUVFE03 | 1680 | 922889 | AL357621 | 8376 | 1-250 |
| HUVDH61 | 1685 | 526590 | AC006129 | 8377 | 1-438 |
| HUVCU26 | 1686 | 974232 | AC005342 | 8378 | 1-695 |
| HUVCU26 | 1686 | 974232 | AC005342 | 8379 | 1-416 |
| HUVCU26 | 1686 | 974232 | AC005342 | 8380 | 1-275 |
| HUVBC21 | 1688 | 671479 | AL136170 | 8381 | 1-2421 |
| | | | | | 2585-3666 |
| | | | | | 3742-3807 |
| | | | | | 3903-4614 |
| | | | | | 4708-4785 |
| HUVBC21 | 1688 | 671479 | AL136170 | 8382 | 1-77 |
| | | | | | 1950-2416 |
| | | | | | 2558-2959 |
| | | | | | 3957-4319 |
| HUVAA46 | 1689 | 667943 | AL035400 | 8383 | 1-602 |
| | | | | | 1503-1697 |
| | | | | | 3827-4399 |
| | | | | | 4614-5805 |
| HUNAK12 | 1690 | 839574 | AC027778 | 8384 | 1-454 |
| HUNAK12 | 1690 | 839574 | AC006327 | 8385 | 1-454 |
| HUNAK12 | 1690 | 839574 | AC027778 | 8386 | 1-173 |
| HUNAK12 | 1690 | 839574 | AC006327 | 8387 | 1-285 |
| HUNAG41 | 1691 | 711543 | AC015480 | 8388 | 1-564 |
| HUNAG41 | 1691 | 711543 | AC023138 | 8389 | 1-564 |
| HUNAF22 | 1692 | 800452 | AC006222 | 8390 | 1-442 |
| HUNAD10 | 1697 | 968590 | AC073349 | 8391 | 1-1351 |
| HUNAD10 | 1697 | 968590 | AC073349 | 8392 | 1-147 |
| HUNAD10 | 1697 | 968590 | AC073349 | 8393 | 1-746 |
| HUNAC68 | 1698 | 753817 | AL353727 | 8394 | 1-580 |
| | | | | | 4850-5325 |
| | | | | | 5800-6282 |
| | | | | | 6475-6544 |
| | | | | | 6648-6977 |
| | | | | | 8563-11289 |
| | | | | | 12142-12783 |
| | | | | | 12858-13147 |
| | | | | | 13154-13434 |
| | | | | | 13613-13740 |
| | | | | | 15488-15743 |
| | | | | | 15955-15992 |
| | | | | | 16231-16359 |
| | | | | | 16374-16745 |
| | | | | | 16974-17032 |
| | | | | | 17437-17545 |
| | | | | | 17841-17880 |
| | | | | | 18596-18751 |
| | | | | | 19250-19371 |
| HUNAC68 | 1698 | 753817 | AL358790 | 8395 | 1-36 |
| | | | | | 118-200 |
| | | | | | 268-2563 |
| HUNAC68 | 1698 | 753817 | AC009144 | 8396 | 1-380 |
| | | | | | 1161-1306 |
| | | | | | 2510-3089 |
| | | | | | 7359-7834 |
| | | | | | 8309-8791 |
| | | | | | 8984-9053 |
| | | | | | 9157-9486 |
| | | | | | 11072-13798 |
| | | | | | 14651-15292 |
| | | | | | 15367-15656 |
| | | | | | 15663-15943 |
| | | | | | 16122-16249 |
| | | | | | 17998-18253 |
| | | | | | 18465-18502 |
| | | | | | 18741-18869 |
| | | | | | 18884-19255 |
| | | | | | 19484-19542 |
| | | | | | 20242-20390 |
| | | | | | 21106-21261 |
| | | | | | 21755-21893 |
| | | | | | 23252-23319 |
| | | | | | 25611-25701 |
| | | | | | 26408-26563 |
| | | | | | 26828-27037 |
| | | | | | 27045-27154 |
| HUNAC68 | 1698 | 753817 | AL358790 | 8397 | 1-376 |
| HUNAC68 | 1698 | 753817 | AL358790 | 8398 | 1-103 |
| HUNAB76 | 1699 | 968754 | AC019250 | 8399 | 1-726 |
| HUNAB76 | 1699 | 968754 | AC024119 | 8400 | 1-726 |
| HUNAB76 | 1699 | 968754 | AL049715 | 8401 | 1-299 |
| HUNAB76 | 1699 | 968754 | AC019250 | 8402 | 1-129 |
| HUNAB76 | 1699 | 968754 | AC019250 | 8403 | 1-453 |
| HUNAB76 | 1699 | 968754 | AC024119 | 8404 | 1-469 |
| HUNAB76 | 1699 | 968754 | AC024119 | 8405 | 1-582 |
| HUNAB76 | 1699 | 968754 | AL049715 | 8406 | 1-469 |
| HUNAB76 | 1699 | 968754 | AL049715 | 8407 | 1-539 |
| HUNAB42 | 1700 | 714264 | AL121585 | 8408 | 1-775 |
| HUNAB42 | 1700 | 714264 | AL121585 | 8409 | 1-79 |
| | | | | | 1720-2905 |
| HUKFS69 | 1701 | 754186 | AL356852 | 8410 | 1-592 |
| HUKFS69 | 1701 | 754186 | AC068046 | 8411 | 1-766 |
| | | | | | 860-1860 |
| | | | | | 1960-2625 |
| HUKFS69 | 1701 | 754186 | AL021068 | 8412 | 1-766 |
| | | | | | 860-1860 |
| | | | | | 1960-2625 |
| HUKFS69 | 1701 | 754186 | AC068046 | 8413 | 1-467 |
| HUKFS69 | 1701 | 754186 | AL356852 | 8414 | 1-602 |
| HUKFS69 | 1701 | 754186 | AC068046 | 8415 | 1-602 |
| HUKFS69 | 1701 | 754186 | AL021068 | 8416 | 1-467 |
| HUKFL89 | 1702 | 574525 | AC053531 | 8417 | 1-643 |
| HUXFL89 | 1702 | 574525 | AC025788 | 8418 | 1-643 |
| HUKFL89 | 1702 | 574525 | AC026250 | 8419 | 1-516 |
| HUKFL89 | 1702 | 574525 | AC026250 | 8420 | 1-388 |
| HUKFL71 | 1703 | 760581 | AC073057 | 8421 | 1-241 |
| HUKFL71 | 1703 | 760581 | AC073057 | 8422 | 1-105 |
| HUKFL52 | 1704 | 574523 | AC002302 | 8423 | 1-851 |
| HUKFE56 | 1706 | 574381 | AC067901 | 8424 | 1-570 |
| HUKFE56 | 1706 | 574381 | AP002822 | 8425 | 1-576 |
| HUKFE56 | 1706 | 574381 | AC067901 | 8426 | 1-3799 |
| HUKFE56 | 1706 | 574381 | AP002822 | 8427 | 1-3799 |
| HUKFD95 | 1707 | 796014 | AC044881 | 8428 | 1-610 |
| | | | | | 661-1115 |
| HUKFD95 | 1707 | 796014 | AC026292 | 8429 | 1-454 |
| HUKFD95 | 1707 | 796014 | AC026291 | 8430 | 1-610 |
| | | | | | 661-1114 |
| HUKFD95 | 1707 | 796014 | AC044881 | 8431 | 1-689 |
| HUKFD95 | 1707 | 796014 | AC026291 | 8432 | 1-689 |
| HUKFD95 | 1707 | 796014 | AC026291 | 8433 | 1-249 |
| HUKEY01 | 1708 | 921504 | AC023479 | 8434 | 1-878 |
| HUKEY01 | 1708 | 921504 | AL353151 | 8435 | 1-1947 |
| HUKEY01 | 1708 | 921504 | AC011871 | 8436 | 1-464 |
| HUKEY01 | 1708 | 921504 | AL136231 | 8437 | 1-1947 |
| | | | | | 4426-5048 |
| | | | | | 6590-6760 |
| | | | | | 7264-7384 |
| | | | | | 7980-8163 |
| HUKEY01 | 1708 | 921504 | AC023479 | 8438 | 1-297 |
| HUKEY01 | 1708 | 921504 | AL353151 | 8439 | 1-966 |
| HUKEY01 | 1708 | 921504 | AC011871 | 8440 | 1-508 |
| HUKEY01 | 1708 | 921504 | AL136231 | 8441 | 1-304 |
| HUKER62 | 1709 | 772501 | AC069076 | 8442 | 1-116 |
| | | | | | 486-680 |
| | | | | | 1904-2035 |
| | | | | | 2615-2745 |
| | | | | | 2944-3073 |
| | | | | | 3778-4744 |
| | | | | | 5131-5234 |
| | | | | | 5328-6647 |
| HUKER62 | 1709 | 772501 | AC004754 | 8443 | 1-108 |
| | | | | | 415-503 |
| | | | | | 559-667 |
| | | | | | 1308-1458 |
| | | | | | 2640-2791 |
| | | | | | 2981-3442 |
| | | | | | 3936-4211 |
| | | | | | 4832-5135 |
| | | | | | 7065-7155 |
| | | | | | 7723-7848 |
| | | | | | 8596-9232 |
| | | | | | 9936-10061 |
| | | | | | 10421-10615 |
| | | | | | 11839-11970 |
| | | | | | 12549-12679 |
| | | | | | 12878-13007 |
| | | | | | 13714-14680 |
| | | | | | 15067-15170 |
| | | | | | 15264-16579 |
| HUKER62 | 1709 | 772501 | AC069076 | 8444 | 1-637 |
| HUKER62 | 1709 | 772501 | AC004754 | 8445 | 1-357 |
| HUKDY02 | 1711 | 920815 | AC069195 | 8446 | 1-488 |
| HUKDY02 | 1711 | 920815 | AC012306 | 8447 | 1-1805 |
| HUKDY02 | 1711 | 920815 | AC012306 | 8448 | 1-490 |
| HUKCP30 | 1714 | 690933 | AC011477 | 8449 | 1-580 |
| HUKCP30 | 1714 | 690933 | AC011477 | 8450 | 1-584 |
| HUKCO11 | 1715 | 967742 | AC022972 | 8451 | 1-96 |
| | | | | | 511-867 |
| | | | | | 3365-3592 |
| | | | | | 5373-5521 |
| | | | | | 6677-6961 |
| | | | | | 7423-7816 |
| | | | | | 7924-8345 |
| HUKCO11 | 1715 | 967742 | AC022972 | 8452 | 1-736 |
| HUKCC25 | 1717 | 529723 | AC007378 | 8453 | 1-259 |
| HUKAT59 | 1719 | 628540 | AL365274 | 8454 | 1-1254 |
| HUKAM19 | 1722 | 672076 | AC022022 | 8455 | 1-318 |
| HUKAM19 | 1722 | 672076 | AC022022 | 8456 | 1-297 |
| HUKAL44 | 1724 | 716927 | AC073462 | 8457 | 1-46 |
| | | | | | 2717-4929 |
| | | | | | 4991-5459 |
| | | | | | 5581-5827 |
| | | | | | 6813-7648 |
| | | | | | 8152-8598 |
| | | | | | 8796-9240 |
| | | | | | 10094-10567 |
| | | | | | 10604-11064 |
| | | | | | 11694-11815 |
| | | | | | 12072-12344 |
| | | | | | 12700-12807 |
| HUKAL44 1724 | 716927 | AC073462 | 8458 | 1-152 | |
| HUKAJ91 | 1725 | 790487 | AC024670 | 8459 | 1-1661 |
| HUKAJ91 | 1725 | 790487 | AC020746 | 8460 | 1-1661 |
| HUKAJ91 | 1725 | 790487 | AC024670 | 8461 | 1-1032 |
| HUKAJ91 | 1725 | 790487 | AC020746 | 8462 | 1-1032 |
| HUKAB63 | 1728 | 625273 | AC068451 | 8463 | 1-800 |
| | | | | | 870-1610 |
| HUKAB63 | 1728 | 625273 | AC068451 | 8464 | 1-133 |
| HUKAB25 | 1729 | 677470 | AC025802 | 8465 | 1-531 |
| HUKAB25 | 1729 | 677470 | AC025624 | 8466 | 1-531 |
| HUKAB25 | 1729 | 677470 | AC025802 | 8467 | 1-2446 |
| HUKAB25 | 1729 | 677470 | AC025624 | 8468 | 1-125 |
| HUKAB25 | 1729 | 677470 | AC025802 | 8469 | 1-120 |
| HUKAB25 | 1729 | 677470 | AC025624 | 8470 | 1-2446 |
| HUKAA54 | 1730 | 503630 | AL022325 | 8471 | 1-154 |
| | | | | | 1810-1865 |
| | | | | | 1947-2233 |
| | | | | | 2391-2757 |
| | | | | | 2828-4196 |
| | | | | | 4215-4421 |
| | | | | | 4990-5074 |
| | | | | | 5133-5294 |
| | | | | | 5676-6489 |
| | | | | | 6529-7035 |
| HUKAA54 | 1730 | 503630 | AL031588 | 8472 | 1-154 |
| | | | | | 1810-1865 |
| | | | | | 1947-2233 |
| | | | | | 2391-2757 |
| | | | | | 2828-4196 |
| | | | | | 4215-4421 |
| | | | | | 4990-5074 |
| | | | | | 5133-5294 |
| | | | | | 5676-6489 |
| | | | | | 6529-7035 |
| HUKAA54 | 1730 | 503630 | AL022325 | 8473 | 1-875 |
| HUKAA54 | 1730 | 503630 | AL031588 | 8474 | 1-875 |
| HUDBE95 | 1734 | 795796 | AC019073 | 8475 | 1-780 |
| | | | | | 5430-5615 |
| | | | | | 7641-7685 |
| | | | | | 10826-10887 |
| | | | | | 11255-11332 |
| | | | | | 12359-12669 |
| | | | | | 13590-13776 |
| | | | | | 16097-16197 |
| | | | | | 16225-16569 |
| | | | | | 17409-17588 |
| | | | | | 17614-18145 |
| | | | | | 18212-18277 |
| | | | | | 20025-20135 |
| | | | | | 21203-21289 |
| | | | | | 21668-21798 |
| | | | | | 22067-22836 |
| | | | | | 22902-23233 |
| | | | | | 23289-24983 |
| HUDBE95 | 1734 | 795796 | AC009079 | 8476 | 1-780 |
| | | | | | 1966-2659 |
| | | | | | 5432-5617 |
| | | | | | 7643-7687 |
| | | | | | 10830-10891 |
| | | | | | 11259-11336 |
| | | | | | 12363-12673 |
| | | | | | 13594-13780 |
| | | | | | 16101-16201 |
| | | | | | 16229-16573 |
| | | | | | 17510-17593 |
| | | | | | 17618-18149 |
| | | | | | 18216-18281 |
| | | | | | 20020-20130 |
| | | | | | 21198-21284 |
| | | | | | 21663-21793 |
| | | | | | 22060-22829 |
| | | | | | 22895-23226 |
| | | | | | 23282-24977 |
| HUDBE95 | 1734 | 795796 | AC019073 | 8477 | 1-464 |
| HUDBE95 | 1734 | 795796 | AC009079 | 8478 | 1-454 |
| HUDAK19 | 1740 | 671974 | AC024249 | 8479 | 1-882 |
| | | | | | 1119-1964 |
| HTTKC85 | 1742 | 956206 | AC007246 | 8480 | 1-445 |
| HTTKC85 | 1742 | 956206 | AC007246 | 8481 | 1-653 |
| HTTKC85 | 1742 | 956206 | AC007246 | 8482 | 1-766 |
| HTTJN26 | 1744 | 869612 | AC010761 | 8483 | 1-545 |
| | | | | | 730-2324 |
| | | | | | 2733-2817 |
| | | | | | 2910-2993 |
| | | | | | 3334-3705 |
| | | | | | 4186-4362 |
| HTTJN26 | 1744 | 869612 | AC010761 | 8484 | 1-158 |
| HTTJN26 | 1744 | 869612 | AC010761 | 8485 | 1-244 |
| HTTIX05 | 1746 | 931024 | AL138955 | 8486 | 1-492 |
| | | | | | 646-1277 |
| | | | | | 1480-2938 |
| HTTIX05 | 1746 | 931024 | AL136104 | 8487 | 1-493 |
| | | | | | 647-1278 |
| | | | | | 1481-2939 |
| HTTIX05 | 1746 | 931024 | AL136104 | 8488 | 1-124 |
| HTTIN11 | 1749 | 965920 | AC073580 | 8489 | 1-815 |
| HTTIN11 | 1749 | 965920 | AL109916 | 8490 | 1-815 |
| HTTIN11 | 1749 | 965920 | AC073580 | 8491 | 1-436 |
| HTTIN11 | 1749 | 965920 | AC073580 | 8492 | 1-228 |
| HTTIN11 | 1749 | 965920 | AL109916 | 8493 | 1-436 |
| HTTIN11 | 1749 | 965920 | AL109916 | 8494 | 1-228 |
| HTTIE08 | 1750 | 958169 | AC026405 | 8495 | 1-4307 |
| HTTIE08 | 1750 | 958169 | AC020566 | 8496 | 1-575 |
| HTTIE08 | 1750 | 958169 | AC016901 | 8497 | 1-6684 |
| HTTIE08 | 1750 | 958169 | AC020566 | 8498 | 1-34 |
| | | | | | 1050-1364 |
| HTTIE08 | 1750 | 958169 | AC016901 | 8499 | 1-131 |
| | | | | | 1868-2214 |
| | | | | | 2273-2385 |
| | | | | | 3084-3172 |
| HTTIB12 | 1751 | 969568 | AC026576 | 8500 | 1-715 |
| HTTHJ56 | 1752 | 944914 | AC013715 | 8501 | 1-241 |
| | | | | | 407-704 |
| | | | | | 1629-1750 |
| | | | | | 3363-3439 |
| | | | | | 6942-7140 |
| | | | | | 7436-7629 |
| | | | | | 11318-11960 |
| HTTFG12 | 1753 | 751809 | AC068289 | 8502 | 1-1168 |
| HTTFG12 | 1753 | 751809 | AC068289 | 8503 | 1-104 |
| HTTEQ59 | 1755 | 739445 | AC018654 | 8504 | 1-113 |
| | | | | | 608-2226 |
| | | | | | 2955-3217 |
| | | | | | 3366-4135 |
| | | | | | 4148-4842 |
| HTTEQ59 | 1755 | 739445 | AC022073 | 8505 | 1-113 |
| | | | | | 608-2226 |
| | | | | | 2955-3217 |
| | | | | | 3366-4135 |
| | | | | | 4148-4842 |
| HTTEQ01 | 1756 | 917156 | Z83845 | 8506 | 1-684 |
| HTTEQ01 | 1756 | 917156 | Z83845 | 8507 | 1-504 |
| | | | | | 658-707 |
| | | | | | 1786-3045 |
| | | | | | 3351-4099 |
| HTTEO59 | 1757 | 900662 | AC046168 | 8508 | 1-2879 |
| HTTEO53 | 1758 | 728344 | AC074116 | 8509 | 1-280 |
| | | | | | 905-4002 |
| HTTEO53 | 1758 | 728344 | AL162722 | 8510 | 1-280 |
| | | | | | 905-3688 |
| HTTEO53 | 1758 | 728344 | AC074116 | 8511 | 1-99 |
| HTTEO53 | 1758 | 728344 | AL162722 | 8512 | 1-99 |
| HTTEJ56 | 1759 | 573669 | AC068707 | 8513 | 1-134 |
| | | | | | 1054-1276 |
| | | | | | 1688-1740 |
| | | | | | 2572-2856 |
| | | | | | 2936-3012 |
| | | | | | 3748-3941 |
| | | | | | 4846-4969 |
| | | | | | 5395-5467 |
| | | | | | 5675-6158 |
| HTTEJ56 | 1759 | 573669 | AC068707 | 8514 | 1-1098 |
| HTTEB05 | 1760 | 932294 | AL031672 | 8515 | 1-1512 |
| HTTEB05 | 1760 | 932294 | AL031672 | 8516 | 1-489 |
| HTTEB05 | 1760 | 932294 | AL031672 | 8517 | 1-692 |
| | | | | | 4641-5166 |
| | | | | | 6143-6251 |
| | | | | | 8784-8849 |
| | | | | | 11398-11796 |
| | | | | | 11851-12038 |
| | | | | | 13499-13858 |
| | | | | | 14606-14716 |
| | | | | | 17177-17863 |
| | | | | | 19079-19195 |
| | | | | | 19315-19699 |
| | | | | | 20154-20572 |
| | | | | | 22216-22455 |
| | | | | | 22597-23544 |
| HTTDO59 | 1761 | 744438 | AL160282 | 8518 | 1-671 |
| | | | | | 781-2678 |
| | | | | | 2858-2994 |
| | | | | | 3178-3347 |
| | | | | | 3426-3693 |
| HTTDM42 | 1762 | 460948 | AC073619 | 8519 | 1-421 |
| | | | | | 704-793 |
| | | | | | 1909-2043 |
| HTTDM42 | 1762 | 460948 | AL354745 | 8520 | 1-421 |
| | | | | | 704-793 |
| | | | | | 1910-2044 |
| | | | | | 2204-2966 |
| | | | | | 3204-4359 |
| HTTDM42 | 1762 | 460948 | AL354745 | 8521 | 1-904 |
| HTTDM42 | 1762 | 460948 | AL354745 | 8522 | 1-233 |
| BTTDL81 | 1763 | 694222 | AL022328 | 8523 | 1-481 |
| | | | | | 729-828 |
| | | | | | 1094-1193 |
| | | | | | 1289-1396 |
| | | | | | 1553-1617 |
| | | | | | 1798-1929 |
| | | | | | 2089-2152 |
| | | | | | 2247-4100 |
| | | | | | 4146-4381 |
| | | | | | 4518-4577 |
| | | | | | 4865-4961 |
| | | | | | 5157-5580 |
| | | | | | 5725-6072 |
| HTTDL81 | 1763 | 694222 | AL022328 | 8524 | 1-723 |
| HTTDL81 | 1763 | 694222 | AL022328 | 8525 | 1-81 |
| | | | | | 162-241 |
| | | | | | 315-880 |
| | | | | | 1024-1324 |
| | | | | | 1365-1937 |
| | | | | | 2215-2794 |
| HTTDL75 | 1764 | 766551 | AC068013 | 8526 | 1-384 |
| HTTDL75 | 1764 | 766551 | AC068471 | 8527 | 1-697 |
| HTTDL75 | 1764 | 766551 | AC074378 | 8528 | 1-697 |
| HTTDL75 | 1764 | 766551 | AC074378 | 8529 | 1-495 |
| HTTCQ95 | 1766 | 796674 | AC026065 | 8530 | 1-100 |
| | | | | | 772-894 |
| | | | | | 1216-1581 |
| | | | | | 1841-2015 |
| | | | | | 2108-2519 |
| | | | | | 3025-3350 |
| | | | | | 3659-4132 |
| | | | | | 6075-6743 |
| HTTBR42 | 1770 | 714220 | AL157409 | 8531 | 1-570 |
| | | | | | 4245-4986 |
| HTTBR42 | 1770 | 714220 | AL157409 | 8532 | 1-312 |
| HTTBO82 | 1772 | 780164 | AC044902 | 8533 | 1-436 |
| | | | | | 477-893 |
| HTTBO82 | 1772 | 780164 | AC009595 | 8534 | 1-436 |
| | | | | | 477-893 |
| HTTBO82 | 1772 | 780164 | AC044902 | 8535 | 1-256 |
| HTTBM03 | 1773 | 925409 | AC031984 | 8536 | 1-766 |
| | | | | | 2180-2586 |
| | | | | | 3286-3634 |
| | | | | | 3651-3858 |
| | | | | | 3895-4311 |
| HTTBM03 | 1773 | 925409 | AL050318 | 8537 | 1-766 |
| | | | | | 2178-2584 |
| | | | | | 3284-3632 |
| | | | | | 3649-3856 |
| | | | | | 3893-4309 |
| | | | | | 4861-5005 |
| | | | | | 7178-7361 |
| | | | | | 11400-11880 |
| | | | | | 12124-12392 |
| | | | | | 13017-13267 |
| | | | | | 15332-15583 |
| | | | | | 15793-16031 |
| | | | | | 16947-17288 |
| | | | | | 18668-18837 |
| | | | | | 19381-19764 |
| | | | | | 21255-21574 |
| | | | | | 22689-22887 |
| | | | | | 23670-23952 |
| | | | | | 27931-28039 |
| | | | | | 28646-28948 |
| | | | | | 29548-29705 |
| | | | | | 30258-32335 |
| HTTBM03 | 1773 | 925409 | AL390374 | 8538 | 1-766 |
| | | | | | 2178-2584 |
| | | | | | 3284-3632 |
| | | | | | 3649-3856 |
| | | | | | 3893-4309 |
| | | | | | 4861-5005 |
| | | | | | 7178-7362 |
| | | | | | 11063-11173 |
| | | | | | 11400-11880 |
| | | | | | 12124-12392 |
| | | | | | 13017-13268 |
| | | | | | 15332-15583 |
| | | | | | 15795-16033 |
| | | | | | 16952-17289 |
| | | | | | 18674-18843 |
| | | | | | 19387-19770 |
| | | | | | 21261-21580 |
| | | | | | 22695-22893 |
| | | | | | 23676-23958 |
| | | | | | 27937-28045 |
| | | | | | 28652-28954 |
| | | | | | 29556-29713 |
| | | | | | 30266-32343 |
| HTTBM03 | 1773 | 925409 | AC031984 | 8539 | 1-145 |
| HTTBM03 | 1773 | 925409 | AL050318 | 8540 | 1-151 |
| HTTBM03 | 1773 | 925409 | AL050318 | 8541 | 1-195 |
| HTTBM03 | 1773 | 925409 | AL390374 | 8542 | 1-195 |
| HTTBI80 | 1774 | 781590 | AC008628 | 8543 | 1-162 |
| | | | | | 1001-1703 |
| HTTBI80 | 1774 | 781590 | AC010226 | 8544 | 1-162 |
| | | | | | 1001-1703 |
| HTTBH95 | 1775 | 530559 | AL121759 | 8545 | 1-182 |
| | | | | | 1815-1886 |
| HTTBH95 | 1775 | 530559 | AL121759 | 8546 | 1-457 |
| HTTAQ60 | 1778 | 742377 | AC055720 | 8547 | 1-643 |
| | | | | | 842-1218 |
| HTTAQ60 | 1778 | 742377 | AC024145 | 8548 | 1-643 |
| | | | | | 842-1223 |
| HTTAQ60 | 1778 | 742377 | AC055720 | 8549 | 1-679 |
| HTTAQ60 | 1778 | 742377 | AC024145 | 8550 | 1-679 |
| HTTAQ60 | 1778 | 742377 | AC024145 | 8551 | 1-135 |
| HTTAP21 | 1780 | 671488 | AL023803 | 8552 | 1-198 |
| | | | | | 4122-4247 |
| | | | | | 8722-8781 |
| | | | | | 12640-12742 |
| | | | | | 15684-15778 |
| | | | | | 17532-17609 |
| | | | | | 17745-18841 |
| | | | | | 19072-19205 |
| | | | | | 20937-21397 |
| | | | | | 21427-21993 |
| | | | | | 22264-22342 |
| | | | | | 24544-24618 |
| | | | | | 28047-28160 |
| | | | | | 30396-30560 |
| | | | | | 32340-33565 |
| HTTAP21 | 1780 | 671488 | AL023803 | 8553 | 1-293 |
| HTTAP21 | 1780 | 671488 | AL023803 | 8554 | 1-414 |
| HTTAP09 | 1781 | 826343 | AC023593 | 8555 | 1-437 |
| HTTAP09 | 1781 | 826343 | AC012406 | 8556 | 1-437 |
| HTTAP09 | 1781 | 826343 | AC012406 | 8557 | 1-786 |
| | | | | | 1865-1938 |
| HTTAP09 | 1781 | 826343 | AC023593 | 8558 | 1-787 |
| | | | | | 1865-1938 |
| HTTAC77 | 1785 | 772735 | AC021291 | 8559 | 1-779 |
| NTTAA94 | 1786 | 793001 | AL031255 | 8560 | 1-908 |
| HTTAA94 | 1786 | 793001 | AL031255 | 8561 | 1-480 |
| HTTAA39 | 1787 | 710355 | AC016691 | 8562 | 1-526 |
| | | | | | 564-1577 |
| HTTAA39 | 1787 | 710355 | AC015719 | 8563 | 1-1149 |
| HTTAA39 | 1787 | 710355 | AC016691 | 8564 | 1-496 |
| HTTAA39 | 1787 | 710355 | AC016691 | 8565 | 1-106 |
| HTTAA39 | 1787 | 710355 | AC015719 | 8566 | 1-840 |
| HTLIP06 | 1788 | 934207 | AL162586 | 8567 | 1-2160 |
| | | | | | 2297-2470 |
| HTLIP06 | 1788 | 934207 | AL162426 | 8568 | 1-2160 |
| | | | | | 2297-2472 |
| | | | | | 3211-3477 |
| | | | | | 3629-4087 |
| HTLIP06 | 1788 | 934207 | AC007430 | 8569 | 1-2160 |
| | | | | | 2297-2472 |
| | | | | | 3211-3477 |
| | | | | | 3629-4087 |
| HTLIP06 | 1788 | 934207 | AL162586 | 8570 | 1-136 |
| | | | | | 294-491 |
| | | | | | 2350-2692 |
| | | | | | 3660-3898 |
| HTLIP06 | 1788 | 934207 | AL162426 | 8571 | 1-136 |
| | | | | | 294-491 |
| | | | | | 2351-2693 |
| | | | | | 3661-3899 |
| HTLIP06 | 1788 | 934207 | AC007430 | 8572 | 1-136 |
| | | | | | 294-491 |
| | | | | | 2351-2693 |
| | | | | | 3661-3899 |
| HTLIP06 | 1788 | 934207 | AL162426 | 8573 | 1-118 |
| HTLIP06 | 1788 | 934207 | AC007430 | 8574 | 1-118 |
| HTLHS69 | 1793 | 870152 | AC009095 | 8575 | 1-220 |
| | | | | | 227-466 |
| | | | | | 573-1448 |
| HTLHS05 | 1794 | 933720 | AL121753 | 8576 | 1-77 |
| | | | | | 91-640 |
| | | | | | 2531-2639 |
| | | | | | 3380-3625 |
| | | | | | 3692-4433 |
| | | | | | 4677-4862 |
| | | | | | 5043-5355 |
| | | | | | 5532-5893 |
| | | | | | 6299-10579 |
| | | | | | 12966-13230 |
| | | | | | 14676-15242 |
| | | | | | 15749-15996 |
| | | | | | 16066-16393 |
| | | | | | 16675-17238 |
| | | | | | 17381-17885 |
| | | | | | 18029-18260 |
| | | | | | 19347-19477 |
| | | | | | 20064-20199 |
| | | | | | 20849-21010 |
| HTLHS05 | 1794 | 933720 | AL356652 | 8577 | 1-77 |
| | | | | | 91-640 |
| | | | | | 2531-2639 |
| | | | | | 3380-3625 |
| | | | | | 3692-4433 |
| | | | | | 4677-4862 |
| | | | | | 5043-5355 |
| | | | | | 5532-5893 |
| | | | | | 6299-10590 |
| | | | | | 12979-13243 |
| | | | | | 14689-15255 |
| | | | | | 15762-16052 |
| | | | | | 16079-16406 |
| | | | | | 16688-17251 |
| | | | | | 17394-17898 |
| | | | | | 18042-18273 |
| | | | | | 19363-19509 |
| | | | | | 20088-20188 |
| | | | | | 20863-21024 |
| HTLHS05 | 1794 | 933720 | AL121753 | 8578 | 1-437 |
| HTLHS05 | 1794 | 933720 | AL121753 | 8579 | 1-638 |
| | | | | | 793-854 |
| HTLHS05 | 1794 | 933720 | AL356652 | 8580 | 1-437 |
| HTLHS05 | 1794 | 933720 | AL356652 | 8581 | 1-638 |
| | | | | | 793-854 |
| HTLHJ51 | 1796 | 865399 | AC027421 | 8582 | 1-146 |
| | | | | | 1403-3399 |
| HTLHJ51 | 1796 | 865399 | AC025860 | 8583 | 1-146 |
| | | | | | 1402-3398 |
| HTLHJ51 | 1796 | 865399 | AL353622 | 8584 | 1-146 |
| | | | | | 1402-3398 |
| HTLHB93 | 1797 | 945862 | AL161656 | 8585 | 1-585 |
| HTLHB93 | 1797 | 945862 | AL035460 | 8586 | 1-585 |
| HTLHB93 | 1797 | 945862 | AL161656 | 8587 | 1-29 |
| | | | | | 92-459 |
| | | | | | 544-844 |
| HTLHB93 | 1797 | 945862 | AL161656 | 8588 | 1-754 |
| HTLHB93 | 1797 | 945862 | AL035460 | 8589 | 1-29 |
| | | | | | 92-459 |
| | | | | | 544-844 |
| HTLHB93 | 1797 | 945862 | AL035460 | 8590 | 1-754 |
| HTLGS10 | 1799 | 963458 | AC055863 | 8591 | 1-34 |
| | | | | | 227-316 |
| | | | | | 895-1294 |
| | | | | | 1518-1678 |
| | | | | | 1917-2553 |
| HTLGR32 | 1800 | 928245 | AC013403 | 8592 | 1-1399 |
| HTLGR32 | 1800 | 928245 | AC013403 | 8593 | 1-391 |
| HTLGR32 | 1800 | 928245 | AC013403 | 8594 | 1-126 |
| HTLGP84 | 1801 | 782194 | AC020934 | 8595 | 1-58 |
| | | | | | 591-853 |
| | | | | | 900-1357 |
| HTLGC43 | 1803 | 870228 | AL118524 | 8596 | 1-903 |
| | | | | | 936-2052 |
| HTLGC43 | 1803 | 870228 | AL118524 | 8597 | 1-497 |
| HTLEQ92 | 1804 | 932882 | AC009109 | 8598 | 1-303 |
| | | | | | 1003-1241 |
| | | | | | 2173-2763 |
| HTLEQ92 | 1804 | 932882 | AC010531 | 8599 | 1-303 |
| | | | | | 1003-1241 |
| | | | | | 2173-2763 |
| | | | | | 2907-3967 |
| | | | | | 4804-4849 |
| | | | | | 4950-7755 |
| HTLEQ92 | 1804 | 932882 | AC009109 | 8600 | 1-722 |
| HTLEQ92 | 1804 | 932882 | AC010531 | 8601 | 1-1592 |
| HTLEP21 | 1805 | 671151 | AC016774 | 8602 | 1-138 |
| | | | | | 467-569 |
| | | | | | 810-930 |
| | | | | | 1056-1149 |
| | | | | | 1553-1686 |
| | | | | | 1774-2544 |
| HTLEP21 | 1805 | 671151 | AC010789 | 8603 | 1-138 |
| | | | | | 468-570 |
| | | | | | 811-931 |
| | | | | | 1057-1150 |
| | | | | | 1554-1687 |
| | | | | | 1775-2546 |
| HTLEP21 | 1805 | 671151 | AC016774 | 8604 | 1-594 |
| | | | | | 1023-1155 |
| | | | | | 1772-2162 |
| | | | | | 2448-2739 |
| | | | | | 2975-3438 |
| | | | | | 3681-4096 |
| | | | | | 4814-4865 |
| | | | | | 5289-5389 |
| | | | | | 5443-5627 |
| | | | | | 7000-7166 |
| | | | | | 7396-8248 |
| | | | | | 8876-9167 |
| | | | | | 10516-10689 |
| | | | | | 11193-11857 |
| | | | | | 12200-12372 |
| | | | | | 12455-12745 |
| | | | | | 13874-14148 |
| | | | | | 14398-14684 |
| | | | | | 15738-15861 |
| | | | | | 16053-16243 |
| | | | | | 17510-17938 |
| | | | | | 18019-18179 |
| | | | | | 18259-18528 |
| | | | | | 18587-18676 |
| | | | | | 18960-19577 |
| | | | | | 19606-20010 |
| | | | | | 20036-21667 |
| | | | | | 22067-26217 |
| | | | | | 26261-26631 |
| | | | | | 26869-27524 |
| | | | | | 27631-28143 |
| | | | | | 28212-28560 |
| | | | | | 29119-29156 |
| | | | | | 29687-30245 |
| | | | | | 30256-31203 |
| | | | | | 31798-33971 |
| HTLEP21 | 1805 | 671151 | AC010789 | 8605 | 1-595 |
| | | | | | 1024-1156 |
| | | | | | 1773-2165 |
| | | | | | 2447-2738 |
| | | | | | 2974-3437 |
| | | | | | 3680-4095 |
| | | | | | 4813-4864 |
| | | | | | 5288-5388 |
| | | | | | 5442-5626 |
| | | | | | 6999-7165 |
| | | | | | 7395-8247 |
| | | | | | 8875-9166 |
| | | | | | 10515-10688 |
| | | | | | 11192-11856 |
| | | | | | 12199-12371 |
| | | | | | 12454-12755 |
| | | | | | 13981-14147 |
| | | | | | 14397-14683 |
| | | | | | 15737-15860 |
| | | | | | 16052-16242 |
| | | | | | 17509-17937 |
| | | | | | 18018-18178 |
| | | | | | 18258-18527 |
| | | | | | 18586-18675 |
| | | | | | 18959-19576 |
| | | | | | 19605-20009 |
| | | | | | 20035-21666 |
| | | | | | 22243-26224 |
| | | | | | 26240-26630 |
| | | | | | 26868-27523 |
| | | | | | 27630-28149 |
| | | | | | 28212-28560 |
| | | | | | 29119-29156 |
| | | | | | 29688-30247 |
| | | | | | 30269-31205 |
| | | | | | 31800-33973 |
| HTLDO01 | 1812 | 913669 | AC002056 | 8606 | 1-1300 |
| HTLDO01 | 1812 | 913669 | AC000036 | 8607 | 1-1300 |
| | | | | | 2362-2937 |
| HTLDO01 | 1812 | 913669 | AC002056 | 8608 | 1-375 |
| HTLDO01 | 1812 | 913669 | AC000036 | 8609 | 1-829 |
| | | | | | 1755-2331 |
| | | | | | 3054-3393 |
| | | | | | 5260-5322 |
| HTLDO01 | 1812 | 913669 | AC000036 | 8610 | 1-375 |
| HTLCZ79 | 1815 | 572853 | AC004064 | 8611 | 1-285 |
| HTLCZ79 | 1815 | 572853 | AL161939 | 8612 | 1-285 |
| HTLCZ79 | 1815 | 572853 | AL118502 | 8613 | 1-285 |
| HTLCZ79 | 1815 | 572853 | AC004064 | 8614 | 1-97 |
| HTLCZ79 | 1815 | 572853 | AC004064 | 8615 | 1-471 |
| | | | | | 571-1561 |
| HTLCZ79 | 1815 | 572853 | AL161939 | 8616 | 1-471 |
| | | | | | 571-1561 |
| HTLCZ79 | 1815 | 572853 | AL118502 | 8617 | 1-471 |
| | | | | | 571-1561 |
| HTLCO02 | 1817 | 921045 | AC066588 | 8618 | 1-242 |
| | | | | | 2043-2258 |
| HTLCG65 | 1818 | 413333 | AC015549 | 8619 | 1-167 |
| HTLCG65 | 1818 | 413333 | AC006060 | 8620 | 1-171 |
| | | | | | 3245-3475 |
| | | | | | 3590-3742 |
| | | | | | 4110-4269 |
| | | | | | 5242-5535 |
| | | | | | 6465-6516 |
| HTLCG59 | 1819 | 530039 | AC027712 | 8621 | 1-46 |
| | | | | | 3805-3943 |
| | | | | | 5188-5370 |
| | | | | | 6708-6843 |
| | | | | | 7531-7689 |
| | | | | | 8008-8127 |
| | | | | | 8669-8788 |
| | | | | | 9234-9406 |
| | | | | | 9698-10187 |
| | | | | | 10689-15514 |
| HTLCG59 | 1819 | 530039 | AL356097 | 8622 | 1-46 |
| | | | | | 3805-3943 |
| | | | | | 5188-5370 |
| | | | | | 6709-6844 |
| | | | | | 7530-7688 |
| | | | | | 8007-8126 |
| | | | | | 8668-8787 |
| | | | | | 9234-9406 |
| | | | | | 9698-10187 |
| | | | | | 10693-15517 |
| HTLCG59 | 1819 | 530039 | AC027113 | 8623 | 1-46 |
| | | | | | 3805-3944 |
| | | | | | 5189-5371 |
| | | | | | 6709-6844 |
| | | | | | 7530-7688 |
| | | | | | 8007-8126 |
| | | | | | 8668-8787 |
| | | | | | 9233-9405 |
| | | | | | 9697-10186 |
| | | | | | 10692-15518 |
| HTLCG59 | 1819 | 530039 | AC027712 | 8624 | 1-595 |
| HTLCG59 | 1819 | 530039 | AL356097 | 8625 | 1-595 |
| HTLCG59 | 1819 | 530039 | AC027113 | 8626 | 1-595 |
| HTLBH67 | 1821 | 751985 | AC008439 | 8627 | 1-62 |
| | | | | | 293-400 |
| | | | | | 452-976 |
| | | | | | 1016-1058 |
| | | | | | 1463-1534 |
| | | | | | 1886-2026 |
| | | | | | 2110-2249 |
| | | | | | 2401-2463 |
| | | | | | 3324-4027 |
| | | | | | 4192-4288 |
| | | | | | 4694-5330 |
| | | | | | 5485-5650 |
| | | | | | 5813-6262 |
| | | | | | 6273-6401 |
| | | | | | 6475-6559 |
| | | | | | 6728-6847 |
| | | | | | 6979-7205 |
| | | | | | 7573-7676 |
| | | | | | 7730-8146 |
| | | | | | 8334-8866 |
| | | | | | 8885-9392 |
| HTLBH67 | 1821 | 751985 | AC008781 | 8628 | 1-85 |
| | | | | | 254-371 |
| | | | | | 505-731 |
| | | | | | 1098-1201 |
| | | | | | 1255-1671 |
| | | | | | 1718-2387 |
| | | | | | 2408-2915 |
| | | | | | 3113-3244 |
| | | | | | 3382-4278 |
| | | | | | 4504-4538 |
| | | | | | 4650-5645 |
| HTLBH67 | 1821 | 751985 | AC022420 | 8629 | 1-62 |
| | | | | | 295-403 |
| | | | | | 455-979 |
| | | | | | 1019-1061 |
| | | | | | 1466-1537 |
| | | | | | 1890-2030 |
| | | | | | 2114-2253 |
| | | | | | 2405-2467 |
| | | | | | 3328-4030 |
| | | | | | 4195-4291 |
| | | | | | 4697-5333 |
| | | | | | 5488-5653 |
| | | | | | 5816-6265 |
| | | | | | 6276-6404 |
| | | | | | 6478-6562 |
| | | | | | 6731-6850 |
| | | | | | 6982-7208 |
| | | | | | 7575-7678 |
| | | | | | 7732-8148 |
| | | | | | 8195-8864 |
| | | | | | 8885-9392 |
| | | | | | 9590-9721 |
| | | | | | 9859-10754 |
| | | | | | 10980-11014 |
| | | | | | 11126-12121 |
| HTLBH67 | 1821 | 751985 | AC005368 | 8630 | 1-64 |
| | | | | | 294-399 |
| | | | | | 451-975 |
| | | | | | 1015-1057 |
| | | | | | 1462-1533 |
| | | | | | 1885-2025 |
| | | | | | 2109-2248 |
| | | | | | 2400-2462 |
| | | | | | 3323-4026 |
| | | | | | 4191-4287 |
| | | | | | 4693-5329 |
| | | | | | 5484-5649 |
| | | | | | 5812-6264 |
| | | | | | 6275-6403 |
| | | | | | 6477-6561 |
| | | | | | 6730-6849 |
| | | | | | 6981-7207 |
| | | | | | 7575-7678 |
| | | | | | 7732-8148 |
| | | | | | 8201-8868 |
| | | | | | 8887-9394 |
| | | | | | 9592-9723 |
| | | | | | 9861-10759 |
| | | | | | 10985-11019 |
| | | | | | 11131-12126 |
| HTLBH67 | 1821 | 751985 | AC008781 | 8631 | 1-292 |
| HTLBH67 | 1821 | 751985 | AC022420 | 8632 | 1-323 |
| | | | | | 1372-1431 |
| | | | | | 1657-1821 |
| | | | | | 2377-2485 |
| | | | | | 4488-4700 |
| | | | | | 4954-5061 |
| | | | | | 6224-6547 |
| | | | | | 6819-6965 |
| | | | | | 7268-7333 |
| | | | | | 8088-8593 |
| | | | | | 9897-10068 |
| | | | | | 10109-10623 |
| | | | | | 10645-10680 |
| | | | | | 10812-10871 |
| | | | | | 10982-11123 |
| | | | | | 11345-11383 |
| | | | | | 11877-12000 |
| | | | | | 12310-13467 |
| HTLBH67 | 1821 | 751985 | AC022420 | 8633 | 1-292 |
| HTLBH67 | 1821 | 751985 | AC005368 | 8634 | 1-292 |
| HTLBC07 | 1822 | 954111 | AC015841 | 8635 | 1-668 |
| HTLBC07 | 1822 | 954111 | AC018617 | 8636 | 1-672 |
| HTLBC07 | 1822 | 954111 | AC004586 | 8637 | 1-672 |
| HTLBC07 | 1822 | 954111 | AC015841 | 8638 | 1-124 |
| HTLBC07 | 1822 | 954111 | AC018617 | 8639 | 1-124 |
| HTLBC07 | 1822 | 954111 | AC004586 | 8640 | 1-514 |
| | | | | | 681-994 |
| | | | | | 1116-1732 |
| | | | | | 1974-2431 |
| | | | | | 2451-3123 |
| | | | | | 3603-3698 |
| | | | | | 4469-4606 |
| | | | | | 5033-5496 |
| | | | | | 6293-6890 |
| | | | | | 6965-8015 |
| | | | | | 8053-8130 |
| HTLBC07 | 1822 | 954111 | AC004586 | 8641 | 1-77 |
| | | | | | 3689-3807 |
| | | | | | 3960-4294 |
| | | | | | 4692-4820 |
| | | | | | 5674-5809 |
| | | | | | 6237-6334 |
| | | | | | 7138-7247 |
| | | | | | 8211-8309 |
| | | | | | 8720-8861 |
| | | | | | 9797-10087 |
| | | | | | 10098-10215 |
| | | | | | 10448-11237 |
| | | | | | 11311-11550 |
| | | | | | 11566-11654 |
| | | | | | 12306-12914 |
| | | | | | 12929-13575 |
| | | | | | 13587-13703 |
| | | | | | 14256-14391 |
| | | | | | 14535-14763 |
| | | | | | 17193-17450 |
| HTLAB29 | 1829 | 879168 | AC026362 | 8642 | 1-689 |
| | | | | | 508-653 |
| | | | | | 1079-1226 |
| | | | | | 1867-2043 |
| | | | | | 2136-2239 |
| | | | | | 2359-3327 |
| | | | | | 3438-3958 |
| | | | | | 4003-5312 |
| HTLAB29 | 1829 | 879168 | AC026362 | 8643 | 1-336 |
| HTFBE02 | 1830 | 920507 | AC022536 | 8644 | 1-31 |
| | | | | | 340-421 |
| | | | | | 1097-1262 |
| | | | | | 2446-2621 |
| | | | | | 3069-3161 |
| | | | | | 3571-3791 |
| | | | | | 4947-5076 |
| | | | | | 5905-6987 |
| HTFBE02 | 1830 | 920507 | AC022536 | 8645 | 1-102 |
| HTEQS95 | 1831 | 972746 | AL133284 | 8646 | 1-1005 |
| HTEQS95 | 1831 | 972746 | AL133284 | 8647 | 1-258 |
| HTEQS90 | 1832 | 973426 | AP000635 | 8648 | 1-692 |
| HTEQS90 | 1832 | 973426 | AP000610 | 8649 | 1-691 |
| HTEQS90 | 1832 | 973426 | AP001547 | 8650 | 1-691 |
| HTEQS90 | 1832 | 973426 | AP000635 | 8651 | 1-543 |
| HTEQS90 | 1832 | 973426 | AP000610 | 8652 | 1-197 |
| HTEQS90 | 1832 | 973426 | AP001547 | 8653 | 1-197 |
| HTBQS90 | 1832 | 973426 | AP000610 | 8654 | 1-543 |
| HTEQS90 | 1832 | 973426 | AP001547 | 8655 | 1-543 |
| HTEQP03 | 1833 | 870516 | AC018931 | 8656 | 1-238 |
| | | | | | 672-970 |
| | | | | | 6605-6665 |
| HTEQP03 | 1833 | 870516 | AC018931 | 8657 | 1-323 |
| | | | | | 373-560 |
| HTEQB08 | 1835 | 958291 | AL139106 | 8658 | 1-831 |
| HTEQB08 | 1835 | 958291 | AL162721 | 8659 | 1-831 |
| HTEQB08 | 1835 | 958291 | AL139106 | 8660 | 1-324 |
| HTEQB08 | 1835 | 958291 | AL162721 | 8661 | 1-261 |
| | | | | | 805-1128 |
| HTEOE28 | 1841 | 870581 | AL139243 | 8662 | 1-1106 |
| HTENY44 | 1842 | 870588 | AC027544 | 8663 | 1-197 |
| | | | | | 710-864 |
| | | | | | 1263-1380 |
| | | | | | 2382-2706 |
| | | | | | 3184-3394 |
| | | | | | 3970-4082 |
| HTENY44 | 1842 | 870588 | AC027544 | 8664 | 1-570 |
| HTENY44 | 1842 | 870588 | AC027544 | 8665 | 1-322 |
| HTENV06 | 1843 | 933294 | AL121753 | 8666 | 1-498 |
| HTENV06 | 1843 | 933294 | AL356652 | 8667 | 1-498 |
| HTENV06 | 1843 | 933294 | AL121753 | 8668 | 1-116 |
| HTENV06 | 1843 | 933294 | AL356652 | 8669 | 1-104 |
| HTENL95 | 1848 | 795314 | AC022930 | 8670 | 1-32 |
| | | | | | 79-745 |
| | | | | | 880-1680 |
| | | | | | 1782-2276 |
| | | | | | 2861-3730 |
| | | | | | 4861-5265 |
| HTENL95 | 1848 | 795314 | AC069217 | 8671 | 1-32 |
| | | | | | 79-745 |
| | | | | | 880-1679 |
| HTENL95 | 1848 | 795314 | AF238376 | 8672 | 1-32 |
| | | | | | 79-745 |
| | | | | | 880-1680 |
| HTENL95 | 1848 | 795314 | AC022930 | 8673 | 1-150 |
| | | | | | 215-626 |
| | | | | | 662-1438 |
| | | | | | 2351-2999 |
| HTENL95 | 1848 | 795314 | AC022930 | 8674 | 1-297 |
| HTENL95 | 1848 | 795314 | AC069217 | 8675 | 1-297 |
| HTENL95 | 1848 | 795314 | AF238376 | 8676 | 1-297 |
| HTENL95 | 1848 | 795314 | AC069217 | 8677 | 1-495 |
| HTENL95 | 1848 | 795314 | AF238376 | 8678 | 1-495 |
| HTENA08 | 1850 | 958380 | Z97985 | 8679 | 1-460 |
| | | | | | 851-1242 |
| | | | | | 1372-1475 |
| | | | | | 2276-2373 |
| HTENA08 | 1850 | 958380 | Z97985 | 8680 | 1-264 |
| HTEMY05 | 1851 | 880592 | AC019326 | 8681 | 1-734 |
| | | | | | 1378-6434 |
| HTEMY05 | 1851 | 880592 | AF129408 | 8682 | 1-734 |
| | | | | | 1378-7065 |
| HTEMY05 | 1851 | 880592 | AC019326 | 8683 | 1-579 |
| HIEMY05 | 1851 | 880592 | AF129408 | 8684 | 1-756 |
| HTEMU66 | 1853 | 944419 | AL022167 | 8685 | 1-1796 |
| HTEMU66 | 1853 | 944419 | AC018903 | 8686 | 1-631 |
| HTEMU66 | 1853 | 944419 | AC068470 | 8687 | 1-706 |
| HTEMU66 | 1853 | 944419 | AL049186 | 8688 | 1-912 |
| HTEMU66 | 1853 | 944419 | AC022305 | 8689 | 1-686 |
| HTEMU66 | 1853 | 944419 | AL049186 | 8690 | 1-87 |
| HTEMN80 | 1856 | 775543 | AP001386 | 8691 | 1-2970 |
| | | | | | 3001-4307 |
| HTEMN80 | 1856 | 775543 | AP002785 | 8692 | 1-2974 |
| | | | | | 3005-4311 |
| HTEMN80 | 1856 | 775543 | AP001386 | 8693 | 1-300 |
| HTEMN80 | 1856 | 775543 | AP002785 | 8694 | 1-236 |
| HTEMI51 | 1858 | 870613 | AL365214 | 8695 | 1-94 |
| | | | | | 3508-4007 |
| HTELV29 | 1861 | 806421 | AC068938 | 8696 | 1-643 |
| HTELV29 | 1861 | 806421 | AC073407 | 8697 | 1-2055 |
| | | | | | 3690-3915 |
| | | | | | 3928-4379 |
| | | | | | 4421-5222 |
| | | | | | 7704-8003 |
| | | | | | 11303-11530 |
| | | | | | 12021-12259 |
| | | | | | 12917-14410 |
| HTELV29 | 1861 | 806421 | AC073407 | 8698 | 1-350 |
| HTELP07 | 1862 | 952274 | AC041014 | 8699 | 1-118 |
| | | | | | 490-918 |
| HTELP07 | 1862 | 952274 | AC041014 | 8700 | 1-332 |
| HTELA02 | 1864 | 918699 AC021688 | 8701 | 1-687 | |
| | | | | | 1014-1336 |
| HTEKI62 | 1866 | 812862 | AC005848 | 8702 | 1-164 |
| | | | | | 343-428 |
| | | | | | 578-2903 |
| | | | | | 3020-3168 |
| | | | | | 4072-4415 |
| | | | | | 5074-5526 |
| | | | | | 5547-5780 |
| HTEKI62 | 1866 | 812862 | AC005848 | 8703 | 1-863 |
| | | | | | 1241-1590 |
| | | | | | 1666-2167 |
| | | | | | 2328-2424 |
| | | | | | 2500-2950 |
| | | | | | 3000-3341 |
| | | | | | 3351-3962 |
| | | | | | 3976-3995 |
| | | | | | 4276-5430 |
| | | | | | 5485-5585 |
| | | | | | 5616-5892 |
| | | | | | 6622-6727 |
| | | | | | 7156-8018 |
| HTEKD77 | 1868 | 772397 | AC018865 | 8704 | 1-1638 |
| HTEJV94 | 1869 | 793039 | AC058807 | 8705 | 1-946 |
| HTEJV94 | 1869 | 793039 | AC003669 | 8706 | 1-946 |
| HTEYN12 | 1871 | 653252 | AL096763 | 8707 | 1-118 |
| | | | | | 1052-1310 |
| | | | | | 3744-4364 |
| | | | | | 4488-4515 |
| | | | | | 5291-5447 |
| | | | | | 6507-7124 |
| | | | | | 7157-7605 |
| | | | | | 7842-8575 |
| HTEJL30 | 1872 | 696784 | AC012379 | 8708 | 1-2084 |
| HTEJL30 | 1872 | 696784 | AC009697 | 8709 | 1-2084 |
| HTEJL30 | 1872 | 696784 | AC012379 | 8710 | 1-142 |
| HTEJL30 | 1872 | 696784 | AC009697 | 8711 | 1-719 |
| HTEJL30 | 1872 | 696784 | AC012379 | 8712 | 1-719 |
| HTEJL30 | 1872 | 696784 | AC009697 | 8713 | 1-142 |
| HTEJB07 | 1874 | 953801 | AC073625 | 8714 | 1-494 |
| | | | | | 2402-2532 |
| HTEJB07 | 1874 | 953801 | AC007394 | 8715 | 1-430 |
| HTEJB07 | 1874 | 953801 | AC073625 | 8716 | 1-1712 |
| | | | | | 1727-2677 |
| HTEJB07 | 1874 | 953801 | AC007394 | 8717 | 1-1712 |
| | | | | | 1727-2677 |
| HTEIS34 | 1875 | 887112 | AC069257 | 8718 | 1-635 |
| | | | | | 725-895 |
| | | | | | 1011-1169 |
| | | | | | 1645-2361 |
| | | | | | 2527-3215 |
| | | | | | 3399-3766 |
| | | | | | 3842-4045 |
| HTEIS34 | 1875 | 887112 | AC026308 | 8719 | 1-635 |
| | | | | | 725-895 |
| | | | | | 1011-1169 |
| | | | | | 1645-2361 |
| | | | | | 2527-3215 |
| | | | | | 3399-3766 |
| | | | | | 3842-4045 |
| HTEIS34 | 1875 | 887112 | AC069257 | 8720 | 1-165 |
| HTEIS34 | 1875 | 887112 | AC069257 | 8721 | 1-380 |
| HTEIS34 | 1875 | 887112 | AC026308 | 8722 | 1-381 |
| HTEIS34 | 1875 | 887112 | AC026308 | 8723 | 1-486 |
| HTEIS25 | 1876 | 870660 | AC053512 | 8724 | 1-252 |
| | | | | | 304-440 |
| | | | | | 462-606 |
| | | | | | 851-994 |
| HTEIS25 | 1876 | 870660 | AL360086 | 8725 | 1-253 |
| | | | | | 305-441 |
| | | | | | 463-607 |
| | | | | | 852-995 |
| HTEHX57 | 1885 | 734976 | AC023756 | 8726 | 1-91 |
| | | | | | 1173-1400 |
| | | | | | 3751-4383 |
| | | | | | 4431-4890 |
| | | | | | 5497-5769 |
| | | | | | 5920-6396 |
| HTEHX57 | 1885 | 734976 | AP001152 | 8727 | 1-452 |
| | | | | | 1059-1331 |
| | | | | | 1482-1958 |
| HTEHX57 | 1885 | 734976 | AC011007 | 8728 | 1-79 |
| | | | | | 3753-3901 |
| | | | | | 9145-9297 |
| | | | | | 9344-9538 |
| | | | | | 13689-14081 |
| | | | | | 14559-14683 |
| | | | | | 15765-15992 |
| | | | | | 17822-18243 |
| | | | | | 18342-18974 |
| | | | | | 19022-19481 |
| | | | | | 20088-20360 |
| | | | | | 20511-20987 |
| HTEHX57 | 1885 | 734976 | AC023756 | 8729 | 1-1701 |
| | | | | | 1831-4730 |
| HTEHX57 | 1885 | 734976 | AP001152 | 8730 | 1-1702 |
| | | | | | 1835-4742 |
| HTEHX57 | 1885 | 734976 | AC011007 | 8731 | 1-1701 |
| HTEHV11 | 1886 | 967439 | AL021331 | 8732 | 1-569 |
| HTEHV11 | 1886 | 967439 | AL021331 | 8733 | 1-690 |
| HTEHS17 | 1887 | 664436 | AC010255 | 8734 | 1-184 |
| | | | | | 308-529 |
| | | | | | 2761-3109 |
| HTEHS17 | 1887 | 664436 | AC010255 | 8735 | 1-502 |
| HTEHS17 | 1887 | 664436 | AC010255 | 8736 | 1-130 |
| | | | | | 310-1003 |
| | | | | | 1040-1331 |
| HTEGU55 | 1890 | 931017 | Z98752 | 8737 | 1-2035 |
| HTEGU55 | 1890 | 931017 | Z98752 | 8738 | 1-465 |
| HTEGU55 | 1890 | 931017 | Z98752 | 8739 | 1-415 |
| HTEGC30 | 1896 | 690998 | AC073079 | 8740 | 1-504 |
| HTEFO46 | 1899 | 719280 | AC068790 | 8741 | 1-31 |
| | | | | | 136-656 |
| HTEFO46 | 1899 | 719280 | AC024438 | 8742 | 1-31 |
| | | | | | 136-942 |
| | | | | | 1083-4020 |
| HTEFO28 | 1900 | 685383 | AC023123 | 8743 | 1-119 |
| | | | | | 151-982 |
| | | | | | 1019-1286 |
| | | | | | 1442-1755 |
| | | | | | 1908-2137 |
| | | | | | 2256-2608 |
| | | | | | 2974-3413 |
| | | | | | 4977-5488 |
| | | | | | 5507-8584 |
| | | | | | 8676-10198 |
| HTEFO28 | 1900 | 685383 | AC006534 | 8744 | 1-119 |
| | | | | | 151-982 |
| | | | | | 1019-1286 |
| | | | | | 1442-1755 |
| | | | | | 1986-2137 |
| | | | | | 2256-2608 |
| | | | | | 2974-3413 |
| | | | | | 4977-5488 |
| | | | | | 5507-8584 |
| | | | | | 8676-10198 |
| HTEFO28 | 1900 | 685383 | AC023123 | 8745 | 1-546 |
| | | | | | 601-659 |
| HTEFO28 | 1900 | 685383 | AC006534 | 8746 | 1-230 |
| | | | | | 234-264 |
| HTEFO28 | 1900 | 685383 | AC023123 | 8747 | 1-237 |
| | | | | | 239-272 |
| HTEFO28 | 1900 | 685383 | AC006534 | 8748 | 1-546 |
| | | | | | 601-659 |
| HTEET22 | 1906 | 675071 | AC022930 | 8749 | 1-649 |
| | | | | | 1562-2338 |
| | | | | | 2374-2785 |
| | | | | | 2850-2999 |
| HTEET22 | 1906 | 675071 | AC069217 | 8750 | 1-777 |
| | | | | | 813-1224 |
| | | | | | 1289-1366 |
| HTEET22 | 1906 | 675071 | AF238376 | 8751 | 1-38 |
| | | | | | 1258-1452 |
| | | | | | 3186-3304 |
| | | | | | 3555-3746 |
| | | | | | 6146-6232 |
| | | | | | 8111-8262 |
| | | | | | 9292-9751 |
| | | | | | 10190-10839 |
| | | | | | 11752-12528 |
| | | | | | 12564-12975 |
| | | | | | 13040-13189 |
| HTEET22 | 1906 | 675071 | AC022930 | 8752 | 1-460 |
| HTEET22 | 1906 | 675071 | AC022930 | 8753 | 1-405 |
| | | | | | 1536-2405 |
| | | | | | 2990-3484 |
| | | | | | 3586-4386 |
| | | | | | 4521-5187 |
| | | | | | 5234-5265 |
| HTEET22 | 1906 | 675071 | AC069217 | 8754 | 1-402 |
| HTEET22 | 1906 | 675071 | AF238376 | 8755 | 1-408 |
| HTEEF25 | 1907 | 677513 | AC012330 | 8756 | 1-344 |
| HTEEF25 | 1907 | 677513 | AC008132 | 8757 | 1-344 |
| HTEEF25 | 1907 | 677513 | AC023491 | 8758 | 1-344 |
| HTEEF25 | 1907 | 677513 | AC008103 | 8759 | 1-583 |
| | | | | | 683-2302 |
| | | | | | 5090-5245 |
| | | | | | 5708-5746 |
| | | | | | 5973-6045 |
| HTEEF25 | 1907 | 677513 | AC023490 | 8760 | 1-582 |
| | | | | | 682-2297 |
| HTEEF25 | 1907 | 677513 | AC008079 | 8761 | 1-583 |
| | | | | | 683-2302 |
| | | | | | 4878-5241 |
| | | | | | 5704-5742 |
| | | | | | 5969-6041 |
| HTEEF25 | 1907 | 677513 | AC007325 | 8762 | 1-583 |
| | | | | | 683-2306 |
| | | | | | 4881-5244 |
| | | | | | 5707-5745 |
| | | | | | 5972-6044 |
| HTEEF25 | 1907 | 677513 | AC007708 | 8763 | 1-582 |
| | | | | | 682-2297 |
| HTEEF25 | 1907 | 677513 | AC007324 | 8764 | 1-582 |
| | | | | | 682-2301 |
| | | | | | 5089-5244 |
| | | | | | 5707-5745 |
| | | | | | 5972-6044 |
| HTEEF25 | 1907 | 677513 | AC008018 | 8765 | 1-582 |
| | | | | | 682-2301 |
| | | | | | 4877-5240 |
| | | | | | 5703-5741 |
| | | | | | 5968-6040 |
| HTEEF25 | 1907 | 677513 | AC007981 | 8766 | 1-340 |
| HTEEF25 | 1907 | 677513 | AC008103 | 8767 | 1-603 |
| HTEEF25 | 1907 | 677513 | AC008103 | 8768 | 1-233 |
| HTEEF25 | 1907 | 677513 | AC023490 | 8769 | 1-603 |
| HTEEF25 | 1907 | 677513 | AC008079 | 8770 | 1-452 |
| | | | | | 1155-1470 |
| | | | | | 1497-1744 |
| | | | | | 6815-7114 |
| | | | | | 8000-8325 |
| | | | | | 8749-9359 |
| | | | | | 10364-10577 |
| | | | | | 10586-10884 |
| | | | | | 11714-12079 |
| | | | | | 14576-14752 |
| | | | | | 16955-17117 |
| | | | | | 17240-17567 |
| | | | | | 21365-21630 |
| | | | | | 23483-23784 |
| | | | | | 23982-24078 |
| | | | | | 24280-24312 |
| | | | | | 25597-25744 |
| | | | | | 25952-26024 |
| | | | | | 26254-26692 |
| | | | | | 27187-27493 |
| | | | | | 27543-27657 |
| | | | | | 27931-28344 |
| | | | | | 31056-31145 |
| | | | | | 31243-31541 |
| | | | | | 31698-31846 |
| | | | | | 33652-33750 |
| | | | | | 34559-34729 |
| | | | | | 34936-35276 |
| | | | | | 36328-36748 |
| | | | | | 36956-37092 |
| | | | | | 37601-37650 |
| | | | | | 38741-38979 |
| | | | | | 40580-41206 |
| HTEEF25 | 1907 | 677513 | AC008079 | 8771 | 1-233 |
| HTEEF25 | 1907 | 677513 | AC007325 | 8772 | 1-603 |
| HTEEF25 | 1907 | 677513 | AC007325 | 8773 | 1-235 |
| HTEEF25 | 1907 | 677513 | AC007708 | 8774 | 1-603 |
| HTEEF25 | 1907 | 677513 | AC007324 | 8775 | 1-234 |
| HTEEF25 | 1907 | 677513 | AC007324 | 8776 | 1-603 |
| HTEEF25 | 1907 | 677513 | AC008018 | 8777 | 1-233 |
| HTEEF25 | 1907 | 677513 | AC008018 | 8778 | 1-603 |
| HTEEF25 | 1907 | 677513 | AC007981 | 8779 | 1-488 |
| HTEEB82 | 1908 | 780161 | AC026140 | 8780 | 1-81 |
| | | | | | 1974-2064 |
| | | | | | 2695-2852 |
| | | | | | 2934-3354 |
| | | | | | 4059-4360 |
| | | | | | 4682-4800 |
| HTEEB82 | 1908 | 780161 | AL033531 | 8781 | 1-81 |
| | | | | | 1974-2064 |
| | | | | | 2695-2852 |
| | | | | | 2934-3354 |
| | | | | | 4059-4845 |
| HTEEB82 | 1908 | 780161 | AC026140 | 8782 | 1-212 |
| HTEEB82 | 1908 | 780161 | AL033531 | 8783 | 1-669 |
| HTEEB82 | 1908 | 780161 | AL033531 | 8784 | 1-212 |
| HTEDX39 | 1909 | 530201 | AC005726 | 8785 | 1-257 |
| HTEDX39 | 1909 | 530201 | AC005726 | 8786 | 1-124 |
| HTEDX39 | 1909 | 530201 | AC005726 | 8787 | 1-81 |
| | | | | | 754-902 |
| | | | | | 1011-1476 |
| | | | | | 1836-2127 |
| | | | | | 3328-3518 |
| | | | | | 3715-3773 |
| | | | | | 4307-4426 |
| | | | | | 4516-4946 |
| | | | | | 5049-5097 |
| | | | | | 5496-5623 |
| | | | | | 6425-6598 |
| HTEDX04 | 1910 | 927850 | AF111169 | 8788 | 1-136 |
| | | | | | 1693-1823 |
| | | | | | 1913-2092 |
| | | | | | 2493-2707 |
| | | | | | 4607-4680 |
| HTEDX04 | 1910 | 927850 | AF111169 | 8789 | 1-347 |
| HTEDX03 | 1911 | 925353 | AC005300 | 8790 | 1-202 |
| HTEDX03 | 1911 | 925353 | AC006946 | 8791 | 1-202 |
| HTEDX03 | 1911 | 925353 | AC006946 | 8792 | 1-168 |
| HTEDW96 | 1912 | 881958 | AC017028 | 8793 | 1-477 |
| | | | | | 786-1004 |
| HTEDW96 | 1912 | 881958 | AC017028 | 8794 | 1-867 |
| HTEDW59 | 1913 | 530448 | AC025868 | 8795 | 1-217 |
| HTEDW59 | 1913 | 530448 | AC025868 | 8796 | 1-264 |
| | | | | | 363-446 |
| HTEDV86 | 1914 | 785818 | AL356801 | 8797 | 1-763 |
| HTEDV86 | 1914 | 785818 | AL356801 | 8798 | 1-142 |
| HTEDO75 | 1918 | 767024 | AL049541 | 8799 | 1-910 |
| HTEDJ92 | 1920 | 522827 | AL390815 | 8800 | 1-295 |
| HTEDI01 | 1923 | 961028 | AC019205 | 8801 | 1-224 |
| HTEDH30 | 1927 | 522936 | AL049697 | 8802 | 1-57 |
| | | | | | 1807-1921 |
| | | | | | 2559-2625 |
| HTEDH30 | 1927 | 522936 | AL049697 | 8803 | 1-365 |
| | | | | | 381-1034 |
| HTEDH17 | 1928 | 522938 | AC026124 | 8804 | 1-413 |
| HTEDH17 | 1928 | 522938 | AC012597 | 8805 | 1-413 |
| HTEDH06 | 1929 | 869427 | AC006251 | 8806 | 1-718 |
| | | | | | 767-1512 |
| | | | | | 1639-2023 |
| | | | | | 2398-2655 |
| | | | | | 2926-2990 |
| | | | | | 3300-3357 |
| | | | | | 4357-4395 |
| | | | | | 5163-5275 |
| | | | | | 5927-6337 |
| | | | | | 6945-7074 |
| | | | | | 7156-7444 |
| HTEDH06 | 1929 | 869427 | AC006251 | 8807 | 1-163 |
| | | | | | 460-673 |
| | | | | | 787-898 |
| | | | | | 4433-4791 |
| | | | | | 6955-7223 |
| | | | | | 7246-7642 |
| | | | | | 11004-11548 |
| | | | | | 12185-12593 |
| | | | | | 13374-13482 |
| | | | | | 14491-14587 |
| | | | | | 15381-16043 |
| | | | | | 16395-16546 |
| | | | | | 18407-18623 |
| | | | | | 19528-19762 |
| | | | | | 19852-20715 |
| | | | | | 21495-21936 |
| HTEDH06 | 1929 | 869427 | AC006251 | 8808 | 1-400 |
| HTEDF96 | 1932 | 614726 | AC021163 | 8809 | 1-540 |
| | | | | | 655-1021 |
| | | | | | 1053-1143 |
| | | | | | 1354-1536 |
| | | | | | 1692-1762 |
| | | | | | 1924-2030 |
| | | | | | 2867-2962 |
| | | | | | 3191-4078 |
| | | | | | 4135-4228 |
| | | | | | 4365-4458 |
| | | | | | 4565-4675 |
| | | | | | 4747-4815 |
| | | | | | 4901-4977 |
| | | | | | 5232-5675 |
| | | | | | 6013-6910 |
| HTEDF96 | 1932 | 614726 | AC006942 | 8810 | 1-541 |
| | | | | | 656-1023 |
| | | | | | 1055-1145 |
| | | | | | 1356-1538 |
| | | | | | 1694-1764 |
| | | | | | 1926-2032 |
| | | | | | 3194-4081 |
| | | | | | 4138-4231 |
| | | | | | 4368-4461 |
| | | | | | 4568-4678 |
| | | | | | 4750-4818 |
| | | | | | 4904-4980 |
| | | | | | 5235-5678 |
| | | | | | 6016-6914 |
| | | | | | 7138-7281 |
| | | | | | 7453-7737 |
| | | | | | 7813-8322 |
| | | | | | 8835-9123 |
| | | | | | 9152-10108 |
| | | | | | 10204-10288 |
| | | | | | 10387-10448 |
| | | | | | 11252-11414 |
| | | | | | 11496-11676 |
| | | | | | 11746-12218 |
| | | | | | 12336-12436 |
| | | | | | 13243-13426 |
| | | | | | 13626-13767 |
| | | | | | 13891-14067 |
| | | | | | 14442-14596 |
| | | | | | 15655-15742 |
| | | | | | 16852-17292 |
| | | | | | 17660-17764 |
| | | | | | 18610-18921 |
| | | | | | 19197-19405 |
| | | | | | 19407-19499 |
| | | | | | 20302-20404 |
| | | | | | 20510-20780 |
| | | | | | 21329-21458 |
| HTEDF96 | 1932 | 614726 | AC021163 | 8811 | 1-288 |
| HTEDF96 | 1932 | 614726 | AC006942 | 8812 | 1-288 |
| HTEDF22 | 1935 | 908406 | AL138891 | 8813 | 1-822 |
| HTEDF22 | 1935 | 908406 | AC002418 | 8814 | 1-823 |
| HTEDF22 | 1935 | 908406 | AC004386 | 8815 | 1-823 |
| HTEDF22 | 1935 | 908406 | AL138891 | 8816 | 1-155 |
| HTEDF22 | 1935 | 908406 | AC002418 | 8817 | 1-142 |
| HTECE66 | 1936 | 522997 | AL159160 | 8818 | 1-61 |
| | | | | | 5520-5850 |
| HTECE66 | 1936 | 522997 | AL390071 | 8819 | 1-61 |
| | | | | | 620-770 |
| | | | | | 5508-5838 |
| HTECE66 | 1936 | 522997 | AL390071 | 8820 | 1-259 |
| HTECE62 | 1937 | 523002 | AC069401 | 8821 | 1-158 |
| | | | | | 259-547 |
| | | | | | 1614-2136 |
| HTECE62 | 1937 | 523002 | AC005232 | 8822 | 1-158 |
| | | | | | 259-547 |
| | | | | | 1614-2136 |
| HTECE51 | 1939 | 870723 | AC016976 | 8823 | 1-301 |
| HTECE51 | 1939 | 870723 | AC058805 | 8824 | 1-301 |
| HTECE51 | 1939 | 870723 | AC027764 | 8825 | 1-301 |
| HTECE51 | 1939 | 870723 | AC016976 | 8826 | 1-425 |
| HTECE51 | 1939 | 870723 | AC027764 | 8827 | 1-425 |
| HTECE31 | 1941 | 508104 | AC069360 | 8828 | 1-283 |
| HTECE31 | 1941 | 508104 | AC023850 | 8829 | 1-283 |
| HTECE31 | 1941 | 508104 | AC069360 | 8830 | 1-409 |
| HTECE31 | 1941 | 508104 | AC023850 | 8831 | 1-409 |
| HTECD94 | 1943 | 527210 | AC025959 | 8832 | 1-58 |
| | | | | | 828-1050 |
| | | | | | 2944-3114 |
| | | | | | 3238-3330 |
| HTECD94 | 1943 | 527210 | AC025963 | 8833 | 1-127 |
| | | | | | 951-1008 |
| | | | | | 1778-2000 |
| | | | | | 3894-4064 |
| | | | | | 4188-4280 |
| HTECD94 | 1943 | 527210 | AC009451 | 8834 | 1-127 |
| | | | | | 951-1008 |
| | | | | | 1781-2003 |
| | | | | | 3897-4067 |
| | | | | | 4191-4283 |
| HTECD94 | 1943 | 527210 | AC025959 | 8835 | 1-151 |
| HTECD94 | 1943 | 527210 | AC025963 | 8836 | 1-151 |
| HTECD94 | 1943 | 527210 | AC009451 | 8837 | 1-151 |
| HTECD88 | 1944 | 527214 | AC024631 | 8838 | 1-560 |
| HTECD88 | 1944 | 527214 | AC017098 | 8839 | 1-560 |
| HTECD88 | 1944 | 527214 | AC024631 | 8840 | 1-263 |
| HTECD88 | 1944 | 527214 | AC017098 | 8841 | 1-869 |
| | | | | | 1451-4175 |
| HTECD88 | 1944 | 527214 | AC024631 | 8842 | 1-869 |
| | | | | | 1451-4174 |
| HTECD88 | 1944 | 527214 | AC017098 | 8843 | 1-263 |
| HTECD70 | 1945 | 527203 | AC013471 | 8844 | 1-243 |
| | | | | | 3350-3433 |
| HTECD65 | 1946 | 533795 | AL157899 | 8845 | 1-119 |
| | | | | | 4379-4589 |
| HTECD65 | 1946 | 533795 | AL137800 | 8846 | 1-119 |
| | | | | | 4380-4590 |
| HTECD65 | 1946 | 533795 | AL157899 | 8847 | 1-489 |
| | | | | | 540-886 |
| HTECD65 | 1946 | 533795 | AL137800 | 8848 | 1-489 |
| | | | | | 540-2889 |
| HTECD15 | 1948 | 523029 | AC019082 | 8849 | 1-405 |
| HTECD15 | 1948 | 523029 | AC019082 | 8850 | 1-136 |
| | | | | | 545-583 |
| | | | | | 824-1177 |
| HTECC71 | 1949 | 508142 | AC060234 | 8851 | 1-364 |
| HTECC45 | 1950 | 508124 | AC034305 | 8852 | 1-320 |
| HTECC45 | 1950 | 508124 | AC034305 | 8853 | 1-539 |
| HTECC26 | 1951 | 508144 | AL158090 | 8854 | 1-168 |
| | | | | | 2574-2660 |
| | | | | | 3463-3623 |
| HTECC09 | 1952 | 678659 | AC069004 | 8855 | 1-91 |
| | | | | | 238-330 |
| | | | | | 1468-1597 |
| | | | | | 1773-1835 |
| | | | | | 2685-2851 |
| | | | | | 2987-3081 |
| | | | | | 3275-3440 |
| | | | | | 4518-4928 |
| | | | | | 6204-6550 |
| | | | | | 6951-7273 |
| | | | | | 7923-8577 |
| HTECC09 | 1952 | 678659 | AC069004 | 8856 | 1-816 |
| HTECC08 | 1953 | 960439 | AC008397 | 8857 | 1-436 |
| HTECC08 | 1953 | 960439 | AC008397 | 8858 | 1-314 |
| HTECC08 | 1953 | 960439 | AC008397 | 8859 | 1-555 |
| HTECA39 | 1955 | 508132 | AC036150 | 8860 | 1-412 |
| HTBCA39 | 1955 | 508132 | AP001883 | 8861 | 1-412 |
| HTECA39 | 1955 | 508132 | AC036150 | 8862 | 1-496 |
| | | | | | 541-1674 |
| HTECA39 | 1955 | 508132 | AP001883 | 8863 | 1-461 |
| HTECA39 | 1955 | 508132 | AC036150 | 8864 | 1-461 |
| HTECA39 | 1955 | 508132 | AP001883 | 8865 | 1-496 |
| | | | | | 541-1674 |
| HTEBJ02 | 1960 | 921321 | AL031727 | 8866 | 1-1383 |
| HTEBJ02 | 1960 | 921321 | AL031727 | 8867 | 1-576 |
| HTEAX06 | 1962 | 960792 | AC015559 | 8868 | 1-949 |
| HTEAX06 | 1962 | 960792 | AC015559 | 8869 | 1-65 |
| | | | | | 86-509 |
| | | | | | 733-1178 |
| | | | | | 2992-3574 |
| | | | | | 4191-4337 |
| | | | | | 4759-4850 |
| | | | | | 6000-6163 |
| | | | | | 6241-6337 |
| | | | | | 6731-6852 |
| | | | | | 6932-7048 |
| | | | | | 7138-7271 |
| | | | | | 8386-8513 |
| | | | | | 9167-9300 |
| | | | | | 9384-9468 |
| | | | | | 9527-9830 |
| | | | | | 10006-10582 |
| | | | | | 11005-11153 |
| | | | | | 11315-11469 |
| | | | | | 11660-11810 |
| | | | | | 14929-15256 |
| | | | | | 15410-15569 |
| | | | | | 16041-16200 |
| | | | | | 16626-16799 |
| | | | | | 17095-17498 |
| | | | | | 17712-18272 |
| HTEAX06 | 1962 | 960792 | AC015559 | 8870 | 1-188 |
| | | | | | 1981-2138 |
| | | | | | 3446-3545 |
| | | | | | 3751-3867 |
| | | | | | 3900-4028 |
| | | | | | 4262-4369 |
| HTEAV22 | 1963 | 679394 | AC016757 | 8871 | 1-1823 |
| HTEAV22 | 1963 | 679394 | AC016757 | 8872 | 1-1229 |
| | | | | | 2106-2702 |
| | | | | | 3129-4275 |
| HTEAR93 | 1967 | 503298 | AC009967 | 8873 | 1-411 |
| | | | | | 1914-2289 |
| | | | | | 2844-2962 |
| | | | | | 3628-4209 |
| | | | | | 4664-4925 |
| | | | | | 5258-5353 |
| HTEAR93 | 1967 | 503298 | AC009967 | 8874 | 1-241 |
| | | | | | 348-492 |
| | | | | | 1563-1872 |
| | | | | | 1875-2138 |
| HTEAR93 | 1967 | 503298 | AC009967 | 8875 | 1-315 |
| HTEAG47 | 1971 | 503623 | AL139384 | 8876 | 1-939 |
| HTEAG47 | 1971 | 503623 | AL162711 | 8877 | 1-939 |
| | | | | | 1988-2462 |
| | | | | | 5032-5242 |
| HTEAG47 | 1971 | 503623 | AC011695 | 8878 | 1-939 |
| HTEAG47 | 1971 | 503623 | AL139384 | 8879 | 1-475 |
| HTEAG47 | 1971 | 503623 | AL162711 | 8880 | 1-310 |
| HTEAG47 | 1971 | 503623 | AL139384 | 8881 | 1-198 |
| HTEAG47 | 1971 | 503623 | AL162711 | 8882 | 1-198 |
| HTEAG47 | 1971 | 503623 | AC011695 | 8883 | 1-198 |
| HTEAG47 | 1971 | 503623 | AC011695 | 8884 | 1-475 |
| HTEAG08 | 1972 | 960469 | AC069236 | 8885 | 1-329 |
| HTEAG08 | 1972 | 960469 | AC069236 | 8886 | 1-454 |
| HTEAB50 | 1973 | 724751 | AL391056 | 8887 | 1-162 |
| | | | | | 524-688 |
| | | | | | 735-874 |
| | | | | | 1577-1774 |
| | | | | | 2049-2216 |
| | | | | | 2395-2540 |
| | | | | | 3191-3424 |
| HTEAB50 | 1973 | 724751 | AC007779 | 8888 | 1-162 |
| | | | | | 524-688 |
| | | | | | 749-849 |
| | | | | | 1579-1776 |
| | | | | | 2050-2217 |
| | | | | | 2396-2541 |
| | | | | | 3192-3425 |
| HTEAB50 | 1973 | 724751 | AC007779 | 8889 | 1-130 |
| HSWBY36 | 1975 | 708291 | AL122125 | 8890 | 1-465 |
| HSWBY36 | 1975 | 708291 | AL122125 | 8891 | 1-586 |
| HSWBE29 | 1977 | 412991 | AC016310 | 8892 | 1-1198 |
| HSWBE29 | 1977 | 412991 | AC016310 | 8893 | 1-531 |
| HSWAS65 | 1978 | 953051 | AC027146 | 8894 | 1-155 |
| | | | | | 281-963 |
| | | | | | 1320-2717 |
| HSWAS65 | 1978 | 953051 | AC027146 | 8895 | 1-2324 |
| | | | | | 2582-2898 |
| | | | | | 3329-3548 |
| | | | | | 4330-4523 |
| | | | | | 4816-4920 |
| | | | | | 5735-5913 |
| | | | | | 7687-7814 |
| | | | | | 8125-8911 |
| | | | | | 9575-9620 |
| HSWAS18 | 1979 | 666302 | AC015734 | 8896 | 1-498 |
| HSWAS18 | 1979 | 666302 | AC015734 | 8897 | 1-1814 |
| HSWAS18 | 1979 | 666302 | AC015734 | 8898 | 1-626 |
| HSWAR63 | 1980 | 471236 | AC023572 | 8899 | 1-1010 |
| HSWAR63 | 1980 | 471236 | AC025630 | 8900 | 1-663 |
| HSWAR63 | 1980 | 471236 | AL158197 | 8901 | 1-1678 |
| HSWAR63 | 1980 | 471236 | AC010554 | 8902 | 1-1242 |
| | | | | | 1316-3871 |
| | | | | | 4275-5565 |
| | | | | | 6216-6811 |
| | | | | | 7004-7388 |
| | | | | | 7749-8799 |
| | | | | | 9220-10381 |
| | | | | | 10766-12026 |
| | | | | | 12271-13076 |
| HSWAR63 | 1980 | 471236 | AL158197 | 8903 | 1-260 |
| HSWAR63 | 1980 | 471236 | AC010554 | 8904 | 1-368 |
| HPWSA52 | 1983 | 727294 | AC023293 | 8905 | 1-1823 |
| | | | | | 1896-2248 |
| | | | | | 2687-2854 |
| | | | | | 3435-3673 |
| | | | | | 3752-3855 |
| | | | | | 5351-5412 |
| | | | | | 5579-5661 |
| | | | | | 5664-6092 |
| | | | | | 6986-7089 |
| | | | | | 7968-8147 |
| HPWSA52 | 1983 | 727294 | AL035699 | 8906 | 1-1823 |
| | | | | | 1896-2248 |
| | | | | | 2687-2854 |
| | | | | | 3433-3671 |
| | | | | | 3750-3853 |
| | | | | | 5349-5410 |
| | | | | | 5577-5659 |
| | | | | | 5662-6090 |
| | | | | | 7966-8145 |
| HPWSA52 | 1983 | 727294 | AC023293 | 8907 | 1-1845 |
| | | | | | 1919-2936 |
| HPWSA52 | 1983 | 727294 | AL035699 | 8908 | 1-1845 |
| | | | | | 1919-2936 |
| HPWDE86 | 1986 | 785710 | AC021124 | 8909 | 1-1473 |
| | | | | | 1741-2513 |
| | | | | | 2636-3258 |
| | | | | | 3403-3998 |
| | | | | | 5728-6283 |
| | | | | | 6454-6541 |
| | | | | | 6613-7768 |
| | | | | | 8422-8995 |
| | | | | | 9025-9187 |
| | | | | | 9699-10397 |
| | | | | | 11541-11606 |
| | | | | | 11644-11887 |
| | | | | | 13552-14227 |
| | | | | | 14437-15311 |
| | | | | | 15960-16131 |
| | | | | | 17491-17894 |
| | | | | | 17906-18148 |
| | | | | | 18243-20300 |
| HPWDE86 | 1986 | 785710 | AC008592 | 8910 | 1-1473 |
| | | | | | 1741-2513 |
| | | | | | 2636-3258 |
| | | | | | 3403-3998 |
| | | | | | 5728-6283 |
| | | | | | 6454-6541 |
| | | | | | 6613-7768 |
| | | | | | 8422-8995 |
| | | | | | 9025-9187 |
| | | | | | 9699-10397 |
| | | | | | 11541-11606 |
| | | | | | 11644-11887 |
| | | | | | 13577-14227 |
| | | | | | 14437-15311 |
| | | | | | 15960-16131 |
| | | | | | 17491-17894 |
| | | | | | 17906-18148 |
| | | | | | 18243-22141 |
| HPWDE86 | 1986 | 785710 | AC008821 | 8911 | 1-1473 |
| | | | | | 1741-2513 |
| | | | | | 2636-3258 |
| | | | | | 3403-3998 |
| | | | | | 5729-6284 |
| | | | | | 6455-6542 |
| | | | | | 6614-7768 |
| | | | | | 8422-8995 |
| | | | | | 9025-9187 |
| | | | | | 9699-10397 |
| | | | | | 11540-11605 |
| | | | | | 11643-11886 |
| | | | | | 13551-14226 |
| | | | | | 14436-15310 |
| | | | | | 15959-16130 |
| | | | | | 17489-17892 |
| | | | | | 17904-18146 |
| | | | | | 18241-19429 |
| HPWDE86 | 1986 | 785710 | AC008924 | 8912 | 1-1473 |
| | | | | | 1741-2513 |
| | | | | | 2636-3258 |
| | | | | | 3403-3997 |
| | | | | | 5728-6283 |
| | | | | | 6454-6541 |
| | | | | | 6613-7768 |
| | | | | | 8422-8995 |
| | | | | | 9025-9187 |
| | | | | | 9699-10397 |
| | | | | | 11541-11606 |
| | | | | | 11644-11887 |
| | | | | | 13577-14227 |
| | | | | | 14437-15311 |
| | | | | | 15960-16131 |
| | | | | | 17491-17894 |
| | | | | | 17906-18148 |
| | | | | | 18243-22140 |
| HPWDE86 | 1986 | 785710 | AC021124 | 8913 | 1-1496 |
| HPWDE86 | 1986 | 785710 | AC008592 | 8914 | 1-1495 |
| HPWDE86 | 1986 | 785710 | AC008821 | 8915 | 1-1495 |
| HPWDE86 | 1986 | 785710 | AC008924 | 8916 | 1-1495 |
| HPWCJ90 | 1987 | 789170 | AC024191 | 8917 | 1-42 |
| | | | | | 1672-1837 |
| | | | | | 2662-3033 |
| | | | | | 4555-4909 |
| | | | | | 5629-6051 |
| HPWCJ90 | 1987 | 789170 | AC024191 | 8918 | 1-636 |
| HPWCJ90 | 1987 | 789170 | AC024191 | 8919 | 1-109 |
| HPWBF35 | 1989 | 707514 | AC018476 | 8920 | 1-347 |
| HPWBF35 | 1989 | 707514 | AC007949 | 8921 | 1-1359 |
| HPWBF35 | 1989 | 707514 | AC018477 | 8922 | 1-345 |
| HPWAT23 | 1991 | 676323 | AC068550 | 8923 | 1-851 |
| | | | | | 939-1165 |
| | | | | | 1537-2159 |
| | | | | | 2587-2619 |
| HPWAT23 | 1991 | 676323 | AC007933 | 8924 | 1-304 |
| HPWAT23 | 1991 | 676323 | AC015912 | 8925 | 1-851 |
| | | | | | 939-1165 |
| | | | | | 1537-2159 |
| | | | | | 2587-2619 |
| HPWAT23 | 1991 | 676323 | AC068550 | 8926 | 1-532 |
| HPWAT23 | 1991 | 676323 | AC068550 | 8927 | 1-479 |
| HPWAT23 | 1991 | 676323 | AC007933 | 8928 | 1-532 |
| HPWAT23 | 1991 | 676323 | AC015912 | 8929 | 1-532 |
| HPWAT23 | 1991 | 676323 | AC007933 | 8930 | 1-482 |
| HPWAT23 | 1991 | 676323 | AC015912 | 8931 | 1-479 |
| HPWAJ85 | 1992 | 535157 | Z95115 | 8932 | 1-808 |
| | | | | | 845-2003 |
| HPWAJ85 | 1992 | 535157 | Z95115 | 8933 | 1-123 |
| | | | | | 1133-1262 |
| | | | | | 2633-2792 |
| | | | | | 3108-3261 |
| | | | | | 4574-5008 |
| | | | | | 5437-5789 |
| | | | | | 6397-6617 |
| | | | | | 6951-7387 |
| | | | | | 8434-8511 |
| | | | | | 8730-8794 |
| HPWAJ85 | 1992 | 535157 | Z95115 | 8934 | 1-693 |
| HPWAJ39 | 1993 | 575271 | AC073177 | 8935 | 1-315 |
| HPWAJ39 | 1993 | 575271 | AC016905 | 8936 | 1-319 |
| HPWAJ39 | 1993 | 575271 | AC016905 | 8937 | 1-258 |
| HPWAJ39 | 1993 | 575271 | AC016905 | 8938 | 1-719 |
| HPWAI05 | 1994 | 932627 | AC017006 | 8939 | 1-564 |
| HPWAI05 | 1994 | 932627 | AC017006 | 8940 | 1-375 |
| HPWAG31 | 1996 | 693618 | AC018695 | 8941 | 1-470 |
| HPWAG31 | 1996 | 693618 | AC009068 | 8942 | 1-463 |
| HPWAG31 | 1996 | 693618 | AC018695 | 8943 | 1-129 |
| HPWAG31 | 1996 | 693618 | AC009068 | 8944 | 1-129 |
| HPVAH71 | 1997 | 829301 | AC021225 | 8945 | 1-2009 |
| HPVAH71 | 1997 | 829301 | AC007881 | 8946 | 1-1775 |
| | | | | | 1871-3872 |
| HPVAH71 | 1997 | 829301 | AC007881 | 8947 | 1-101 |
| HPVAH71 | 1997 | 829301 | AC007881 | 8948 | 1-179 |
| | | | | | 1488-2112 |
| | | | | | 2156-3167 |
| HPVAH41 | 1998 | 848632 | AC023055 | 8949 | 1-817 |
| | | | | | 1052-1362 |
| | | | | | 1416-1580 |
| | | | | | 1660-1798 |
| | | | | | 1995-2102 |
| | | | | | 2315-5348 |
| | | | | | 6011-6166 |
| | | | | | 6325-6676 |
| | | | | | 6848-7254 |
| | | | | | 7391-7453 |
| HPVAH41 | 1998 | 848632 | AC023055 | 8950 | 1-300 |
| HPVAH41 | 1998 | 848632 | AC023055 | 8951 | 1-646 |
| HPRTI54 | 2003 | 728812 | AC074120 | 8952 | 1-963 |
| HPRTI54 | 2003 | 728812/ AP001818 | 8953 | 1-963 | |
| HPRTI54 | 2003 | 728812 | AC074120 | 8954 | 1-738 |
| HPRTI54 | 2003 | 728812 | AP001818 | 8955 | 1-1024 |
| HPRTI16 | 2004 | 667652 | AL109928 | 8956 | 1-55 |
| | | | | | 140-468 |
| | | | | | 845-1039 |
| | | | | | 2611-3094 |
| | | | | | 3270-3416 |
| | | | | | 5144-5386 |
| | | | | | 6727-6949 |
| | | | | | 7289-7483 |
| | | | | | 7526-7651 |
| | | | | | 10478-10559 |
| | | | | | 13709-13761 |
| | | | | | 13774-14390 |
| | | | | | 15428-15686 |
| | | | | | 17608-17682 |
| | | | | | 23419-24008 |
| HPRTI16 | 2004 | 667652 | AL109928 | 8957 | 1-200 |
| HPRTI16 | 2004 | 667652 | AL109928 | 8958 | 1-131 |
| | | | | | 2091-2573 |
| HPRCV66 | 2005 | 320393 | AC007377 | 8959 | 1-1104 |
| | | | | | 1155-1427 |
| | | | | | 4071-4160 |
| | | | | | 4296-4421 |
| HPRCV66 | 2005 | 320393 | AC010447 | 8960 | 1-792 |
| | | | | | 1169-1441 |
| | | | | | 3979-4068 |
| | | | | | 4204-4329 |
| HPRCV66 | 2005 | 320393 | AC007377 | 8961 | 1-618 |
| HPRCV66 | 2005 | 320393 | AC010447 | 8962 | 1-525 |
| HPRCV66 | 2005 | 320393 | AC007377 | 8963 | 1-525 |
| HPRCV66 | 2005 | 320393 | AC010447 | 8964 | 1-618 |
| HPRCT83 | 2006 | 780264 | AC007182 | 8965 | 1-1014 |
| | | | | | 4968-5234 |
| | | | | | 5805-6546 |
| | | | | | 7479-8153 |
| | | | | | 9443-9916 |
| | | | | | 13555-13984 |
| | | | | | 16814-17618 |
| | | | | | 18231-18666 |
| | | | | | 21045-21485 |
| | | | | | 22412-23012 |
| | | | | | 23014-23411 |
| | | | | | 24103-24320 |
| | | | | | 31987-32500 |
| | | | | | 37576-37704 |
| | | | | | 39352-39698 |
| | | | | | 40342-40425 |
| | | | | | 43454-43595 |
| | | | | | 43627-44110 |
| | | | | | 44718-45133 |
| | | | | | 45471-45741 |
| | | | | | 45986-46107 |
| HPRCT83 | 2006 | 780264 | AC007182 | 8966 | 1-323 |
| HPRCT83 | 2006 | 780264 | AC007182 | 8967 | 1-476 |
| HPRCN03 | 2007 | 925420 | AC004056 | 8968 | 1-529 |
| HPRCN03 | 2007 | 925420 | AC004056 | 8969 | 1-384 |
| HPRCN03 | 2007 | 925420 | AC004056 | 8970 | 1-270 |
| HPRCL72 | 2009 | 766311 | AF276255 | 8971 | 1-107 |
| | | | | | 198-359 |
| | | | | | 2503-3020 |
| | | | | | 5027-6174 |
| KPRCL72 | 2009 | 766311 | AC015709 | 8972 | 1-107 |
| | | | | | 198-359 |
| | | | | | 2503-3020 |
| | | | | | 5026-6173 |
| HPRCD11 | 2012 | 967762 | AC010645 | 8973 | 1-1261 |
| HPRCD11 | 2012 | 967762 | AC010645 | 8974 | 1-763 |
| | | | | | 1255-1379 |
| HPRCD11 | 2012 | 967762 | AC010645 | 8975 | 1-1412 |
| HPRCC22 | 2013 | 526623 | AL158815 | 8976 | 1-258 |
| | | | | | 1168-1273 |
| | | | | | 1506-1763 |
| | | | | | 3756-5057 |
| | | | | | 5749-5893 |
| | | | | | 6020-10468 |
| HPRCC22 | 2013 | 526623 | AC012634 | 8977 | 1-2422 |
| HPRCC22 | 2013 | 526623 | AC005601 | 8978 | 1-2422 |
| HPRCC22 | 2013 | 526623 | AL035587 | 8979 | 1-258 |
| | | | | | 1168-1273 |
| | | | | | 1493-1763 |
| | | | | | 3756-5492 |
| | | | | | 5749-5893 |
| | | | | | 6020-10468 |
| HPRCC22 | 2013 | 526623 | AL158815 | 8980 | 1-306 |
| HPRCC22 | 2013 | 526623 | AL158815 | 8981 | 1-606 |
| HPRCC22 | 2013 | 526623 | AC012634 | 8982 | 1-240 |
| HPRCC22 | 2013 | 526623 | AC012634 | 8983 | 1-435 |
| HPRCC22 | 2013 | 526623 | AC005601 | 8984 | 1-240 |
| HPRCC22 | 2013 | 526623 | AC005601 | 8985 | 1-435 |
| HPRCC22 | 2013 | 526623 | AL035587 | 8986 | 1-606 |
| HPRCC22 | 2013 | 526623 | AL035587 | 8987 | 1-296 |
| HPRBI87 | 2016 | 695116 | AC012618 | 8988 | 1-1525 |
| HPRBI87 | 2016 | 695116 | AC062036 | 8989 | 1-134 |
| | | | | | 343-404 |
| | | | | | 622-764 |
| | | | | | 1703-1852 |
| | | | | | 1920-4557 |
| | | | | | 5206-5421 |
| HPRBI87 | 2016 | 695116 | AC062036 | 8990 | 1-316 |
| HPRBH80 | 2017 | 781636 | AC068212 | 8991 | 1-851 |
| HPRBH80 | 2017 | 781636 | AC004582 | 8992 | 1-851 |
| HPRBH80 | 2017 | 781636 | AC068212 | 8993 | 1-227 |
| | | | | | 1252-1834 |
| HPRBH80 | 2017 | 781636 | AC004582 | 8994 | 1-227 |
| | | | | | 1252-1810 |
| HPRAV80 | 2018 | 781637 | AC019071 | 8995 | 1-173 |
| | | | | | 594-708 |
| | | | | | 1259-1460 |
| | | | | | 1857-2014 |
| | | | | | 2036-2449 |
| | | | | | 3537-3910 |
| | | | | | 5801-8095 |
| | | | | | 8166-9964 |
| | | | | | 10231-10812 |
| HPRAV80 | 2018 | 781637 | AC019071 | 8996 | 1-440 |
| HPRAN50 | 2020 | 724753 | AC011244 | 8997 | 1-377 |
| HPRAN50 | 2020 | 724753 | AL161433 | 8998 | 1-348 |
| HPRAN50 | 2020 | 724753 | AL009030 | 8999 | 1-377 |
| HPRAN50 | 2020 | 724753 | AL133255 | 9000 | 1-348 |
| HPRAN50 | 2020 | 724753 | AL157879 | 9001 | 1-350 |
| HPRAN50 | 2020 | 724753 | AL161433 | 9002 | 1-627 |
| HPRAN50 | 2020 | 724753 | AL009030 | 9003 | 1-573 |
| HPRAN50 | 2020 | 724753 | AL133255 | 9004 | 1-572 |
| HPRAN50 | 2020 | 724753 | AL157879 | 9005 | 1-572 |
| HPRAG73 | 2022 | 764757 | AC009985 | 9006 | 1-867 |
| | | | | | 902-1299 |
| HPRAG73 | 2022 | 764757 | AC009985 | 9007 | 1-370 |
| HPRAF86 | 2024 | 784594 | AC018494 | 9008 | 1-604 |
| HPRAF86 | 2024 | 784594 | AC018494 | 9009 | 1-435 |
| HPMSH94 | 2026 | 796839 | AP001033 | 9010 | 1-609 |
| HPMSH94 | 2026 | 796839 | AC015955 | 9011 | 1-616 |
| HPMSH94 | 2026 | 796839 | AP001033 | 9012 | 1-324 |
| HPMSH94 | 2026 | 796839 | AC015955 | 9013 | 1-96 |
| | | | | | 643-1148 |
| | | | | | 1742-2072 |
| | | | | | 2248-2716 |
| | | | | | 3978-4071 |
| | | | | | 5368-8195 |
| HPMSH94 | 2026 | 796839 | AC015955 | 9014 | 1-314 |
| HPMSB35 | 2027 | 707476 | AC069240 | 9015 | 1-655 |
| | | | | | 693-1132 |
| | | | | | 1637-1983 |
| | | | | | 2129-2540 |
| HPMSB35 | 2027 | 707476 | AL080279 | 9016 | 1-655 |
| | | | | | 693-1132 |
| | | | | | 1637-1983 |
| | | | | | 2129-2540 |
| HPMSB35 | 2027 | 707476 | AC069240 | 9017 | 1-69 |
| | | | | | 154-406 |
| | | | | | 641-789 |
| | | | | | 1249-1488 |
| | | | | | 1646-2009 |
| HPMSB35 | 2027 | 707476 | AL080279 | 9018 | 1-277 |
| HPMSB35 | 2027 | 707476 | AC069240 | 9019 | 1-277 |
| HPMSB35 | 2027 | 707476 | AL080279 | 9020 | 1-69 |
| | | | | | 154-406 |
| | | | | | 641-789 |
| | | | | | 1249-1488 |
| | | | | | 1646-2009 |
| HPMMK05 | 2028 | 928283 | AP001265 | 9021 | 1-799 |
| HPMMK05 | 2028 | 928283 | AP000751 | 9022 | 1-25 |
| | | | | | 577-1096 |
| | | | | | 1319-5338 |
| HPMMK05 | 2028 | 928283 | AP001265 | 9023 | 1-1848 |
| HPMMK05 | 2028 | 928283 | AP000751 | 9024 | 1-384 |
| HPMMK05 | 2028 | 928283 | AP000751 | 9025 | 1-1849 |
| HPMMB08 | 2029 | 957945 | AL121918 | 9026 | 1-759 |
| | | | | | 870-1328 |
| HPMMB08 | 2029 | 957945 | AC021670 | 9027 | 1-759 |
| | | | | | 870-1328 |
| HPMMB08 | 2029 | 957945 | AL121918 | 9028 | 1-414 |
| HPMMB08 | 2029 | 957945 | AC021670 | 9029 | 1-533 |
| HPMKP06 | 2030 | 933895 | AC034210 | 9030 | 1-462 |
| HPMKP06 | 2030 | 933895 | AC018791 | 9031 | 1-1961 |
| HPMKP06 | 2030 | 933895 | AC016627 | 9032 | 1-1961 |
| HPMKP06 | 2030 | 933895 | AC018791 | 9033 | 1-448 |
| HPMKP06 | 2030 | 933895 | AC016627 | 9034 | 1-448 |
| HPMKC05 | 2031 | 930874 | AC009966 | 9035 | 1-821 |
| HPMKC05 | 2031 | 930874 | AC009966 | 9036 | 1-115 |
| HPMKC05 | 2031 | 930874 | AC009966 | 9037 | 1-512 |
| HPMJT12 | 2032 | 969483 | AC009622 | 9038 | 1-109 |
| | | | | | 530-1348 |
| | | | | | 1382-1410 |
| HPMJT12 | 2032 | 969483 | AF216667 | 9039 | 1-819 |
| HPMJT12 | 2032 | 969483 | AF257497 | 9040 | 1-135 |
| | | | | | 539-1357 |
| | | | | | 1391-1419 |
| HPMJT12 | 2032 | 969483 | AF216667 | 9041 | 1-89 |
| HPMJK11 | 2034 | 965636 | AF252825 | 9042 | 1-518 |
| HPMJI11 | 2036 | 965627 | AL162379 | 9043 | 1-271 |
| | | | | | 419-828 |
| | | | | | 1228-1729 |
| | | | | | 4082-4171 |
| HPMJI11 | 2036 | 965627 | AL162379 | 9044 | 1-161 |
| HPMJE06 | 2037 | 939682 | AC025006 | 9045 | 1-811 |
| HPMJE06 | 2037 | 939682 | AC025006 | 9046 | 1-549 |
| | | | | | 558-731 |
| | | | | | 1577-1719 |
| HPMJE06 | 2037 | 939682 | AC025006 | 9047 | 1-293 |
| HPMGO88 | 2041 | 463906 | AC023389 | 9048 | 1-466 |
| HPMGO88 | 2041 | 463906 | AC023389 | 9049 | 1-465 |
| HPMGO88 | 2041 | 463906 | AC022169 | 9050 | 1-466 |
| HPMGO88 | 2041 | 463906 | AC022169 | 9051 | 1-986 |
| HPMGO88 | 2041 | 463906 | AC022169 | 9052 | 1-998 |
| HPMGJ16 | 2043 | 662021 | AC023508 | 9053 | 1-216 |
| HPMGJ16 | 2043 | 662021 | AC023508 | 9054 | 1-670 |
| HPMFL73 | 2046 | 867670 | AC005103 | 9055 | 1-940 |
| HPMFL73 | 2046 | 867670 | AF047825 | 9056 | 1-940 |
| HPMFL73 | 2046 | 867670 | AC005103 | 9057 | 1-770 |
| HPMFL73 | 2046 | 867670 | AC005103 | 9058 | 1-88 |
| HPMFL73 | 2046 | 867670 | AF047825 | 9059 | 1-770 |
| HPMFC02 | 2047 | 920327 | AL365261 | 9060 | 1-853 |
| HPMFB26 | 2048 | 867674 | AC004873 | 9061 | 1-345 |
| | | | | | 484-2275 |
| HPMFB26 | 2048 | 867674 | AL034380 | 9062 | 1-345 |
| 484-2275 | | | | | |
| HPMFB26 | 2048 | 867674 | AL034380 | 9063 | 1-768 |
| | | | | | 1259-1628 |
| | | | | | 1650-2209 |
| | | | | | 2292-2397 |
| | | | | | 2433-2587 |
| | | | | | 2660-2791 |
| | | | | | 3615-3861 |
| | | | | | 3936-4479 |
| | | | | | 4621-4806 |
| | | | | | 6158-6592 |
| | | | | | 6828-6934 |
| | | | | | 7507-8214 |
| | | | | | 8433-9310 |
| | | | | | 10436-11557 |
| HPMFB26 | 2048 | 867674 | AC004873 | 9064 | 1-768 |
| | | | | | 1259-1628 |
| | | | | | 1650-2209 |
| | | | | | 2292-2397 |
| | | | | | 2433-2587 |
| | | | | | 2694-2801 |
| | | | | | 3604-3858 |
| | | | | | 3936-4479 |
| | | | | | 4608-4872 |
| | | | | | 6158-6592 |
| | | | | | 7507-8214 |
| | | | | | 8433-9310 |
| | | | | | 10436-11557 |
| HPMEG77 | 2049 | 772503 | AL135793 | 9065 | 1-124 |
| | | | | | 3436-4154 |
| | | | | | 4447-5170 |
| HPMEG77 | 2049 | 772503 | AL135793 | 9066 | 1-142 |
| HPMDP10 | 2051 | 968350 | AL109754 | 9067 | 1-170 |
| | | | | | 1357-1493 |
| | | | | | 2395-3335 |
| HPMDP10 | 2051 | 968350 | AL109754 | 9068 | 1-317 |
| HPMDF06 | 2052 | 954567 | AC068644 | 9069 | 1-1496 |
| HPMDF06 | 2052 | 954567 | AC068644 | 9070 | 1-474 |
| HPMAH85 | 2060 | 783344 | AC018870 | 9071 | 1-492 |
| HPMAH85 | 2060 | 783344 | AC018515 | 9072 | 1-490 |
| HPMAH85 | 2060 | 783344 | AC018870 | 9073 | 1-355 |
| HPMAH85 | 2060 | 783344 | AC018515 | 9074 | 1-355 |
| HPMAH56 | 2061 | 867711 | AC019225 | 9075 | 1-393 |
| HPMAH56 | 2061 | 867711 | AL355990 | 9076 | 1-393 |
| HPMAH56 | 2061 | 867711 | AL137790 | 9077 | 1-393 |
| HPMAH56 | 2061 | 867711 | AC010535 | 9078 | 1-393 |
| HPMAH56 | 2061 | 867711 | AC019225 | 9079 | 1-195 |
| HPMAH56 | 2061 | 867711 | AL137790 | 9080 | 1-195 |
| HPMAH56 | 2061 | 867711 | AC010535 | 9081 | 1-195 |
| HPLBW22 | 2063 | 679217 | AL390760 | 9082 | 1-405 |
| | | | | | 509-556 |
| | | | | | 1117-1214 |
| HPLBW22 | 2063 | 679217 | AL390760 | 9083 | 1-870 |
| HPLBW22 | 2063 | 679217 | AL390760 | 9084 | 1-372 |
| HPLBT54 | 2065 | 731065 | AC027620 | 9085 | 1-604 |
| HPLBT54 | 2065 | 731065 | AC027620 | 9086 | 1-218 |
| HPLBT53 | 2066 | 728517 | AL096838 | 9087 | 1-693 |
| | | | | | 1224-1924 |
| HPLBT53 | 2066 | 728517 | AL117391 | 9088 | 1-693 |
| | | | | | 1224-1924 |
| HPLBT53 | 2066 | 728517 | AL096838 | 9089 | 1-131 |
| HPLBT53 | 2066 | 728517 | AL117391 | 9090 | 1-131 |
| HPLBT53 | 2066 | 728517 | AL096838 | 9091 | 1-439 |
| HPLBT53 | 2066 | 728517 | AL117391 | 9092 | 1-439 |
| HPLBS41 | 2067 | 712707 | AL158203 | 9093 | 1-573 |
| | | | | | 882-1629 |
| | | | | | 1937-3057 |
| | | | | | 3512-5443 |
| HPLBO90 | 2069 | 787208 | AC010997 | 9094 | 1-886 |
| HPLBO90 | 2069 | 787208 | AL390034 | 9095 | 1-886 |
| HPLBO90 | 2069 | 787208 | AC010997 | 9096 | 1-211 |
| HPLBN79 | 2070 | 781854 | AC019175 | 9097 | 1-925 |
| HPLBN79 | 2070 | 781854 | AL356738 | 9098 | 1-925 |
| HPLBN79 | 2070 | 781854 | AC019175 | 9099 | 1-523 |
| HPLBN79 | 2070 | 781854 | AL356738 | 9100 | 1-300 |
| HPLBN79 | 2070 | 781854 | AC019175 | 9101 | 1-300 |
| HPLBN79 | 2070 | 781854 | AL356738 | 9102 | 1-1556 |
| | | | | | 2168-2385 |
| HPLAX14 | 2072 | 727885 | AC005073 | 9103 | 1-447 |
| | | | | | 940-1180 |
| | | | | | 1852-2062 |
| | | | | | 2064-2154 |
| | | | | | 2609-2977 |
| | | | | | 3455-4244 |
| | | | | | 4796-5220 |
| | | | | | 6485-6924 |
| | | | | | 8360-8685 |
| | | | | | 8734-9287 |
| | | | | | 9704-10448 |
| | | | | | 11084-12000 |
| | | | | | 12226-13392 |
| | | | | | 13703-13772 |
| | | | | | 13805-14443 |
| | | | | | 14470-14888 |
| | | | | | 15137-16367 |
| | | | | | 16448-17023 |
| | | | | | 17096-17156 |
| | | | | | 17259-18000 |
| | | | | | 18350-18690 |
| | | | | | 18962-19128 |
| | | | | | 19420-19573 |
| | | | | | 19792-20077 |
| | | | | | 20124-22431 |
| | | | | | 22573-23150 |
| | | | | | 23223-23837 |
| | | | | | 24074-24172 |
| | | | | | 24218-24750 |
| | | | | | 24811-25121 |
| | | | | | 26008-27281 |
| | | | | | 27312-27680 |
| | | | | | 27891-28841 |
| | | | | | 29378-29581 |
| | | | | | 31206-31718 |
| HPLAX14 | 2072 | 727885 | AC005071 | 9104 | 1-447 |
| | | | | | 1852-2062 |
| | | | | | 2064-2154 |
| | | | | | 2609-2977 |
| | | | | | 3455-4244 |
| | | | | | 4796-5218 |
| | | | | | 6593-6924 |
| | | | | | 9903-10133 |
| | | | | | 11084-12000 |
| | | | | | 12226-13392 |
| | | | | | 13703-13772 |
| | | | | | 13805-14443 |
| | | | | | 14470-14888 |
| | | | | | 15137-16367 |
| | | | | | 16448-17010 |
| | | | | | 17096-17156 |
| | | | | | 17259-18000 |
| | | | | | 18350-18690 |
| | | | | | 18962-19128 |
| | | | | | 19420-19573 |
| | | | | | 19792-20077 |
| | | | | | 20124-22431 |
| | | | | | 22573-23150 |
| | | | | | 23223-23837 |
| | | | | | 24074-24172 |
| | | | | | 24218-24750 |
| | | | | | 24819-25110 |
| | | | | | 26008-27281 |
| | | | | | 27312-27680 |
| | | | | | 27891-28841 |
| | | | | | 29378-29581 |
| | | | | | 31206-31718 |
| HPLAX14 | 2072 | 727885 | AC005073 | 9105 | 1-853 |
| HPLAX14 | 2072 | 727885 | AC005073 | 9106 | 1-3333 |
| | | | | | 3556-3754 |
| | | | | | 3816-7381 |
| | | | | | 7384-7601 |
| | | | | | 7635-8330 |
| | | | | | 8572-8879 |
| | | | | | 8917-9030 |
| | | | | | 9088-9191 |
| | | | | | 9671-9908 |
| | | | | | 9911-13281 |
| | | | | | 13403-13828 |
| | | | | | 14157-15040 |
| | | | | | 15737-16040 |
| | | | | | 16205-16293 |
| | | | | | 17878-18795 |
| | | | | | 19197-19455 |
| | | | | | 19962-21676 |
| HPLAX14 | 2072 | 727885 | AC005071 | 9107 | 1-3015 |
| | | | | | 3238-3428 |
| | | | | | 3498-7063 |
| | | | | | 7066-7283 |
| | | | | | 7317-8012 |
| | | | | | 9349-12963 |
| | | | | | 13085-13595 |
| | | | | | 13839-14722 |
| | | | | | 15397-15722 |
| | | | | | 15887-15975 |
| | | | | | 17560-18477 |
| | | | | | 18879-19130 |
| | | | | | 19644-21358 |
| HPLAX14 | 2072 | 727885 | AC005071 | 9108 | 1-1300 |
| HPLAV44 | 2073 | 715732 | AC010645 | 9109 | 1-1261 |
| HPLAV44 | 2073 | 715732 | AC010645 | 9110 | 1-125 |
| | | | | | 617-1379 |
| HPLAV44 | 2073 | 715732 | AC010645 | 9111 | 1-1412 |
| HPJFA10 | 2075 | 963322 | AC009299 | 9112 | 1-607 |
| HPJFA10 | 2075 | 963322 | AC009299 | 9113 | 1-465 |
| HPJFA10 | 2075 | 963322 | AC009299 | 9114 | 1-475 |
| HPJEV95 | 2076 | 929723 | AL359456 | 9115 | 1-711 |
| HPJEV95 | 2076 | 929723 | AL390724 | 9116 | 1-633 |
| HPJEV95 | 2076 | 929723 | AL390724 | 9117 | 1-368 |
| HPJEV95 | 2076 | 929723 | AL359456 | 9118 | 1-1365 |
| HPJET11 | 2078 | 965894 | AP001270 | 9119 | 1-961 |
| HPJET11 | 2078 | 965894 | AP001270 | 9120 | 1-344 |
| HPJET11 | 2078 | 965894 | AP001270 | 9121 | 1-527 |
| HPJES17 | 2079 | 859867 | AP001857 | 9122 | 1-444 |
| HPJES17 | 2079 | 859867 | AC015703 | 9123 | 1-444 |
| HPJES17 | 2079 | 859867 | AP001857 | 9124 | 1-54 |
| | | | | | 1030-1290 |
| HPJEL02 | 2080 | 918315 | AC025014 | 9125 | 1-1195 |
| | | | | | 1827-2531 |
| | | | | | 4783-5133 |
| | | | | | 5139-5379 |
| | | | | | 5902-6081 |
| | | | | | 6463-7267 |
| | | | | | 7466-7724 |
| | | | | | 8041-8216 |
| | | | | | 8269-9037 |
| | | | | | 9310-10364 |
| | | | | | 10545-10988 |
| | | | | | 11353-12100 |
| HPJEL02 | 2080 | 918315 | AC011850 | 9126 | 1-416 |
| | | | | | 1048-1381 |
| | | | | | 4025-4374 |
| | | | | | 4380-4621 |
| | | | | | 5927-6305 |
| HPJEL02 | 2080 | 918315 | AC011850 | 9127 | 1-334 |
| HPJEL02 | 2080 | 918315 | AC020590 | 9128 | 1-397 |
| HPJEL02 | 2080 | 918315 | AL162451 | 9129 | 1-416 |
| | | | | | 1052-1446 |
| | | | | | 2106-2304 |
| | | | | | 4264-4614 |
| | | | | | 4620-4861 |
| | | | | | 5947-6495 |
| HPJEL02 | 2080 | 918315 | AC012661 | 9130 | 1-396 |
| HPJEL02 | 2080 | 918315 | AC011850 | 9131 | 1-660 |
| HPJEL02 | 2080 | 918315 | AC025014 | 9132 | 1-1181 |
| HPJEL02 | 2080 | 918315 | AC011850 | 9133 | 1-247 |
| HPJEL02 | 2080 | 918315 | AL162451 | 9134 | 1-249 |
| HPJEL02 | 2080 | 918315 | AC020590 | 9135 | 1-659 |
| HPJEL02 | 2080 | 918315 | AC012661 | 9136 | 1-486 |
| HPJEG53 | 2081 | 974074 | AC006137 | 9137 | 1-508 |
| HPJEG53 | 2081 | 974074 | AL050328 | 9138 | 1-508 |
| HPJEG53 | 2081 | 974074 | AC006137 | 9139 | 1-266 |
| | | | | | 1353-1457 |
| | | | | | 1654-1954 |
| HPJEG53 | 2081 | 974074 | AL050328 | 9140 | 1-323 |
| | | | | | 1647-1959 |
| HPJDT03 | 2083 | 922815 | AC009143 | 9141 | 1-459 |
| HPJDT03 | 2083 | 922815 | AC009123 | 9142 | 1-459 |
| | | | | | 3173-3221 |
| | | | | | 5754-6155 |
| HPJDP54 | 2084 | 949149 | AC022608 | 9143 | 1-531 |
| HPJDP54 | 2084 | 949149 | AC021472 | 9144 | 1-531 |
| HPJDP54 | 2084 | 949149 | AC069078 | 9145 | 1-531 |
| HPJDP54 | 2084 | 949149 | AC022608 | 9146 | 1-301 |
| HPJDP54 | 2084 | 949149 | AC022608 | 9147 | 1-537 |
| HPJDP54 | 2084 | 949149 | AC021472 | 9148 | 1-1124 |
| HPJDP54 | 2084 | 949149 | AC021472 | 9149 | 1-301 |
| HPJDP54 | 2084 | 949149 | AC069078 | 9150 | 1-1124 |
| HPJDP54 | 2084 | 949149 | AC069078 | 9151 | 1-301 |
| HPJDC01 | 2086 | 915056 | AL357517 | 9152 | 1-607 |
| HPJDC01 | 2086 | 915056 | AL356792 | 9153 | 1-607 |
| HPJDC01 | 2086 | 915056 | AL357517 | 9154 | 1-532 |
| HPJDC01 | 2086 | 915056 | AL357517 | 9155 | 1-221 |
| HPJDC01 | 2086 | 915056 | AL356792 | 9156 | 1-532 |
| HPJDC01 | 2086 | 915056 | AL356792 | 9157 | 1-221 |
| HPJCT81 | 2089 | 494874 | AC068243 | 9158 | 1-652 |
| HPJCT81 | 2089 | 494874 | AC068243 | 9159 | 1-119 |
| HPJCT81 | 2089 | 494874 | AC068243 | 9160 | 1-420 |
| HPJCT26 | 2090 | 559949 | AC022064 | 9161 | 1-130 |
| | | | | | 781-1384 |
| | | | | | 3527-3569 |
| HPJCT26 | 2090 | 559949 | AC022064 | 9162 | 1-198 |
| HPJCS73 | 2091 | 975087 | AC008013 | 9163 | 1-751 |
| | | | | | 869-1288 |
| | | | | | 1741-2134 |
| | | | | | 3713-4192 |
| | | | | | 4219-4525 |
| | | | | | 5032-5188 |
| | | | | | 6221-6459 |
| | | | | | 7627-7887 |
| | | | | | 8458-9081 |
| | | | | | 9227-9966 |
| | | | | | 10464-10713 |
| | | | | | 11232-11320 |
| | | | | | 11620-11777 |
| | | | | | 11791-12453 |
| | | | | | 12643-13059 |
| | | | | | 14536-14632 |
| | | | | | 15693-16508 |
| | | | | | 16536-17099 |
| | | | | | 17433-17823 |
| | | | | | 18365-18520 |
| | | | | | 19494-19542 |
| | | | | | 19895-20386 |
| | | | | | 20452-21075 |
| | | | | | 21128-21475 |
| | | | | | 22370-22928 |
| | | | | | 22994-23030 |
| HPJCS73 | 2091 | 975087 | AC009533 | 9164 | 1-221 |
| | | | | | 367-759 |
| | | | | | 1212-1606 |
| | | | | | 3182-3992 |
| | | | | | 4509-4666 |
| | | | | | 4820-4982 |
| | | | | | 5711-5948 |
| | | | | | 7122-7382 |
| | | | | | 7953-8576 |
| | | | | | 8722-9484 |
| | | | | | 9977-10227 |
| | | | | | 10746-10834 |
| | | | | | 11133-11288 |
| | | | | | 11304-11966 |
| | | | | | 12156-12572 |
| | | | | | 14044-14140 |
| | | | | | 14735-15547 |
| | | | | | 15575-16138 |
| | | | | | 16472-16862 |
| | | | | | 17405-17560 |
| | | | | | 18541-18589 |
| | | | | | 18938-19448 |
| | | | | | 20178-20525 |
| | | | | | 21420-21971 |
| | | | | | 22037-22073 |
| | | | | | 22331-22434 |
| | | | | | 22548-22685 |
| | | | | | 22842-23316 |
| | | | | | 23334-23726 |
| | | | | | 25414-26133 |
| | | | | | 26228-26338 |
| | | | | | 26375-26622 |
| | | | | | 26657-26756 |
| | | | | | 27017-27239 |
| | | | | | 27287-27340 |
| | | | | | 27456-27676 |
| | | | | | 27850-28149 |
| | | | | | 28593-28639 |
| | | | | | 28670-29013 |
| | | | | | 29189-29345 |
| | | | | | 29359-30420 |
| HPJCS73 | 2091 | 975087 | AC008013 | 9165 | 1-294 |
| HPJCS73 | 2091 | 975087 | AC008013 | 9166 | 1-106 |
| | | | | | 220-357 |
| | | | | | 575-1050 |
| | | | | | 1060-1459 |
| | | | | | 3153-3870 |
| | | | | | 3965-4359 |
| | | | | | 4392-4496 |
| | | | | | 4756-4977 |
| | | | | | 5025-5078 |
| | | | | | 5198-5418 |
| | | | | | 5593-5895 |
| | | | | | 6301-6763 |
| | | | | | 6941-8173 |
| | | | | | 8913-9547 |
| | | | | | 9927-10355 |
| | | | | | 10651-11058 |
| | | | | | 11461-11749 |
| HPJCS73 | 2091 | 975087 | AC009533 | 9167 | 1-636 |
| HPJCS32 | 2093 | 699046 | AC024922 | 9168 | 1-274 |
| RPJCS32 | 2093 | 699046 | AC024922 | 9169 | 1-274 |
| HPJCL55 | 2095 | 670083 | AC068280 | 9170 | 1-895 |
| HPJBS35 | 2100 | 867818 | AC016276 | 9171 | 1-431 |
| HiPJBS35 2100 | 867818 | AC015557 | 9172 | 1-436 | |
| HPJBS35 | 2100 | 867818 | AC015557 | 9173 | 1-495 |
| HPJBL76 | 2101 | 769889 | AC007066 | 9174 | 1-1543 |
| HPJBL76 | 2101 | 769889 | AC018466 | 9175 | 1-1543 |
| HPJBL76 | 2101 | 769889 | AC007066 | 9176 | 1-785 |
| KPJBL76 | 2101 | 769889 | AC007066 | 9177 | 1-1761 |
| HPJBL76 | 2101 | 769889 | AC018466 | 9178 | 1-1761 |
| HPJBL76 | 2101 | 769889 | AC018466 | 9179 | 1-785 |
| HPJBK25 | 2103 | 974606 | AC005077 | 9180 | 1-540 |
| HPJBK25 | 2103 | 974606 | AC005077 | 9181 | 1-124 |
| HPJBK14 | 2104 | 974593 | AC005202 | 9182 | 1-604 |
| HPJBK14 | 2104 | 974593 | AC005202 | 9183 | 1-98 |
| HPJBH45 | 2105 | 717088 | AC073089 | 9184 | 1-681 |
| HPJBH45 | 2105 | 717088 | AC006480 | 9185 | 1-681 |
| KPIBH45 | 2105 | 717088 | AC073089 | 9186 | 1-238 |
| HPJBH45 | 2105 | 717088 | AC006480 | 9187 | 1-218 |
| HPJBH45 | 2105 | 717088 | AC006480 | 9188 | 1-493 |
| HPJAU73 | 2107 | 806718 | AC011689 | 9189 | 1-1216 |
| HPJAU73 | 2107 | 806718 | AC078939 | 9190 | 1-1496 |
| HPJAU73 | 2107 | 806718 | AC011043 | 9191 | 1-712 |
| | | | | | 904-1867 |
| | | | | | 1874-1906 |
| | | | | | 2000-2124 |
| | | | | | 2337-3891 |
| HPJAU73 | 2107 | 806718 | AC011841 | 9192 | 1-710 |
| | | | | | 902-1864 |
| | | | | | 1997-2121 |
| | | | | | 2334-3824 |
| | | | | | 4232-5905 |
| HPJAU73 | 2107 | 806718 | AC078939 | 9193 | 1-646 |
| | | | | | 837-1797 |
| | | | | | 1804-1836 |
| | | | | | 1930-3820 |
| | | | | | 4161-5834 |
| HPJAU73 | 2107 | 806718 | AC078939 | 9194 | 1-1358 |
| HPJAU73 | 2107 | 806718 | AC011043 | 9195 | 1-105 |
| HPJAU73 | 2107 | 806718 | AC078939 | 9196 | 1-906 |
| HPJAU73 | 2107 | 806718 | AC011841 | 9197 | 1-541 |
| HPJAU73 | 2107 | 806718 | AC011841 | 9198 | 1-105 |
| HPJAU73 | 2107 | 806718 | AC078939 | 9199 | 1-564 |
| HPJAU73 | 2107 | 806718 | AC078939 | 9200 | 1-105 |
| HPJAP92 | 2108 | 806718 | AL353687 | 9201 | 1-430 |
| HPJAP92 | 2108 | 887830 | Z97832 | 9202 | 1-430 |
| HPJAP92 | 2108 | 806718 | AL353687 | 9203 | 1-262 |
| HPJAP92 | 2108 | 887830 | Z97832 | 9204 | 1-262 |
| HPJAN69 | 2110 | 754858 | AC025957 | 9205 | 1-345 |
| HPJAN67 | 2111 | 751384 | AL139244 | 9206 | 1-161 |
| | | | | | 1052-1592 |
| | | | | | 3665-4095 |
| | | | | | 4361-4549 |
| HPJAN67 | 2111 | 751384 | AC004962 | 9207 | 1-83 |
| | | | | | 719-835 |
| | | | | | 1648-1811 |
| | | | | | 2702-3242 |
| | | | | | 5315-5745 |
| | | | | | 6011-6199 |
| HPJAN67 | 2111 | 751384 | AL139244 | 9208 | 1-506 |
| HPJAN67 | 2111 | 751384 | AC004962 | 9209 | 1-1876 |
| HPJAN57 | 2112 | 734503 | AC007747 | 9210 | 1-433 |
| HPJAN57 | 2112 | 734503 | AL158136 | 9211 | 1-433 |
| HPJAN57 | 2112 | 734503 | AC007747 | 9212 | 1-623 |
| HPJAN57 | 2112 | 734503 | AL158136 | 9213 | 1-623 |
| HPJAJ20 | 2113 | 669000 | AP000584 | 9214 | 1-564 |
| | | | | | 648-2086 |
| | | | | | 3513-3644 |
| HPJAJ20 | 2113 | 669000 | AC011256 | 9215 | 1-564 |
| | | | | | 648-2086 |
| | | | | | 3514-3645 |
| HPJAJ20 | 2113 | 669000 | AP000588 | 9216 | 1-564 |
| | | | | | 648-2086 |
| | | | | | 3513-3644 |
| HPJAJ20 | 2113 | 669000 | AP002815 | 9217 | 1-564 |
| | | | | | 648-2086 |
| | | | | | 3513-3644 |
| HPJAJ20 | 2113 | 669000 | AP000584 | 9218 | 1-386 |
| HPJAJ20 | 2113 | 669000 | AC011256 | 9219 | 1-386 |
| HPJAJ20 | 2113 | 669000 | AP000588 | 9220 | 1-386 |
| HPJAJ20 | 2113 | 669000 | AP002815 | 9221 | 1-386 |
| HPJAE51 | 2114 | 725761 | AL353654 | 9222 | 1-392 |
| | | | | | 842-1387 |
| HPJAE51 | 2114 | 725761 | AC004842 | 9223 | 1-392 |
| | | | | | 842-1387 |
| HPJAE51 | 2114 | 725761 | AL035696 | 9224 | 1-392 |
| | | | | | 842-1387 |
| HPJAE51 | 2114 | 725761 | AL353654 | 9225 | 1-169 |
| | | | | | 179-295 |
| HPJAE51 | 2114 | 725761 | AC004842 | 9226 | 1-168 |
| | | | | | 178-294 |
| HPJAE51 | 2114 | 725761 | AL035696 | 9227 | 1-162 |
| HPJAA27 | 2115 | 419786 | AC074007 | 9228 | 1-531 |
| HPJAA27 | 2115 | 419786 | AL356953 | 9229 | 1-531 |
| HPJAA27 | 2115 | 419786 | AC018896 | 9230 | 1-531 |
| HPICG93 | 2116 | 887817 | AL356975 | 9231 | 1-447 |
| HPICG93 | 2116 | 887817 | AL357812 | 9232 | 1-423 |
| HPIBT62 | 2119 | 743135 | AC068150 | 9233 | 1-62 |
| | | | | | 2884-2997 |
| | | | | | 3285-3503 |
| | | | | | 4212-4325 |
| | | | | | 5273-5353 |
| | | | | | 7542-7640 |
| | | | | | 7721-8853 |
| HPIBT62 | 2119 | 743135 | AC068150 | 9234 | 1-766 |
| HPIBO89 | 2120 | 786741 | AL355102 | 9235 | 1-98 |
| | | | | | 763-882 |
| | | | | | 1106-1289 |
| | | | | | 1883-2041 |
| | | | | | 2351-2629 |
| | | | | | 3424-3590 |
| | | | | | 4426-4726 |
| | | | | | 5712-8082 |
| HPJBO89 | 2120 | 786741 | AL355102 | 9236 | 1-101 |
| | | | | | 1847-2078 |
| HPIBO89 | 2120 | 786741 | AL355102 | 9237 | 1-2260 |
| HPIBI89 | 2121 | 867845 AC009696 | 9238 | 1-149 | |
| | | | | | 5 1 1-650 |
| | | | | | 806-1203 |
| | | | | | 1520-2566 |
| | | | | | 2570-2737 |
| | | | | | 3468-3611 |
| | | | | | 3880-4009 |
| | | | | | 4098-4206 |
| HPIBC93 | 2123 | 785971 | Z97630 | 9239 | 1-418 |
| | | | | | 2009-2216 |
| | | | | | 2619-2865 |
| | | | | | 3398-3578 |
| | | | | | 4946-5048 |
| | | | | | 5089-5669 |
| | | | | | 7182-7343 |
| | | | | | 7476-7560 |
| | | | | | 7718-7895 |
| | | | | | 7913-8163 |
| | | | | | 8257-8378 |
| | | | | | 8422-8957 |
| HPIBC93 | 2123 | 785971 | Z97630 | 9240 | 1-2182 |
| HPIBB45 | 2124 | 867850 | AL110504 | 9241 | 1-5312 |
| HPIBB32 | 2126 | 698901 | AC040962 | 9242 | 1-323 |
| HPIBB32 | 2126 | 698901 | AL161903 | 9243 | 1-415 |
| HPIBB32 | 2126 | 698901 | AL021366 | 9244 | 1-415 |
| HPIBB32 | 2126 | 698901 | AL050332 | 9245 | 1-415 |
| HPIBB32 | 2126 | 698901 | AL161903 | 9246 | 1-183 |
| HPIBB32 | 2126 | 698901 | AC040962 | 9247 | 1-111 |
| HPIBB32 | 2126 | 698901 | AL161903 | 9248 | 1-111 |
| HPIBB32 | 2126 | 698901 | AL021366 | 9249 | 1-194 |
| HPIBB32 | 2126 | 698901 | AL021366 | 9250 | 1-111 |
| HPIBB32 | 2126 | 698901 | AL050332 | 9251 | 1-111 |
| HPIBB32 | 2126 | 698901 | AL050332 | 9252 | 1-194 |
| HPIAW91 | 2128 | 790033 | AC004200 | 9253 | 1-719 |
| HPJAW91 | 2128 | 790033 | AC011858 | 9254 | 1-719 |
| HPIAW91 | 2128 | 790033 | AB023056 | 9255 | 1-719 |
| HPIAV06 | 2129 | 935111 | AC008542 | 9256 | 1-41 |
| | | | | | 499-841 |
| | | | | | 945-1795 |
| | | | | | 1847-2073 |
| | | | | | 2214-2453 |
| | | | | | 3031-3131 |
| | | | | | 3396-4444 |
| | | | | | 4470-5202 |
| | | | | | 5863-6644 |
| | | | | | 7027-7181 |
| | | | | | 7474-7771 |
| | | | | | 7857-8016 |
| | | | | | 8110-8448 |
| HPIAV06 | 2129 | 935111 | AC023788 | 9257 | 1-71 |
| | | | | | 998-1207 |
| | | | | | 4649-5094 |
| | | | | | 5184-5215 |
| | | | | | 5490-5821 |
| | | | | | 6192-6604 |
| | | | | | 6708-6745 |
| | | | | | 6917-7852 |
| | | | | | 7993-8232 |
| | | | | | 8809-8909 |
| | | | | | 9174-10222 |
| | | | | | 10248-10976 |
| | | | | | 11637-12418 |
| | | | | | 12801-12955 |
| | | | | | 13248-13545 |
| | | | | | 13631-13790 |
| | | | | | 13884-14221 |
| HPIAV06 | 2129 | 935111 | AC008404 | 9258 | 1-446 |
| | | | | | 537-568 |
| | | | | | 843-1166 |
| | | | | | 1553-1961 |
| | | | | | 2065-2915 |
| | | | | | 2967-3193 |
| | | | | | 3334-3573 |
| | | | | | 4515-5563 |
| | | | | | 5589-6320 |
| | | | | | 6980-7761 |
| | | | | | 8144-8298 |
| | | | | | 8591-8888 |
| | | | | | 8974-9133 |
| | | | | | 9227-9566 |
| HPJAV06 | 2129 | 935111 | AC008404 | 9259 | 1-393 |
| HPIAV06 | 2129 | 935111 | AC023788 | 9260 | 1-393 |
| HPIAQ70 | 2130 | 973604 | AC008751 | 9261 | 1-930 |
| HPHSB91 | 2133 | 790313 | AC069100 | 9262 | 1-331 |
| HPHSB91 | 2133 | 790313 | AC069100 | 9263 | 1-101 |
| HPHSA94 | 2135 | 793084 | AC068386 | 9264 | 1-278 |
| HPHSA94 | 2135 | 793084 | AC017015 | 9265 | 1-278 |
| HPHSA94 | 2135 | 793084 | AC068386 | 9266 | 1-269 |
| HPHSA94 | 2135 | 793084 | AC017O15 | 9267 | 1-267 |
| HPHSA94 | 2135 | 793084 | AC017015 | 9268 | 1-557 |
| HPFMG06 | 2137 | 933696 | AL138904 | 9269 | 1-474 |
| 705-1039 | | | | | |
| 1625-1999 | | | | | |
| HPFMG06 | 2137 | 933696 | AL354990 | 9270 | 1-474 |
| 705-1039 | | | | | |
| 1625-1999 | | | | | |
| HPFMG06 | 2137 | 933696 | AL138904 | 9271 | 1-511 |
| HPFMG06 | 2137 | 933696 | AL354990 | 9272 | 1-511 |
| HPFMG06 | 2137 | 933696 | AL138904 | 9273 | 1-210 |
| HPFMG06 | 2137 | 933696 | AL354990 | 9274 | 1-210 |
| HPFMB10 | 2138 | 961758 | AC016135 | 9275 | 1-845 |
| HPFMB10 | 2138 | 961758 | AC018512 | 9276 | 1-776 |
| HPFDX38 | 2139 | 709302 | AC023631 | 9277 | 1-2429 |
| HPFDX38 | 2139 | 709302 | AC011962 | 9278 | 1-2428 |
| HPFCZ82 | 2140 | 780198 | AC048350 | 9279 | 1-900 |
| HPFCZ82 | 2140 | 780198 | AC037193 | 9280 | 1-876 |
| HPFCZ82 | 2140 | 780198 | AC008042 | 9281 | 1-688 |
| | | | | | 1078-1977 |
| HPFCZ82 | 2140 | 780198 | AC037193 | 9282 | 1-218 |
| | | | | | 961-991 |
| | | | | | 4864-5402 |
| HPFCZ82 | 2140 | 780198 | AC037193 | 9283 | 1-688 |
| HPFCZ60 | 2141 | 430125 | AC010611 | 9284 | 1-694 |
| HPFCZ60 | 2141 | 430125 | AC010255 | 9285 | 1-694 |
| HPFCZ60 | 2141 | 430125 | AC010611 | 9286 | 1-190 |
| HPFCZ60 | 2141 | 430125 | AC010255 | 9287 | 1-190 |
| HPFCZ10 | 2142 | 968360 | AC024493 | 9288 | 1-337 |
| HPFCZ10 | 2142 | 968360 | AL359983 | 9289 | 1-337 |
| HPFCZ10 | 2142 | 968360 | AL357555 | 9290 | 1-337 |
| HPFCP53 | 2145 | 526574 | AC023329 | 9291 | 1-101 |
| HPFCP53 | 2145 | 526574 | AC069380 | 9292 | 1-238 |
| HPFCP53 | 2145 | 526574 | AL162583 | 9293 | 1-130 |
| HPFCL56 | 2148 | 732601 | AC027270 | 9294 | 1-154 |
| | | | | | 744-867 |
| | | | | | 1696-1817 |
| | | | | | 1958-2117 |
| | | | | | 2143-2244 |
| | | | | | 3812-3907 |
| | | | | | 4266-4379 |
| | | | | | 4520-4734 |
| | | | | | 4822-4936 |
| | | | | | 5686-5748 |
| | | | | | 5820-5952 |
| | | | | | 6060-6191 |
| | | | | | 7271-8847 |
| | | | | | 9423-9518 |
| | | | | | 10087-10163 |
| | | | | | 10751-10891 |
| | | | | | 12158-12252 |
| | | | | | 12330-12717 |
| | | | | | 13997-14286 |
| | | | | | 14515-14846 |
| | | | | | 14946-15228 |
| | | | | | 16306-16744 |
| | | | | | 16881-17380 |
| | | | | | 18392-18826 |
| | | | | | 19323-19437 |
| | | | | | 19503-20654 |
| | | | | | 20746-21268 |
| | | | | | 21327-21815 |
| | | | | | 22145-22695 |
| | | | | | 22742-23675 |
| | | | | | 23977-24173 |
| HPFCL56 | 2148 | 732601 | AP002748 | 9295 | 1-551 |
| | | | | | 598-1452 |
| HPFCL56 | 2148 | 732601 | AC027270 | 9296 | 1-154 |
| HPFCL56 | 2148 | 732601 | AP002748 | 9297 | 1-196 |
| HPFCL56 | 2148 | 732601 | AC027270 | 9298 | 1-282 |
| HPFCA01 | 2151 | 928672 | AC005531 | 9299 | 1-873 |
| HPFCA01 | 2151 | 928672 | AC073184 | 9300 | 1-873 |
| HPFCA01 | 2151 | 928672 | AC005531 | 9301 | 1-934 |
| HPFCA01 | 2151 | 928672 | AC073184 | 9302 | 1-934 |
| HPELD12 | 2152 | 969248 | AC000384 | 9303 | 1-73 |
| | | | | | 373-694 |
| | | | | | 880-951 |
| | | | | | 1368-1531 |
| | | | | | 1991-2111 |
| | | | | | 2578-2725 |
| | | | | | 3044-3210 |
| | | | | | 4123-4292 |
| | | | | | 4550-4761 |
| HPELD12 | 2152 | 969248 | AC000384 | 9304 | 1-765 |
| | | | | | 1018-1580 |
| HPEKI04 | 2153 | 926104 | AC009985 | 9305 | 1-506 |
| | | | | | 515-927 |
| | | | | | 977-1407 |
| HPEKI04 | 2153 | 926104 | AC010794 | 9306 | 1-506 |
| | | | | | 515-927 |
| | | | | | 977-1407 |
| HPEKI04 | 2153 | 926104 | AC009985 | 9307 | 1-540 |
| HPEKI04 | 2153 | 926104 | AC010794 | 9308 | 1-540 |
| HPEKI04 | 2153 | 926104 | AC009985 | 9309 | 1-156 |
| HPEKI04 | 2153 | 926104 | AC010794 | 9310 | 1-156 |
| HPEKE01 | 2154 | 914414 | AC055804 | 9311 | 1-528 |
| HPEKE01 | 2154 | 914414 | AL357976 | 9312 | 1-528 |
| HPEKE01 | 2154 | 914414 | AC055804 | 9313 | 1-352 |
| HPEKE01 | 2154 | 914414 | AL357976 | 9314 | 1-231 |
| HPEKE01 | 2154 | 914414 | AC055804 | 9315 | 1-176 |
| HPEKE01 | 2154 | 914414 | AL357976 | 9316 | 1-352 |
| HPEBT82 | 2155 | 524246 | AC018865 | 9317 | 1-466 |
| HPEBT82 | 2155 | 524246 | AC018865 | 9318 | 1-218 |
| HPEBT49 | 2159 | 530021 | AC046171 | 9319 | 1-373 |
| HPEBT49 | 2159 | 530021 | AC046171 | 9320 | 1-209 |
| | | | | | 1274-1611 |
| HPEBT49 | 2159 | 530021 | AC046171 | 9321 | 1-208 |
| HPEBT34 | 2160 | 706836 | AC009677 | 9322 | 1-360 |
| HPEBT14 | 2161 | 535061 | AL358573 | 9323 | 1-245 |
| HPEBT14 | 2161 | 535061 | AL139113 | 9324 | 1-246 |
| HPEBT14 | 2161 | 535061 | AL358573 | 9325 | 1-576 |
| HPEBT14 | 2161 | 535061 | AL139113 | 9326 | 1-576 |
| HPEBL08 | 2164 | 960240 | AC007684 | 9327 | 1-38 |
| | | | | | 2047-2188 |
| | | | | | 2599-2984 |
| | | | | | 3134-4018 |
| | | | | | 4336-4377 |
| | | | | | 4685-4800 |
| | | | | | 6534-6618 |
| | | | | | 8404-8480 |
| | | | | | 8739-8851 |
| | | | | | 12237-12815 |
| | | | | | 14345-14412 |
| | | | | | 14489-14605 |
| | | | | | 15097-15445 |
| | | | | | 15469-15664 |
| | | | | | 16908-17608 |
| | | | | | 18139-18250 |
| | | | | | 19641-19696 |
| HPEBL08 | 2164 | 960240 | AC007684 | 9328 | 1-1190 |
| HPEBL08 | 2164 | 960240 | AC007684 | 9329 | 1-394 |
| | | | | | 429-990 |
| | | | | | 1194-1451 |
| HPEBG10 | 2167 | 867888 | AL356133 | 9330 | 1-293 |
| HPEBG10 | 2167 | 867888 | AL356133 | 9331 | 1-503 |
| HPEBA61 | 2169 | 742251 | AC007036 | 9332 | 1-78 |
| HPEBA61 | 2169 | 742251 | AC007036 | 9333 | 1-225 |
| HPEBA05 | 2170 | 928027 | AC026647 | 9334 | 1-379 |
| HPEBA05 | 2170 | 928027 | AL359754 | 9335 | 1-374 |
| | | | | | 1483-1516 |
| HPEBA05 | 2170 | 928027 | AL159175 | 9336 | 1-374 |
| | | | | | 1483-1516 |
| HPEBA05 | 2170 | 928027 | AL359754 | 9337 | 1-673 |
| HPEBA05 | 2170 | 928027 | AC026647 | 9338 | 1-672 |
| HPEBA05 | 2170 | 928027 | AL159175 | 9339 | 1-673 |
| HPBAA57 | 2174 | 514231 | AC018662 | 9340 | 1-784 |
| | | | | | 890-1375 |
| | | | | | 1837-2156 |
| | | | | | 2324-2766 |
| | | | | | 3080-3286 |
| | | | | | 4028-4155 |
| | | | | | 4903-5424 |
| | | | | | 5721-6302 |
| | | | | | 6782-7063 |
| | | | | | 7153-7571 |
| | | | | | 7923-8053 |
| | | | | | 11271-11598 |
| HPEAA57 | 2174 | 514231 | AC008039 | 9341 | 1-784 |
| | | | | | 890-1375 |
| | | | | | 1837-2156 |
| | | | | | 2324-2766 |
| | | | | | 3080-3286 |
| | | | | | 4028-4155 |
| | | | | | 4905-5426 |
| | | | | | 5723-6304 |
| | | | | | 6784-7065 |
| | | | | | 7155-7573 |
| | | | | | 7925-8055 |
| | | | | | 11273-11600 |
| HPEAA57 | 2174 | 514231 | AC018662 | 9342 | 1-419 |
| HPEAA57 | 2174 | 514231 | AC008039 | 9343 | 1-418 |
| HPDWR11 | 2176 | 965249 | AC016344 | 9344 | 1-647 |
| HPDWR11 | 2176 | 965249 | AC018796 | 9345 | 1-643 |
| HPDWR11 | 2176 | 965249 | AC010857 | 9346 | 1-643 |
| HPDWR11 | 2176 | 965249 | AC018796 | 9347 | 1-422 |
| HPDWR11 | 2176 | 965249 | AC010857 | 9348 | 1-422 |
| HPDWN05 | 2177 | 928563 | AC009871 | 9349 | 1-599 |
| | | | | | 896-1375 |
| HPDWN05 | 2177 | 928563 | AC009812 | 9350 | 1-599 |
| | | | | | 896-1375 |
| HPDWN05 | 2177 | 928563 | AC009871 | 9351 | 1-99 |
| HPDWN05 | 2177 | 928563 | AC009871 | 9352 | 1-4119 |
| HPDWN05 | 2177 | 928563 | AC009812 | 9353 | 1-99 |
| HPDWN05 | 2177 | 928563 | AC009812 | 9354 | 1-74 |
| | | | | | 277-452 |
| | | | | | 718-5961 |
| HPDRR06 | 2181 | 968601 | AC073389 | 9355 | 1-1034 |
| HPDRR06 | 2181 | 968601 | AL359074 | 9356 | 1-92 |
| | | | | | 1559-2178 |
| | | | | | 2181-3214 |
| HPDRR06 | 2181 | 968601 | AC073389 | 9357 | 1-615 |
| HPDRR06 | 2181 | 968601 | AL359074 | 9358 | 1-652 |
| HPDRR06 | 2181 | 968601 | AL359074 | 9359 | 1-465 |
| | | | | | 596-748 |
| | | | | | 790-866 |
| HPDRN07 | 2182 | 951838 | AC073930 | 9360 | 1-2176 |
| HPDRN07 | 2182 | 951838 | AC073865 | 9361 | 1-2174 |
| HPDRN07 | 2182 | 951838 | AC073930 | 9362 | 1-449 |
| HPDRN07 | 2182 | 951838 | AC073865 | 9363 | 1-849 |
| HPDRN07 | 2182 | 951838 | AC073930 | 9364 | 1-849 |
| HPDRN07 | 2182 | 951838 | AC073865 | 9365 | 1-449 |
| HPDRG01 | 2183 | 914416 | AL356152 | 9366 | 1-773 |
| HPDRG01 | 2183 | 914416 | AL158082 | 9367 | 1-773 |
| HPDRG01 | 2183 | 914416 | AL158082 | 9368 | 1-153 |
| HPDRG01 | 2183 | 914416 | AL356152 | 9369 | 1-602 |
| HPDPS12 | 2184 | 969342 | AC073487 | 9370 | 1-375 |
| | | | | | 893-4326 |
| | | | | | 4474-5168 |
| | | | | | 5186-6317 |
| | | | | | 6538-6708 |
| | | | | | 6755-7192 |
| | | | | | 7587-9453 |
| HPDPS12 | 2184 | 969342 | AC023055 | 9371 | 1-246 |
| | | | | | 485-1179 |
| | | | | | 1198-2329 |
| | | | | | 2550-2720 |
| | | | | | 2767-3204 |
| | | | | | 3603-5469 |
| HPDPS12 | 2184 | 969342 | AC073487 | 9372 | 1-646 |
| HPDPS12 | 2184 | 969342 | AC023055 | 9373 | 1-428 |
| HPDPS12 | 2184 | 969342 | AC023055 | 9374 | 1-245 |
| HPDPP12 | 2185 | 969341 | AP001097 | 9375 | 1-481 |
| HPDPP12 | 2185 | 969341 | AC021474 | 9376 | 1-579 |
| HPDPP12 | 2185 | 969341 | AP000931 | 9377 | 1-579 |
| HPDPP12 | 2185 | 969341 | AP001097 | 9378 | 1-125 |
| HPDPP12 | 2185 | 969341 | AC021474 | 9379 | 1-125 |
| HPDPP12 | 2185 | 969341 | AP000931 | 9380 | 1-453 |
| HPDPP12 | 2185 | 969341 | AC021474 | 9381 | 1-451 |
| HPDOW10 | 2187 | 961782 | AC026088 | 9382 | 1-494 |
| HPDOF11 | 2189 | 965491 | AL390721 | 9383 | 1-912 |
| HPDOF11 | 2189 | 965491 | AL021997 | 9384 | 1-233 |
| | | | | | 901-1252 |
| | | | | | 1400-1967 |
| | | | | | 2803-2939 |
| | | | | | 3883-4324 |
| | | | | | 4569-5633 |
| | | | | | 7594-8505 |
| | | | | | 8713-11051 |
| HPDOF11 | 2189 | 965491 | AL390721 | 9385 | 1-2339 |
| HPCTK02 | 2190 | 917480 | AL158074 | 9386 | 1-42 |
| | | | | | 468-1132 |
| | | | | | 1279-1726 |
| HPCTK02 | 2190 | 917480 | AC013579 | 9387 | 1-42 |
| | | | | | 468-1129 |
| | | | | | 1276-1721 |
| HPCTK02 | 2190 | 917480 | AL158074 | 9388 | 1-117 |
| HPCTK02 | 2190 | 917480 | AC013579 | 9389 | 1-740 |
| | | | | | 1026-1325 |
| | | | | | 1835-2355 |
| HPCTC04 | 2192 | 925777 | AC006198 | 9390 | 1-972 |
| HPCTC04 | 2192 | 925777 | AL079338 | 9391 | 1-972 |
| HPCTC04 | 2192 | 925777 | AC006198 | 9392 | 1-597 |
| HPCTC04 | 2192 | 925777 | AL079338 | 9393 | 1-572 |
| HPCTC04 | 2192 | 925777 | AC006198 | 9394 | 1-187 |
| HPCTC04 | 2192 | 925777 | AL079338 | 9395 | 1-187 |
| HPCOV68 | 2195 | 911075 | AC026794 | 9396 | 1-1027 |
| BPCOV68 | 2195 | 911075 | AC004SOO | 9397 | 1-1004 |
| HPCOV68 | 2195 | 911075 | AC026794 | 9398 | 1-102 |
| HPCOV68 | 2195 | 911075 | AC004500 | 9399 | 1-102 |
| HPCAO89 | 2196 | 946913 | AP001583 | 9400 | 1-56 |
| | | | | | 1227-1357 |
| | | | | | 3023-3526 |
| | | | | | 4699-4820 |
| | | | | | 8676-8831 |
| | | | | | 9495-9648 |
| | | | | | 11657-12553 |
| HPCAO89 | 2196 | 946913 | AP001583 | 9401 | 1-124 |
| HPCAF65 | 2199 | 573368 | AL139816 | 9402 | 1-305 |
| | | | | | 1879-2426 |
| | | | | | 2774-3145 |
| HPCAB54 | 2201 | 728857 | AC074194 | 9403 | 1-424 |
| HPCAB54 | 2201 | 728857 | AC074194 | 9404 | 1-580 |
| HOVEV01 | 2203 | 914553 | AL359092 | 9405 | 1-116 |
| HOVEV01 | 2203 | 914553 | AC009453 | 9406 | 1-143 |
| HOVEV01 | 2203 | 914553 | AC025036 | 9407 | 1-148 |
| HOVEV01 | 2203 | 914553 | AC016327 | 9408 | 1-125 |
| HOVEV01 | 2203 | 914553 | AC022231 | 9409 | 1-151 |
| HOVEV01 | 2203 | 914553 | AC022232 | 9410 | 1-152 |
| HOVEV01 | 2203 | 914553 | AC048342 | 9411 | 1-130 |
| HOVEV01 | 2203 | 914553 | AC048342 | 9412 | 1-118 |
| HOVEU06 | 2205 | 933737 | AL356240 | 9413 | 1-406 |
| HOVEU06 | 2205 | 933737 | AC021202 | 9414 | 1-406 |
| HOVEO04 | 2206 | 926209 | AC009763 | 9415 | 1-37 |
| | | | | | 612-789 |
| | | | | | 1387-1596 |
| | | | | | 2329-2749 |
| HOVEO04 | 2206 | 926209 | AC008751 | 9416 | 1-37 |
| | | | | | 610-787 |
| | | | | | 1383-1592 |
| | | | | | 2325-2745 |
| HOVEO04 | 2206 | 926209 | AC009763 | 9417 | 1-577 |
| HOVEO04 | 2206 | 926209 | AC008751 | 9418 | 1-575 |
| HOVDD10 | 2209 | 961887 | AC013555 | 9419 | 1-589 |
| HOVDD10 | 2209 | 961887 | AC013555 | 9420 | 1-3604 |
| HOVCO50 | 2211 | 932544 | AC011743 | 9421 | 1-310 |
| | | | | | 1101-3106 |
| | | | | | 3478-4052 |
| | | | | | 4404-7119 |
| | | | | | 7315-7492 |
| | | | | | 7591-7677 |
| | | | | | 7702-8144 |
| | | | | | 8377-8410 |
| | | | | | 8495-9117 |
| | | | | | 9222-9386 |
| | | | | | 9534-10411 |
| | | | | | 10577-10783 |
| HOVCO50 | 2211 | 932544 | AC009948 | 9422 | 1-195 |
| | | | | | 436-930 |
| | | | | | 2047-2366 |
| | | | | | 3235-3687 |
| | | | | | 4129-4425 |
| | | | | | 5291-7148 |
| | | | | | 7368-7956 |
| | | | | | 8617-9180 |
| | | | | | 9370-9679 |
| | | | | | 10470-12475 |
| | | | | | 12847-13421 |
| | | | | | 13773-15659 |
| | | | | | 15770-16487 |
| | | | | | 16683-16860 |
| | | | | | 17070-17512 |
| | | | | | 17745-17778 |
| | | | | | 17863-18485 |
| | | | | | 18590-18754 |
| | | | | | 18902-19779 |
| | | | | | 19945-20150 |
| | | | | | 20271-20444 |
| HOVCO50 | 2211 | 932544 | AC011743 | 9423 | 1-521 |
| HOVCO50 | 2211 | 932544 | AC011743 | 9424 | 1-564 |
| HOVCO50 | 2211 | 932544 | AC009948 | 9425 | 1-521 |
| HOVCO50 | 2211 | 932544 | AC009948 | 9426 | 1-588 |
| HOVCM77 | 2213 | 772208 | AC013452 | 9427 | 1-31 |
| | | | | | 1058-1160 |
| | | | | | 3236-3744 |
| | | | | | 4308-4731 |
| | | | | | 4830-5384 |
| | | | | | 5754-5981 |
| HOVCM77 | 2213 | 772208 | AC036102 | 9428 | 1-31 |
| | | | | | 1059-1161 |
| | | | | | 3237-3745 |
| | | | | | 4309-4732 |
| | | | | | 4831-5385 |
| | | | | | 5755-5982 |
| HOVCM77 | 2213 | 772208 | AC069073 | 9429 | 1-808 |
| HOVCM77 | 2213 | 772208 | AC069073 | 9430 | 1-192 |
| HOVCM03 | 2214 | 924196 | AC008026 | 9431 | 1-691 |
| HOVCM03 | 2214 | 924196 | AC018636 | 9432 | 1-1712 |
| | | | | | 1781-2220 |
| | | | | | 2775-3125 |
| | | | | | 4267-4398 |
| | | | | | 4943-5119 |
| | | | | | 5395-6479 |
| | | | | | 6593-6736 |
| | | | | | 8582-8759 |
| | | | | | 9851-10352 |
| | | | | | 10560-11273 |
| | | | | | 11554-11699 |
| | | | | | 13092-13782 |
| | | | | | 13894-14174 |
| | | | | | 14184-16225 |
| HOVCM03 | 2214 | 924196 | AC023982 | 9433 | 1-614 |
| HOVCM03 | 2214 | 924196 | AC018636 | 9434 | 1-687 |
| HOVCM03 | 2214 | 924196 | AC018636 | 9435 | 1-382 |
| HOVCM03 | 2214 | 924196 | AC023982 | 9436 | 1-439 |
| HOVCI89 | 2215 | 786917 | Z99289 | 9437 | 1-165 |
| | | | | | 2231-2370 |
| | | | | | 3629-5021 |
| | | | | | 5116-6302 |
| HOVCI89 | 2215 | 786917 | Z99289 | 9438 | 1-282 |
| HOVCI89 | 2215 | 786917 | Z99289 | 9439 | 1-110 |
| HOVBK69 | 2220 | 757594 | AC048347 | 9440 | 1-537 |
| HOVBK69 | 2220 | 757594 | AC009319 | 9441 | 1-536 |
| HOVBK69 | 2220 | 757594 | AC048347 | 9442 | 1-299 |
| HOVBK69 | 2220 | 757594 | AC048347 | 9443 | 1-147 |
| HOVBK69 | 2220 | 757594 | AC009319 | 9444 | 1-303 |
| HOVBK69 | 2220 | 757594 | AC009319 | 9445 | 1-193 |
| HOVBK38 | 2221 | 956238 | AC006251 | 9446 | 1-442 |
| | | | | | 1222-2085 |
| | | | | | 2175-2409 |
| | | | | | 3314-3530 |
| | | | | | 5391-5542 |
| | | | | | 5894-6556 |
| | | | | | 7350-7446 |
| | | | | | 8455-8563 |
| | | | | | 9344-9752 |
| | | | | | 10389-10933 |
| | | | | | 14295-14691 |
| | | | | | 14714-14982 |
| | | | | | 17146-17504 |
| | | | | | 21039-21150 |
| | | | | | 21264-21477 |
| | | | | | 21774-21936 |
| HOVBK38 | 2221 | 956238 | AC006251 | 9447 | 1-323 |
| HOVBK38 | 2221 | 956238 | AC006251 | 9448 | 1-289 |
| | | | | | 371-500 |
| | | | | | 1108-1518 |
| | | | | | 2170-2282 |
| | | | | | 3050-3088 |
| | | | | | 4088-4145 |
| | | | | | 4455-4519 |
| | | | | | 4790-5047 |
| | | | | | 5422-5806 |
| | | | | | 5933-6678 |
| | | | | | 6727-7444 |
| HOVBI67 | 2223 | 751665 | AC004975 | 9449 | 1-1090 |
| | | | | | 1399-1517 |
| | | | | | 2019-2457 |
| | | | | | 4390-4835 |
| | | | | | 5859-6444 |
| | | | | | 8606-8937 |
| | | | | | 8979-9108 |
| | | | | | 10450-10806 |
| | | | | | 10853-12075 |
| | | | | | 12331-13044 |
| | | | | | 13247-13372 |
| | | | | | 19647-21441 |
| HOVAZ65 | 2226 | 750273 | AP000627 | 9450 | 1-1082 |
| HOVAZ65 | 2226 | 750273 | AP000730 | 9451 | 1-1836 |
| | | | | | 1991-2508 |
| HOVAZ65 | 2226 | 750273 | AP000870 | 9452 | 1-1836 |
| | | | | | 1991-2508 |
| HOVAY42 | 2229 | 713812 | AC023046 | 9453 | 1-364 |
| HOVAY42 | 2229 | 713812 | AC023046 | 9454 | 1-105 |
| HOVAY42 | 2229 | 713812 | AC023046 | 9455 | 1-210 |
| HOVAY03 | 2230 | 921959 | AP002789 | 9456 | 1-308 |
| HOVAY03 | 2230 | 921959 | AP002789 | 9457 | 1-247 |
| HOVA025 | 2232 | 678163 | AC026149 | 9458 | 1-374 |
| HOVA025 | 2232 | 678163 | AC026149 | 9459 | 1-352 |
| HOVA025 | 2232 | 678163 | AC026149 | 9460 | 1-518 |
| HOVAC77 | 2238 | 578783 | AC023158 | 9461 | 1-396 |
| HOVAB61 | 2242 | 578791 | AL096827 | 9462 | 1-667 |
| HOVAB61 | 2242 | 578791 | AL096827 | 9463 | 1-139 |
| HOVAB61 | 2242 | 578791 | AL096827 | 9464 | 1-1322 |
| HOOKF10 | 2243 | 961499 | AC023183 | 9465 | 1-493 |
| HOOKF10 | 2243 | 961499 | AC026678 | 9466 | 1-493 |
| HOOKF10 | 2243 | 961499 | AC026365 | 9467 | 1-493 |
| HOOKF10 | 2243 | 961499 | AC026678 | 9468 | 1-480 |
| HOOKF10 | 2243 | 961499 | AC023183 | 9469 | 1-480 |
| HOOKF10 | 2243 | 961499 | AC026365 | 9470 | 1-480 |
| HOOJU04 | 2245 | 925774 | AC048331 | 9471 | 1-59 |
| | | | | | 317-593 |
| HOOJU04 | 2245 | 925774 | AC024530 | 9472 | 1-59 |
| | | | | | 317-593 |
| HOOJU04 | 2245 | 925774 | AC061705 | 9473 | 1-59 |
| | | | | | 317-593 |
| HOOJU04 | 2245 | 925774 | AC048331 | 9474 | 1-572 |
| HOOJU04 | 2245 | 925774 | AC024530 | 9475 | 1-91 |
| | | | | | 184-640 |
| | | | | | 785-2468 |
| | | | | | 2676-2898 |
| HOOJU04 | 2245 | 925774 | AC061705 | 9476 | 1-91 |
| | | | | | 184-640 |
| | | | | | 785-2468 |
| | | | | | 2676-2898 |
| HOOJU04 | 2245 | 925774 | AC024530 | 9477 | 1-453 |
| HOOJU04 | 2245 | 925774 | AC061705 | 9478 | 1-572 |
| HOOJN04 | 2246 | 925783 | AL035684 | 9479 | 1-55 |
| | | | | | 2293-2465 |
| | | | | | 3852-3951 |
| | | | | | 5485-5583 |
| | | | | | 6544-6662 |
| | | | | | 7772-7947 |
| | | | | | 8614-9071 |
| | | | | | 10099-10166 |
| | | | | | 10618-10710 |
| | | | | | 10715-11030 |
| | | | | | 12681-12959 |
| | | | | | 13821-13979 |
| | | | | | 16726-17090 |
| | | | | | 17491-18237 |
| | | | | | 19028-19138 |
| | | | | | 20072-20129 |
| | | | | | 22633-22838 |
| | | | | | 26307-31140 |
| HOOJN04 | 2246 | 925783 | AL035684 | 9480 | 1-573 |
| HOOJN04 | 2246 | 925783 | AL035684 | 9481 | 1-498 |
| HOOJH05 | 2248 | 928627 | AC021154 | 9482 | 1-935 |
| HOOJH05 | 2248 | 928627 | AC011452 | 9483 | 1-934 |
| HOOJH05 | 2248 | 928627 | AC011452 | 9484 | 1-101 |
| HOOIG03 | 2251 | 922510 | AC016883 | 9485 | 1-429 |
| HOOIG03 | 2251 | 922510 | AC073155 | 9486 | 1-429 |
| HOOIG03 | 2251 | 922510 | AC018714 | 9487 | 1-429 |
| HOOHP02 | 2252 | 917424 | AC013669 | 9488 | 1-487 |
| HOOHP02 | 2252 | 917424 | AC013669 | 9489 | 1-181 |
| | | | | | 291-782 |
| | | | | | 2171-2360 |
| | | | | | 2703-3570 |
| | | | | | 4336-4689 |
| | | | | | 5249-5785 |
| | | | | | 5817-6442 |
| | | | | | 6834-7458 |
| HOOAB23 2255 | 522227 | AC051654 | 9490 | 1-129 | |
| | | | | | 832-1405 |
| HOOAB23 | 2255 | 522227 | AC068345 | 9491 | 1-855 |
| | | | | | 1558-2131 |
| HOOAB23 | 2255 | 522227 | AC068345 | 9492 | 1-203 |
| HONAK10 | 2257 | 968610 | AC023105 | 9493 | 1-3282 |
| | | | | | 3292-5377 |
| HONAK10 | 2257 | 968610 | AC023105 | 9494 | 1-1914 |
| | | | | | 1958-2384 |
| HONAH06 | 2258 | 936029 | AC022286 | 9495 | 1-1132 |
| HONAH06 | 2258 | 936029 | AC005355 | 9496 | 1-33 |
| HONAH06 | 2258 | 936029 | AC002369 | 9497 | 1-1333 |
| | | | | | 1663-1760 |
| | | | | | 2438-2530 |
| | | | | | 4503-5088 |
| HONAH06 | 2258 | 936029 | AC005730 | 9498 | 1-1130 |
| HONAH06 | 2258 | 936029 | AC002369 | 9499 | 1-228 |
| HONAH06 | 2258 | 936029 | AC005730 | 9500 | 1-887 |
| HONAH06 | 2258 | 936029 | AC005730 | 9501 | 1-192 |
| HONAE50 | 2259 | 723571 | AC073160 | 9502 | 1-749 |
| HONAE50 | 2259 | 723571 | AC027507 | 9503 | 1-749 |
| HONAE50 | 2259 | 723571 | AC027507 | 9504 | 1-158 |
| HONAB50 | 2259 | 723571 | AC073160 | 9505 | 1-158 |
| HONAD65 | 2260 | 747152 | AL138904 | 9506 | 1-474 |
| | | | | | 705-1039 |
| | | | | | 1625-1999 |
| HONAD65 | 2260 | 747152 | AL354990 | 9507 | 1-474 |
| | | | | | 705-1039 |
| | | | | | 1625-1999 |
| HONAD65 | 2260 | 747152 | AL138904 | 9508 | 1-511 |
| HONAD65 | 2260 | 747152 | AL354990 | 9509 | 1-511 |
| HONAD65 | 2260 | 747152 | AL138904 | 9510 | 1-210 |
| HONAD65 | 2260 | 747152 | AL354990 | 9511 | 1-210 |
| HOGCW89 | 2264 | 973227 | AC015988 | 9512 | 1-736 |
| HOGCW89 | 2264 | 973227 | AP001491 | 9513 | 1-736 |
| HOGCW89 | 2264 | 973227 | AC015988 | 9514 | 1-222 |
| HOGCW89 | 2264 | 973227 | AC015988 | 9515 | 1-831 |
| HOGCW89 | 2264 | 973227 | AP001491 | 9516 | 1-831 |
| HOGCW89 | 2264 | 973227 | AP001491 | 9517 | 1-229 |
| HOGCT13 | 2265 | 657284 | AC012431 | 9518 | 1-234 |
| | | | | | 240-488 |
| | | | | | 879-1648 |
| | | | | | 1672-1969 |
| | | | | | 2213-3083 |
| HOGCT13 | 2265 | 657284 | AC024483 | 9519 | 1-249 |
| | | | | | 640-1409 |
| | | | | | 1433-1730 |
| | | | | | 1974-2844 |
| HOGCT13 | 2265 | 657284 | AC010300 | 9520 | 1-412 |
| | | | | | 810-1279 |
| | | | | | 1502-1630 |
| | | | | | 2316-2382 |
| | | | | | 3130-4416 |
| | | | | | 4989-5077 |
| | | | | | 5090-5599 |
| | | | | | 5990-6759 |
| | | | | | 6783-7080 |
| | | | | | 7321-8191 |
| HOGCT13 | 2265 | 657284 | AC010300 | 9521 | 1-399 |
| HOGCH05 | 2269 | 930813 | AL354797 | 9522 | 1-663 |
| HOGCH05 | 2269 | 930813 | AL359692 | 9523 | 1-663 |
| HOGCH05 | 2269 | 930813 | AC013740 | 9524 | 1-663 |
| HOGCH05 | 2269 | 930813 | AL359692 | 9525 | 1-431 |
| HOGCH05 | 2269 | 930813 | AL354797 | 9526 | 1-117 |
| HOGCH05 | 2269 | 930813 | AL359692 | 9527 | 1-117 |
| HOGCH05 | 2269 | 930813 | AC013740 | 9528 | 1-117 |
| HOGCH05 | 2269 | 930813 | AC013740 | 9529 | 1-431 |
| HOGCC63 | 2272 | 745130 | AC021885 | 9530 | 1-443 |
| HOGCC63 | 2272 | 745130 | AC021885 | 9531 | 1-43 |
| | | | | | 176-469 |
| | | | | | 2722-3017 |
| | | | | | 3881-4005 |
| HOGBE27 | 2275 | 682232 | AC021573 | 9532 | 1-2701 |
| | | | | | 2726-2818 |
| | | | | | 2920-3387 |
| HOGBE27 | 2275 | 682232 | AC021573 | 9533 | 1-602 |
| HOGAM56 | 2276 | 908904 | AC021344 | 9534 | 1-717 |
| HOGAI73 | 2277 | 764490 | AC007215 | 9535 | 1-2096 |
| HOGAI73 | 2277 | 764490 | AC007688 | 9536 | 1-271 |
| | | | | | 276-3205 |
| HOGAI73 | 2277 | 764490 | AC007215 | 9537 | 1-168 |
| HOGAI73 | 2277 | 764490 | AC007688 | 9538 | 1-776 |
| HOGAD77 | 2281 | 772319 | AC073650 | 9539 | 1-936 |
| HOGAD77 | 2281 | 772319 | AC009417 | 9540 | 1-556 |
| HOGAD77 | 2281 | 772319 | AC073650 | 9541 | 1-572 |
| HOGAD77 | 2281 | 772319 | AC009417 | 9542 | 1-572 |
| HODKG07 | 2322 | 951875 | AC072035 | 9543 | 1-786 |
| HODKG07 | 2322 | 951875 | AC072035 | 9544 | 1-689 |
| HODGL88 | 2327 | 859300 | AC020988 | 9545 | 1-886 |
| | | | | | 900-3110 |
| HODGL88 | 2327 | 859300 | AC020988 | 9546 | 1-318 |
| HODGL88 | 2327 | 859300 | AC020988 | 9547 | 1-320 |
| HODFY10 | 2329 | 963350 | AC015464 | 9548 | 1-718 |
| HODFY10 | 2329 | 963350 | AL133284 | 9549 | 1-718 |
| HODFY10 | 2329 | 963350 | AC015464 | 9550 | 1-779 |
| HODFY10 | 2329 | 963350 | AC015464 | 9551 | 1-940 |
| HODFY10 | 2329 | 963350 | AL133284 | 9552 | 1-3485 |
| | | | | | 8125-8521 |
| | | | | | 14884-15094 |
| | | | | | 17015-17375 |
| | | | | | 18078-21722 |
| | | | | | 21824-22143 |
| | | | | | 23417-24165 |
| HODFY10 | 2329 | 963350 | AL133284 | 9553 | 1-782 |
| HODFX19 | 2330 | 842138 | AC011462 | 9554 | 1-756 |
| | | | | | 1096-1314 |
| | | | | | 2617-2717 |
| | | | | | 3158-3842 |
| | | | | | 5564-5805 |
| | | | | | 6037-6404 |
| | | | | | 6761-6817 |
| | | | | | 6951-7090 |
| | | | | | 7229-7499 |
| HODFX19 | 2330 | 842138 | AC011462 | 9555 | 1-133 |
| HODFX04 | 2332 | 926278 | AP001469 | 9556 | 1-421 |
| | | | | | 1062-1420 |
| | | | | | 1705-1867 |
| | | | | | 1978-2089 |
| | | | | | 2804-2943 |
| | | | | | 3323-3420 |
| | | | | | 4630-4970 |
| | | | | | 5685-8599 |
| | | | | | 9683-11324 |
| | | | | | 11404-12154 |
| | | | | | 13101-13635 |
| | | | | | 13740-14218 |
| | | | | | 15283-15751 |
| | | | | | 15842-16654 |
| | | | | | 17611-17746 |
| | | | | | 18380-19010 |
| | | | | | 19268-19404 |
| | | | | | 19634-19850 |
| | | | | | 21352-21872 |
| | | | | | 23386-23623 |
| | | | | | 23640-24466 |
| | | | | | 25541-25784 |
| | | | | | 26154-26288 |
| | | | | | 27551-27876 |
| | | | | | 28169-28210 |
| | | | | | 28657-28687 |
| | | | | | 28993-29095 |
| | | | | | 30196-30400 |
| | | | | | 30800-31304 |
| HODFX04 | 2332 | 926278 | AP001469 | 9557 | 1-465 |
| HODFX04 | 2332 | 926278 | AP001469 | 9558 | 1-470 |
| HODFW40 | 2334 | 859320 | AC008927 | 9559 | 1-555 |
| HODFW40 | 2334 | 859320 | AC008589 | 9560 | 1-555 |
| HODFW40 | 2334 | 859320 | AC008779 | 9561 | 1-555 |
| HODFW40 | 2334 | 859320 | AC008927 | 9562 | 1-303 |
| HODFW40 | 2334 | 859320 | AC008589 | 9563 | 1-303 |
| HODFW40 | 2334 | 859320 | AC008779 | 9564 | 1-303 |
| HODFR85 | 2335 | 783789 | AL356136 | 9565 | 1-539 |
| HODFR85 | 2335 | 783789 | AC025014 | 9566 | 1-1196 |
| HODFR85 | 2335 | 783789 | AP001896 | 9567 | 1-1199 |
| HODFR85 | 2335 | 783789 | AL356136 | 9568 | 1-428 |
| HODFR85 | 2335 | 783789 | AC025014 | 9569 | 1-494 |
| HODFR85 | 2335 | 783789 | AP001896 | 9570 | 1-494 |
| HODFL37 | 2336 | 948703 | AC018620 | 9571 | 1-489 |
| HODFL37 | 2336 | 948703 | AC018620 | 9572 | 1-518 |
| HODFJ11 | 2337 | 966065 | AC015896 | 9573 | 1-671 |
| | | | | | 1241-1647 |
| HODFJ11 | 2337 | 966065 | AC015896 | 9574 | 1-935 |
| HODFI66 | 2338 | 974317 | AC067831 | 9575 | 1-527 |
| HODFI66 | 2338 | 974317 | AC063944 | 9576 | 1-527 |
| HODFH45 | 2339 | 974916 | AL121595 | 9577 | 1-598 |
| HODFH45 | 2339 | 974916 | AL121595 | 9578 | 1-232 |
| HODFG82 | 2340 | 779191 | AC074124 | 9579 | 1-553 |
| HODFG82 | 2340 | 779191 | AC074124 | 9580 | 1-122 |
| HODFD73 | 2343 | 909812 | AL050332 | 9581 | 1-187 |
| | | | | | 311-458 |
| | | | | | 667-1020 |
| | | | | | 2447-2586 |
| HODFD73 | 2343 | 909812 | AL161903 | 9582 | 1-187 |
| | | | | | 311-458 |
| | | | | | 667-1020 |
| | | | | | 2448-2587 |
| HODFD73 | 2343 | 909812 | AL050332 | 9583 | 1-89 |
| HODFC79 | 2344 | 774156 | AL354665 | 9584 | 1-1880 |
| HODFC79 | 2344 | 774156 | AL356112 | 9585 | 1-1880 |
| HODFC79 | 2344 | 774156 | AL354665 | 9586 | 1-504 |
| HODFC79 | 2344 | 774156 | AL356112 | 9587 | 1-504 |
| HODFC79 | 2344 | 774156 | AL354665 | 9588 | 1-336 |
| HODEU01 | 2346 | 915176 | AC073577 | 9589 | 1-1184 |
| HODEU01 | 2346 | 915176 | AC073577 | 9590 | 1-100 |
| HODET07 | 2347 | 952194 | AF129408 | 9591 | 1-432 |
| HODET07 | 2347 | 952194 | AF129408 | 9592 | 1-663 |
| HODES10 | 2348 | 963474 | AC004928 | 9593 | 1-624 |
| HODES10 | 2348 | 963474 | AC004928 | 9594 | 1-205 |
| HODEK82 | 2350 | 779245 | AC016457 | 9595 | 1-782 |
| HODEK82 | 2350 | 779245 | AC060231 | 9596 | 1-782 |
| HODEK82 | 2350 | 779245 | AC022538 | 9597 | 1-782 |
| HODEK82 | 2350 | 779245 | AC016457 | 9598 | 1-453 |
| HODEK82 | 2350 | 779245 | AC060231 | 9599 | 1-453 |
| HODEK82 | 2350 | 779245 | AC022538 | 9600 | 1-453 |
| HODEA14 | 2351 | 859375 | AC004821 | 9601 | 1-100 |
| | | | | | 2352-2466 |
| | | | | | 2802-2941 |
| | | | | | 2960-3163 |
| | | | | | 4980-5083 |
| | | | | | 6842-6968 |
| | | | | | 8774-9008 |
| | | | | | 10405-10540 |
| | | | | | 11412-11517 |
| | | | | | 11577-11682 |
| | | | | | 13279-13409 |
| HODEA14 | 2351 | 859375 | AC004821 | 9602 | 1-274 |
| HODDS89 | 2353 | 531075 | AL359453 | 9603 | 1-489 |
| HODDS89 | 2353 | 531075 | AL359096 | 9604 | 1-489 |
| HODDS89 | 2353 | 531075 | AC053522 | 9605 | 1-489 |
| HODDS89 | 2353 | 531075 | AC015973 | 9606 | 1-489 |
| HODDS89 | 2353 | 531075 | AL359453 | 9607 | 1-331 |
| HODDS89 | 2353 | 531075 | AL359096 | 9608 | 1-331 |
| HODDS89 | 2353 | 531075 | AC053522 | 9609 | 1-331 |
| HODDS89 | 2353 | 531075 | AC015973 | 9610 | 1-331 |
| HODDS74 | 2354 | 765863 | AC016957 | 9611 | 1-429 |
| | | | | | 571-934 |
| | | | | | 1473-2003 |
| | | | | | 2118-2519 |
| | | | | | 3522-3589 |
| HODCZ39 | 2358 | 875811 | AC008990 | 9612 | 1-579 |
| | | | | | 1410-1855 |
| | | | | | 2046-4238 |
| | | | | | 4245-4589 |
| | | | | | 4723-5500 |
| | | | | | 5796-6198 |
| HODCZ39 | 2358 | 875811 | AC010620 | 9613 | 1-834 |
| | | | | | 1126-1489 |
| | | | | | 1779-2082 |
| | | | | | 2087-2615 |
| | | | | | 2924-3005 |
| | | | | | 3288-3484 |
| | | | | | 6156-6584 |
| | | | | | 6654-6857 |
| | | | | | 7053-7451 |
| | | | | | 9732-10222 |
| | | | | | 10604-12196 |
| | | | | | 28404-28529 |
| | | | | | 29430-29840 |
| | | | | | 30786-31233 |
| | | | | | 39537-40066 |
| | | | | | 40600-41177 |
| | | | | | 42007-42545 |
| | | | | | 42643-44839 |
| | | | | | 44846-45190 |
| | | | | | 45324-46101 |
| | | | | | 46397-46799 |
| HODCZ39 | 2358 | 875811 | AC008990 | 9614 | 1-95 |
| | | | | | 1041-1794 |
| HODCZ39 | 2358 | 875811 | AC008990 | 9615 | 1-530 |
| HODCZ39 | 2358 | 875811 | AC010620 | 9616 | 1-95 |
| | | | | | 1040-1793 |
| HODCY73 | 2359 | 764543 | AC025992 | 9617 | 1-521 |
| HODCY73 | 2359 | 764543 | AL356957 | 9618 | 1-690 |
| HODCY73 | 2359 | 764543 | AL358813 | 9619 | 1-450 |
| HODCY73 | 2359 | 764543 | AL162612 | 9620 | 1-1431 |
| | | | | | 1501-1692 |
| | | | | | 1855-3146 |
| | | | | | 3686-4006 |
| | | | | | 4703-6498 |
| HODCY73 | 2359 | 764543 | AC018593 9621 | 1-1430 | |
| | | | | | 1500-1691 |
| | | | | | 1854-3144 |
| | | | | | 3684-3985 |
| | | | | | 4696-6493 |
| HODCY73 | 2359 | 764543 | AL358813 | 9622 | 1-756 |
| HODCY73 | 2359 | 764543 | AC025992 | 9623 | 1-1496 |
| HODCY73 | 2359 | 764543 | AL356957 | 9624 | 1-1494 |
| HODCY73 | 2359 | 764543 | AL162612 | 9625 | 1-384 |
| HODCY73 | 2359 | 764543 | AL358813 | 9626 | 1-1002 |
| HODCY73 | 2359 | 764543 | AL162612 | 9627 | 1-850 |
| HODCY73 | 2359 | 764543 | AC018593 | 9628 | 1-332 |
| HODCY73 | 2359 | 764543 | AC018593 | 9629 | 1-1496 |
| HODCY32 | 2360 | 859543 | AC023867 | 9630 | 1-611 |
| HODCY32 | 2360 | 859543 | AC023867 | 9631 | 1-648 |
| HODCY32 | 2360 | 859543 | AC009495 | 9632 | 1-1907 |
| | | | | | 2428-2566 |
| | | | | | 3458-4205 |
| | | | | | 5930-6606 |
| | | | | | 6608-6806 |
| | | | | | 7787-8721 |
| | | | | | 12114-12354 |
| | | | | | 12826-12943 |
| | | | | | 14443-14643 |
| | | | | | 14777-15780 |
| | | | | | 16627-16758 |
| | | | | | 16802-17297 |
| | | | | | 21703-21946 |
| | | | | | 22365-24099 |
| HODCY32 | 2360 | 859543 | AC009495 | 9633 | 1-476 |
| HODCW83 | 2361 | 781287 | AL035367 | 9634 | 1-78 |
| | | | | | 174-305 |
| | | | | | 1281-1442 |
| | | | | | 1519-1552 |
| | | | | | 2373-2498 |
| | | | | | 2594-2818 |
| | | | | | 2976-3043 |
| | | | | | 4113-4271 |
| | | | | | 4346-4441 |
| | | | | | 4979-5277 |
| | | | | | 5571-5718 |
| | | | | | 5960-6104 |
| | | | | | 7479-7833 |
| | | | | | 8245-8371 |
| | | | | | 8551-8718 |
| | | | | | 8949-9503 |
| | | | | | 9663-9777 |
| | | | | | 10007-10128 |
| | | | | | 10242-10323 |
| | | | | | 10596-10905 |
| | | | | | 11404-12232 |
| HODCW83 | 2361 | 781287 | AC020567 | 9635 | 1-1875 |
| | | | | | 1958-2262 |
| | | | | | 2388-2630 |
| | | | | | 2707-2875 |
| HODCW83 | 2361 | 781287 | AC020567 | 9636 | 1-99 |
| HODCO15 | 2363 | 660502 | AC018379 | 9637 | 1-52 |
| | | | | | 865-1157 |
| | | | | | 1271-1363 |
| | | | | | 1369-1933 |
| | | | | | 3640-3798 |
| | | | | | 4011-4819 |
| | | | | | 5198-6057 |
| | | | | | 6253-8477 |
| HODCJ84 | 2364 | 973286 | AC013429 | 9638 | 1-687 |
| HODCJ84 | 2364 | 973286 | AC008265 | 9639 | 1-687 |
| HODCJ84 | 2364 | 973286 | AC013429 | 9640 | 1-410 |
| HODCJ84 | 2364 | 973286 | AC013429 | 9641 | 1-544 |
| HODCJ84 | 2364 | 973286 | AC008265 | 9642 | 1-544 |
| HODCJ84 | 2364 | 973286 | AC008265 | 9643 | 1-410 |
| HODCC05 | 2365 | 932633 | AC006946 | 9644 | 1-57 |
| | | | | | 724-1966 |
| | | | | | 4206-4370 |
| HODBZ85 | 2367 | 784526 | AC024994 | 9645 | 1-384 |
| | | | | | 468-807 |
| | | | | | 1074-1320 |
| HODBZ85 | 2367 | 784526 | AL133340 | 9646 | 1-384 |
| | | | | | 468-807 |
| | | | | | 1074-1320 |
| HODBZ85 2367 | 784526 | AC024994 9647 | 1-392 | | |
| | | | | | 1812-2867 |
| HODBZ85 | 2367 | 784526 | AL133340 | 9648 | 1-392 |
| | | | | | 1812-2867 |
| HODBU72 | 2369 | 766284 | AC072044 | 9649 | 1-379 |
| HODBU72 | 2369 | 766284 | AC026876 | 9650 | 1-379 |
| HODBU72 | 2369 | 766284 | AC009893 | 9651 | 1-379 |
| HODBF33 | 2373 | 702750 | AC073640 | 9652 | 1-317 |
| | | | | | 530-1570 |
| | | | | | 1730-2268 |
| | | | | | 5937-6065 |
| HODBF17 | 2374 | 529389 | AL157875 | 9653 | 1-571 |
| HODBF17 | 2374 | 529389 | AL157875 | 9654 | 1-1818 |
| HODBD93 | 2375 | 792579 | AC027105 | 9655 | 1-567 |
| HODBD93 | 2375 | 792579 | AL122023 | 9656 | 1-567 |
| HODBD93 | 2375 | 792579 | AL132838 | 9657 | 1-567 |
| HODBC42 | 2377 | 529635 | AP002020 | 9658 | 1-29 |
| | | | | | 634-2028 |
| HODBC42 | 2377 | 529635 | AC004067 | 9659 | 1-29 |
| | | | | | 634-2028 |
| HODBC42 | 2377 | 529635 | AP002020 | 9660 | 1-141 |
| HODBC42 | 2377 | 529635 | AP002020 | 9661 | 1-386 |
| HODBC42 | 2377 | 529635 | AC004067 | 9662 | 1-386 |
| HODBA48 | 2378 | 721931 | AC005046 | 9663 | 1-157 |
| | | | | | 1370-1522 |
| | | | | | 1727-1861 |
| | | | | | 2415-2630 |
| | | | | | 3229-3373 |
| | | | | | 3584-3817 |
| | | | | | 6852-7006 |
| | | | | | 7432-7608 |
| | | | | | 9282-9534 |
| | | | | | 10097-10628 |
| | | | | | 10841-11055 |
| | | | | | 11740-11963 |
| | | | | | 13041-13323 |
| | | | | | 13451-13850 |
| | | | | | 14382-15096 |
| | | | | | 16075-16749 |
| | | | | | 18154-18346 |
| | | | | | 18531-18857 |
| | | | | | 19624-20680 |
| | | | | | 20738-21207 |
| | | | | | 22021-22555 |
| | | | | | 22673-23076 |
| | | | | | 25746-25974 |
| | | | | | 26932-27715 |
| | | | | | 27740-30183 |
| | | | | | 30458-30899 |
| | | | | | 31160-32000 |
| | | | | | 32177-32662 |
| | | | | | 33181-33425 |
| | | | | | 33436-33652 |
| | | | | | 33857-34003 |
| | | | | | 34289-34464 |
| | | | | | 34518-34738 |
| | | | | | 36446-37141 |
| | | | | | 37163-38834 |
| | | | | | 38961-39339 |
| HODBA48 | 2378 | 721931 | AC005046 | 9664 | 1-136 |
| HODAV84 | 2381 | 592179 | AL133514 | 9665 | 1-629 |
| HODAV84 | 2381 | 592179 | AL133514 | 9666 | 1-630 |
| HODAK05 | 2384 | 932639 | AC026405 | 9667 | 1-1145 |
| | | | | | 1846-2312 |
| | | | | | 3041-3568 |
| | | | | | 4230-6044 |
| | | | | | 6403-6576 |
| | | | | | 9005-9592 |
| | | | | | 10059-10472 |
| | | | | | 10734-13322 |
| HODAK05 | 2384 | 932639 | AC026405 | 9668 | 1-526 |
| HODAE72 | 2385 | 529638 | AC021661 | 9669 | 1-196 |
| HODAE72 | 2385 | 529638 | AL356583 | 9670 | 1-196 |
| HODAA92 | 2389 | 790588 | AC026636 | 9671 | 1-234 |
| HODAA80 | 2391 | 529560 | AL354993 | 9672 | 1-882 |
| HODAA80 | 2391 | 529560 | AL354993 | 9673 | 1-101 |
| HODAA80 | 2391 | 529560 | AL354993 | 9674 | 1-111 |
| HODAA69 | 2392 | 529563 | AP000791 | 9675 | 1-772 |
| HODAA69 | 2392 | 529563 | AP002349 | 9676 | 1-768 |
| HODAA69 | 2392 | 529563 | AC007030 | 9677 | 1-773 |
| HODAA54 | 2393 | 859582 | AC026731 | 9678 | 1-256 |
| HODAA21 | 2395 | 859583 | AL035530 | 9679 | 1-303 |
| | | | | | 736-986 |
| | | | | | 10977-11340 |
| | | | | | 13616-13896 |
| | | | | | 15003-15115 |
| | | | | | 15827-16799 |
| | | | | | 17915-18493 |
| | | | | | 21381-21837 |
| | | | | | 22627-22812 |
| | | | | | 22838-23836 |
| | | | | | 24249-24953 |
| | | | | | 25245-25435 |
| | | | | | 27484-27678 |
| | | | | | 28829-29505 |
| | | | | | 30105-30641 |
| | | | | | 32209-32582 |
| | | | | | 32642-33135 |
| | | | | | 33357-33685 |
| | | | | | 34531-34948 |
| | | | | | 38450-38642 |
| | | | | | 39237-39536 |
| | | | | | 40191-40354 |
| | | | | | 42778-42866 |
| | | | | | 43278-43368 |
| | | | | | 43400-44302 |
| | | | | | 44382-44960 |
| | | | | | 45622-46160 |
| | | | | | 46194-46311 |
| HODAA21 | 2395 | 859583 | AL035530 | 9680 | 1-592 |
| HODAA21 | 2395 | 859583 | AL035530 | 9681 | 1-1767 |
| HODAA15 | 2396 | 523382 | AL022068 | 9682 | 1-127 |
| HODAA04 | 2398 | 927711 | AL138713 | 9683 | 1-497 |
| HODAA04 | 2398 | 927711 | AL138713 | 9684 | 1-480 |
| HOCPU05 | 2399 | 928651 | AL022721 | 9685 | 1-1263 |
| | | | | | 6140-6293 |
| | | | | | 8003-8156 |
| | | | | | 9128-9256 |
| | | | | | 9263-10128 |
| | | | | | 11307-11562 |
| | | | | | 13464-13807 |
| | | | | | 14210-14510 |
| | | | | | 15844-17115 |
| | | | | | 17822-19417 |
| | | | | | 20123-20680 |
| | | | | | 21428-21754 |
| | | | | | 25071-25264 |
| | | | | | 25391-25481 |
| | | | | | 25570-25604 |
| | | | | | 30944-31465 |
| | | | | | 34638-34933 |
| | | | | | 35608-35955 |
| | | | | | 36105-36346 |
| | | | | | 38876-39207 |
| | | | | | 44154-44338 |
| | | | | | 44424-44513 |
| | | | | | 44661-45127 |
| | | | | | 45137-45929 |
| HOCPU05 | 2399 | 928651 | AL022721 | 9686 | 1-117 |
| HOCPH02 | 2400 | 917453 | AL359674 | 9687 | 1-684 |
| HOCPH02 | 2400 | 917453 | AL359674 | 9688 | 1-456 |
| HOCPF02 | 2401 | 917630 | AL359372 | 9689 | 1-1054 |
| | | | | | 2139-2246 |
| | | | | | 4030-4427 |
| | | | | | 6093-6259 |
| HOCPF02 | 2401 | 917630 | AL050343 | 9690 | 1-1054 |
| | | | | | 2139-2246 |
| | | | | | 4030-4428 |
| | | | | | 6094-6260 |
| HOCPF02 | 2401 | 917630 | AL359372 | 9691 | 1-31 |
| | | | | | 42-315 |
| HOCPF02 | 2401 | 917630 | AL050343 | 9692 | 1-274 |
| HOCPF02 | 2401 | 917630 | AL050343 | 9693 | 1-742 |
| HOCOV07 | 2402 | 951744 | AC026974 | 9694 | 1-813 |
| HOCOV07 | 2402 | 951744 | AL079341 | 9695 | 1-813 |
| HOCOV07 | 2402 | 951744 | AC026974 | 9696 | 1-306 |
| HOCOV07 | 2402 | 951744 | AL079341 | 9697 | 1-306 |
| HOCMM01 | 2403 | 914464 | AC078864 | 9698 | 1-954 |
| HOCMM01 | 2403 | 914464 | AC019244 | 9699 | 1-829 |
| HOCMI24 | 2404 | 878363 | AC023046 | 9700 | 1-1593 |
| HOCMI24 | 2404 | 878363 | AC023046 | 9701 | 1-353 |
| HNOAD04 | 2407 | 926258 | AC069278 | 9702 | 1-741 |
| HNOAD04 | 2407 | 926258 | AC069278 | 9703 | 1-698 |
| | | | | | 1008-1383 |
| HNOAD04 | 2407 | 926258 | AC069278 | 9704 | 1-2222 |
| HNNNB08 | 2408 | 957719 | AC005281 | 9705 | 1-276 |
| | | | | | 835-5981 |
| | | | | | 5998-8928 |
| HNNNB08 | 2408 | 957719 | AC005281 | 9706 | 1-529 |
| HNNNA07 | 2409 | 899742 | AC037444 | 9707 | 1-625 |
| HNNNA07 | 2409 | 899742 | AC013698 | 9708 | 1-625 |
| HNNNA07 | 2409 | 899742 | AC037444 | 9709 | 1-285 |
| HNNNA07 | 2409 | 899742 | AC037444 | 9710 | 1-316 |
| HNNNA07 | 2409 | 899742 | AC013698 | 9711 | 1-285 |
| HNNNA07 | 2409 | 899742 | AC013698 | 9712 | 1-316 |
| HNIAB92 | 2410 | 683077 | AC078916 | 9713 | 1-364 |
| HNIAB92 | 2410 | 683077 | AC022305 | 9714 | 1-686 |
| HNIAB92 | 2410 | 683077 | AC072032 | 9715 | 1-364 |
| HNIAB92 | 2410 | 683077 | AC078916 | 9716 | 1-288 |
| HNIAB92 | 2410 | 683077 | AC072032 | 9717 | 1-288 |
| HNBVH02 | 2413 | 917719 | AL355822 | 9718 | 1-103 |
| | | | | | 170-600 |
| | | | | | 780-1088 |
| | | | | | 1296-1647 |
| | | | | | 2086-2390 |
| | | | | | 3428-3714 |
| | | | | | 3745-4698 |
| | | | | | 5342-10951 |
| HNBVH02 | 2413 | 917719 | AL117354 | 9719 | 1-103 |
| | | | | | 170-600 |
| | | | | | 780-1088 |
| | | | | | 1296-1647 |
| | | | | | 2085-2407 |
| | | | | | 3742-4775 |
| | | | | | 4783-4893 |
| | | | | | 5339-10949 |
| HNBVH02 | 2413 | 917719 | AL355822 | 9720 | 1-689 |
| HNBVH02 | 2413 | 917719 | AL117354 | 9721 | 1-689 |
| HNBVC03 | 2414 | 922402 | AC017099 | 9722 | 1-396 |
| | | | | | 510-858 |
| | | | | | 1026-1198 |
| | | | | | 2607-2761 |
| HNBVC03 | 2414 | 922402 | AC017099 | 9723 | 1-196 |
| HNBUQ06 | 2415 | 933673 | AC022558 | 9724 | 1-133 |
| | | | | | 1253-1381 |
| | | | | | 2940-3076 |
| | | | | | 3160-3199 |
| | | | | | 3860-3985 |
| | | | | | 4129-4569 |
| | | | | | 5374-5488 |
| | | | | | 5932-7588 |
| HNBUQ06 | 2415 | 933673 | AC022558 | 9725 | 1-373 |
| HNBUQ06 | 2415 | 933673 | AC022558 | 9726 | 1-374 |
| HNBUI10 | 2417 | 961734 | AC010990 | 9727 | 1-227 |
| | | | | | 339-1923 |
| | | | | | 1947-2413 |
| | | | | | 2498-2672 |
| HLWFJ69 | 2418 | 754476 | AC012169 | 9728 | 1-414 |
| HLWFJ69 | 2418 | 754476 | AC012169 | 9729 | 1-200 |
| | | | | | 540-702 |
| | | | | | 2463-2655 |
| | | | | | 4388-4755 |
| | | | | | 5077-5416 |
| | | | | | 5954-6143 |
| HLWEH10 | 2420 | 963548 | AC016151 | 9730 | 1-593 |
| HLWEH10 | 2420 | 963548 | AC016147 | 9731 | 1-593 |
| HLWEH10 | 2420 | 963548 | AC011881 | 9732 | 1-1143 |
| HLWEH10 | 2420 | 963548 | AC024454 | 9733 | 1-1146 |
| HLWEH10 | 2420 | 963548 | AC000382 | 9734 | 1-1134 |
| HLWEH10 | 2420 | 963548 | AC016147 | 9735 | 1-406 |
| HLWEH10 | 2420 | 963548 | AC016147 | 9736 | 1-223 |
| HLWEH10 | 2420 | 963548 | AC011881 | 9737 | 1-224 |
| HLWEH10 | 2420 | 963548 | AC024454 | 9738 | 1-224 |
| HLWEH10 | 2420 | 963548 | AC000382 | 9739 | 1-223 |
| HLWEH10 | 2420 | 963548 | AC000382 | 9740 | 1-1424 |
| HLWEA90 | 2421 | 787632 | AC010582 | 9741 | 1-87 |
| | | | | | 201-1019 |
| HLWEA90 | 2421 | 787632 | AL136040 | 9742 | 1-87 |
| | | | | | 201-1019 |
| HLWEA90 | 2421 | 787632 | AC010582 | 9743 | 1-570 |
| HLWEA90 | 2421 | 787632 | AC010582 | 9744 | 1-172 |
| HLWEA90 | 2421 | 787632 | AL136040 | 9745 | 1-172 |
| HLWEA90 | 2421 | 787632 | AL136040 | 9746 | 1-558 |
| HLWDD01 | 2423 | 915378 | AL109757 | 9747 | 1-558 |
| HLWDD01 | 2423 | 915378 | AL031296 | 9748 | 1-670 |
| | | | | | 1590-2584 |
| | | | | | 3609-3751 |
| | | | | | 4204-4803 |
| | | | | | 4847-5271 |
| | | | | | 9874-10146 |
| | | | | | 11847-12328 |
| | | | | | 12493-13051 |
| | | | | | 13395-13635 |
| | | | | | 15455-15917 |
| | | | | | 17288-17739 |
| | | | | | 18945-19908 |
| | | | | | 21414-22006 |
| | | | | | 27737-27823 |
| | | | | | 35955-36575 |
| | | | | | 36643-37204 |
| | | | | | 37341-37504 |
| | | | | | 39154-39312 |
| | | | | | 41736-42263 |
| | | | | | 47221-47669 |
| | | | | | 47712-48167 |
| | | | | | 50898-51095 |
| | | | | | 51163-51655 |
| | | | | | 51716-52580 |
| | | | | | 52706-58181 |
| HLWDD01 | 2423 | 915378 | AL109757 | 9749 | 1-482 |
| HLWDD01 | 2423 | 915378 | AL031296 | 9750 | 1-274 |
| HLWCN93 | 2426 | 791854 | AL356915 | 9751 | 1-688 |
| HLWCN93 | 2426 | 791854 | AL356915 | 9752 | 1-339 |
| HLWCN93 | 2426 | 791854 | AL356915 | 9753 | 1-253 |
| HLWCF33 | 2429 | 687995 | AC018868 | 9754 | 1-99 |
| | | | | | 586-1341 |
| | | | | | 2056-2449 |
| | | | | | 2920-3360 |
| | | | | | 3386-3488 |
| | | | | | 4490-5122 |
| | | | | | 5574-5649 |
| | | | | | 7802-7900 |
| | | | | | 9752-9814 |
| | | | | | 10688-11014 |
| | | | | | 11951-12045 |
| HLWCF33 | 2429 | 687995 | AC018868 | 9755 | 1-554 |
| HLWCF47 | 2430 | 720156 | AC023331 | 9756 | 1-121 |
| | | | | | 258-3102 |
| | | | | | 4363-4509 |
| HLWCE47 | 2430 | 720156 | AC023331 | 9757 | 1-45 |
| | | | | | 471-1400 |
| | | | | | 1581-2065 |
| | | | | | 2682-3136 |
| | | | | | 4339-5870 |
| HLWBW29 | 2433 | 690515 | AL121586 | 9758 | 1-397 |
| | | | | | 2315-2406 |
| | | | | | 3620-4013 |
| | | | | | 4016-4099 |
| | | | | | 4277-4545 |
| | | | | | 4635-4916 |
| | | | | | 5001-5099 |
| | | | | | 5203-5521 |
| HLWBW29 | 2433 | 690515 | AL139226 | 9759 | 1-397 |
| | | | | | 2314-2405 |
| | | | | | 3619-4012 |
| | | | | | 4015-4098 |
| | | | | | 4276-4544 |
| | | | | | 4634-4846 |
| HLWBW29 | 2433 | 690515 | AL121586 | 9760 | 1-218 |
| | | | | | 386-445 |
| | | | | | 524-1437 |
| | | | | | 1507-1603 |
| | | | | | 1800-2130 |
| | | | | | 2481-2687 |
| | | | | | 3285-3720 |
| | | | | | 4079-4447 |
| | | | | | 4632-5281 |
| | | | | | 5733-6062 |
| | | | | | 6435-7005 |
| | | | | | 7989-8263 |
| | | | | | 8407-8736 |
| | | | | | 8786-8848 |
| | | | | | 8963-9148 |
| | | | | | 10148-10245 |
| | | | | | 10438-11523 |
| | | | | | 11689-12039 |
| | | | | | 12381-12673 |
| | | | | | 13749-14001 |
| | | | | | 14716-14838 |
| | | | | | 15055-15209 |
| | | | | | 15263-15441 |
| | | | | | 15473-15610 |
| HLWBW29 | 2433 | 690515 | AL139226 | 9761 | 1-86 |
| | | | | | 190-508 |
| HLWBT09 | 2434 | 887877 | AP000655 | 9762 | 1-447 |
| HLWBT09 | 2434 | 887877 | AC012153 | 9763 | 1-447 |
| | | | | | 3188-3293 |
| | | | | | 6053-6211 |
| | | | | | 6320-6805 |
| | | | | | 6922-7663 |
| | | | | | 7858-7976 |
| | | | | | 8361-8482 |
| | | | | | 9276-9370 |
| HLWBT09 | 2434 | 887877 | AC012153 | 9764 | 1-267 |
| HLWBS62 | 2435 | 743406 | AC005203 | 9765 | 1-216 |
| | | | | | 492-953 |
| | | | | | 1282-1431 |
| | | | | | 1754-1846 |
| | | | | | 2011-2094 |
| | | | | | 2599-2717 |
| | | | | | 2956-3306 |
| | | | | | 3685-4243 |
| | | | | | 4636-4916 |
| | | | | | 4919-5475 |
| | | | | | 5711-8099 |
| | | | | | 8218-9037 |
| | | | | | 9387-10436 |
| | | | | | 10500-11440 |
| | | | | | 11934-12921 |
| | | | | | 13353-13560 |
| | | | | | 13759-13866 |
| | | | | | 14223-14326 |
| | | | | | 14799-15187 |
| | | | | | 15528-15837 |
| | | | | | 16093-16197 |
| | | | | | 16539-16716 |
| | | | | | 17686-17775 |
| | | | | | 18652-18786 |
| | | | | | 20304-20465 |
| | | | | | 21288-21364 |
| | | | | | 21996-22111 |
| | | | | | 23463-23703 |
| | | | | | 23726-24579 |
| | | | | | 24595-24722 |
| | | | | | 25683-25758 |
| HLWBS62 | 2435 | 743406 | AC006111 | 9766 | 1-216 |
| | | | | | 492-953 |
| | | | | | 1282-1431 |
| | | | | | 1754-1846 |
| | | | | | 2011-2094 |
| | | | | | 2543-2661 |
| | | | | | 2900-3250 |
| | | | | | 3629-4187 |
| | | | | | 4580-4860 |
| | | | | | 4863-5419 |
| | | | | | 5655-6300 |
| | | | | | 6361-8043 |
| | | | | | 8162-8981 |
| | | | | | 9331-10380 |
| | | | | | 10444-11384 |
| | | | | | 11878-12865 |
| | | | | | 13297-13504 |
| | | | | | 13702-13809 |
| | | | | | 14166-14269 |
| | | | | | 14742-15130 |
| | | | | | 15602-15772 |
| | | | | | 16482-16659 |
| | | | | | 17629-17718 |
| | | | | | 18595-18729 |
| | | | | | 20247-20408 |
| | | | | | 21231-21307 |
| | | | | | 21939-22054 |
| | | | | | 23406-23646 |
| | | | | | 23669-24522 |
| | | | | | 25626-25701 |
| HLWBS62 | 2435 | 743406 | AC005203 | 9767 | 1-663 |
| HLWBS62 | 2435 | 743406 | AC006111 | 9768 | 1-663 |
| HLWBR85 | 2436 | 784261 | AC073573 | 9769 | 1-157 |
| | | | | | 190-1625 |
| HLWBR85 | 2436 | 784261 | AC073573 | 9770 | 1-129 |
| | | | | | 443-1256 |
| HLWBR85 | 2436 | 784261 | AC073573 | 9771 | 1-1487 |
| HLWBJ65 | 2438 | 747784 | AL049611 | 9772 | 1-165 |
| | | | | | 335-911 |
| | | | | | 1853-2122 |
| | | | | | 5376-6516 |
| HLWBH92 | 2439 | 791355 | AC015461 | 9773 | 1-42 |
| | | | | | 614-1073 |
| | | | | | 1433-1570 |
| | | | | | 2132-2699 |
| | | | | | 2822-3332 |
| | | | | | 3681-3973 |
| | | | | | 4281-4618 |
| | | | | | 5384-6480 |
| | | | | | 6612-7384 |
| | | | | | 8045-8651 |
| | | | | | 8864-8986 |
| | | | | | 9098-10018 |
| | | | | | 10476-11001 |
| | | | | | 11359-11552 |
| | | | | | 11580-11802 |
| | | | | | 12250-12674 |
| | | | | | 12793-13281 |
| | | | | | 14507-14719 |
| | | | | | 15077-15520 |
| | | | | | 16239-17705 |
| HLWBH92 | 2439 | 791355 | AL157394 | 9774 | 1-608 |
| | | | | | 822-934 |
| | | | | | 1055-1975 |
| | | | | | 2433-2958 |
| | | | | | 3316-3508 |
| | | | | | 3537-3759 |
| | | | | | 4207-4631 |
| | | | | | 4750-5238 |
| | | | | | 6464-6676 |
| | | | | | 7034-7477 |
| | | | | | 8196-9662 |
| HLWBH92 | 2439 | 791355 | AL157394 | 9775 | 1-773 |
| HLWBF48 | 2441 | 721530 | AC025230 | 9776 | 1-507 |
| HLWBF48 | 2441 | 721530 | AC025230 | 9777 | 1-320 |
| HLWBE74 | 2442 | 887967 | AC026529 | 9778 | 1-387 |
| HLWBE74 | 2442 | 887967 | AC026529 | 9779 | 1-116 |
| HLWBC21 | 2443 | 869611 | AC008870 | 9780 | 1-76 |
| | | | | | 1811-2154 |
| | | | | | 2232-2671 |
| | | | | | 3021-3129 |
| | | | | | 4039-4147 |
| | | | | | 4436-4506 |
| | | | | | 4859-5131 |
| | | | | | 6200-6622 |
| | | | | | 7373-7595 |
| | | | | | 7729-8234 |
| | | | | | 9030-9789 |
| | | | | | 10164-10575 |
| | | | | | 10878-14792 |
| HLWBC21 | 2443 | 869611 | AC009043 | 9781 | 1-226 |
| | | | | | 409-741 |
| | | | | | 1925-2135 |
| | | | | | 3871-4214 |
| | | | | | 4292-4731 |
| | | | | | 5079-5187 |
| | | | | | 6097-6205 |
| | | | | | 6494-6564 |
| | | | | | 6917-7189 |
| | | | | | 8258-8680 |
| | | | | | 9431-9653 |
| | | | | | 9787-10292 |
| | | | | | 11088-11847 |
| | | | | | 12223-12634 |
| | | | | | 12937-16851 |
| HLWBC21 | 2443 | 869611 | AC002400 | 9782 | 1-226 |
| | | | | | 409-741 |
| | | | | | 1926-2136 |
| | | | | | 3872-4215 |
| | | | | | 4293-4732 |
| | | | | | 5080-5188 |
| | | | | | 6098-6206 |
| | | | | | 6495-6565 |
| | | | | | 6918-7190 |
| | | | | | 8259-8681 |
| | | | | | 9432-9654 |
| | | | | | 9788-10293 |
| | | | | | 11090-11849 |
| | | | | | 12225-12636 |
| | | | | | 12939-16853 |
| HLWBC21 | 2443 | 869611 | AC009043 | 9783 | 1-523 |
| HLWBC21 | 2443 | 869611 | AC002400 | 9784 | 1-522 |
| HLWBA27 | 2445 | 931387 | AC073342 | 9785 | 1-164 |
| | | | | | 208-280 |
| | | | | | 349-1975 |
| | | | | | 1978-2434 |
| | | | | | 2614-2946 |
| | | | | | 4135-9074 |
| | | | | | 9200-9507 |
| HLWBA27 | 2445 | 931387 | AC073342 | 9786 | 1-434 |
| HLWAS09 | 2447 | 625419 | AC023300 | 9787 | 1-42 |
| | | | | | 621-892 |
| | | | | | 5228-5295 |
| | | | | | 5624-5709 |
| | | | | | 6898-7039 |
| | | | | | 7372-7745 |
| | | | | | 8210-8940 |
| | | | | | 9110-9248 |
| | | | | | 11554-11620 |
| | | | | | 11800-12095 |
| | | | | | 12143-12209 |
| | | | | | 12240-12612 |
| | | | | | 13239-13378 |
| | | | | | 13766-13932 |
| | | | | | 15723-16186 |
| | | | | | 16578-16970 |
| | | | | | 17992-18068 |
| | | | | | 19055-19192 |
| | | | | | 19207-19562 |
| | | | | | 20293-20705 |
| | | | | | 20784-20888 |
| | | | | | 21589-21754 |
| | | | | | 22112-22267 |
| | | | | | 22754-23587 |
| HLWAS09 | 2447 | 625419 | AL390962 | 9788 | 1-393 |
| HLWAS09 | 2447 | 625419 | AC023545 | 9789 | 1-332 |
| | | | | | 797-1527 |
| | | | | | 1697-1835 |
| | | | | | 4141-4207 |
| | | | | | 4387-4682 |
| | | | | | 4730-4796 |
| | | | | | 4827-5199 |
| | | | | | 5826-5965 |
| | | | | | 6353-6519 |
| | | | | | 8310-8773 |
| | | | | | 9165-9557 |
| | | | | | 10579-10655 |
| | | | | | 11642-11779 |
| | | | | | 11794-12149 |
| | | | | | 12880-13292 |
| | | | | | 13371-13474 |
| | | | | | 14175-14340 |
| | | | | | 14698-14853 |
| | | | | | 15340-16173 |
| HLWAS09 | 2447 | 625419 | AL390962 | 9790 | 1-464 |
| HLWAO67 | 2449 | 751503 | AC023120 | 9791 | 1-113 |
| | | | | | 1670-1968 |
| | | | | | 2817-2876 |
| | | | | | 3739-3958 |
| | | | | | 4039-4861 |
| | | | | | 8042-8236 |
| | | | | | 9960-10253 |
| | | | | | 10358-10487 |
| | | | | | 11261-11363 |
| | | | | | 12445-12554 |
| | | | | | 17967-18436 |
| | | | | | 19317-19470 |
| | | | | | 19666-19900 |
| | | | | | 20264-20363 |
| | | | | | 20475-20779 |
| | | | | | 25579-26082 |
| | | | | | 26905-27377 |
| | | | | | 27555-27983 |
| | | | | | 28656-28997 |
| | | | | | 29146-29769 |
| | | | | | 30579-31170 |
| | | | | | 31202-31625 |
| | | | | | 32023-32698 |
| | | | | | 34599-34740 |
| | | | | | 34805-35520 |
| | | | | | 35575-37925 |
| HLWAO67 | 2449 | 751503 | AC023120 | 9792 | 1-1768 |
| HLWAO67 | 2449 | 751503 | AC023120 | 9793 | 1-518 |
| HLWAE09 | 2453 | 789030 | AL162258 | 9794 | 1-1463 |
| | | | | | 1779-2270 |
| | | | | | 2460-2664 |
| | | | | | 2763-3258 |
| | | | | | 3293-4333 |
| | | | | | 4480-5086 |
| HLWAE09 | 2453 | 789030 | AL162258 | 9795 | 1-245 |
| HLWAD57 | 2454 | 734655 | AL049651 | 9796 | 1-469 |
| HLWAD33 | 2455 | 702317 | AC015849 | 9797 | 1-458 |
| HLWAD33 | 2455 | 702317 | AC004675 | 9798 | 1-466 |
| HLWAD33 | 2455 | 702317 | AC004675 | 9799 | 1-250 |
| HLWAD33 | 2455 | 702317 | AC004675 | 9800 | 1-773 |
| | | | | | 1224-1484 |
| | | | | | 1586-2669 |
| HLWAD32 | 2456 | 699158 | AC069057 | 9801 | 1-366 |
| HLWAD02 | 2457 | 919725 | AC008005 | 9802 | 1-545 |
| HLWAD02 | 2457 | 919725 | AC019292 | 9803 | 1-545 |
| HLWAD02 | 2457 | 919725 | AC008005 | 9804 | 1-283 |
| HLWAD02 | 2457 | 919725 | AC008005 | 9805 | 1-333 |
| | | | | | 2042-3121 |
| | | | | | 3134-4497 |
| | | | | | 4933-5401 |
| HLWAD02 | 2457 | 919725 | AC019292 | 9806 | 1-283 |
| HLWAD02 | 2457 | 919725 | AC019292 | 9807 | 1-333 |
| | | | | | 2039-3118 |
| | | | | | 3131-3936 |
| HKZAH11 | 2458 | 965175 | AL359092 | 9808 | 1-116 |
| HKZAH11 | 2458 | 965175 | AC009453 | 9809 | 1-143 |
| HKZAH11 | 2458 | 965175 | AC025036 | 9810 | 1-148 |
| HKZAH11 | 2458 | 965175 | AC011953 | 9811 | 1-126 |
| HKZAH11 | 2458 | 965175 | AC022231 | 9812 | 1-151 |
| HKZAH11 | 2458 | 965175 | AP001451 | 9813 | 1-96 |
| HKZAH11 | 2458 | 965175 | AC016327 | 9814 | 1-165 |
| HKZAH11 | 2458 | 965175 | AC048342 | 9815 | 1-130 |
| HKZAH11 | 2458 | 965175 | AP000562 | 9816 | 1-724 |
| HKZAH11 | 2458 | 965175 | AC016327 | 9817 | 1-195 |
| HKZAH11 | 2458 | 965175 | AC048342 | 9818 | 1-118 |
| HKZAH11 | 2458 | 965175 | AP000562 | 9819 | 1-187 |
| HJMBX19 | 2459 | 668568 | AC011184 | 9820 | 1-433 |
| | | | | | 545-883 |
| | | | | | 1218-1556 |
| HJMBX19 | 2459 | 668568 | AC011184 | 9821 | 1-331 |
| HJMBS77 | 2460 | 772101 | AC009902 | 9822 | 1-320 |
| HJMBS77 | 2460 | 772101 | AC009902 | 9823 | 1-1732 |
| HJMBS10 | 2461 | 964464 | AP000116 | 9824 | 1-606 |
| HJMBS10 | 2461 | 964464 | AP000192 | 9825 | 1-606 |
| HJMBS10 | 2461 | 964464 | AP000048 | 9826 | 1-606 |
| HJMBQ90 | 2462 | 788834 | AL162271 | 9827 | 1-1136 |
| | | | | | 1294-1518 |
| | | | | | 2224-2510 |
| | | | | | 2907-3489 |
| HJMBQ90 | 2462 | 788834 | AC068198 | 9828 | 1-808 |
| | | | | | 859-1169 |
| | | | | | 1306-2443 |
| | | | | | 2599-2823 |
| | | | | | 3529-3815 |
| | | | | | 4215-4401 |
| | | | | | 4557-4741 |
| HJMBQ90 | 2462 | 788834 | AL162271 | 9829 | 1-113 |
| HJMBQ90 | 2462 | 788834 | AL162271 | 9830 | 1-45 |
| | | | | | 291-609 |
| HJMBQ90 | 2462 | 788834 | AC068198 | 9831 | 1-45 |
| | | | | | 294-612 |
| HJMBN02 | 2463 | 919737 | AC010687 | 9832 | 1-632 |
| HJMBN02 | 2463 | 919737 | AC011399 | 9833 | 1-847 |
| | | | | | 995-1104 |
| | | | | | 1510-2357 |
| | | | | | 2363-2467 |
| | | | | | 2608-3240 |
| | | | | | 3319-4028 |
| | | | | | 5266-5726 |
| | | | | | 7081-7398 |
| HJMBN02 | 2463 | 919737 | AC005214 | 9834 | 1-847 |
| | | | | | 995-1104 |
| | | | | | 1510-2357 |
| | | | | | 2363-2540 |
| | | | | | 2608-3240 |
| | | | | | 3319-4029 |
| | | | | | 5268-5728 |
| | | | | | 7082-8757 |
| | | | | | 8896-9359 |
| | | | | | 10246-10442 |
| | | | | | 10573-10763 |
| | | | | | 10952-11038 |
| | | | | | 11298-11386 |
| | | | | | 11406-12164 |
| | | | | | 12287-13192 |
| | | | | | 13285-13604 |
| | | | | | 13686-14403 |
| HJMBN02 | 2463 | 919737 | AC010687 | 9835 | 1-711 |
| HJMBN02 | 2463 | 919737 | AC011399 | 9836 | 1-560 |
| | | | | | 1032-1413 |
| | | | | | 1565-1911 |
| HJMBN02 | 2463 | 919737 | AC010687 | 9837 | 1-847 |
| | | | | | 995-1104 |
| | | | | | 1510-2356 |
| | | | | | 2362-2539 |
| HJMBN02 | 2463 | 919737 | AC005214 | 9838 | 1-193 |
| HJMBN02 | 2463 | 919737 | AC005214 | 9839 | 1-559 |
| | | | | | 1031-1412 |
| | | | | | 1564-1910 |
| HJMBI93 | 2464 | 929114 | AL031847 | 9840 | 1-1841 |
| HJMAV93 | 2465 | 828110 | AC025740 | 9841 | 1-84 |
| | | | | | 504-619 |
| | | | | | 2486-5330 |
| | | | | | 5682-7115 |
| HJMAV93 | 2465 | 828110 | AC025740 | 9842 | 1-461 |
| HJMAV93 | 2465 | 828110 | AC025740 | 9843 | 1-772 |
| HJMAU07 | 2466 | 961623 | AC004493 | 9844 | 1-35 |
| | | | | | 410-599 |
| | | | | | 1161-1291 |
| | | | | | 4637-5891 |
| | | | | | 6021-6140 |
| | | | | | 6276-8377 |
| | | | | | 8478-15183 |
| | | | | | 15896-17173 |
| | | | | | 17337-17391 |
| | | | | | 17567-17817 |
| | | | | | 18166-19658 |
| | | | | | 20060-20408 |
| | | | | | 21099-21245 |
| | | | | | 22688-23082 |
| | | | | | 23890-24387 |
| HJMAU07 | 2466 | 961623 | AC004493 9845 | 1-942 | |
| HJMAQ86 | 2467 | 785410 | AP001805 9846 | 1-2130 | |
| HJMAQ86 | 2467 | 785410 | AC023532 9847 | 1-2132 | |
| | | | | | 5338-5376 |
| HJMAQ86 | 2467 | 785410 | U73643 | 9848 | 1-2131 |
| | | | | | 5344-5373 |
| HJMAQ86 | 2467 | 785410 | AP001805 | 9849 | 1-692 |
| HJMAQ86 | 2467 | 785410 | AC023532 | 9850 | 1-692 |
| HJMAQ86 | 2467 | 785410 | U73643 | 9851 | 1-692 |
| HJMAJ91 | 2469 | 811222 | AP000579 | 9852 | 1-148 |
| | | | | | 924-1039 |
| | | | | | 2043-2371 |
| | | | | | 3168-3291 |
| | | | | | 3324-3436 |
| | | | | | 3442-3596 |
| | | | | | 4583-4741 |
| | | | | | 5311-5502 |
| | | | | | 5615-5693 |
| | | | | | 5944-6637 |
| | | | | | 7166-8217 |
| HJMAJ91 | 2469 | 811222 | AP000579 | 9853 | 1-485 |
| HJMAI62 | 2470 | 742612 | AC002325 | 9854 | 1-210 |
| | | | | | 828-1009 |
| | | | | | 1391-1843 |
| | | | | | 2126-2699 |
| | | | | | 3119-3263 |
| | | | | | 3622-3964 |
| | | | | | 3992-4139 |
| | | | | | 5066-6149 |
| HJMAI62 | 2470 | 742612 | AC001644 | 9855 | 1-158 |
| | | | | | 708-871 |
| | | | | | 1883-2092 |
| | | | | | 2710-2891 |
| | | | | | 3273-3725 |
| | | | | | 4008-4581 |
| | | | | | 5001-5145 |
| | | | | | 5504-6021 |
| | | | | | 6948-8031 |
| HJMAI62 | 2470 | 742612 | AC002355 | 9856 | 1-116 |
| | | | | | 669-833 |
| | | | | | 1883-2079 |
| | | | | | 2700-2882 |
| | | | | | 3271-3733 |
| | | | | | 4022-4177 |
| | | | | | 5027-5176 |
| | | | | | 5539-5908 |
| | | | | | 5938-6070 |
| | | | | | 7027-8066 |
| HJMAI62 | 2470 | 742612 | AC002325 | 9857 | 1-2217 |
| | | | | | 2648-3015 |
| | | | | | 3487-3706 |
| | | | | | 4094-4549 |
| | | | | | 5330-5457 |
| | | | | | 5621-5743 |
| | | | | | 7223-7371 |
| | | | | | 10631-10827 |
| HJMAI62 | 2470 | 742612 | AC001644 | 9858 | 1-218 |
| HJMAI62 | 2470 | 742612 | AC001644 | 9859 | 1-2217 |
| | | | | | 2648-3015 |
| | | | | | 3487-3706 |
| | | | | | 4094-4549 |
| | | | | | 5330-5457 |
| | | | | | 5621-5743 |
| | | | | | 7223-7371 |
| | | | | | 10632-10828 |
| HJMAI62 | 2470 | 742612 | AC002355 | 9860 | 1-186 |
| HETJY68 | 2472 | 752542 | AC021236 | 9861 | 1-64 |
| | | | | | 107-782 |
| | | | | | 957-1948 |
| HETFF43 | 2477 | 529589 | AC002430 | 9862 | 1-193 |
| HETFF43 | 2477 | 529589 | AC007384 | 9863 | 1-193 |
| HETFF43 | 2477 | 529589 | AC002430 | 9864 | 1-1417 |
| HETFF43 | 2477 | 529589 | AC002430 | 9865 | 1-772 |
| HETFF43 | 2477 | 529589 | AC007384 | 9866 | 1-1417 |
| HETFF43 | 2477 | 529589 | AC007384 | 9867 | 1-772 |
| HETBM55 | 2482 | 929285 | AC026565 | 9868 | 1-199 |
| | | | | | 302-449 |
| | | | | | 971-1329 |
| | | | | | 1415-1771 |
| HETBM55 | 2482 | 929285 | AL391068 | 9869 | 1-199 |
| | | | | | 302-449 |
| | | | | | 972-1330 |
| | | | | | 1416-1772 |
| HETBM55 | 2482 | 929285 | AC026565 | 9870 | 1-317 |
| HETBM55 | 2482 | 929285 | AL391068 | 9871 | 1-98 |
| HETBM55 | 2482 | 929285 | AL391068 | 9872 | 1-478 |
| | | | | | 786-1282 |
| HETAS81 | 2485 | 778539 | AJ239326 | 9873 | 1-496 |
| HETAS81 | 2485 | 778539 | AJ239326 | 9874 | 1-485 |
| HETAS62 | 2486 | 754155 | AC024527 | 9875 | 1-1433 |
| HETAS62 | 2486 | 754155 | AC024527 | 9876 | 1-458 |
| | | | | | 916-1327 |
| | | | | | 2547-2905 |
| | | | | | 3015-3726 |
| | | | | | 4373-4406 |
| HETAS62 | 2486 | 754155 | AL135916 | 9877 | 1-506 |
| | | | | | 579-1425 |
| HETAS62 | 2486 | 754155 | AL021368 | 9878 | 1-488 |
| | | | | | 579-1425 |
| HETAS62 | 2486 | 754155 | AC024527 | 9879 | 1-461 |
| HETAS62 | 2486 | 754155 | AC024527 | 9880 | 1-84 |
| HETAS62 | 2486 | 754155 | AC024527 | 9881 | 1-536 |
| HETAS62 | 2486 | 754155 | AL135916 | 9882 | 1-459 |
| HETAS62 | 2486 | 754155 | AL135916 | 9883 | 1-395 |
| HETAS62 | 2486 | 754155 | AL021368 | 9884 | 1-395 |
| HETAS62 | 2486 | 754155 | AL021368 | 9885 | 1-459 |
| HETAJ14 | 2487 | 660831 | AL137801 | 9886 | 1-179 |
| | | | | | 260-500 |
| | | | | | 2213-2348 |
| | | | | | 4736-5133 |
| | | | | | 5208-5285 |
| | | | | | 5508-5662 |
| | | | | | 5773-5903 |
| | | | | | 7130-8120 |
| | | | | | 8349-8770 |
| | | | | | 9477-10513 |
| | | | | | 11808-11888 |
| HETAJ14 | 2487 | 660831 | AC011945 | 9887 | 1-28 |
| | | | | | 255-408 |
| | | | | | 519-649 |
| | | | | | 1876-2866 |
| | | | | | 3096-3518 |
| | | | | | 4225-5262 |
| | | | | | 6557-6637 |
| HETAJ14 | 2487 | 660831 | AL137801 | 9888 | 1-175 |
| HETAJ14 | 2487 | 660831 | AC011945 | 9889 | 1-175 |
| HEQCCO1 | 2488 | 924849 | AC004477 | 9890 | 1-326 |
| | | | | | 1029-1626 |
| | | | | | 2309-2345 |
| | | | | | 2958-3015 |
| | | | | | 3982-4124 |
| | | | | | 5005-5248 |
| | | | | | 5482-6071 |
| | | | | | 6519-6577 |
| | | | | | 7045-7136 |
| | | | | | 7692-7780 |
| | | | | | 8037-8184 |
| | | | | | 9575-9866 |
| | | | | | 10372-10789 |
| | | | | | 11501-11618 |
| HEQBG85 | 2492 | 827915 | AC009471 | 9891 | 1-108 |
| | | | | | 723-884 |
| | | | | | 4822-6340 |
| | | | | | 9727-10217 |
| | | | | | 10407-10719 |
| | | | | | 10931-11142 |
| | | | | | 14095-14493 |
| | | | | | 15086-15208 |
| | | | | | 15529-15664 |
| | | | | | 18304-18739 |
| | | | | | 18985-19103 |
| | | | | | 19756-22635 |
| HEQBE71 | 2495 | 760305 | AC012522 | 9892 | 1-1087 |
| HEQBE71 | 2495 | 760305 | AC006254 | 9893 | 1-1263 |
| | | | | | 1513-2033 |
| | | | | | 2070-2296 |
| | | | | | 2334-2660 |
| | | | | | 2830-4987 |
| | | | | | 5578-6030 |
| | | | | | 6277-6369 |
| | | | | | 8894-9193 |
| | | | | | 9213-9265 |
| | | | | | 9347-9448 |
| | | | | | 10205-10424 |
| | | | | | 11055-11156 |
| | | | | | 11776-11991 |
| HEQBE71 | 2495 | 760305 | AC012522 | 9894 | 1-1263 |
| | | | | | 1513-2033 |
| | | | | | 2070-2296 |
| | | | | | 2334-2660 |
| | | | | | 2830-3734 |
| HEQBE71 | 2495 | 760305 | AC012522 | 9895 | 1-453 |
| HEQBE71 | 2495 | 760305 | AC006254 | 9896 | 1-322 |
| HEQAM59 | 2497 | 739220 | AC010226 | 9897 | 1-575 |
| | | | | | 642-1128 |
| HEQAM59 | 2497 | 739220 | AC010472 | 9898 | 1-1277 |
| | | | | | 1339-1830 |
| HEQAM59 | 2497 | 739220 | AC008628 | 9899 | 1-1934 |
| HEQAM59 | 2497 | 739220 | AC026789 | 9900 | 1-1934 |
| | | | | | 2001-2487 |
| HEQAM59 | 2497 | 739220 | AC022114 | 9901 | 1-576 |
| HEQAM59 | 2497 | 739220 | AC026789 | 9902 | 1-157 |
| HEQAM59 | 2497 | 739220 | AC010226 | 9903 | 1-1431 |
| HEQAM59 | 2497 | 739220 | AC010472 | 9904 | 1-243 |
| HEQAM59 | 2497 | 739220 | AC008628 | 9905 | 1-157 |
| HEQAM59 | 2497 | 739220 | AC026789 | 9906 | 1-914 |
| HEPCB04 | 2502 | 941270 | AL023581 | 9907 | 1-394 |
| | | | | | 541-679 |
| HEPBO85 | 2504 | 783362 | AC010192 | 9908 | 1-1410 |
| HEPBO85 | 2504 | 783362 | AC010192 | 9909 | 1-844 |
| HEPAX40 | 2506 | 535627 | AP000872 | 9910 | 1-919 |
| HEPAX40 | 2506 | 535627 | AP001316 | 9911 | 1-918 |
| HEPAX40 | 2506 | 535627 | AC020735 | 9912 | 1-918 |
| HEPAX40 | 2506 | 535627 | AP000872 | 9913 | 1-239 |
| HEPAX40 | 2506 | 535627 | AP001316 | 9914 | 1-239 |
| HEPAX40 | 2506 | 535627 | AC020735 | 9915 | 1-239 |
| HEPAP34 | 2509 | 703336 | AC023500 | 9916 | 1-861 |
| | | | | | 1078-1553 |
| | | | | | 1584-2086 |
| | | | | | 2457-5820 |
| | | | | | 5956-6035 |
| | | | | | 6220-6390 |
| | | | | | 6480-6573 |
| HEPAP34 | 2509 | 703336 | AC023500 | 9917 | 1-90 |
| | | | | | 204-285 |
| | | | | | 394-540 |
| | | | | | 757-840 |
| | | | | | 1060-1090 |
| HEPAP34 | 2509 | 703336 | AC023500 | 9918 | 1-44 |
| | | | | | 976-1138 |
| | | | | | 1382-1480 |
| | | | | | 1506-1645 |
| | | | | | 2208-2505 |
| | | | | | 2848-2978 |
| | | | | | 3094-3276 |
| | | | | | 4404-4939 |
| | | | | | 5843-5881 |
| HEPAJ14 | 2512 | 657440 | AL158843 | 9919 | 1-749 |
| HEPAJ14 | 2512 | 657440 | AL158843 | 9920 | 1-548 |
| HEPAJ04 | 2513 | 933091 | AC078837 | 9921 | 1-358 |
| HEPAJ04 | 2513 | 933091 | AC015937 | 9922 | 1-295 |
| | | | | | 1964-2131 |
| | | | | | 2295-2696 |
| HEPAJ04 | 2513 | 933091 | AC007993 | 9923 | 1-295 |
| | | | | | 1964-2131 |
| | | | | | 2295-2696 |
| HEPAJ04 | 2513 | 933091 | AC015937 | 9924 | 1-152 |
| | | | | | 343-406 |
| | | | | | 656-852 |
| HEPAJ04 | 2513 | 933091 | AC007993 | 9925 | 1-152 |
| | | | | | 343-406 |
| | | | | | 656-852 |
| HEPAE58 | 2514 | 509130 | AL356017 | 9926 | 1-422 |
| | | | | | 489-1010 |
| | | | | | 1016-1105 |
| | | | | | 4311-4768 |
| | | | | | 4930-5657 |
| | | | | | 12468-12775 |
| | | | | | 12982-13085 |
| | | | | | 17810-19506 |
| | | | | | 19953-20359 |
| | | | | | 20615-20935 |
| | | | | | 21563-21594 |
| | | | | | 21625-21685 |
| | | | | | 21806-22238 |
| HEPAE58 | 2514 | 509130 | AL117187 | 9927 | 1-422 |
| | | | | | 489-1009 |
| | | | | | 1015-1104 |
| | | | | | 4310-4767 |
| | | | | | 4929-5656 |
| | | | | | 12467-12774 |
| | | | | | 12981-13084 |
| | | | | | 17809-19505 |
| | | | | | 19952-20358 |
| | | | | | 20614-20934 |
| | | | | | 21562-21593 |
| | | | | | 21624-21684 |
| | | | | | 21805-22237 |
| HEPAE02 | 2515 | 921389 | AC004887 | 9928 | 1-573 |
| HEGBA01 | 2518 | 915596 | AC006333 | 9929 | 1-164 |
| HEGBA01 | 2518 | 915596 | AC006333 | 9930 | 1-1132 |
| HEGBA01 | 2518 | 915596 | AC006333 | 9931 | 1-106 |
| HEGAQ91 | 2520 | 789940 | AL031319 | 9932 | 1-429 |
| | | | | | 1170-1866 |
| | | | | | 7200-7527 |
| | | | | | 8540-8925 |
| HEGAL55 | 2521 | 731654 | AL133367 | 9933 | 1-51 |
| | | | | | 740-1103 |
| | | | | | 3374-3642 |
| | | | | | 5341-6839 |
| HEGAL55 | 2521 | 731654 | AL139300 | 9934 | 1-51 |
| | | | | | 740-1103 |
| | | | | | 3374-3642 |
| | | | | | 5340-6838 |
| HEGAL55 | 2521 | 731654 | AL133367 | 9935 | 1-680 |
| HEGAL55 | 2521 | 731654 | AL139300 | 9936 | 1-535 |
| HEGAL55 | 2521 | 731654 | AL139300 | 9937 | 1-680 |
| HEGAJ08 | 2522 | 959216 | AC013472 | 9938 | 1-162 |
| | | | | | 207-664 |
| | | | | | 1217-1396 |
| | | | | | 1663-1842 |
| | | | | | 2264-3540 |
| | | | | | 3892-4029 |
| HEGAC02 | 2523 | 918992 | Z93016 | 9939 | 1-154 |
| | | | | | 1660-2193 |
| | | | | | 4376-4518 |
| | | | | | 4613-4754 |
| | | | | | 5136-5690 |
| HEGAC02 | 2523 | 918992 | Z93016 | 9940 | 1-196 |
| HEEAY84 | 2524 | 782706 | AC058792 | 9941 | 1-366 |
| | | | | | 744-1196 |
| HEEAY84 | 2524 | 782706 | AC024408 | 9942 | 1-366 |
| | | | | | 744-1196 |
| HEEAY84 | 2524 | 782706 | AL162578 | 9943 | 1-366 |
| | | | | | 744-1196 |
| HEEAY84 | 2524 | 782706 | AL136091 | 9944 | 1-366 |
| | | | | | 744-1196 |
| HEEAY84 | 2524 | 782706 | AC024408 | 9945 | 1-379 |
| HEEAY84 | 2524 | 782706 | AL162578 | 9946 | 1-379 |
| HEEAY84 | 2524 | 782706 | AL136091 | 9947 | 1-379 |
| HEEAY84 | 2524 | 782706 | AC058792 | 9948 | 1-379 |
| HEEAX09 | 2525 | 912065 | AL355987 | 9949 | 1-380 |
| | | | | | 897-1234 |
| | | | | | 1680-1754 |
| | | | | | 2724-3894 |
| HEEAX09 | 2525 | 912065 | AL355987 | 9950 | 1-412 |
| HEEAW40 | 2526 | 710655 | AL132982 | 9951 | 1-475 |
| | | | | | 741-1367 |
| HEEAP59 | 2527 | 738892 | AC019120 | 9952 | 1-689 |
| | | | | | 915-1330 |
| HEEAP59 | 2527 | 738892 | AC019120 | 9953 | 1-520 |
| HEEAH94 | 2529 | 794257 | AC044789 | 9954 | 1-596 |
| HEEAH94 | 2529 | 794257 | AC009877 | 9955 | 1-621 |
| HEEAH94 | 2529 | 794257 | AC039056 | 9956 | 1-618 |
| HEEAH94 | 2529 | 794257 | AC009877 | 9957 | 1-185 |
| HEEAH94 | 2529 | 794257 | AC009877 | 9958 | 1-358 |
| HEEAH94 | 2529 | 794257 | AC039056 | 9959 | 1-358 |
| HEEAH94 | 2529 | 794257 | AC039056 | 9960 | 1-185 |
| HEEAH76 | 2530 | 769950 | AC010600 | 9961 | 1-835 |
| | | | | | 1917-2695 |
| HEEAH76 | 2530 | 769950 | AC010600 | 9962 | 1-527 |
| HEEAH76 | 2530 | 769950 | AC010600 | 9963 | 1-516 |
| HEEAH57 | 2531 | 734488 | AC069029 | 9964 | 1-561 |
| | | | | | 661-1152 |
| HEEAH57 | 2531 | 734488 | AC069029 | 9965 | 1-150 |
| HEEAG51 | 2533 | 930810 | U73637 | 9966 | 1-456 |
| | | | | | 624-1143 |
| | | | | | 1468-3366 |
| | | | | | 5719-5910 |
| | | | | | 11252-11421 |
| | | | | | 16310-16521 |
| | | | | | 16547-16574 |
| | | | | | 18633-20907 |
| HEEAG51 | 2533 | 930810 | AF015416 | 9967 | 1-456 |
| | | | | | 677-1130 |
| | | | | | 1469-3367 |
| | | | | | 5720-5912 |
| | | | | | 6136-6235 |
| | | | | | 11254-11423 |
| | | | | | 16312-16523 |
| | | | | | 16549-16576 |
| | | | | | 18636-19929 |
| HEEAG51 | 2533 | 930810 | AF015416 | 9968 | 1-727 |
| HEEAG51 | 2533 | 930810 | U73637 | 9969 | 1-280 |
| HEEAG51 | 2533 | 930810 | AF015416 | 9970 | 1-280 |
| HEEAD13 | 2535 | 470886 | AC020558 | 9971 | 1-162 |
| | | | | | 5477-5629 |
| | | | | | 8588-8704 |
| | | | | | 8974-9372 |
| | | | | | 9931-10402 |
| | | | | | 11053-11250 |
| | | | | | 11813-11910 |
| | | | | | 12288-12575 |
| HEEAD13 | 2535 | 470886 | AC073621 | 9972 | 1-153 |
| | | | | | 3113-3228 |
| | | | | | 3498-3896 |
| | | | | | 4455-4926 |
| | | | | | 5578-5775 |
| | | | | | 6338-6435 |
| | | | | | 6813-7100 |
| | | | | | 10158-10763 |
| | | | | | 11954-11987 |
| HEEAD13 | 2535 | 470886 | AC073621 | 9973 | 1-428 |
| HEAAX26 | 2537 | 684734 | AL159994 | 9974 | 1-2470 |
| HEAAX26 | 2537 | 684734 | AL159994 | 9975 | 1-313 |
| HEAAR47 | 2539 | 973284 | AC004672 | 9976 | 1-735 |
| HEAAR21 | 2540 | 883939 AC005146 | 9977 | 1-979 | |
| HEAAR21 | 2540 | 883939 AC005146 | 9978 | 1-331 | |
| HEAAR21 | 2540 | 883939 AC005146 | 9979 | 1-396 | |
| HEAAN43 | 2541 | 842032 | AC008435 | 9980 | 1-342 |
| | | | | | 1365-2096 |
| HEAAG42 2545 | 714041 | AC015531 | 9981 | 1-1301 | |
| HEAAG42 | 2545 | 714041 | AC015531 | 9982 | 1-569 |
| HEAAG42 | 2545 | 714041 | AC015531 | 9983 | 1-102 |
| HEAAB66 | 2546 | 844361 | AC002404 | 9984 | 1-732 |
| | | | | | 3584-3740 |
| HEAAB66 | 2546 | 844361 | AC002404 | 9985 | 1-175 |
| HEAAIB66 2546 | 844361 | AC002404 | 9986 | 1-343 | |
| HCOPI07 | 2549 | 651645 | AC015589 | 9987 | 1-501 |
| HCOPI07 | 2549 | 651645 | AC010328 | 9988 | 1-501 |
| HCOPI07 | 2549 | 651645 | AC015589 | 9989 | 1-452 |
| HCOPI07 | 2549 | 651645 | AC015589 | 9990 | 1-309 |
| HCOPI07 | 2549 | 651645 | AC010328 | 9991 | 1-309 |
| HCOPI07 | 2549 | 651645 | AC010328 | 9992 | 1-452 |
| HCOPF07 | 2550 | 951655 | AL139142 | 9993 | 1-687 |
| | | | | | 714-1246 |
| HCOPF07 | 2550 | 951655 | AC021635 | 9994 | 1-687 |
| | | | | | 714-1246 |
| HCOOF07 | 2551 | 951693 | AC000016 | 9995 | 1-2256 |
| HCOOF07 | 2551 | 951693 | AC025090 | 9996 | 1-61 |
| | | | | | 388-1387 |
| | | | | | 4757-5078 |
| | | | | | 5239-5403 |
| | | | | | 5784-6271 |
| | | | | | 6305-9404 |
| HCOOF07 | 2551 | 951693 | AC000016 | 9997 | 1-2086 |
| HCOOF07 | 2551 | 951693 | AC025090 | 9998 | 1-426 |
| HCOOF07 | 2551 | 951693 | AC000016 | 9999 | 1-797 |
| HCOOF07 | 2551 | 951693 | AC025090 | 10000 | 1-2087 |
| HCONP02 | 2552 | 917577 | AC022441 | 10001 | 1-1525 |
| | | | | | 1644-2207 |
| HCONP02 | 2552 | 917577 | AC008811 | 10002 | 1-1268 |
| | | | | | 1387-1950 |
| HCONP02 | 2552 | 917577 | AC008831 | 10003 | 1-72 |
| | | | | | 1850-1898 |
| | | | | | 1960-2591 |
| | | | | | 3025-3362 |
| | | | | | 3408-3487 |
| | | | | | 3859-4611 |
| | | | | | 4949-5354 |
| | | | | | 5927-6259 |
| | | | | | 7760-8619 |
| | | | | | 9073-9122 |
| | | | | | 10060-10638 |
| | | | | | 10766-11381 |
| | | | | | 12595-12900 |
| | | | | | 14574-15215 |
| | | | | | 17051-17438 |
| | | | | | 18105-18470 |
| | | | | | 18786-19243 |
| | | | | | 19413-20937 |
| | | | | | 21056-21619 |
| HCONP02 | 2552 | 917577 | AC022441 | 10004 | 1-458 |
| HCONP02 | 2552 | 917577 | AC008811 | 10005 | 1-458 |
| HCONP02 | 2552 | 917577 | AC008831 | 10006 | 1-140 |
| HCONM33 | 2553 | 971637 | AF196969 | 10007 | 1-1043 |
| | | | | | 1119-1879 |
| HCONM33 | 2553 | 971637 | AF196969 | 10008 | 1-483 |
| HCONM33 | 2553 | 971637 | AF196969 | 10009 | 1-266 |
| HCHNW48 | 2557 | 962478 | AL157369 | 10010 | 1-46 |
| | | | | | 279-590 |
| | | | | | 2838-3019 |
| | | | | | 5420-5719 |
| | | | | | 6799-7566 |
| HCHNW48 | 2557 | 962478 | AL157369 | 10011 | 1-441 |
| HCHNW48 | 2557 | 962478 | AL157369 | 10012 | 1-570 |
| HCHMJ89 | 2560 | 786765 | AL353760 | 10013 | 1-405 |
| | | | | | 2788-2851 |
| HCHMJ89 | 2560 | 786765 | AL139410 | 10014 | 1-405 |
| | | | | | 2788-2851 |
| HCHMJ89 | 2560 | 786765 | AL353760 | 10015 | 1-130 |
| | | | | | 1147-1704 |
| | | | | | 2371-2416 |
| | | | | | 2507-3019 |
| | | | | | 3056-3180 |
| | | | | | 3335-3656 |
| | | | | | 3695-3784 |
| HCHMJ89 | 2560 | 786765 | AL139410 | 10016 | 1-440 |
| | | | | | 470-1166 |
| | | | | | 1737-5349 |
| | | | | | 5455-6170 |
| | | | | | 6814-6950 |
| | | | | | 7356-8416 |
| | | | | | 10213-10336 |
| | | | | | 10460-10627 |
| | | | | | 10656-11870 |
| HCHMJ89 | 2560 | 786765 | AL353760 | 10017 | 1-440 |
| | | | | | 470-1166 |
| | | | | | 1737-5343 |
| | | | | | 5455-6170 |
| | | | | | 6814-6950 |
| | | | | | 7356-8416 |
| | | | | | 10213-10336 |
| | | | | | 10460-10627 |
| | | | | | 10656-11870 |
| HCHMJ89 | 2560 | 786765 | AL139410 | 10018 | 1-130 |
| | | | | | 1147-1704 |
| | | | | | 2373-2416 |
| | | | | | 2507-3019 |
| | | | | | 3056-3180 |
| | | | | | 3335-3656 |
| | | | | | 3695-3784 |
| HCHMI96 | 2561 | 800129 | U91323 | 10019 | 1-586 |
| | | | | | 1448-1702 |
| | | | | | 2440-2932 |
| | | | | | 3527-3569 |
| | | | | | 3822-3926 |
| | | | | | 4216-4627 |
| | | | | | 8710-8764 |
| HCHMI96 | 2561 | 800129 | 1191323 | 10020 | 1-367 |
| HCHMI96 | 2561 | 800129 | U91323 | 10021 | 1-684 |
| HCHCI07 | 2563 | 952957 | AL031666 | 10022 | 1-956 |
| HCHCI07 | 2563 | 952957 | AL031666 | 10023 | 1-162 |
| HCHCI07 | 2563 | 952957 | AL031666 | 10024 | 1-287 |
| HCHCG28 | 2565 | 686431 | AC008720 | 10025 | 1-2147 |
| | | | | | 3523-3676 |
| | | | | | 3898-4059 |
| HCHCG28 | 2565 | 686431 | AC008720 | 10026 | 1-87 |
| HCHCE78 | 2566 | 773428 | AC016135 | 10027 | 1-845 |
| HCHCE78 | 2566 | 773428 | AC022305 | 10028 | 1-878 |
| HCHCE78 | 2566 | 773428 | AC018512 | 10029 | 1-776 |
| HCHCE78 | 2566 | 773428 | AC002518 | 10030 | 1-150 |
| HCHBQ27 | 2567 | 682308 | AC022466 | 10031 | 1-191 |
| HCHBQ27 | 2567 | 682308 | AC016135 | 10032 | 1-845 |
| HCHBQ27 | 2567 | 682308 | AC022305 | 10033 | 1-878 |
| HCHBQ27 | 2567 | 682308 | AC018512 | 10034 | 1-776 |
| HCHBQ27 | 2567 | 682308 | AC069145 | 10035 | 1-302 |
| HCHBQ27 | 2567 | 682308 | AC002518 | 10036 | 1-150 |
| HCHBQ27 | 2567 | 682308 | AC022466 | 10037 | 1-358 |
| HCHBQ27 | 2567 | 682308 | AC069145 | 10038 | 1-75 |
| HCHBN09 | 2568 | 625420 | AC023572 | 10039 | 1-1010 |
| HCHBN09 | 2568 | 625420 | AC011630 | 10040 | 1-680 |
| HCHBN09 | 2568 | 625420 | AC013557 | 10041 | 1-743 |
| | | | | | 15203-20746 |
| HCHBN09 | 2568 | 625420 | AL158197 | 10042 | 1-1678 |
| HCHBN09 | 2568 | 625420 | AC010554 | 10043 | 1-1242 |
| | | | | | 1316-3871 |
| | | | | | 4275-5565 |
| | | | | | 6216-6811 |
| | | | | | 7004-7388 |
| | | | | | 7749-8799 |
| | | | | | 9220-10381 |
| | | | | | 10766-12026 |
| | | | | | 12271-13076 |
| HCHBN09 | 2568 | 625420 | AC013557 | 10044 | 1-123 |
| HCHBN09 | 2568 | 625420 | AL158197 | 10045 | 1-260 |
| HCHBN09 | 2568 | 625420 | AC013557 | 10046 | 1-355 |
| HCHBN09 | 2568 | 625420 | AC010554 | 10047 | 1-368 |
| HCHAG52 | 2572 | 726081 | AC015679 | 10048 | 1-405 |
| HCHAG52 | 2572 | 726081 | AC015679 | 10049 | 1-222 |
| HCHAG52 | 2572 | 726081 | AC015679 | 10050 | 1-103 |
| HCDMF96 | 2573 | 796196 | AC004676 | 10051 | 1-80 |
| | | | | | 563-871 |
| | | | | | 1053-1408 |
| | | | | | 1467-2070 |
| | | | | | 4385-4481 |
| | | | | | 4889-4977 |
| | | | | | 5408-5903 |
| | | | | | 6173-6232 |
| | | | | | 6875-7016 |
| | | | | | 9420-10150 |
| | | | | | 11107-11627 |
| HCDMF96 | 2573 | 796196 | AC004676 | 10052 | 1-126 |
| HCDMF96 | 2573 | 796196 | AC004676 | 10053 | 1-323 |
| HCDMC86 | 2575 | 785134 | AC007337 | 10054 | 1-74 |
| | | | | | 578-1317 |
| HCDMC86 | 2575 | 785134 | AC009039 | 10055 | 1-74 |
| | | | | | 579-1318 |
| HCDMC86 | 2575 | 785134 | AC007337 | 10056 | 1-278 |
| HCDMC86 | 2575 | 785134 | AC009039 | 10057 | 1-278 |
| HCDMC22 | 2578 | 672815 | AC012204 | 10058 | 1-74 |
| HCDMB91 | 2580 | 789551 | AL358472 | 10059 | 1-348 |
| HCDMB42 | 2581 | 713300 | AC024971 | 10060 | 1-274 |
| HCDMB42 | 2581 | 713300 | AL078591 | 10061 | 1-283 |
| HCDMB41 | 2582 | 711996 | AC024481 | 10062 | 1-588 |
| HCDMB27 | 2583 | 682389 | AC027783 | 10063 | 1-298 |
| HCDMB27 | 2583 | 682389 | AC027576 | 10064 | 1-298 |
| HCDMB03 | 2586 | 923316 | AL030997 | 10065 | 1-325 |
| HCDMB03 | 2586 | 923316 | AL030997 | 10066 | 1-340 |
| HCDMB03 | 2586 | 923316 | AL030997 | 10067 | 1-268 |
| HCDMA20 | 2587 | 669201 | AC016874 | 10068 | 1-72 |
| | | | | | 1460-2583 |
| HCDMA20 | 2587 | 669201 | AC016721 | 10069 | 1-72 |
| | | | | | 1460-2583 |
| HCDMA20 | 2587 | 669201 | AC016874 | 10070 | 1-98 |
| HCDMA20 | 2587 | 669201 | AC016721 | 10071 | 1-454 |
| HCDMA20 | 2587 | 669201 | AC016874 | 10072 | 1-458 |
| HCDMA20 | 2587 | 669201 | AC016721 | 10073 | 1-98 |
| HCBMZ07 | 2589 | 951788 | AL049610 | 10074 | 1-888 |
| HCBMZ07 | 2589 | 951788 | AL049610 | 10075 | 1-296 |
| HCBMZ07 | 2589 | 951788 | AL049610 | 10076 | 1-37 |
| | | | | | 1329-3923 |
| HCBMY10 | 2590 | 961718 | AL158048 | 10077 | 1-1688 |
| | | | | | 1805-2714 |
| HCBMY10 | 2590 | 961718 | AC041046 | 10078 | 1-908 |
| HCBMY10 | 2590 | 961718 | AC041046 | 10079 | 1-112 |
| HCBMY10 | 2590 | 961718 | AL158048 | 10080 | 1-112 |
| HCBMY10 | 2590 | 961718 | AC041046 | 10081 | 1-703 |
| HCBMG11 | 2591 | 965394 | AC013669 | 10082 | 1-181 |
| | | | | | 291-782 |
| | | | | | 2171-2360 |
| | | | | | 2703-3570 |
| | | | | | 4336-4689 |
| | | | | | 5249-5785 |
| | | | | | 5817-6442 |
| | | | | | 6834-7458 |
| HCBMG11 | 2591 | 965394 | AC013669 | 10083 | 1-487 |
| HBZSG02 | 2593 | 920249 | AC008053 | 10084 | 1-996 |
| HBZSG02 | 2593 | 920249 | AC008053 | 10085 | 1-112 |
| HBZSD32 | 2594 | 699335 | AC011235 | 10086 | 1-354 |
| HBZSD32 | 2594 | 699335 | AC011235 | 10087 | 1-151 |
| HBZAJ73 | 2595 | 764479 | AC073594 | 10088 | 1-729 |
| | | | | | 1248-1374 |
| HBZAJ73 | 2595 | 764479 | AC068986 | 10089 | 1-729 |
| | | | | | 1248-1375 |
| HBZAJ73 | 2595 | 764479 | AC010892 | 10090 | 1-729 |
| | | | | | 1248-1375 |
| HBZAJ73 | 2595 | 764479 | AC073594 | 10091 | 1-555 |
| HBZAJ73 | 2595 | 764479 | AC068986 | 10092 | 1-554 |
| HBZAJ73 | 2595 | 764479 | AC010892 | 10093 | 1-554 |
| HBZAJ26 | 2596 | 681879 | AC036116 | 10094 | 1-682 |
| HBZAJ26 | 2596 | 681879 | AL358976 | 10095 | 1-682 |
| HBZAJ26 | 2596 | 681879 | AC036116 | 10096 | 1-245 |
| | | | | | 1588-2237 |
| HBZAJ26 | 2596 | 681879 | AL358976 | 10097 | 1-689 |
| HBZAJ26 | 2596 | 681879 | AC036116 | 10098 | 1-689 |
| HBZAJ26 | 2596 | 681879 | AL358976 | 10099 | 1-245 |
| | | | | | 1588-2237 |
| HBZAI39 | 2597 | 847621 | AC009036 | 10100 | 1-1337 |
| HBZAI39 | 2597 | 847621 | AC012320 | 10101 | 1-1338 |
| HBZAI39 | 2597 | 847621 | AC009036 | 10102 | 1-126 |
| HBZAI39 | 2597 | 847621 | AC009036 | 10103 | 1-104 |
| HBZAI14 | 2598 | 847620 | AC073635 | 10104 | 1-466 |
| HBZAI14 | 2598 | 847620 | AC073635 | 10105 | 1-676 |
| HBZAB15 | 2599 | 660348 | AC019190 | 10106 | 1-894 |
| | | | | | 941-2689 |
| NBZAB15 | 2599 | 660348 | AC025171 | 10107 | 1-894 |
| | | | | | 941-2485 |
| HBZAB08 | 2600 | 959560 | AP002448 | 10108 | 1-235 |
| HBZAB08 | 2600 | 959560 | AP002448 | 10109 | 1-272 |
| HBNBL29 | 2603 | 703113 | AC008915 | 10110 | 1-1744 |
| HBNBL29 | 2603 | 703113 | AC008915 | 10111 | 1-420 |
| HBNBJ29 | 2604 | 907015 | AC036160 | 10112 | 1-334 |
| HBNBJ29 | 2604 | 907015 | AC016995 | 10113 | 1-334 |
| HBNBJ29 | 2604 | 907015 | AC036160 | 10114 | 1-470 |
| HBNBJ29 | 2604 | 907015 | AC036160 | 10115 | 1-99 |
| HBNBJ29 | 2604 | 907015 | AC016995 | 10116 | 1-99 |
| HBNBJ29 | 2604 | 907015 | AC016995 | 10117 | 1-470 |
| HBNBJ06 | 2605 | 960664 | AC061996 | 10118 | 1-527 |
| HBNBJ06 | 2605 | 960664 | AC022579 | 10119 | 1-173 |
| | | | | | 1341-1867 |
| | | | | | 4892-4933 |
| HBNBJ06 | 2605 | 960664 | AC022579 | 10120 | 1-492 |
| HBNBB09 | 2608 | 868924 | AL365223 | 10121 | 1-73 |
| | | | | | 2336-3428 |
| HBNBB09 | 2608 | 868924 | AL365223 | 10122 | 1-851 |
| HBNAW73 | 2609 | 764716 | Z99289 | 10123 | 1-1491 |
| HBNAW73 | 2609 | 764716 | Z99289 | 10124 | 1-110 |
| HBNAW73 | 2609 | 764716 | Z99289 | 10125 | 1-190 |
| | | | | | 1730-1923 |
| | | | | | 2881-3366 |
| | | | | | 4302-4465 |
| | | | | | 4635-5036 |
| | | | | | 6198-6347 |
| | | | | | 6938-7175 |
| | | | | | 7445-7543 |
| | | | | | 7995-8128 |
| | | | | | 12062-13446 |
| | | | | | 13544-14273 |
| HBNAC32 | 2614 | 526549 | AC018648 | 10126 | 1-855 |
| | | | | | 1191-1323 |
| | | | | | 3823-3881 |
| | | | | | 4371-5379 |
| HBNAC32 | 2614 | 526549 | AC018648 | 10127 | 1-125 |
| | | | | | 180-388 |
| | | | | | 891-1383 |
| | | | | | 1802-1965 |
| | | | | | 2065-2506 |
| HBNAC28 | 2615 | 525832 | AC007539 | 10128 | 1-728 |
| HBNAC09 | 2617 | 525833 | AL132713 | 10129 | 1-2438 |
| HBNAC09 | 2617 | 525833 | AL132713 | 10130 | 1-355 |
| | | | | | 392-835 |
| | | | | | 914-995 |
| | | | | | 1054-1333 |
| | | | | | 1586-1743 |
| | | | | | 2135-2199 |
| HBNAC09 | 2617 | 525833 | AL132713 | 10131 | 1-124 |
| HBNAC02 | 2618 | 921187 | AL133523 | 10132 | 1-188 |
| HBNAC02 | 2618 | 921187 | AL133523 | 10133 | 1-1700 |
| | | | | | 1768-2230 |
| | | | | | 2511-2678 |
| | | | | | 3146-6917 |
| | | | | | 8428-8644 |
| | | | | | 8873-9205 |
| | | | | | 11616-11679 |
| | | | | | 14711-14834 |
| | | | | | 15647-16163 |
| | | | | | 17626-17691 |
| | | | | | 18185-18607 |
| | | | | | 20796-20845 |
| HBNAC02 | 2618 | 921187 | AL133523 | 10134 | 1-113 |
| | | | | | 2404-2767 |
| | | | | | 2862-3319 |
| | | | | | 3371-3750 |
| | | | | | 3847-4180 |
| | | | | | 6007-6752 |
| | | | | | 8810-9371 |
| HBGTT76 | 2619 | 903653 | AC006512 | 10135 | 1-658 |
| | | | | | 3090-3543 |
| | | | | | 4479-5105 |
| | | | | | 5885-6846 |
| | | | | | 7103-9707 |
| | | | | | 9914-10293 |
| | | | | | 11523-12034 |
| | | | | | 12067-12181 |
| | | | | | 13769-14031 |
| | | | | | 14199-14291 |
| | | | | | 14584-14790 |
| | | | | | 15123-15154 |
| | | | | | 17039-17482 |
| | | | | | 17539-17987 |
| | | | | | 18697-19052 |
| | | | | | 19112-19380 |
| | | | | | 20023-20268 |
| | | | | | 21158-21598 |
| | | | | | 21817-22221 |
| | | | | | 23565-23665 |
| | | | | | 23906-24076 |
| | | | | | 24981-25506 |
| | | | | | 25510-25861 |
| | | | | | 25981-26645 |
| | | | | | 26661-27449 |
| | | | | | 27717-27812 |
| | | | | | 27991-28024 |
| | | | | | 28437-28888 |
| | | | | | 29651-33442 |
| | | | | | 33621-34089 |
| | | | | | 34245-34808 |
| | | | | | 34819-35284 |
| | | | | | 35854-35960 |
| | | | | | 38525-38771 |
| HBGTT76 | 2619 | 903653 | AC006512 | 10136 | 1-315 |
| | | | | | 439-531 |
| | | | | | 707-1080 |
| | | | | | 1144-1227 |
| | | | | | 1491-1845 |
| | | | | | 2113-2321 |
| | | | | | 2700-3556 |
| | | | | | 3818-4307 |
| | | | | | 4336-4813 |
| | | | | | 4958-5775 |
| HBGTT76 | 2619 | 903653 | AC006512 | 10137 | 1-738 |
| HBGTE11 | 2620 | 965121 | AF037222 | 10138 | 1-34 |
| | | | | | 504-637 |
| | | | | | 1210-2684 |
| | | | | | 3241-3528 |
| | | | | | 3799-4114 |
| | | | | | 4225-4439 |
| | | | | | 4754-4886 |
| | | | | | 5520-6004 |
| | | | | | 6811-6950 |
| | | | | | 8255-8470 |
| | | | | | 9691-10480 |
| | | | | | 10798-11383 |
| | | | | | 12144-12327 |
| | | | | | 12452-12657 |
| | | | | | 12889-13456 |
| | | | | | 13751-13876 |
| | | | | | 13921-14373 |
| | | | | | 14745-15119 |
| | | | | | 15895-16112 |
| | | | | | 16289-16338 |
| | | | | | 16453-17862 |
| HBGTE11 | 2620 | 965121 | AL049840 | 10139 | 1-34 |
| | | | | | 527-678 |
| | | | | | 1208-2682 |
| | | | | | 3785-4100 |
| | | | | | 4211-4425 |
| | | | | | 5506-5990 |
| | | | | | 6797-6936 |
| | | | | | 8241-8456 |
| | | | | | 9677-10466 |
| | | | | | 10784-11369 |
| | | | | | 12130-12313 |
| | | | | | 12438-12643 |
| | | | | | 12875-13442 |
| | | | | | 13740-13862 |
| | | | | | 13907-14359 |
| | | | | | 14731-15105 |
| | | | | | 15881-16098 |
| | | | | | 16275-16324 |
| | | | | | 16440-17849 |
| HBGTE11 | 2620 | 965121 | AF037222 | 10140 | 1-126 |
| HBGTE11 | 2620 | 965121 | AF037222 | 10141 | 1-941 |
| | | | | | 1055-1957 |
| HBGTE11 | 2620 | 965121 | AL049840 | 10142 | 1-126 |
| HBGTE11 | 2620 | 965121 | AL049840 | 10143 | 1-1797 |
| HBGQS88 | 2621 | 886650 | AC004152 | 10144 | 1-1226 |
| HBGNL8S | 2622 | 848179 | AL359510 | 10145 | 1-340 |
| | | | | | 433-1692 |
| HBGNL85 | 2622 | 848179 | AL359510 | 10146 | 1-620 |
| HBGND04 | 2623 | 926973 | AC011686 | 10147 | 1-50 |
| | | | | | 2676-3023 |
| | | | | | 3161-3501 |
| | | | | | 3760-4076 |
| | | | | | 5867-6062 |
| | | | | | 6851-7280 |
| | | | | | 7581-8170 |
| HBGND04 | 2623 | 926973 | AP000560 | 10148 | 1-1137 |
| | | | | | 1749-2085 |
| | | | | | 4498-4845 |
| | | | | | 4983-5323 |
| | | | | | 5582-5898 |
| | | | | | 7689-7884 |
| | | | | | 8673-9102 |
| | | | | | 9403-9993 |
| HBGND04 | 2623 | 926973 | AP001324 | 10149 | 1-50 |
| | | | | | 2675-3022 |
| | | | | | 3159-3500 |
| | | | | | 3759-4075 |
| | | | | | 5866-6061 |
| | | | | | 6851-7280 |
| | | | | | 7581-8170 |
| HBGND04 | 2623 | 926973 | AP000560 | 10150 | 1-93 |
| HBGND04 | 2623 | 926973 | AC011686 | 10151 | 1-3688 |
| | | | | | 3726-3971 |
| | | | | | 4813-5933 |
| | | | | | 6168-6648 |
| HBGND04 | 2623 | 926973 | AP001324 | 10152 | 1-2189 |
| HBGND04 | 2623 | 926973 | AP000560 | 10153 | 1-2577 |
| HBGMT82 | 2624 | 954374 | AP000449 | 10154 | 1-1171 |
| | | | | | 1258-1698 |
| HBGMT82 | 2624 | 954374 | AC055871 | 10155 | 1-1174 |
| | | | | | 1258-2167 |
| | | | | | 2367-2591 |
| | | | | | 2949-3669 |
| HBGMT82 | 2624 | 954374 | AJ002553 | 10156 | 1-286 |
| HBGMT82 | 2624 | 954374 | AC051660 | 10157 | 1-1173 |
| | | | | | 1256-2164 |
| | | | | | 2364-2588 |
| | | | | | 2946-3665 |
| | | | | | 3840-4059 |
| | | | | | 4135-4280 |
| HBGMT82 | 2624 | 954374 | AJ002553 | 10158 | 1-137 |
| | | | | | 586-767 |
| HBGMT82 | 2624 | 954374 | AC051660 | 10159 | 1-473 |
| HBGMT82 | 2624 | 954374 | AC051660 | 10160 | 1-82 |
| | | | | | 433-487 |
| | | | | | 583-1153 |
| | | | | | 1232-1412 |
| HBGMS69 | 2625 | 754392 | AC010427 | 10161 | 1-757 |
| HBGMS69 | 2625 | 754392 | AC026740 | 10162 | 1-757 |
| HBGMS69 | 2625 | 754392 | AC016498 | 10163 | 1-757 |
| HBGMS69 | 2625 | 754392 | AC010427 | 10164 | 1-424 |
| HBGMS69 | 2625 | 754392 | AC026740 | 10165 | 1-115 |
| | | | | | 765-1186 |
| HBGMS69 | 2625 | 754392 | AC010427 | 10166 | 1-416 |
| HBGMS69 | 2625 | 754392 | AC016498 | 10167 | 1-424 |
| HBGMS69 | 2625 | 754392 | AC026740 | 10168 | 1-227 |
| | | | | | 229-411 |
| HBGMS69 | 2625 | 754392 | AC016498 | 10169 | 1-417 |
| HBGMO78 | 2626 | 773043 | AL139220 | 10170 | 1-877 |
| | | | | | 1373-1821 |
| | | | | | 2802-3760 |
| | | | | | 3769-4392 |
| | | | | | 4968-5660 |
| HBGMO78 | 2626 | 773043 | AL357079 | 10171 | 1-878 |
| | | | | | 1374-1822 |
| | | | | | 2800-3758 |
| | | | | | 3767-4390 |
| | | | | | 4968-5660 |
| HBGMO78 | 2626 | 773043 | AC005038 | 10172 | 1-878 |
| | | | | | 1374-1822 |
| | | | | | 2803-3761 |
| | | | | | 3770-4393 |
| | | | | | 5226-5663 |
| | | | | | 5775-5902 |
| | | | | | 6120-6317 |
| | | | | | 9252-9488 |
| | | | | | 9701-10068 |
| | | | | | 11666-11809 |
| HBGMO78 | 2626 | 773043 | AC005038 | 10173 | 1-1280 |
| | | | | | 1472-1999 |
| | | | | | 2116-3378 |
| HBGMO78 | 2626 | 773043 | AC005038 | 10174 | 1-1182 |
| | | | | | 1260-1342 |
| | | | | | 1447-2170 |
| | | | | | 2566-3297 |
| | | | | | 3550-3759 |
| | | | | | 4478-4598 |
| | | | | | 4690-4919 |
| | | | | | 5109-5311 |
| HBGMG81 | 2627 | 880276 | AC026905 | 10175 | 1-38 |
| HBGMG81 | 2627 | 880276 | AC027551 | 10176 | 1-38 |
| HBGMG81 | 2627 | 880276 | AL365398 | 10177 | 1-47 |
| HBGMG81 | 2627 | 880276 | AC020714 | 10178 | 1-440 |
| | | | | | 1153-1430 |
| HBGMG81 | 2627 | 880276 | AC006512 | 10179 | 1-247 |
| | | | | | 2812-2918 |
| | | | | | 3488-3953 |
| | | | | | 3964-4527 |
| | | | | | 4683-5151 |
| | | | | | 5330-9121 |
| | | | | | 9884-10335 |
| | | | | | 10748-10781 |
| | | | | | 10960-11055 |
| | | | | | 11323-12111 |
| | | | | | 12127-12791 |
| | | | | | 12911-13262 |
| | | | | | 13266-13791 |
| | | | | | 14696-14866 |
| | | | | | 15107-15207 |
| | | | | | 16551-16955 |
| | | | | | 17174-17614 |
| | | | | | 18504-18749 |
| | | | | | 19392-19660 |
| | | | | | 19720-20075 |
| | | | | | 20785-21233 |
| | | | | | 21290-21733 |
| | | | | | 23618-23649 |
| | | | | | 23982-24188 |
| | | | | | 24481-24573 |
| | | | | | 24741-25003 |
| | | | | | 26591-26705 |
| | | | | | 26738-27249 |
| | | | | | 28479-28858 |
| | | | | | 29065-31669 |
| | | | | | 31926-32887 |
| | | | | | 33667-34293 |
| | | | | | 35229-35682 |
| | | | | | 38114-38771 |
| HBGMG81 | 2627 | 880276 | AC027551 | 10180 | 1-131 |
| HBGMG81 | 2627 | 880276 | AC020714 | 10181 | 1-842 |
| HBGMG81 | 2627 | 880276 | AC006512 | 10182 | 1-818 |
| | | | | | 963-1440 |
| | | | | | 1469-1958 |
| | | | | | 2220-3076 |
| | | | | | 3455-3663 |
| | | | | | 3931-4285 |
| | | | | | 4549-4632 |
| | | | | | 4696-5069 |
| | | | | | 5245-5337 |
| | | | | | 5461-5775 |
| HBGMG81 | 2627 | 880276 | AC020714 | 10183 | 1-1160 |
| HBGMG81 | 2627 | 880276 | AC006512 | 10184 | 1-738 |
| HBGFS88 | 2628 | 914032 | AC010687 | 10185 | 1-144 |
| | | | | | 1186-2261 |
| HBGFS88 | 2628 | 914032 | AC005369 | 10186 | 1-649 |
| | | | | | 870-1459 |
| | | | | | 2153-2236 |
| | | | | | 2499-2621 |
| | | | | | 2722-2856 |
| | | | | | 3368-3523 |
| | | | | | 4084-4227 |
| | | | | | 4315-4423 |
| | | | | | 4652-4777 |
| | | | | | 5094-5193 |
| | | | | | 5519-5647 |
| | | | | | 5739-5983 |
| | | | | | 6144-6260 |
| | | | | | 6507-6661 |
| | | | | | 7019-8042 |
| | | | | | 8949-9295 |
| | | | | | 9392-9485 |
| | | | | | 10579-10703 |
| | | | | | 11915-11969 |
| | | | | | 11976-12107 |
| | | | | | 12491-12570 |
| | | | | | 12627-13146 |
| | | | | | 14186-15261 |
| HBGFS88 | 2628 | 914032 | AC010687 | 10187 | 1-109 |
| HBGFS88 | 2628 | 914032 | AC005369 | 10188 | 1-109 |
| HBGFS88 | 2628 | 914032 | AC005369 | 10189 | 1-86 |
| | | | | | 357-503 |
| HBGFG53 | 2629 | 727748 | AC026666 | 10190 | 1-791 |
| HBGFG53 | 2629 | 727748 | AC026283 | 10191 | 1-1463 |
| HBGFG53 | 2629 | 727748 | AC026666 | 10192 | 1-244 |
| HBGFG53 | 2629 | 727748 | AC026283 | 10193 | 1-319 |
| HBGFG53 | 2629 | 727748 | AC026283 | 10194 | 1-297 |
| | | | | | 330-1653 |
| HBGDA74 | 2632 | 832888 | AP001100 | 10195 | 1-102 |
| | | | | | 420-643 |
| | | | | | 761-840 |
| | | | | | 1681-1796 |
| | | | | | 1917-2066 |
| | | | | | 2158-2417 |
| | | | | | 3079-3200 |
| | | | | | 3281-3345 |
| | | | | | 3436-4001 |
| | | | | | 4062-4625 |
| HBGDA74 | 2632 | 832888 | AP000481 | 10196 | 1-64 |
| | | | | | 188-337 |
| | | | | | 429-688 |
| | | | | | 1350-1471 |
| | | | | | 1552-1616 |
| | | | | | 1707-2271 |
| | | | | | 2332-2895 |
| HBGDA74 | 2632 | 832888 | AP000481 | 10197 | 1-540 |
| | | | | | 1012-1076 |
| | | | | | 1166-1313 |
| | | | | | 1698-1760 |
| | | | | | 1787-1874 |
| | | | | | 1971-2103 |
| | | | | | 2575-2765 |
| | | | | | 3027-3073 |
| HBGDA74 | 2632 | 832888 | AP001100 | 10198 | 1-540 |
| | | | | | 1012-1076 |
| | | | | | 1166-1198 |
| HBGBG52 | 2635 | 522424 | AL136458 | 10199 | 1-294 |
| | | | | | 506-707 |
| | | | | | 1776-2011 |
| | | | | | 2535-4755 |
| | | | | | 5405-5870 |
| | | | | | 5873-6187 |
| | | | | | 7245-7361 |
| | | | | | 7501-7967 |
| | | | | | 9091-9694 |
| | | | | | 9825-10069 |
| | | | | | 10913-11066 |
| | | | | | 11815-12127 |
| HBGBG52 | 2635 | 522424 | AC069042 | 10200 | 1-245 |
| HBGBG52 | 2635 | 522424 | AL162739 | 10201 | 1-245 |
| HBGBG52 | 2635 | 522424 | AL136458 | 10202 | 1-112 |
| HBGBG52 | 2635 | 522424 | AL162739 | 10203 | 1-604 |
| HBGBB78 | 2638 | 773930 | AC008403 | 10204 | 1-1630 |
| | | | | | 2058-2480 |
| | | | | | 4161-4577 |
| | | | | | 5334-5745 |
| | | | | | 6732-6865 |
| | | | | | 7024-7163 |
| | | | | | 10746-11227 |
| | | | | | 11908-12229 |
| | | | | | 12481-13862 |
| HBGBB78 | 2638 | 773930 | AC008403 | 10205 | 1-482 |
| | | | | | 2074-2191 |
| | | | | | 3067-3427 |
| | | | | | 3514-3666 |
| | | | | | 4176-4250 |
| | | | | | 4718-4839 |
| | | | | | 5313-5692 |
| | | | | | 10395-10491 |
| | | | | | 10694-10779 |
| | | | | | 11107-11256 |
| | | | | | 12127-12209 |
| | | | | | 12283-12405 |
| | | | | | 12543-13031 |
| | | | | | 13771-14040 |
| HBGBB78 | 2638 | 773930 | AC008403 | 10206 | 1-218 |
| | | | | | 172-232 |
| | | | | | 1302-2232 |
| HBCPO75 | 2640 | 927520 | AC069279 10207 | 1-596 | |
| | | | | | 4098-4739 |
| | | | | | 5478-5650 |
| | | | | | 6045-6577 |
| | | | | | 6988-7374 |
| HBCPK03 | 2641 | 922493 | AC011719 | 10208 | 1-923 |
| HBCPK03 | 2641 | 922493 | AP001104 | 10209 | 1-923 |
| HBCPK03 | 2641 | 922493 | AP001324 | 10210 | 1-923 |
| HBCJP02 | 2642 | 917981 AP000795 | 10211 | 1-935 | |
| | | | | | 1442-2055 |
| | | | | | 2120-2651 |
| HBCJP02 | 2642 | 917981 | AC018775 | 10212 | 1-935 |
| | | | | | 1442-2055 |
| | | | | | 2120-2653 |
| HBCJP02 | 2642 | 917981 | AC01 1088 | 10213 | 1-254 |
| | | | | | 1365-1474 |
| | | | | | 2669-2833 |
| | | | | | 3184-3483 |
| | | | | | 3853-4390 |
| | | | | | 9055-9989 |
| | | | | | 10496-11109 |
| | | | | | 11174-11705 |
| | | | | | 14770-14905 |
| | | | | | 15601-16949 |
| | | | | | 24077-24508 |
| | | | | | 25195-25367 |
| | | | | | 27155-27556 |
| | | | | | 28055-28776 |
| | | | | | 29078-30192 |
| | | | | | 35093-35409 |
| | | | | | 37099-37222 |
| | | | | | 37906-38308 |
| | | | | | 39047-39871 |
| | | | | | 40730-41079 |
| | | | | | 41464-41939 |
| | | | | | 42882-44161 |
| HBCJP02 | 2642 | 917981 | AC011088 | 10214 | 1-379 |
| HBCJG07 | 2643 | 951898 | AL158821 | 10215 | 1-179 |
| | | | | | 415-1143 |
| HBCJG07 | 2643 | 951898 | AL158821 | 10216 | 1-401 |
| | | | | | 691-974 |
| | | | | | 1279-2180 |
| HAUCC58 | 2644 | 764851 | AC006329 | 10217 | 1-159 |
| | | | | | 388-562 |
| | | | | | 976-1372 |
| | | | | | 1647-1772 |
| | | | | | 1796-2110 |
| | | | | | 2230-2442 |
| | | | | | 3917-4291 |
| | | | | | 4695-4807 |
| | | | | | 4854-4990 |
| | | | | | 5212-5512 |
| | | | | | 6837-7180 |
| | | | | | 7293-7754 |
| | | | | | 8183-8372 |
| | | | | | 8413-8665 |
| | | | | | 9645-9815 |
| | | | | | 10677-11353 |
| | | | | | 11786-12287 |
| | | | | | 12400-13026 |
| HAUCC58 | 2644 | 764851 | AC006329 | 10218 | 1-338 |
| | | | | | 1214-1745 |
| HAUAS89 | 2646 | 518847 | AC008044 | 10219 | 1-119 |
| | | | | | 2461-2803 |
| | | | | | 4346-4547 |
| | | | | | 5141-5577 |
| | | | | | 7669-7807 |
| | | | | | 7933-8244 |
| | | | | | 8849-8944 |
| | | | | | 9208-10426 |
| | | | | | 12618-12735 |
| | | | | | 13747-14129 |
| | | | | | 14744-15306 |
| HAUAS89 | 2646 | 518847 | AC008044 | 10220 | 1-55 |
| | | | | | 3400-3593 |
| HAUAS89 | 2646 | 518847 | AC008044 | 10221 | 1-495 |
| HAUAQ28 | 2647 | 685374 | AC027523 | 10222 | 1-1260 |
| HAUAQ28 | 2647 | 685374 | AC011774 | 10223 | 1-1260 |
| HAUAQ28 | 2647 | 685374 | AP001848 | 10224 | 1-1260 |
| HAUAQ28 | 2647 | 685374 | AC027523 | 10225 | 1-535 |
| HAUAQ28 | 2647 | 685374 | AC011774 | 10226 | 1-535 |
| HAUAQ28 | 2647 | 685374 | AP001848 | 10227 | 1-535 |
| HACMR08 | 2650 | 955638 | AC012318 | 10228 | 1-147 |
| HACMR08 | 2650 | 955638 | AL121844 | 10229 | 1-216 |
| HACMR08 | 2650 | 955638 | AC013553 | 10230 | 1-280 |
| | | | | | 2514-2880 |
| | | | | | 3507-3803 |
| | | | | | 5834-5958 |
| | | | | | 8010-8114 |
| | | | | | 9356-9430 |
| | | | | | 13100-13296 |
| | | | | | 14272-14676 |
| | | | | | 14966-15305 |
| | | | | | 15968-16340 |
| | | | | | 16952-17049 |
| | | | | | 17302-17464 |
| | | | | | 18685-19018 |
| | | | | | 19824-20193 |
| | | | | | 20412-20822 |
| | | | | | 21304-21778 |
| | | | | | 22964-23210 |
| | | | | | 23327-23714 |
| | | | | | 24031-24645 |
| | | | | | 24690-24771 |
| | | | | | 26370-27118 |
| HACMR08 | 2650 | 955638 | AL121656 | 10231 | 1-2346 |
| | | | | | 2487-3703 |
| | | | | | 3832-4167 |

[0087] Table 1B summarizes additional polynucleotides encompassed by the invention (including cDNA clones related to the sequences (Clone ID NO: Z), contig sequences (contig identifier (Contig ID:) contig nucleotide sequence identifiers (SEQ ID NO: X)), and genomic sequences (SEQ ID NO: B). The first column provides a unique clone identifier, “Clone ID NO: Z”, for a cDNA clone related to each contig sequence. The second column provides the sequence identifier, “SEQ ID NO: X”, for each contig sequence. The third column provides a unique contig identifier, “Contig ID:” for each contig sequence. The fourth column, provides a BAC identifier “BAC ID NO: A” for the BAC clone referenced in the corresponding row of the table. The fifth column provides the nucleotide sequence identifier, “SEQ ID NO: B” for a fragment of the BAC clone identified in column four of the corresponding row of the table. The sixth column, “Exon From-To”, provides the location (i.e., nucleotide position numbers) within the polynucleotide sequence of SEQ ID NO: B which delineate certain polynucleotides of the invention that are also exemplary members of polynucleotide sequences that encode polypeptides of the invention (e.g., polypeptides containing amino acid sequences encoded by the polynucleotide sequences delineated in column six, and fragments and variants thereof).

TABLE 2

| | | SEQ | | | | Score/ | | |
|---|---|---|---|---|---|---|---|---|
| Clone ID | Contig | ID | Analysis | | PFam/NR Accession | Percent | NT | NT |
| NO:Z | ID: | NO:X | Method | PFam/NR Description | Number | Identity | From | To |
| H7MDD72 | 847688 | 13 | blastx.2 | (AF034780) | gb\|AAC98919.1\| | 95% | 597 | 7 |
| | | | | lysosphingolipid receptor | | | | |
| | | | | Edg5 [Homo sapiens] | | | | |
| H7MDD72 | 887805 | 2651 | HMMER | PFAM: 7 transmembrane | PF00001 | 118 | 75 | 668 |
| | | | 1.8 | receptor (rhodopsin | | | | |
| | | | | family) | | | | |
| HAOSH55 | 952380 | 14 | blastx.2 | (AF200357) pantothenate | gb\|AAF23952.1\|AF2 | 78% | 2 | 337 |
| | | | | kinase 1 beta [Mus | 00357_1 | | | |
| | | | | musculus] | | | | |
| HAQAK73 | 764671 | 15 | blastx.2 | galactosylceramide-like | pir\|JC5238\|JC5238 | 65% | 129 | 7 |
| | | | | protein, GCP - human | | | | |
| HAQBJ71 | 839982 | 18 | blastx.2 | BasR [Escherichia coli] | dbj\|BAA03143.1\| | 97% | 127 | 2 |
| | | | | | | 51% | 392 | 123 |
| HBCJS08 | 957826 | 23 | blastx.2 | (AK002129) unnamed | dbj\|BAA92096.1\| | 66% | 188 | 346 |
| | | | | protein product [Homo | | | | |
| | | | | sapiens] | | | | |
| HBGBG42 | 922396 | 30 | blastx.2 | (AF161472) HSPC123 | gb\|AAF29087.1\|AF1 | 50% | 85 | 315 |
| | | | | [Homo sapiens] | 61472_1 | | | |
| HBGBT79 | 525352 | 33 | blastx.2 | Invasin. [Escherichia coli] | dbj\|BAA15799.1\| | 58% | 35 | 331 |
| | | | | | | 49% | 3 | 209 |
| | | | | | | 87% | 199 | 246 |
| HBGBW60 | 954916 | 34 | blastx.2 | paired-like homeodomain | gb\|AAB39864.1\| | 100% | 101 | 235 |
| | | | | protein PRX2 [Homo | | | | |
| | | | | sapiens] | | | | |
| HBGDE85 | 524875 | 37 | blastx.2 | core protein [Escherichia | gb\|AAA24544.1\| | 90% | 1 | 126 |
| | | | | coli] | | | | |
| HBGDS13 | 971696 | 38 | HMMER | PFAM: Zinc finger, C2H2 | PF00096 | 4.57 | 167 | 211 |
| | | | 1.8 | type | | | | |
| | | | blastx.2 | rhaR (AA 1-312) | emb\|CAA29453.1\| | 86% | 257 | 129 |
| | | | | [Escherichia coli] | | 92% | 141 | 100 |
| HBGDT43 | 974223 | 39 | blastx.2 | (AK000496) unnamed | dbj\|BAA91205.1\| | 80% | 445 | 311 |
| | | | | protein product [Homo | | | | |
| | | | | sapiens] | | | | |
| HBGMD05 | 870189 | 41 | blastx.2 | Fos-related antigen | gb\|AAA79137.1\| | 88% | 4 | 207 |
| | | | | [Rattus norvegicus] | | | | |
| HBGMZ39 | 947112 | 45 | HMMER | PFAM: Cytochrome P450 | PF00067 | 59.5 | 509 | 372 |
| | | | 2.1.1 | | | | | |
| | | | blastx.2 | cytochrome P450 2B - | pir\|JT0676\|JT0676 | 43% | 563 | 372 |
| | | | | green monkey | | 43% | 299 | 168 |
| | | | | | | 40% | 165 | 121 |
| HBGND09 | 848219 | 47 | blastx.2 | (AF156271) RING finger | gb\|AAD40286.1\| | 97% | 2 | 367 |
| | | | | protein terf [Homo | | | | |
| | | | | sapiens] | | | | |
| HBGNM13 | 912730 | 49 | blastx.2 | (AE000420) putative | gb\|AAC76465.1\| | 97% | 188 | 75 |
| | | | | regulator [Escherichia | | | | |
| | | | | coli] | | | | |
| HBGN007 | 952212 | 50 | blastx.2 | (AK000496) unnamed | dbj\|BAA91205.1\| | 81% | 383 | 323 |
| | | | | protein product [Homo | | 33% | 169 | 53 |
| | | | | sapiens] | | | | |
| HBGNQ31 | 887152 | 51 | blastx.2 | (AF022821) putative | gb\|AAD09338.1\| | 56% | 10 | 183 |
| | | | | potassium channel DP4 | | | | |
| | | | | [Mus musculus] | | | | |
| HBGPH02 | 918513 | 58 | blastx.2 | alpha 1C adrenergic | dbj\|BAA06901.1\| | 71% | 452 | 327 |
| | | | | receptor isoform 2 [Homo | | 93% | 339 | 292 |
| | | | | sapiens] | | 69% | 292 | 254 |
| HBGPV05 | 930706 | 60 | blastx.2 | (AE000157) orf, | gb\|AAC73617.1\| | 77% | 617 | 36 |
| | | | | hypothetical protein | | 47% | 555 | 346 |
| | | | | [Eseherichia coli] | | 76% | 619 | 545 |
| HBGTR84 | 886529 | 65 | blastx.2 | (AL137718) hypothetical | emb\|CAB70890.1\| | 30% | 21 | 581 |
| | | | | protein [Homo sapiens] | | | | |
| HBNAY58 | 558193 | 72 | blastx.2 | human elongation factor- | emb\|CAA79716.1\| | 73% | 263 | 400 |
| | | | | 1-delta [Homo sapiens] | | | | |
| HCBNW02 | 950897 | 80 | blastx.2 | (AC008372) unknown | gb\|AAF23326.1\|AC0 | 44% | 1 | 270 |
| | | | | [Homo sapiens] | 08372_2 | | | |
| HCBOG03 | 922351 | 82 | HMMER | PFAM: Zinc finger, | PF00098 | 6.1 | 95 | 112 |
| | | | 1.8 | CCHC class | | | | |
| HCHAD40 | 923764 | 88 | blastx.2 | unidentified reading frame | emb\|CAA23893.1\| | 85% | 211 | 152 |
| | | | | [Escherichia coli] | | 87% | 311 | 264 |
| | | | | | | 100% | 264 | 226 |
| | | | | | | 87% | 325 | 302 |
| HCHBQ03 | 923763 | 92 | blastx.2 | unidentified reading frame | emb\|CAA23893.1\| | 98% | 334 | 158 |
| | | | | [Escherichia coli] | | | | |
| HCHND96 | 880585 | 94 | blastx.2 | (AF141920) roadblock | gb\|AAD45986.1\|AF1 | 75% | 174 | 455 |
| | | | | [Drosophila melanogaster] | 41920_1 | | | |
| HCHOA76 | 740102 | 95 | blastx.2 | (AK000385) unnamed | dbj\|BAA91131.1\| | 64% | 499 | 335 |
| | | | | protein product [Homo | | 75% | 266 | 195 |
| | | | | sapiens] | | 58% | 336 | 286 |
| HCHOD89 | 954866 | 96 | blastx.2 | cytochrome P450 2C34v2 | gb\|AAA79105.1\| | 53% | 94 | 189 |
| | | | | [Sus scrofa] | | 33% | 6 | 86 |
| HCHQB06 | 934941 | 98 | blastx.2 | (AK001623) unnamed | dbj\|BAA91793.1\| | 89% | 183 | 440 |
| | | | | protein product [Homo | | | | |
| | | | | sapiens] | | | | |
| HCOOZ11 | 965306 | 105 | HMMER | PFAM: Src homology | PF00018 | 5.22 | 179 | 214 |
| | | | 1.8 | domain 3 | | | | |
| | | | blastx.2 | (AL022238) dJ1042K10.2 | emb\|CAA18266.1\| | 100% | 182 | 589 |
| | | | | (supported by | | | | |
| | | | | GENSCAN, FGENES and | | | | |
| | | | | GENEWISE) [Homo | | | | |
| | | | | sapiens] | | | | |
| HEAAA42 | 963100 | 111 | HMMER | PFAM: Zinc finger, C2H2 | PF00096 | 20.88 | 114 | 176 |
| | | | 1.8 | type | | | | |
| | | | blastx.2 | (AF117814) odd-skipped | gb\|AAD37115.1\|AF1 | 79% | 18 | 221 |
| | | | | related 1 protein [Mus | 17814_1 | | | |
| | | | | musculus] | | | | |
| HEEAH07 | 851219 | 124 | blastx.2 | (AL137469) hypothetical | emb\|CAB70754.1\| | 100% | 178 | 270 |
| | | | | protein [Homo sapiens] | | | | |
| HEEAJ58 | 785121 | 125 | blastx.2 | (AF080470) pallid [Homo | gb\|AAF08343.1\|AF0 | 100% | 169 | 258 |
| | | | | sapiens] | 80470_1 | 100% | 90 | 170 |
| | | | | | | 66% | 169 | 252 |
| HEEAJ76 | 887321 | 126 | blastx.2 | truncated protein | gb\|AAB31222.1\| | 87% | 94 | 23 |
| | | | | [Saccharomyces | | | | |
| | | | | cerevisiae] | | | | |
| HEEAW01 | 851213 | 133 | blastx.2 | (AK000385) unnamed | dbj\|BAA91131.1\| | 72% | 371 | 210 |
| | | | | protein product [Homo | | | | |
| | | | | sapiens] | | | | |
| HEGAB84 | 823900 | 137 | HMMER | PFAM: Ank repeat | PF00023 | 36.9 | 205 | 315 |
| | | | 2.1.1 | | | | | |
| | | | blastx.2 | ankyrin 3 [Mus musculus] | gb\|AAB01605.1\| | 37% | 28 | 348 |
| HEGAI82 | 955291 | 140 | blastx.2 | putative [Rattus | emb\|CAA52297.1\| | 58% | 1 | 276 |
| | | | | norvegicus] | | 96% | 370 | 453 |
| | | | | | | 31% | 179 | 283 |
| HEGAO83 | 780837 | 142 | HMMER | PFAM: IG | PF00047 | 9.4 | 234 | 305 |
| | | | 1.8 | (immunoglobulin) | | | | |
| | | | | superfamily | | | | |
| HEGAZ61 | 950033 | 149 | HMMER | PFAM: Reprolysin family | PF01562 | 141.4 | 276 | 560 |
| | | | 2.1.1 | propeptide | | | | |
| | | | blastx.2 | epididymal apical protein | emb\|CAA46929.1\| | 92% | 60 | 560 |
| | | | | I-precursor [Macaca | | | | |
| | | | | fascicularis] | | | | |
| HEPAB70 | 557149 | 151 | blastx.2 | ORF_ID:o209#7 | dbj\|BAA35540.1\| | 83% | 99 | 329 |
| | | | | [Escherichia coli] | | 87% | 43 | 141 |
| | | | | | | 90% | 326 | 355 |
| HEPAP02 | 926914 | 160 | blastx.2 | WW domain binding | gb\|AAD10950.1\| | 100% | 59 | 163 |
| | | | | protein-1 [Homo sapiens] | | | | |
| HEPBA39 | 919875 | 163 | HMMER | PFAM: lipocalins | PF00061 | 26.73 | 117 | 509 |
| | | | 1.8 | | | | | |
| | | | blastx.2 | (AF109472) epididymal | gb\|AAC98311.1\| | 42% | 314 | 66 |
| | | | | protein 52 [Oryctolagus | | | | |
| | | | | cuniculus] | | | | |
| HEPBH38 | 707524 | 169 | blastx.2 | (AK000385) unnamed | dbj\|BAA91131.1\| | 53% | 319 | 146 |
| | | | | protein product [Homo | | | | |
| | | | | sapiens] | | | | |
| HEPCT32 | 947081 | 179 | blastx.2 | (AJ243311) matrix | emb\|CAB46656.1\| | 32% | 262 | 636 |
| | | | | metalloproteinase-2 | | 39% | 262 | 477 |
| | | | | [Equus caballus] | | 32% | 24 | 269 |
| | | | | | | 27% | 18 | 275 |
| HEPCU32 | 931824 | 180 | HMMER | PFAM: lipocalins | PF00061 | 11.52 | 508 | 627 |
| | | | 1.8 | | | | | |
| | | | blastx.14 | mE-RABP minor form | gi\|3241966\|gb\|AAC2 | 30% | 502 | 630 |
| | | | | protein [Mus musculus] | 4316.1\| | 20% | 336 | 482 |
| | | | | | | 60% | 279 | 308 |
| HEPCU32 | 946975 | 2652 | HMMER | PFAM: lipocalins | PF00061 | 11.52 | 405 | 524 |
| | | | 1.8 | | | | | |
| | | | blastx.14 | mE-RABP minor form | gi\|3241966\|gb\|AAC2 | 30% | 399 | 527 |
| | | | | protein [Mus musculus] | 4316.1\| | 20% | 233 | 379 |
| | | | | | | 60% | 176 | 205 |
| HEQAE65 | 911438 | 181 | HMMER | PFAM: Myosin head | PF00063 | 35.1 | 50 | 148 |
| | | | 2.1.1 | (motor domain) | | | | |
| | | | blastx.2 | (AF234532) myosin X | gb\|AAF37875.1\|AF2 | 100% | 2 | 154 |
| | | | | [Homo sapiens] | 34532_1 | | | |
| HEQAH70 | 699690 | 182 | blastx.2 | (AJ007558) nucleoporin | emb\|CAA07553.1\| | 85% | 176 | 343 |
| | | | | 155 [Homo sapiens] | | 97% | 49 | 171 |
| | | | | | | 65% | 288 | 347 |
| HEQAO76 | 769973 | 183 | blastx.2 | (AF053944) aortic | gb\|AAC25585.1\| | 100% | 148 | 201 |
| | | | | carboxypeptidase-like | | 100% | 1 | 45 |
| | | | | protein ACLP [Homo | | 34% | 266 | 430 |
| | | | | sapiens] | | 34% | 269 | 400 |
| | | | | | | 31% | 329 | 433 |
| | | | | | | 36% | 311 | 424 |
| | | | | | | 24% | 266 | 415 |
| | | | | | | 57% | 390 | 431 |
| | | | | | | 35% | 314 | 418 |
| HETAF89 | 509300 | 189 | blastx.2 | (AF209069) hypothetical | gb\|AAF16744.1\|AF2 | 98% | 72 | 248 |
| | | | | protein [Homo sapiens] | 09069_2 | | | |
| HETAH66 | 799665 | 191 | blastx.2 | IgE-binding factor [Mus | gb\|AAA37291.1\| | 57% | 109 | 216 |
| | | | | musculus] | | 37% | 20 | 115 |
| HETAZ13 | 536192 | 201 | HMMER | PFAM: Src homology | PF00018 | 3.73 | 165 | 245 |
| | | | 1.8 | domain 3 | | | | |
| HETDI03 | 925489 | 217 | blastx.2 | zinc finger protein | gb\|AAC50260.1\| | 78% | 18 | 131 |
| | | | | ZNF133 [Homo sapiens] | | 70% | 15 | 134 |
| | | | | | | 74% | 15 | 131 |
| | | | | | | 66% | 18 | 143 |
| | | | | | | 73% | 18 | 131 |
| | | | | | | 60% | 18 | 146 |
| | | | | | | 71% | 18 | 131 |
| | | | | | | 62% | 18 | 146 |
| | | | | | | 64% | 18 | 134 |
| | | | | | | 65% | 18 | 140 |
| HETDP21 | 525407 | 220 | HMMER | PFAM: Zinc finger, | PF00097 | 9.69 | 233 | 292 |
| | | | 1.8 | C3HC4 type (RING | | | | |
| | | | | finger) | | | | |
| | | | blastx.2 | (AF034745) LNXp80 | gb\|AAC40075.1\| | 92% | 218 | 292 |
| | | | | [Mus musculus] | | 61% | 112 | 216 |
| HETFC82 | 799658 | 227 | HMMER | PFAM: Bacterial mutT | PF00293 | 3.03 | 418 | 480 |
| | | | 1.8 | protein | | | | |
| | | | blastx.2 | (AL035291) hypothetical | emb\|CAA22894.1\| | 94% | 7 | 531 |
| | | | | protein [Homo sapiens] | | | | |
| HETFI24 | 954104 | 230 | HMMER | PFAM: Spectrin alpha | PF00435 | 9.64 | 628 | 690 |
| | | | 1.8 | chain, repeated domain | | | | |
| | | | blastx.2 | myosin II heavy chain | gb\|AAB01786.1\| | 25% | 355 | 1146 |
| | | | | [Naegleria fowleri] | | 20% | 204 | 434 |
| HETFM43 | 973702 | 233 | blastx.2 | (AK002129) unnamed | dbj\|BAA92096.1\| | 80% | 200 | 262 |
| | | | | protein product [Homo | | 53% | 303 | 347 |
| | | | | sapiens] | | 88% | 268 | 294 |
| HETGL74 | 947978 | 237 | HMMER | PFAM: IG | PF00047 | 15.57 | 213 | 392 |
| | | | 1.8 | (immunoglobulin) | | | | |
| | | | | superfamily | | | | |
| | | | blastx.2 | FOLLISTATIN-LIKE 2 | sp\|Q61581\|Q61581 | 36% | 132 | 440 |
| | | | | (FOLLISTATIN-LIKE | | | | |
| | | | | PROTEIN). | | | | |
| HETHO63 | 745503 | 244 | blastx.2 | rhophilin [Mus musculus] | gb\|AAC52388.1\| | 51% | 160 | 450 |
| | | | | | | 35% | 47 | 157 |
| HETHR24 | 851412 | 246 | HMMER | PFAM: Fibrillar collagen | PF01410 | 53.4 | 201 | 308 |
| | | | 2.1.1 | C-terminal domain | | | | |
| | | | blastx.2 | type V collagen [Gallus | gb\|AAB41274.1\| | 65% | 213 | 308 |
| | | | | gallus] | | 48% | 86 | 214 |
| | | | | | | 41% | 336 | 437 |
| HETIF01 | 966185 | 248 | blastx.2 | fused-ccdB [Escherichia | emb\|CAA71575.1\| | 94% | 122 | 223 |
| | | | | coli] | | | | |
| HETIJ84 | 766589 | 250 | blastx.2 | (AF161432) HSPC314 | gb\|AAF28992.1\|AF1 | 75% | 1 | 246 |
| | | | | [Homo sapiens] | 61432_1 | | | |
| HETJX04 | 927120 | 262 | HMMER | PFAM: C2 domain | PF00168 | 150.4 | 9 | 260 |
| | | | 2.1.1 | | | | | |
| | | | blastx.2 | (AB025258) granuphilin-a | dbj\|BAA84656.1\| | 94% | 6 | 683 |
| | | | | [Mus musculus] | | 57% | 685 | 831 |
| | | | | | | 48% | 719 | 859 |
| HETJY11 | 966194 | 263 | blastx.2 | (AK000496) unnamed | dbj\|BAA91205.1\| | 70% | 3 | 227 |
| | | | | protein product [Homo | | | | |
| | | | | sapiens] | | | | |
| HETKV26 | 910030 | 270 | HMMER | PFAM: Oxysterol-binding | PF01237 | 67 | 2 | 364 |
| | | | 2.1.1 | protein | | | | |
| HETKZ65 | 941045 | 272 | blastx.14 | (AF067972) DNA | gi\|4927370\|gb\|AAD3 | 84% | 63 | 500 |
| | | | | cytosine methyltransferase | 3084.1\|AF067972_1 | 72% | 455 | 520 |
| | | | | 3 alpha [Homo sapiens] | | 100% | 520 | 537 |
| HLWAH41 | 944774 | 283 | HMMER | PFAM: ENV polyprotein | PF00429 | 150 | 82 | 714 |
| | | | 2.1.1 | (coat polyprotein) | | | | |
| | | | blastx.2 | (AF108843) env protein | gb\|AAD34324.1\| | 50% | 67 | 711 |
| | | | | [Homo sapiens] | | | | |
| HLWAI13 | 920690 | 284 | blastx.14 | (AL117538) hypothetical | gi\|5912069\|emb\|CAB | 100% | 496 | 588 |
| | | | | protein [Homo sapiens] | 55984.1\| | | | |
| HLWAJ64 | 746460 | 285 | HMMER | PFAM: Zinc finger, | PF00098 | 6.51 | 357 | 337 |
| | | | 1.8 | CCHC class | | | | |
| HLWAK69 | 694216 | 286 | HMMER | PFAM: Zinc finger, C2H2 | PF00096 | 6.05 | 118 | 168 |
| | | | 1.8 | type | | | | |
| HLWAR77 | 947484 | 288 | HMMER | PRAM: 7 transmembrane | PF00001 | 214.2 | 1287 | 553 |
| | | | 1.8 | receptor (rhodopsin | | | | |
| | | | | family) | | | | |
| | | | blastx.2 | (AF119815) G-protein- | gb\|AAD22047.1\| | 99% | 1287 | 292 |
| | | | | coupled receptor [Homo | | | | |
| | | | | sapiens] | | | | |
| HLWBQ84 | 782938 | 299 | HMMER | PFAM: HMG (high | PF00505 | 9.46 | 21 | 110 |
| | | | 1.8 | mobility group) box | | | | |
| HLWFG82 | 929647 | 317 | HMMER | PFAM: Immunoglobulin | PF00047 | 32.6 | 121 | 330 |
| | | | 2.1.1 | domain | | | | |
| | | | blastx.2 | Frazzled [Drosophila | gb\|AAC47314.1\| | 37% | 52 | 411 |
| | | | | melanogaster] | | 43% | 488 | 535 |
| HNOAX12 | 969363 | 330 | blastx.2 | line-1 reverse | gb\|AAC51337.1\| | 41% | 710 | 465 |
| | | | | transcriptase [Homo | | | | |
| | | | | sapiens] | | | | |
| HODAG37 | 529410 | 339 | blastx.2 | (AC004416) | gb\|AAC06181.1\| | 54% | 229 | 131 |
| | | | | WUGSC:H_RG013N12.g | | 58% | 137 | 87 |
| | | | | w.1335199.a gene product | | | | |
| | | | | [Homo sapiens] | | | | |
| HODBT58 | 678444 | 355 | blastx.2 | (AF118086) PR01992 | gb\|AAF22030.1\|AF1 | 69% | 1 | 129 |
| | | | | [Homo sapiens] | 18094_25 | | | |
| HODCV09 | 973487 | 375 | blastx.2 | (AF034209) RIG-like 5-6 | gb\|AAB92665.1\| | 100% | 130 | 207 |
| | | | | [Homo sapiens] | | | | |
| HODDQ21 | 919295 | 392 | blastx.2 | (AF161393) HSPC275 | gb\|AAF28953.1\|AF1 | 96% | 3 | 245 |
| | | | | [Homo sapiens] | 61393_1 | | | |
| HODDS67 | 567197 | 394 | blastx.2 | (AK001614) unnamed | dbj\|BAA91790.1\| | 100% | 69 | 164 |
| | | | | protein product [Homo | | 100% | 14 | 67 |
| | | | | sapiens] | | | | |
| HODER91 | 789661 | 419 | HMMER | PFAM: Zinc finger, C2H2 | PF00096 | 11.06 | 163 | 225 |
| | | | 1.8 | type | | | | |
| | | | blastx.2 | (AC007059) Human | gb\|AAD19818.1\| | 35% | 1 | 294 |
| | | | | homolog of Mus musculus | | | | |
| | | | | wizL protein [AA 4-1561] | | | | |
| | | | | [Homo sapiens] | | | | |
| HODEX10 | 926260 | 423 | HMMER | PFAM: Helicases | PF00271 | 9.2 | 22 | 54 |
| | | | 1.8 | conserved C-terminal | | | | |
| | | | | domain | | | | |
| HODFQ06 | 934304 | 451 | blastx.2 | (AK000496) unnamed | dbj\|BAA91205.1\| | 48% | 466 | 254 |
| | | | | protein product [Homo | | 60% | 537 | 454 |
| | | | | sapiens] | | | | |
| HODFY16 | 958329 | 459 | HMMER | PFAM: Phorbol esters/ | PF00130 | 3.15 | 175 | 213 |
| | | | 1.8 | diacylglycerol binding | | | | |
| | | | | domain | | | | |
| HODGC61 | 973449 | 463 | HMMER | PFAM: Protein-tyrosine | PF00102 | 6.61 | 130 | 222 |
| | | | 1.8 | phosphatase | | | | |
| HODGH02 | 917969 | 465 | blastx.2 | IDN4-GGTR14 | sp\|Q9Y6Y5\|Q9Y6Y5 | 94% | 17 | 118 |
| | | | | PROTEIN. | | | | |
| HODGH04 | 926255 | 466 | blastx.2 | IDN4-GGTR14 | sp\|Q9Y6Y5\|Q9Y6Y5 | 51% | 8 | 247 |
| | | | | PROTEIN. | | | | |
| HODGJ67 | 974297 | 471 | blastx.14 | pol gene protein; Xxx | gi\|1196424\|gb\|AAA8 | 70% | 132 | 284 |
| | | | | [Homo sapiens] | 8026.1\| | | | |
| HODGP95 | 908650 | 477 | HMMER | PFAM: Zinc finger, C2H2 | PF00096 | 18.49 | 209 | 271 |
| | | | 1.8 | type | | | | |
| | | | blastx.2 | (AC005498) R31665_1 | gb\|AAC32422.1\| | 61% | 125 | 310 |
| | | | | [Homo sapiens] | | 52% | 146 | 310 |
| | | | | | | 53% | 146 | 292 |
| | | | | | | 41% | 125 | 310 |
| | | | | | | 34% | 74 | 334 |
| | | | | | | 50% | 146 | 307 |
| | | | | | | 51% | 164 | 310 |
| | | | | | | 46% | 164 | 310 |
| | | | | | | 47% | 307 | 357 |
| | | | | | | 47% | 307 | 357 |
| | | | | | | 47% | 307 | 357 |
| | | | | | | 50% | 310 | 357 |
| | | | | | | 35% | 307 | 357 |
| | | | | | | 41% | 307 | 357 |
| HODGQ22 | 974290 | 479 | blastx.2 | hypothetical protein | pir\|S72489\|S72489 | 47% | 235 | 2 |
| | | | | Tigger 2 - human | | 57% | 287 | 231 |
| | | | | transposon MER37 1 | | | | |
| HODGQ92 | 894368 | 481 | HMMER | PFAM: RhoGAP domain | PF00620 | 30.1 | 2 | 124 |
| | | | 2.1.1 | | | | | |
| | | | blastx.2 | (AC002398) F25965_3 | gb\|AAB81198.1\| | 63% | 142 | 399 |
| | | | | [Homo sapiens] | | 72% | 2 | 133 |
| HOFAD05 | 932211 | 507 | blastx.14 | unknown [murine | gi\|2318003\|gb\|AAB6 | 39% | 263 | 180 |
| | | | | herpesvirus 68] | 6461.1\| | 45% | 192 | 127 |
| | | | | | | 85% | 120 | 100 |
| HOFMB78 | 572941 | 512 | HMMER | PFAM: Laminin B | PF00052 | 1.62 | 286 | 330 |
| | | | 1.8 | (Domain IV) | | | | |
| | | | blastx.2 | ribosomal protein L7a | gb\|AAA60282.1\| | 72% | 49 | 399 |
| | | | | large subunit [Homo | | 61% | 236 | 397 |
| | | | | sapiens] | | 50% | 44 | 91 |
| HOFMF03 | 924679 | 516 | blastx.2 | U88 [Human herpesvirus | emb\|CAA58337.1\| | 54% | 298 | 116 |
| | | | | 6] | | 49% | 298 | 116 |
| | | | | | | 50% | 295 | 116 |
| | | | | | | 51% | 295 | 116 |
| | | | | | | 54% | 298 | 116 |
| | | | | | | 50% | 295 | 116 |
| | | | | | | 51% | 289 | 116 |
| | | | | | | 55% | 298 | 116 |
| | | | | | | 48% | 295 | 116 |
| | | | | | | 46% | 295 | 116 |
| | | | | | | 52% | 298 | 116 |
| | | | | | | 48% | 289 | 116 |
| | | | | | | 43% | 295 | 116 |
| | | | | | | 51% | 295 | 116 |
| | | | | | | 49% | 298 | 116 |
| | | | | | | 45% | 295 | 116 |
| | | | | | | 43% | 295 | 116 |
| | | | | | | 46% | 295 | 116 |
| | | | | | | 45% | 295 | 116 |
| | | | | | | 54% | 297 | 115 |
| | | | | | | 43% | 295 | 116 |
| | | | | | | 43% | 295 | 116 |
| | | | | | | 45% | 295 | 116 |
| | | | | | | 46% | 295 | 116 |
| | | | | | | 44% | 289 | 116 |
| | | | | | | 44% | 289 | 116 |
| | | | | | | 43% | 295 | 116 |
| | | | | | | 44% | 289 | 116 |
| | | | | | | 46% | 289 | 116 |
| | | | | | | 43% | 295 | 116 |
| | | | | | | 43% | 295 | 116 |
| | | | | | | 48% | 289 | 116 |
| | | | | | | 43% | 289 | 116 |
| | | | | | | 41% | 295 | 116 |
| | | | | | | 44% | 342 | 115 |
| | | | | | | 41% | 339 | 115 |
| | | | | | | 42% | 297 | 115 |
| HOFMF70 | 734917 | 517 | HMMER | PFAM: Connexin | PF00029 | 20.4 | 244 | 288 |
| | | | 2.1.1 | | | | | |
| | | | blastx.2 | (AJ004856) connexin31 | emb\|CAA06165.1\| | 85% | 113 | 259 |
| | | | | [Homo sapiens] | | 70% | 285 | 386 |
| HOFMG21 | 973358 | 518 | HMMER | PFAM: MAS20 protein | PF02064 | 33.6 | 105 | 248 |
| | | | 2.1.1 | import receptor | | | | |
| | | | blastx.14 | mitochondrial outer | gi\|285987\|dbj\|BAA02 | 98% | 114 | 416 |
| | | | | membrane protein 19 | 804.1\| | 72% | 452 | 484 |
| | | | | [Homo sapiens] | | | | |
| HOFMH12 | 964722 | 519 | blastx.2 | 19 kDa subunit of | emb\|CAA42218.1\| | 66% | 83 | 457 |
| | | | | NADH:ubiquinone | | 64% | 312 | 476 |
| | | | | oxidoreductase complex | | | | |
| | | | | (complex I) [Bos taurus] | | | | |
| HOFMH38 | 920365 | 520 | HMMER | PFAM: TCP-1/cpn60 | PF00118 | 104.8 | 102 | 287 |
| | | | 2.1.1 | chaperonin family | | | | |
| | | | blastx.2 | unnamed protein product | emb\|CAA02863.1\| | 93% | 60 | 296 |
| | | | | [unidentified] | | 88% | 326 | 403 |
| | | | | | | 100% | 19 | 69 |
| | | | | | | 100% | 286 | 327 |
| HOFMI62 | 796358 | 523 | blastx.2 | (AJ388527) Ribosomal | emb\|CAB46829.1\| | 96% | 40 | 228 |
| | | | | protein [Canis familiaris] | | 96% | 231 | 323 |
| | | | | | | 66% | 320 | 355 |
| | | | | | | 38% | 35 | 88 |
| HOFMJ44 | 719663 | 525 | HMMER | PFAM: Ribosomal protein | PF01667 | 109.1 | 128 | 265 |
| | | | 2.1.1 | S27 | | | | |
| | | | blastx.2 | (AF070668) 40S | gb\|AAD20974.1\| | 95% | 56 | 274 |
| | | | | ribosomal protein S27 | | | | |
| | | | | isoform [Homo sapiens] | | | | |
| HOFMM72 | 464015 | 528 | blastx.2 | (AL117557) hypothetical | emb\|CAB55992.1\| | 65% | 61 | 366 |
| | | | | protein [Homo sapiens] | | | | |
| HOFMP79 | 775242 | 531 | HMMER | PFAM: GrpE | PF01025 | 49.4 | 173 | 358 |
| | | | 2.1.1 | | | | | |
| | | | blastx.2 | mt-GrpE#1 precursor | gb\|AAC53534.1\| | 73% | 173 | 400 |
| | | | | [Rattus norvegicus] | | 86% | 36 | 164 |
| HOFMQ65 | 789347 | 534 | blastx.2 | (AL050369) hypothetical | emb\|CAB43677.1\| | 68% | 113 | 343 |
| | | | | protein [Homo sapiens] | | 100% | 43 | 147 |
| | | | | | | 64% | 354 | 404 |
| HOFMS89 | 575820 | 537 | blastx.2 | (AF161359) HSPC096 | gb\|AAF28919.1\|AF1 | 53% | 181 | 411 |
| | | | | [Homo sapiens] | 61359_1 | 46% | 71 | 277 |
| | | | | | | 69% | 411 | 488 |
| | | | | | | 72% | 48 | 80 |
| HOFMT43 | 811542 | 539 | blastx.2 | glucosephosphate | emb\|CAA82246.1\| | 50% | 143 | 514 |
| | | | | isomerase [Sus scrofa] | | 80% | 57 | 161 |
| | | | | | | 40% | 277 | 501 |
| HOFMT72 | 563575 | 541 | blastx.2 | Huntington Disease (HD) | emb\|CAA92991.1\| | 82% | 52 | 2 |
| | | | | gene exon 1 [Homo | | 50% | 297 | 256 |
| | | | | sapiens] | | | | |
| HOFMU63 | 744325 | 543 | blastx.2 | (AK000334) unnamed | dbj\|BAA91091.1\| | 63% | 9 | 245 |
| | | | | protein product [Homo | | | | |
| | | | | sapiens] | | | | |
| HOFNA92 | 792734 | 547 | blastx.2 | (AL109701) C15orf3 | emb\|CAB52022.1\| | 60% | 151 | 339 |
| | | | | [Homo sapiens] | | 86% | 60 | 125 |
| | | | | | | 37% | 128 | 301 |
| | | | | | | 33% | 128 | 334 |
| HOFNG06 | 935569 | 556 | blastx.2 | (AL133584) hypothetical | emb\|CAB63728.1\| | 90% | 80 | 241 |
| | | | | protein [Homo sapiens] | | 90% | 66 | 95 |
| | | | | | | 100% | 253 | 270 |
| HOFNI08 | 974435 | 558 | blastx.2 | (AJ224442) | emb\|CAA11944.1\| | 81% | 25 | 423 |
| | | | | methyltransferase [Homo | | | | |
| | | | | sapiens] | | | | |
| HOFNL18 | 666498 | 561 | HMMER | PFAM: Bacterial mutT | PF00293 | 4.34 | 286 | 345 |
| | | | 1.8 | protein | | | | |
| HOFNL25 | 916963 | 562 | HMMER | PFAM: Ribosomal L18ae | PF01775 | 250.8 | 62 | 331 |
| | | | 2.1.1 | protein family | | | | |
| | | | blastx.2 | ribosomal protein L18a - | pir\|S03957\|R5RT18 | 73% | 47 | 514 |
| | | | | rat | | | | |
| HOFNL37 | 906250 | 563 | blastx.2 | vimentin [Mus musculus] | dbj\|BAA19834.1\| | 51% | 204 | 377 |
| | | | | | | 41% | 175 | 396 |
| | | | | | | 100% | 140 | 178 |
| HOFNT59 | 615305 | 567 | blastx.2 | (AB026125) ART-4 | dbj\|BAA86961.1\| | 59% | 146 | 451 |
| | | | | [Homo sapiens] | | 42% | 18 | 479 |
| HOFNU72 | 705435 | 568 | blastx.2 | (AF086708) 26S | gb\|AAC64104.1\| | 94% | 46 | 204 |
| | | | | proteasome subunit 11 | | 95% | 200 | 259 |
| | | | | [Homo sapiens] | | 81% | 261 | 308 |
| HOFNW79 | 973351 | 570 | blastx.2 | (AJ388527) Ribosomal | emb\|CAB46829.1\| | 96% | 85 | 273 |
| | | | | protein [Canis familiaris] | | 100% | 276 | 362 |
| | | | | | | 84% | 365 | 403 |
| | | | | | | 38% | 80 | 133 |
| HOFNY50 | 715312 | 572 | blastx.2 | (AF047704) tuftelin [Mus | gb\|AAC04577.1\| | 92% | 224 | 388 |
| | | | | musculus] | | 81% | 127 | 222 |
| | | | | | | 68% | 69 | 143 |
| | | | | | | 90% | 393 | 425 |
| | | | | | | 58% | 427 | 477 |
| HOFOB88 | 751692 | 579 | blastx.2 | (AF139185) myomegalin | gb\|AAD29427.1\| | 80% | 13 | 369 |
| | | | | [Rattus norvegicus] | | | | |
| HOFOB91 | 827631 | 580 | blastx.2 | nucleobindin [Homo | gb\|AAA36383.1\| | 86% | 87 | 233 |
| | | | | sapiens] | | 85% | 23 | 43 |
| HOFOF57 | 666909 | 582 | blastx.2 | T28D6.9 [Caenorhabditis | emb\|CAB54316.1\| | 43% | 141 | 347 |
| | | | | elegans] | | 57% | 347 | 388 |
| HOGAF39 | 947431 | 584 | blastx.14 | cyclin A/CDK2- | gi\|995826\|gb\|AAC50 | 47% | 78 | 179 |
| | | | | associated p45 [Homo | 242.1\| | 45% | 2 | 73 |
| | | | | sapiens] | | 42% | 216 | 257 |
| HOGCX95 | 890607 | 591 | HMMER | PFAM: Retroviral aspartyl | PF00077 | 32.8 | 205 | 504 |
| | | | 1.8 | proteases | | | | |
| HOGEE76 | 968956 | 592 | blastx.14 | No definition line found | gi\|1397275\|gb\|AAB0 | 36% | 650 | 790 |
| | | | | [Caenorhabditis elegans] | 3138.1\| | 60% | 599 | 643 |
| | | | | | | 27% | 500 | 586 |
| HOVBY34 | 706816 | 602 | blastx.2 | (AK002129) unnamed | dbj\|BAA92096.1\| | 80% | 177 | 40 |
| | | | | protein product [Homo | | | | |
| | | | | sapiens] | | | | |
| HOVCD39 | 705406 | 605 | blastx.2 | (AF118081) PRO1900 | gb\|AAF22025.1\|AF1 | 70% | 20 | 151 |
| | | | | [Homo sapiens] | 18094_20 | | | |
| HOVEK70 | 909138 | 615 | HMMER | PFAM: Zinc finger, C2H2 | PF00096 | 68.7 | 225 | 293 |
| | | | 2.1.1 | type | | | | |
| | | | blastx.2 | Bowel [Drosophila | gb\|AAB17949.1\| | 88% | 93 | 377 |
| | | | | melanogaster] | | 35% | 111 | 431 |
| | | | | | | 34% | 132 | 377 |
| | | | | | | 85% | 2 | 82 |
| | | | | | | 32% | 81 | 209 |
| | | | | | | 33% | 368 | 457 |
| HPDOT03 | 922481 | 635 | blastx.14 | (AF061346) Edp1 protein | gi\|3114713\|gb\|AAC7 | 61% | 212 | 382 |
| | | | | [Mus musculus] | 8826.1\| | | | |
| HPDPJ69 | 966158 | 637 | blastx.14 | envelope protein [Homo | gi\|1196425\|gb\|AAA8 | 53% | 92 | 226 |
| | | | | sapiens] | 8027.1\| | 62% | 13 | 108 |
| HPDRG92 | 967704 | 643 | blastx.14 | 2-oxoglutarate | gi\|531241\|dbj\|BAA01 | 82% | 7 | 234 |
| | | | | dehydrogenase precursor | 393.1\| | 73% | 237 | 326 |
| | | | | [Homo sapiens] | | 35% | 1 | 60 |
| | | | | | | 75% | 279 | 302 |
| HPEKG18 | 914115 | 656 | blastx.14 | (AB012223) ORF2 [Canis | gi\|2981631\|dbj\|BAA2 | 75% | 96 | 10 |
| | | | | familiaris] | 5253.1\| | | | |
| HPFEA08 | 960372 | 700 | HMMER | PFAM: HMG (high | PF00505 | 5.1 | 68 | 148 |
| | | | 1.8 | mobility group) box | | | | |
| HPIAS40 | 928614 | 708 | blastx.14 | (AF044954) | gi\|4164442\|gb\|AAD0 | 96% | 68 | 232 |
| | | | | NADH:ubiquinone | 5419.1\| | 88% | 304 | 384 |
| | | | | oxidoreductase PDSW | | 92% | 262 | 303 |
| | | | | subunit [Homo sapiens] | | 53% | 384 | 461 |
| HPIAX11 | 925424 | 710 | blastx.2 | (AL031427) dJ167A19.1 | emb\|CAB46721.1\| | 63% | 342 | 569 |
| | | | | (novel protein) [Homo | | 78% | 449 | 604 |
| | | | | sapiens] | | | | |
| HPIAZ37 | 655753 | 711 | HMMER | PFAM: ATP synthase A | PF00119 | 11.95 | 68 | 238 |
| | | | 1.8 | chain | | | | |
| HPIBQ37 | 884289 | 712 | HMMER | PFAM: Immunoglobulin | PF00047 | 42 | 149 | 355 |
| | | | 2.1.1 | domain | | | | |
| | | | blastx | (AF111713) junctional | gb\|AAD42050.1\|AF1 | 100% | 89 | 385 |
| | | | | adhesion molecule [Homo | 11713_1 | 84% | 385 | 423 |
| | | | | sapiens] | | | | |
| HPJCC04 | 926787 | 731 | blastx.14 | (AF159714) PPAR | gi\|5802182\|gb\|AAD5 | 94% | 249 | 40 |
| | | | | gamma coactivator-1 | 1615.1\|AF159714_1 | | | |
| | | | | [Homo sapiens] | | | | |
| HPJDA08 | 958182 | 741 | blastx.14 | zinc finger 5 protein | gi\|1399185\|gb\|AAB3 | 39% | 92 | 475 |
| | | | | [Gallus gallus] | 8387.1\| | | | |
| HPJET90 | 836503 | 750 | HMMER | PFAM: Aldehyde | PF00171 | 150.4 | 66 | 371 |
| | | | 2.1.1 | dehydrogenase family | | | | |
| HPMEG50 | 925080 | 806 | blastx.14 | Mst84Dc [Drosophila | gi\|11075\|emb\|CAA47 | 62% | 7 | 30 |
| | | | | melanogaster] | 939.1\| | 28% | 22 | 105 |
| | | | | | | 44% | 126 | 152 |
| HPMFL08 | 959569 | 819 | HMMER | PFAM: Src homology | PF00018 | 4.97 | 209 | 238 |
| | | | 1.8 | domain 3 | | | | |
| HPMGF06 | 954823 | 845 | blastx.14 | GTP binding protein [Mus | gi\|53169\|emb\|CAA36 | 92% | 37 | 564 |
| | | | | musculus] | 803.1\| | | | |
| HPMGI03 | 924521 | 848 | blastx.14 | (AF106933) plexin B | gi\|4056676\|gb\|AAD0 | 36% | 49 | 147 |
| | | | | [Drosophila melanogaster] | 9426.1\| | 60% | 148 | 177 |
| | | | | | | 63% | 12 | 44 |
| | | | | | | 43% | 288 | 335 |
| | | | | | | 66% | 359 | 385 |
| HPMGX23 | 575903 | 864 | HMMER | PFAM: Helix-loop-helix | PF00010 | 6.66 | 96 | 194 |
| | | | 1.8 | DNA-binding domain | | | | |
| HPMJF76 | 965642 | 875 | blastx.14 | pol protein [Human | gi\|1780973\|emb\|CAA | 58% | 234 | 326 |
| | | | | endogenous retrovirus K] | 71417.1\| | 40% | 28 | 138 |
| | | | | | | 63% | 134 | 199 |
| HPMJN59 | 946876 | 877 | HMMER | PFAM: Prolyl | PF00326 | 21.87 | 138 | 251 |
| | | | 1.8 | oligopeptidase family | | | | |
| | | | blastx.2 | (AC005594) R26984_1 | gb\|AAC33801.1\| | 61% | 138 | 521 |
| | | | | [Homo sapiens] | | | | |
| HPMKM81 | 894416 | 884 | HMMER | PFAM: Homeobox | PF00046 | 82.2 | 94 | 228 |
| | | | 2.1.1 | domain | | | | |
| HPRCC08 | 939490 | 901 | blastx.14 | 2.19 [Homo sapiens] | gi\|854082\|emb\|CAA6 | 54% | 120 | 296 |
| | | | | | 0645.1\| | | | |
| HPWAS77 | 908450 | 914 | HMMER | PFAM: gag gene protein | PF00607 | 92.3 | 655 | 266 |
| | | | 2.1.1 | p24 (core nucleocapsid | | | | |
| | | | | protein) | | | | |
| | | | blastx.14 | gag protein [Human | gi\|1780975\|emb\|CAA | 37% | 730 | 248 |
| | | | | endogenous retrovirus K] | 71418.1\| | 38% | 185 | 108 |
| | | | | | | 45% | 253 | 188 |
| | | | | | | 50% | 25 | 2 |
| HSWAC73 | 710354 | 926 | HMMER | PFAM: WD domain, G- | PF00400 | 9.99 | 134 | 190 |
| | | | 1.8 | beta repeats | | | | |
| HTEAL28 | 963538 | 939 | blastx.14 | (AL080154) hypothetical | gi\|5262611\|emb\|CAB | 36% | 234 | 413 |
| | | | | protein [Homo sapiens] | 45745.1\| | | | |
| HTEBC74 | 887782 | 945 | HMMER | PFAM: Armadillo | PF00514 | 20.2 | 58 | 183 |
| | | | 1.8 | segment protein, repeats | | | | |
| HTEBY08 | 960427 | 954 | HMMER | PFAM: Protein | PF01240 | 92.8 | 63 | 251 |
| | | | 2.1.1 | phosphatase 2A regulatory | | | | |
| | | | | subunit PR55 | | | | |
| | | | blastx.14 | protein phosphatase 2A1 | gi\|619215\|gb\|AAA58 | 97% | 63 | 197 |
| | | | | B gamma subunit | 956.1\| | 87% | 231 | 254 |
| | | | | [Oryctolagus cuniculus] | | | | |
| HTECA21 | 911369 | 962 | HMMER | PFAM: PDZ domain | PF00595 | 57.6 | 100 | 354 |
| | | | 2.1.1 | (Also known as DHR or | | | | |
| | | | | GLGF). | | | | |
| | | | blastx.14 | tyrosine phosphatase | gi\|1486367\|emb\|CAA | 57% | 85 | 351 |
| | | | | [Homo sapiens] | 56124.1\| | 51% | 467 | 652 |
| HTEDI02 | 921243 | 994 | HMMER | PFAM: Leucine Rich | PF00560 | 36.2 | 346 | 414 |
| | | | 2.1.1 | Repeat | | | | |
| | | | blastx.14 | densin-180 [Rattus | gi\|1657758\|gb\|AAC5 | 36% | 220 | 450 |
| | | | | norvegicus] | 2881.1\| | 32% | 214 | 450 |
| | | | | | | 34% | 220 | 456 |
| | | | | | | 30% | 241 | 450 |
| | | | | | | 33% | 214 | 453 |
| | | | | | | 26% | 214 | 441 |
| | | | | | | 29% | 214 | 450 |
| | | | | | | 36% | 268 | 450 |
| | | | | | | 36% | 463 | 612 |
| | | | | | | 24% | 220 | 453 |
| | | | | | | 26% | 214 | 453 |
| | | | | | | 40% | 463 | 588 |
| | | | | | | 29% | 463 | 606 |
| | | | | | | 29% | 463 | 606 |
| | | | | | | 31% | 463 | 606 |
| | | | | | | 29% | 463 | 603 |
| | | | | | | 24% | 463 | 612 |
| HTEDQ30 | 530589 | 1007 | HMMER | PFAM: Ferritins | PF00210 | 104.6 | 9 | 164 |
| | | | 2.1.1 | | | | | |
| HTEDU48 | 932315 | 1013 | blastx.14 | (AF176069) ubiquilin | gi\|5733824\|gb\|AAD4 | 66% | 11 | 118 |
| | | | | [Homo sapiens] | 9751.1\|AF176069_1 | 46% | 305 | 454 |
| | | | | | | 55% | 587 | 688 |
| | | | | | | 57% | 452 | 535 |
| | | | | | | 24% | 251 | 472 |
| | | | | | | 28% | 293 | 388 |
| | | | | | | 26% | 332 | 502 |
| | | | | | | 15% | 311 | 490 |
| | | | | | | 24% | 569 | 679 |
| | | | | | | 32% | 184 | 267 |
| | | | | | | 25% | 329 | 436 |
| HTEDY38 | 771505 | 1017 | HMMER | PFAM: Zinc-binding | PF00099 | 2.19 | 9 | 44 |
| | | | 1.8 | metalloprotease domain | | | | |
| HTEDY54 | 922964 | 1018 | blastx.14 | lysozyme [Gallus gallus] | gi\|63426\|emb\|CAA43 | 46% | 696 | 457 |
| | | | | | 319.1\| | 41% | 405 | 220 |
| | | | | | | 61% | 234 | 181 |
| HTEGM38 | 675087 | 1059 | HMMER | PFAM: DnaJ domain | PF00226 | 65.2 | 93 | 197 |
| | | | 2.1.1 | | | | | |
| HTEGO05 | 932583 | 1061 | HMMER | PFAM: Eukaryotic protein | PF00069 | 50.8 | 3 | 233 |
| | | | 2.1.1 | kinase domain | | | | |
| | | | blastx.14 | male germ cell-associated | gi\|205278\|gb\|AAA41 | 85% | 3 | 395 |
| | | | | kinase (mak) [Rattus | 562.1\| | 64% | 489 | 761 |
| | | | | norvegicus] | | 85% | 768 | 848 |
| | | | | | | 38% | 1023 | 1100 |
| HTEHC47 | 973071 | 1085 | blastx.2 | unnamed protein product | emb\|CAB42447.1\| | 29% | 112 | 612 |
| | | | | [unidentified] | | | | |
| HTEHI14 | 526687 | 1096 | HMMER | PFAM: lactate/malate | PF00056 | 50.6 | 222 | 371 |
| | | | 2.1.1 | dehydrogenase | | | | |
| HTEHS19 | 529280 | 1113 | HMMER | PFAM: 7 transmembrane | PF00002 | 19.3 | 16 | 135 |
| | | | 2.1.1 | receptor (Secretin family) | | | | |
| HTEHV72 | 920610 | 1117 | HMMER | PFAM: IQ calmodulin- | PF00612 | 41.7 | 178 | 240 |
| | | | 2.1.1 | binding motif | | | | |
| HTEIB14 | 963099 | 1127 | HMMER | PFAM: Zinc finger, C2H2 | PF00096 | 53.9 | 78 | 146 |
| | | | 2.1.1 | type | | | | |
| | | | blastx.14 | Bowel [Drosophila | gi\|1388166\|gb\|AAB1 | 90% | 9 | 236 |
| | | | | melanogaster] | 7949.1\| | 33% | 9 | 230 |
| | | | | | | 80% | 227 | 316 |
| | | | | | | 33% | 9 | 230 |
| | | | | | | 46% | 9 | 149 |
| | | | | | | 28% | 54 | 230 |
| | | | | | | 31% | 230 | 334 |
| | | | | | | 35% | 224 | 316 |
| | | | | | | 32% | 307 | 381 |
| | | | | | | 32% | 297 | 380 |
| | | | | | | 34% | 358 | 426 |
| HTEIF40 | 958355 | 1128 | blastx.14 | (AF132972) CGI-38 | gi\|4680715\|gb\|AAD2 | 64% | 117 | 275 |
| | | | | protein [Homo sapiens] | 7747.1\|AF132972_1 | | | |
| HTEIK11 | 967431 | 1136 | blastx.14 | Zfb-29 [Mus musculus] | gi\|55471\|emb\|CAA38 | 28% | 188 | 367 |
| | | | | | 920.1\| | 50% | 353 | 406 |
| | | | | | | 50% | 353 | 406 |
| | | | | | | 50% | 353 | 406 |
| | | | | | | 50% | 353 | 406 |
| | | | | | | 44% | 353 | 406 |
| | | | | | | 61% | 368 | 406 |
| | | | | | | 47% | 356 | 406 |
| | | | | | | 42% | 60 | 137 |
| | | | | | | 38% | 353 | 406 |
| | | | | | | 44% | 356 | 409 |
| | | | | | | 100% | 411 | 431 |
| | | | | | | 85% | 411 | 431 |
| | | | | | | 85% | 411 | 431 |
| | | | | | | 87% | 408 | 431 |
| | | | | | | 100% | 414 | 431 |
| HTEIL07 | 953803 | 1139 | HMMER | PFAM: EF hand | PF00036 | 11.27 | 192 | 263 |
| | | | 1.8 | | | | | |
| HTEIP88 | 941155 | 1148 | HMMER | PFAM: Transmembrane | PF01490 | 34.7 | 1 | 216 |
| | | | 2.1.1 | amino acid transporter | | | | |
| | | | | protein | | | | |
| HTEIU92 | 870652 | 1154 | HMMER | PFAM: Transketolase | PF00456 | 70.1 | 1 | 225 |
| | | | 2.1.1 | | | | | |
| HTEIV54 | 922027 | 1155 | blastx.14 | p18H-rev 107 [Rattus | gi\|433963\|emb\|CAA5 | 40% | 359 | 682 |
| | | | | norvegicus] | 3991.1\| | 65% | 251 | 364 |
| HTEIY80 | 955242 | 1163 | blastx.14 | (AF146793) protein B | gi\|4836805\|gb\|AAD3 | 91% | 320 | 454 |
| | | | | [Mus musculus] | 0564.1\|AF146793_1 | 74% | 453 | 569 |
| | | | | | | 83% | 111 | 203 |
| | | | | | | 31% | 257 | 322 |
| HTEJE15 | 908360 | 1170 | HMMER | PFAM: Helicases | PF00271 | 14.92 | 5 | 52 |
| | | | 1.8 | conserved C-terminal | | | | |
| | | | | domain | | | | |
| | | | blastx.14 | vasa-like gene protein, | gi\|806464\|gb\|AAB33 | 73% | 2 | 190 |
| | | | | RVLG protein = putative | 364.1\| | 84% | 242 | 319 |
| | | | | DEAD 1 [Rattus sp.] | | 65% | 188 | 265 |
| HTEJF45 | 942476 | 1172 | HMMER | PFAM: Zinc-binding | PF00099 | 2.28 | 593 | 637 |
| | | | 1.8 | metalloprotease domain | | | | |
| | | | blastx.2 | (AB017800) nolp [Homo | dbj\|BAA34576.1\| | 69% | 135 | 299 |
| | | | | sapiens] | | 53% | 290 | 487 |
| | | | | | | 77% | 523 | 549 |
| | | | | | | 37% | 540 | 629 |
| HTEJP10 | 914785 | 1180 | HMMER | PFAM: Heat shock hsp90 | PF00183 | 13.29 | 110 | 214 |
| | | | 1.8 | proteins | | | | |
| HTEJP66 | 916481 | 1181 | blastx.14 | (AF151885) CGI-127 | gi\|4929723\|gb\|AAD3 | 100% | 499 | 639 |
| | | | | protein [Homo sapiens] | 4122.1\|AF151885_1 | 62% | 626 | 706 |
| HTEKS20 | 846714 | 1210 | HMMER | PFAM: EF hand | PF00036 | 84.7 | 453 | 539 |
| | | | 2.1.1 | | | | | |
| HTELE10 | 963563 | 1221 | blastx.14 | integumentary mucin B.1 | gi\|1184035\|emb\|CAA | 75% | 339 | 244 |
| | | | | [Xenopus laevis] | 64795.1\| | | | |
| HTELJ89 | 966134 | 1229 | HMMER | PFAM: Zinc-binding | PF00099 | 2.6 | 290 | 316 |
| | | | 1.8 | metalloprotease domain | | | | |
| HTELV86 | 910946 | 1252 | HMMER | PFAM: Fibronectin type | PF00041 | 77.22 | 400 | 669 |
| | | | 1.8 | III domain | | | | |
| | | | blastx.14 | neural cell adhesion | gi\|1016012\|gb\|AAC5 | 96% | 1 | 918 |
| | | | | protein BIG-2 precursor | 2262.1\| | 68% | 960 | 1025 |
| | | | | [Rattus norvegicus] | | 92% | 926 | 967 |
| | | | | | | 66% | 22 | 75 |
| | | | | | | 28% | 1 | 171 |
| | | | | | | 55% | 1 | 54 |
| | | | | | | 28% | 286 | 399 |
| | | | | | | 42% | 10 | 93 |
| | | | | | | 44% | 280 | 354 |
| | | | | | | 33% | 274 | 390 |
| | | | | | | 33% | 286 | 357 |
| | | | | | | 100% | 1028 | 1054 |
| | | | | | | 42% | 184 | 225 |
| | | | | | | 100% | 1057 | 1077 |
| | | | | | | 28% | 658 | 741 |
| HTEMA54 | 911666 | 1260 | HMMER | PFAM: Actin | PF00022 | 320.7 | 247 | 1161 |
| | | | 2.1.1 | | | | | |
| | | | blastx. 14 | actin [Girardia tigrina] | gi\|4204812\|gb\|AAD1 | 42% | 253 | 849 |
| | | | | | 1530.1\| | 44% | 955 | 1161 |
| | | | | | | 55% | 1232 | 1360 |
| | | | | | | 48% | 847 | 927 |
| | | | | | | 58% | 1169 | 1204 |
| HTEMK03 | 923066 | 1273 | blastx.14 | (AF116463) unknown | gi\|4455041\|gb\|AAD2 | 37% | 302 | 216 |
| | | | | [Streptomyces | 1045.1\| | 53% | 171 | 127 |
| | | | | lincolnensis] | | 47% | 348 | 292 |
| | | | | | | 53% | 55 | 17 |
| | | | | | | 35% | 231 | 181 |
| | | | | | | 42% | 190 | 134 |
| | | | | | | 42% | 134 | 78 |
| | | | | | | 58% | 43 | 8 |
| HTEMP49 | 932319 | 1280 | blastx.14 | (AL117564) hypothetical | gi\|5912114\|emb\|CAB | 91% | 12 | 629 |
| | | | | protein [Homo sapiens] | 55995.1\| | | | |
| HTEMR65 | 909280 | 1281 | HMMER | PFAM: Zinc finger, C2H2 | PF00096 | 51.5 | 35 | 103 |
| | | | 2.1.1 | type | | | | |
| | | | blastx.2 | zinc finger protein [Homo | emb\|CAA55533.1\| | 61% | 2 | 286 |
| | | | | sapiens] | | 56% | 2 | 286 |
| | | | | | | 56% | 2 | 286 |
| | | | | | | 54% | 2 | 292 |
| | | | | | | 52% | 2 | 286 |
| | | | | | | 50% | 2 | 304 |
| | | | | | | 53% | 2 | 286 |
| | | | | | | 51% | 2 | 286 |
| | | | | | | 51% | 2 | 286 |
| | | | | | | 53% | 5 | 286 |
| | | | | | | 51% | 2 | 283 |
| | | | | | | 52% | 5 | 286 |
| | | | | | | 51% | 2 | 283 |
| | | | | | | 40% | 909 | 998 |
| | | | | | | 45% | 866 | 931 |
| HTEMT06 | 934338 | 1284 | blastx.14 | 120 kDa style | gi\|2653671\|gb\|AAC1 | 28% | 50 | 280 |
| | | | | glycoprotein [Nicotiana | 5893.1\| | 37% | 240 | 383 |
| | | | | alata] | | 32% | 80 | 226 |
| HTEMX92 | 913795 | 1288 | HMMER | PFAM: BTB/POZ domain | PF00651 | 62.3 | 122 | 319 |
| | | | 2.1.1 | | | | | |
| | | | blastx.14 | (AF086831) | gi\|3599513\|gb\|AAC3 | 47% | 143 | 337 |
| | | | | leukemia/lymohoma | 5368.1\| | 32% | 331 | 450 |
| | | | | related factor cLRF | | | | |
| | | | | [Gallus gallus] | | | | |
| HTENI58 | 917213 | 1299 | HMMER | PFAM: HMG (high | PF00505 | 118.2 | 308 | 514 |
| | | | 2.1.1 | mobility group) box | | | | |
| | | | blastx.14 | HMG-X protein [Xenopus | gi\|639691\|dbj\|BAA06 | 43% | 269 | 514 |
| | | | | laevis] | 440.1\| | 43% | 101 | 319 |
| | | | | | | 26% | 89 | 214 |
| | | | | | | 57% | 446 | 487 |
| HTENP54 | 787535 | 1306 | HMMER | PFAM: Bacterial | PF00196 | 6.37 | 107 | 199 |
| | | | 1.8 | regulatory proteins, luxR | | | | |
| | | | | family | | | | |
| HTENP80 | 775387 | 1307 | HMMER | PFAM: TPR Domain | PF00515 | 11.77 | 83 | 166 |
| | | | 1.8 | | | | | |
| HTENR10 | 963530 | 1309 | blastx.14 | protein kinase related to | gi\|1171248\|gb\|AAC5 | 82% | 10 | 132 |
| | | | | Raf protein kinases; 1 | 0354.1\| | | | |
| HTENR93 | 920834 | 1311 | blastx.14 | (AF121781) unknown | gi\|4210989\|gb\|AAD1 | 79% | 285 | 644 |
| | | | | [Homo sapiens] | 2066.1\| | 74% | 620 | 808 |
| HTENY35 | 884043 | 1319 | HMMER | PFAM: Zinc finger, | PF00097 | 6.56 | 449 | 592 |
| | | | 1.8 | C3HC4 type (RING | | | | |
| | | | | finger) | | | | |
| HTEOF80 | 847224 | 1327 | HMMER | PFAM: EGF-like domain | PF00008 | 14.65 | 20 | 100 |
| | | | 1.8 | | | | | |
| HTEOI36 | 870575 | 1330 | HMMER | PFAM: HMG (high | PF00505 | 15.44 | 69 | 236 |
| | | | 1.8 | mobility group) box | | | | |
| HTEON29 | 815852 | 1333 | HMMER | PFAM: EF hand | PF00036 | 22.29 | 266 | 349 |
| | | | 1.8 | | | | | |
| HTEOV90 | 870532 | 1336 | HMMER | PFAM: Core histones | PF00125 | 11.37 | 358 | 435 |
| | | | 1.8 | H2A, H2B, H3 and H4 | | | | |
| HTEOW39 | 870566 | 1338 | HMMER | PFAM: C-type lysozymes | PF00062 | 126.92 | 59 | 295 |
| | | | 1.8 | and alpha-lactabulmin | | | | |
| HTEPA08 | 958391 | 1340 | blastx.14 | (AF004430) hD54 + ins2 | gi\|2895085\|gb\|AAC9 | 47% | 225 | 482 |
| | | | | isoform [Homo sapiens] | 8478.1\| | 67% | 483 | 575 |
| HTEPE28 | 932576 | 1347 | HMMER | PFAM: metallopeptidase | PF00557 | 203 | 2 | 442 |
| | | | 2.1.1 | family M24 | | | | |
| | | | blastx.14 | (AC002387) putative | gi\|2583129\|gb\|AAB8 | 68% | 2 | 442 |
| | | | | methionine | 2638.1\| | 51% | 408 | 488 |
| | | | | aminopeptidase | | | | |
| | | | | [Arabidopsis thaliana] | | | | |
| HTEPM33 | 870561 | 1354 | HMMER | PFAM: LIM domain | PF00412 | 95.6 | 4 | 180 |
| | | | 2.1.1 | containing proteins | | | | |
| HTEPN07 | 952243 | 1356 | blastx.14 | WW domain binding | gi\|4205086\|gb\|AAD1 | 54% | 174 | 311 |
| | | | | protein-2 [Homo sapiens] | 0951.1\| | 42% | 9 | 158 |
| HTEPP30 | 947107 | 1359 | blastx.14 | (AF081947) tektin [Mus | gi\|4235350\|gb\|AAD1 | 73% | 30 | 689 |
| | | | | musculus] | 3183.1\| | 21% | 72 | 590 |
| HTEPV02 | 917406 | 1366 | HMMER | PFAM: Ank repeat | PF00023 | 30.4 | 343 | 435 |
| | | | 2.1.1 | | | | | |
| | | | blastx.14 | alt. ankyrin (variant 2.2) | gi\|747710\|emb\|CAA3 | 41% | 247 | 411 |
| | | | | [Homo sapiens] | 4611.1\| | | | |
| HTEPX32 | 870698 | 1367 | HMMER | PFAM: Double-stranded | PF00035 | 36 | 508 | 699 |
| | | | 1.8 | RNA binding motif | | | | |
| HTEQD40 | 915198 | 1371 | blastx.14 | (AC004877) sco-spondin- | gi\|3638957\|gb\|AAC3 | 30% | 278 | 171 |
| | | | | mucin-like; similar to | 6301.1\| | 33% | 266 | 195 |
| | | | | P98167 1 sapiens] | | 43% | 188 | 141 |
| | | | | | | 45% | 506 | 447 |
| | | | | | | 54% | 110 | 78 |
| | | | | | | 42% | 121 | 65 |
| | | | | | | 25% | 260 | 177 |
| HTEQE87 | 958354 | 1373 | blastx.14 | (AF132972) CGI-38 | gi\|4680715\|gb\|AAD2 | 50% | 334 | 645 |
| | | | | protein [Homo sapiens] | 7747.1\|AF132972_1 | 58% | 149 | 349 |
| HTEQP45 | 966141 | 1379 | HMMER | PFAM: HMG (high | PF00505 | 5.99 | 7 | 48 |
| | | | 1.8 | mobility group) box | | | | |
| HTEQR15 | 939641 | 1381 | HMMER | PFAM: 4 transmembrane | PF00335 | 32.9 | 174 | 455 |
| | | | 1.8 | segments integral | | | | |
| | | | | membrane proteins | | | | |
| | | | blastx.2 | (AF133424) tetraspanin | gb\|AAF08363.1\|AF1 | 74% | 141 | 698 |
| | | | | TM4-B [Homo sapiens] | 33424_1 | | | |
| HTEQT63 | 924799 | 1383 | HMMER | PFAM: Bacterial mutT | PF00293 | 3.53 | 472 | 501 |
| | | | 1.8 | protein | | | | |
| HTLCA95 | 911655 | 1398 | HMMER | PFAM: Actin | PF00022 | 345.2 | 170 | 1096 |
| | | | 2.1.1 | | | | | |
| | | | blastx. 14 | actin 2 [Echinococcus | gi\|290399\|gb\|AAC80 | 50% | 170 | 568 |
| | | | | granulosus] | 574.1\| | 42% | 761 | 1096 |
| | | | | | | 53% | 677 | 760 |
| | | | | | | 45% | 593 | 652 |
| | | | | | | 63% | 2 | 34 |
| HTLCY54 | 908832 | 1402 | HMMER | PFAM: DnaJ domain | PF00226 | 119.8 | 245 | 445 |
| | | | 2.1.1 | | | | | |
| | | | blastx.14 | (AB014888) MRJ [Homo | gi\|3402485\|dbj\|BAA3 | 67% | 239 | 616 |
| | | | | sapiens] | 2209.1\| | 78% | 797 | 934 |
| | | | | | | 47% | 632 | 694 |
| | | | | | | 40% | 611 | 691 |
| HTLDE64 | 908613 | 1407 | HMMER | PFAM: Zinc finger, C2H2 | PF00096 | 47.6 | 197 | 271 |
| | | | 2.1.1 | type | | | | |
| | | | blastx.2 | Kruppel-like factor LKLF | gb\|AAA86728.1\| | 61% | 179 | 355 |
| | | | | [Mus musculus] | | 42% | 57 | 176 |
| HTLDF33 | 909254 | 1409 | HMMER | PFAM: Zinc finger, C2H2 | PF00096 | 80.8 | 51 | 119 |
| | | | 2.1.1 | type | | | | |
| | | | blastx.2 | (AL022067) dJ134E15.1 | emb\|CAB36862.1\| | 70% | 12 | 422 |
| | | | | (Blimp-1) [Homo sapiens] | | 38% | 24 | 392 |
| HTLDG55 | 911645 | 1410 | blastx.14 | actin [Trypanosoma | gi\|161963\|gb\|AAA30 | 48% | 95 | 199 |
| | | | | brucei] | 151.1\| | 58% | 28 | 63 |
| HTLDO94 | 915223 | 1413 | blastx.14 | (AC004667) hypothetical | gi\|3668087\|gb\|AAC6 | 37% | 96 | 263 |
| | | | | protein [Arabidopsis | 1819.1\| | 34% | 108 | 263 |
| | | | | thaliana] | | 37% | 108 | 242 |
| | | | | | | 44% | 40 | 93 |
| | | | | | | 30% | 37 | 105 |
| | | | | | | 38% | 40 | 93 |
| | | | | | | 29% | 43 | 93 |
| HTLDS55 | 891322 | 1416 | HMMER | PFAM: Cell division | PF00735 | 454.7 | 233 | 1069 |
| | | | 2.1.1 | protein | | | | |
| | | | blastx.2 | (AJ250723) septin-like | emb\|CAB59833.1\| | 63% | 131 | 1054 |
| | | | | protein Sint1 [Mus | | | | |
| | | | | musculus] | | | | |
| HTLDT05 | 909752 | 1417 | HMMER | PFAM: PH domain | PF00169 | 36.9 | 59 | 271 |
| | | | 2.1.1 | | | | | |
| | | | blastx.2 | (AK000004) FLJ00004 | dbj\|BAA92229.1\| | 77% | 47 | 487 |
| | | | | protein [Homo sapiens] | | | | |
| HTLDU05 | 911649 | 1419 | HMMER | PFAM: Actins | PF00022 | 141.45 | 125 | 469 |
| | | | 1.8 | | | | | |
| | | | blastx.14 | (AF113908) actin-related | gi\|4731565\|gb\|AAD2 | 30% | 2 | 469 |
| | | | | protein [Emericella | 8502.1\|AF113908_1 | 33% | 451 | 540 |
| | | | | nidulans] | | | | |
| HTLEH30 | 934287 | 1429 | blastx.14 | (AF025310) tssk-1 and | gi\|2739052\|gb\|AAC0 | 90% | 205 | 270 |
| | | | | tssk-2 kinase substrate | 3366.1\| | 58% | 343 | 429 |
| | | | | [Mus musculus] | | 81% | 306 | 338 |
| HTLEJ11 | 973302 | 1431 | HMMER | PFAM: Eukaryotic protein | PF00069 | 55.9 | 44 | 223 |
| | | | 2.1.1 | kinase domain | | | | |
| | | | blastx.14 | (AF144573) Mx- | gi\|4868443\|gb\|AAD3 | 69% | 35 | 268 |
| | | | | interacting protein kinase | 1319.1\|AF144573_1 | 40% | 437 | 592 |
| | | | | PKM [Mesocricetus | | 42% | 293 | 397 |
| | | | | auratus] | | 38% | 877 | 939 |
| HTLET56 | 911654 | 1444 | HMMER | PFAM: Actins | PF00022 | 262.03 | 134 | 703 |
| | | | 1.8 | | | | | |
| | | | blastx. 14 | actin [Filobasidiella | gi\|508701\|gb\|AAC49 | 52% | 143 | 715 |
| | | | | neoformans] | 074.1\| | 33% | 787 | 963 |
| | | | | | | 53% | 721 | 804 |
| | | | | | | 52% | 966 | 1022 |
| HTLET78 | 836820 | 1445 | HMMER | PFAM: Proprotein | PF01483 | 216.9 | 38 | 433 |
| | | | 2.1.1 | convertase P-domain | | | | |
| HTLEV95 | 883332 | 1448 | HMMER | PFAM: Phorbol esters/ | PF00130 | 1.97 | 172 | 225 |
| | | | 1.8 | diacylglycerol binding | | | | |
| | | | | domain | | | | |
| HTLEY11 | 967309 | 1451 | blastx.14 | (AC004877) sco-spondin- | gi\|3638957\|gb\|AAC3 | 66% | 267 | 250 |
| | | | | mucin-like; similar to | 6301.1\| | | | |
| | | | | P98167 1 sapiens] | | | | |
| HTLFE05 | 954984 | 1459 | blastx.14 | (AJ007798) nuclear | gi\|5834580\|emb\|CAB | 86% | 12 | 731 |
| | | | | protein SA3 [i Homo | 55312.1\| | 65% | 589 | 924 |
| | | | | sapiens] | | | | |
| HTLFI39 | 953730 | 1462 | blastx.2 | (AF053356) ORF4 [Homo | gb\|AAC78801.1\| | 100% | 77 | 256 |
| | | | | sapiens] | | 100% | 3 | 77 |
| | | | | | | 100% | 376 | 420 |
| HTLGD25 | 870136 | 1465 | HMMER | PFAM: Ubiquitin family | PF00240 | 83.86 | 79 | 324 |
| | | | 1.8 | | | | | |
| HTLGM07 | 952254 | 1470 | HMMER | PFAM: ‘Cold-shock’ | PF00313 | 70.2 | 3 | 158 |
| | | | 2.1.1 | DNA-binding domain | | | | |
| | | | blastx.14 | (AF096834) germ cell | gi\|4837737\|gb\|AAD3 | 90% | 3 | 323 |
| | | | | specific Y-box binding | 0662.1\| | 100% | 393 | 485 |
| | | | | protein [Homo sapiens] | | 100% | 549 | 614 |
| | | | | | | 100% | 711 | 761 |
| | | | | | | 36% | 661 | 750 |
| | | | | | | 28% | 637 | 720 |
| | | | | | | 34% | 117 | 203 |
| | | | | | | 40% | 475 | 519 |
| | | | | | | 63% | 487 | 519 |
| HTLGT62 | 918606 | 1471 | blastx.14 | a6(IV) collagen [Homo | gi\|1850097\|dbj\|BAA0 | 48% | 187 | 261 |
| | | | | sapiens] | 9791.1\| | 38% | 379 | 456 |
| | | | | | | 61% | 503 | 541 |
| | | | | | | 40% | 113 | 178 |
| | | | | | | 80% | 232 | 261 |
| | | | | | | 61% | 181 | 219 |
| | | | | | | 53% | 229 | 273 |
| | | | | | | 37% | 196 | 276 |
| | | | | | | 42% | 14 | 70 |
| | | | | | | 66% | 181 | 207 |
| HTLGX90 | 870528 | 1473 | HMMER | PFAM: UBX domain | PF00789 | 20.1 | 637 | 846 |
| | | | 2.1.1 | | | | | |
| HTLHC14 | 908428 | 1474 | HMMER | PFAM: ‘Cold-shock’ | PF00313 | 36.8 | 9 | 95 |
| | | | 2.1.1 | DNA-binding domain | | | | |
| | | | blastx.14 | (AF096834) germ cell | gi\|4837737\|gb\|AAD3 | 88% | 3 | 260 |
| | | | | specific Y-box binding | 0662.1\| | 92% | 330 | 443 |
| | | | | protein [Homo sapiens] | | 62% | 424 | 528 |
| | | | | | | 100% | 539 | 577 |
| | | | | | | 37% | 539 | 625 |
| | | | | | | 34% | 397 | 483 |
| | | | | | | 50% | 519 | 572 |
| | | | | | | 70% | 584 | 613 |
| | | | | | | 28% | 509 | 634 |
| | | | | | | 23% | 342 | 479 |
| | | | | | | 34% | 54 | 140 |
| | | | | | | 37% | 460 | 531 |
| | | | | | | 30% | 256 | 363 |
| | | | | | | 30% | 402 | 479 |
| HTLHP32 | 933335 | 1478 | HMMER | PFAM: RNA recognition | PF00076 | 24.08 | 195 | 284 |
| | | | 1.8 | motif. (aka RRM, RBD, | | | | |
| | | | | or RNP domain) | | | | |
| HTLHT15 | 946586 | 1481 | blastx.14 | (AL032626) cDNA EST | gi\|3925211\|emb\|CAA | 43% | 1 | 243 |
| | | | | EMBL:D70654 comes | 21539.1\| | 66% | 287 | 358 |
| | | | | from this 1 1 1 yk377b8.3 | | 50% | 402 | 455 |
| | | | | comes f | | 58% | 235 | 270 |
| | | | | | | 39% | 240 | 308 |
| HTLHV67 | 936139 | 1484 | blastx.14 | (AF005038) secretory | gi\|5230678\|gb\|AAB6 | 83% | 152 | 475 |
| | | | | carrier membrane protein | 2723.2\| | 60% | 591 | 749 |
| | | | | [Homo sapiens] | | 96% | 465 | 542 |
| | | | | | | 66% | 2 | 46 |
| HTLHZ10 | 963475 | 1486 | blastx.14 | circumsporozoite protein | gi\|482882\|gb\|AAC46 | 37% | 3 | 137 |
| | | | | [Plasmodium vivax] | 499.1\| | 35% | 3 | 137 |
| | | | | | | 33% | 3 | 137 |
| | | | | | | 35% | 45 | 137 |
| | | | | | | 45% | 128 | 187 |
| | | | | | | 45% | 181 | 240 |
| | | | | | | 45% | 234 | 293 |
| | | | | | | 40% | 128 | 187 |
| | | | | | | 50% | 234 | 281 |
| | | | | | | 50% | 340 | 387 |
| | | | | | | 40% | 181 | 240 |
| | | | | | | 40% | 128 | 187 |
| | | | | | | 40% | 128 | 187 |
| | | | | | | 50% | 287 | 334 |
| | | | | | | 50% | 287 | 334 |
| | | | | | | 40% | 234 | 293 |
| | | | | | | 40% | 128 | 187 |
| | | | | | | 40% | 181 | 240 |
| | | | | | | 50% | 234 | 281 |
| | | | | | | 50% | 340 | 387 |
| | | | | | | 40% | 287 | 346 |
| | | | | | | 50% | 128 | 175 |
| | | | | | | 50% | 258 | 293 |
| | | | | | | 50% | 205 | 240 |
| | | | | | | 50% | 311 | 346 |
| HTLID36 | 945891 | 1488 | blastx.2 | (AC004410) fos39554_1 | gb\|AAC05601.1\| | 54% | 6 | 275 |
| | | | | [Homo sapiens] | | 71% | 292 | 417 |
| | | | | | | 57% | 257 | 319 |
| HTLIY52 | 942161 | 1495 | HMMER | PFAM: Eukaryotic protein | PF00069 | 251.19 | 166 | 933 |
| | | | 1.8 | kinase domain | | | | |
| | | | blastx.2 | serine/threonine kinase | gb\|AAA99535.1\| | 44% | 133 | 936 |
| | | | | [Mus musculus] | | | | |
| HTLJA23 | 953729 | 1496 | blastx.2 | (AF053356) ORF4 [Homo | gb\|AAC78801.1\| | 100% | 2 | 274 |
| | | | | sapiens] | | 100% | 394 | 438 |
| HTLJC71 | 922923 | 1498 | HMMER | PFAM: Src homology | PF00018 | 9.14 | 1152 | 1340 |
| | | | 1.8 | domain 3 | | | | |
| | | | blastx.2 | (AL133030) hypothetical | emb\|CAB61362.1\| | 94% | 3 | 1355 |
| | | | | protein [Homo sapiens] | | | | |
| HTLJD88 | 953714 | 1500 | blastx.14 | (AF025310) tssk-1 and | gi\|2739052\|gb\|AAC0 | 83% | 3 | 206 |
| | | | | tssk-2 kinase substrate | 3366.1\| | 74% | 554 | 715 |
| | | | | [Mus musculus] | | 95% | 263 | 391 |
| | | | | | | 72% | 516 | 548 |
| | | | | | | 77% | 468 | 494 |
| | | | | | | 63% | 510 | 542 |
| | | | | | | 32% | 260 | 334 |
| | | | | | | 60% | 21 | 50 |
| HTLJJ75 | 924755 | 1501 | HMMER | PFAM: Coenzyme A | PF01144 | 317.7 | 445 | 813 |
| | | | 2.1.1 | transferase | | | | |
| | | | blastx.14 | succinyl-CoA:alpha- | gi\|164423\|gb\|AAA31 | 85% | 448 | 813 |
| | | | | ketoacid coenzyme A | 019.1\| | 65% | 37 | 405 |
| | | | | transferase [Sus scrofa] | | 80% | 813 | 977 |
| | | | | | | 79% | 980 | 1096 |
| HTTBJ94 | 530564 | 1515 | HMMER | PFAM: Protein of | PF01871 | 63.2 | 18 | 254 |
| | | | 2.1.1 | unknown function | | | | |
| HTTCT34 | 973210 | 1521 | HMMER | PFAM: Divalent cation | PF01769 | 46.7 | 93 | 251 |
| | | | 2.1.1 | transporter | | | | |
| | | | blastx.2 | (AK000480) unnamed | dbj\|BAA91192.1\| | 89% | 466 | 972 |
| | | | | protein product [Homo | | 96% | 105 | 491 |
| | | | | sapiens] | | 58% | 861 | 1049 |
| HTTDO19 | 908937 | 1532 | HMMER | PFAM: Zinc finger, C2H2 | PF00096 | 42.8 | 22 | 90 |
| | | | 2.1.1 | type | | | | |
| | | | blastx.2 | zinc finger protein [Homo | emb\|CAA55529.1\| | 76% | 1 | 129 |
| | | | | sapiens] | | 72% | 1 | 129 |
| | | | | | | 45% | 1 | 237 |
| | | | | | | 67% | 1 | 129 |
| | | | | | | 44% | 1 | 237 |
| | | | | | | 67% | 1 | 129 |
| | | | | | | 50% | 13 | 234 |
| | | | | | | 63% | 125 | 190 |
| | | | | | | 36% | 180 | 287 |
| | | | | | | 71% | 149 | 190 |
| | | | | | | 90% | 161 | 190 |
| | | | | | | 36% | 180 | 287 |
| | | | | | | 36% | 180 | 287 |
| | | | | | | 57% | 180 | 221 |
| | | | | | | 50% | 180 | 227 |
| HTTEU68 | 967819 | 1543 | blastx.14 | glycosyl-phosphatidyl- | gi\|1098569\|gb\|AAA8 | 36% | 26 | 190 |
| | | | | inositol-anchored protein | 2599.1\| | 52% | 536 | 649 |
| | | | | homolog [Mus musculus] | | 32% | 197 | 352 |
| | | | | | | 52% | 759 | 827 |
| | | | | | | 43% | 377 | 424 |
| HTTFM66 | 950051 | 1556 | blastx.2 | (AK001269) unnamed | dbj\|BAA91592.1\| | 84% | 195 | 1124 |
| | | | | protein product [Homo | | | | |
| | | | | sapiens] | | | | |
| HTTKP07 | 911390 | 1587 | HMMER | PFAM: Src homology | PF00018 | 15.82 | 47 | 196 |
| | | | 1.8 | domain 3 | | | | |
| | | | blastx.2 | (AL049683) hypothetical | emb\|CAB41255.1\| | 51% | 8 | 289 |
| | | | | protein [Homo sapiens] | | 56% | 292 | 450 |
| HUKAC72 | 966804 | 1594 | blastx.14 | DARPP-32 = DOPAMINE | sp\|G545790\|G545790 | 81% | 73 | 309 |
| | | | | AND CAMP- | | | | |
| | | | | REGULATED | | | | |
| | | | | PHOSPHOPROTEIN. | | | | |
| HUVCQ07 | 928053 | 1612 | blastx.14 | SHB = SRC HOMOLOGY | sp\|G545100\|G545100 | 44% | 102 | 251 |
| | | | | 2 PROTEIN. | | 52% | 6 | 68 |
| HUVFH03 | 922064 | 1639 | HMMER | PFAM: FAD/NAD- | PF00175 | 6.83 | 282 | 323 |
| | | | 1.8 | binding domain in | | | | |
| | | | | oxidoreductases | | | | |
| HUVGZ77 | 909169 | 1650 | HMMER | PFAM: BTB/POZ domain | PF00651 | 51.2 | 110 | 253 |
| | | | 2.1.1 | | | | | |
| | | | blastx.14 | (AB011665) BAZF [Mus | gi\|3287501\|dbj\|BAA3 | 94% | 47 | 301 |
| | | | | musculus] | 1223.1\| | 87% | 295 | 366 |
| HUVHC93 | 908555 | 1653 | HMMER | PFAM: KRAB box | PF01352 | 152.7 | 147 | 335 |
| | | | 2.1.1 | | | | | |
| | | | blastx.14 | ha0946 protein is | gi\|498152\|dbj\|BAA06 | 64% | 135 | 362 |
| | | | | Kruppel-related. [Homo | 541.1\| | 55% | 72 | 131 |
| | | | | sapiens] | | | | |
| HVCAZ38 | 969208 | 1659 | blastx.2 | (AK000496) unnamed | dbj\|BAA91205.1\| | 64% | 395 | 159 |
| | | | | protein product [Homo | | 75% | 151 | 110 |
| | | | | sapiens] | | | | |
| HVVBK72 | 933167 | 1668 | HMMER | PFAM: UDP- | PF00201 | 70.01 | 2 | 391 |
| | | | 1.8 | glucoronosyl and UDP- | | | | |
| | | | | glucosyl transferases | | | | |
| HWLHJ68 | 957834 | 1671 | HMMER | PFAM: Zinc finger, C2H2 | PF00096 | 6.35 | 216 | 278 |
| | | | 1.8 | type | | | | |
| | | | blastx.14 | (AB012265) wizL [Mus | gi\|3551182\|dbj\|BAA3 | 55% | 201 | 314 |
| | | | | musculus] | 2790.1\| | 39% | 101 | 169 |
| HVVBY08 | 957658 | 1673 | HMMER | PFAM: Sm protein | PF01423 | 79.4 | 134 | 355 |
| | | | 2.1.1 | | | | | |
| | | | blastx.14 | (AC005258) R30783_1 | gi\|3289993\|gb\|AAC2 | 97% | 185 | 403 |
| | | | | [Homo sapiens] | 5622.1\| | 100% | 130 | 195 |
| HUVGP05 | 930892 | 1677 | blastx.14 | (AF091457) zinc finger | gi\|4557143\|gb\|AAD2 | 82% | 231 | 398 |
| | | | | protein RIN ZF [Rattus | 2522.1\|AF091457_1 | 100% | 217 | 246 |
| | | | | norvegicus] | | | | |
| HUVFI01 | 945834 | 1679 | blastx.2 | similar to human TRAMP | dbj\|BAA06540.1\| | 98% | 103 | 1212 |
| | | | | protein. [Homo sapiens] | | | | |
| HUNAF20 | 961527 | 1693 | blastx.14 | (AF184971) cytokine | gi\|6013325\|gb\|AAF01 | 100% | 382 | 278 |
| | | | | receptor homolog 1 | 320.1\|AF184971_1 | | | |
| HUNAE02 | 921132 | 1696 | blastx.14 | (AF151848) CGI-90 | gi\|4929649\|gb\|AAD3 | 100% | 2 | 94 |
| | | | | protein [Homo sapiens] | 4085.1\|AF151848_1 | | | |
| HUKEP18 | 957456 | 1710 | HMMER | PFAM: Trypsin | PF00089 | 82.96 | 729 | 361 |
| | | | 1.8 | | | | | |
| | | | blastx.2 | (AF100707) testes- | gb\|AAF22500.1\|AF1 | 100% | 118 | 588 |
| | | | | specific protein TSP50 | 00707_1 | | | |
| | | | | [Homo sapiens] | | | | |
| HUKDG10 | 968333 | 1713 | blastx.14 | F35D2.4 gene product | gi\|861294\|gb\|AAA68 | 47% | 3 | 314 |
| | | | | [Caenorhabditis elegans] | 328.1\| | | | |
| HTTJN26 | 869612 | 1744 | blastx.2 | cDNA EST yk338f6.5 | emb\|CAB04553.1\| | 35% | 587 | 345 |
| | | | | comes from this gene; | | 50% | 666 | 589 |
| | | | | cDNA EST | | | | |
| | | | | EMBL:D75296 comes | | | | |
| | | | | from this gene | | | | |
| | | | | [Caenorhabditis elegans] | | | | |
| HTTIR04 | 926772 | 1748 | blastx.14 | (AF092091) cp431 | gi\|3851160\|gb\|AAC7 | 45% | 462 | 163 |
| | | | | [Rattus norvegicus] | 2234.1\| | 26% | 195 | 118 |
| HTTDM42 | 460948 | 1762 | HMMER | PFAM: KRAB box | PF01352 | 79.1 | 282 | 401 |
| | | | 2.1.1 | | | | | |
| HTTBP62 | 932997 | 1771 | blastx.14 | (AF036705) Similar to | gi\|2749982\|gb\|AAB9 | 69% | 64 | 336 |
| | | | | phytoene desaturase; | 5172.1\| | 68% | 373 | 468 |
| | | | | coded for 1 1 1 coded for | | | | |
| HTLHK57 | 946914 | 2662 | blastx.14 | acetylcholine receptor | gi\|595481\|gb\|AAA56 | 76% | 783 | 938 |
| | | | | alpha 9 subunit [Rattus | 720.1\| | 71% | 586 | 720 |
| | | | | rattus] | | | | |
| HTLHB93 | 945862 | 1797 | blastx.2 | (AJ006692) ultra high | emb\|CAA07188.1\| | 40% | 21 | 272 |
| | | | | sulfer keratin [Homo | | 39% | 21 | 272 |
| | | | | sapiens] | | | | |
| HTLGS10 | 963458 | 1799 | blastx.14 | pro-alpha-2(I) collagen | gi\|50489\|emb\|CAA41 | 34% | 108 | 212 |
| | | | | [Mus musculus] | 205.1\| | 50% | 380 | 433 |
| | | | | | | 26% | 186 | 320 |
| | | | | | | 53% | 302 | 340 |
| HTLEQ92 | 932882 | 1804 | blastx.14 | (AL117444) hypothetical | gi\|5911890\|emb\|CAB | 100% | 6 | 107 |
| | | | | protein [Homo sapiens] | 55929.1\| | 100% | 203 | 256 |
| | | | | | | 36% | 213 | 269 |
| HTLEN77 | 772363 | 1806 | HMMER | PFAM: EF hand | PF00036 | 26.93 | 294 | 380 |
| | | | 1.8 | | | | | |
| HTLDZ81 | 778180 | 1810 | HMMER | PFAM: Tubulin | PF00091 | 12.29 | 156 | 245 |
| | | | 1.8 | | | | | |
| HTLDW27 | 961353 | 1811 | blastx.14 | (AF014461) EXO70 | gi\|2352998\|gb\|AAB6 | 95% | 239 | 601 |
| | | | | protein [Mus musculus] | 9345.1\| | 100% | 186 | 236 |
| | | | | | | 88% | 76 | 126 |
| | | | | | | 76% | 1 | 51 |
| | | | | | | 63% | 36 | 68 |
| HTLBH67 | 751985 | 1821 | HMMER | PFAM: Src homology | PF00018 | 37.78 | 16 | 162 |
| | | | 1.8 | domain 3 | | | | |
| HTFBE02 | 920507 | 1830 | HMMER | PFAM: Isopentenyl- | PF01772 | 95.6 | 103 | 291 |
| | | | 2.1.1 | diphosphate delta- | | | | |
| | | | | isomerase | | | | |
| HTEQN83 | 908528 | 1834 | HMMER | PFAM: KRAB box | PF01352 | 98.7 | 81 | 203 |
| | | | 2.1.1 | | | | | |
| | | | blastx.14 | (AL080125) hypothetical | gi\|5262560\|emb\|CAB | 62% | 75 | 251 |
| | | | | protein [Homo sapiens] | 45723.1\| | 66% | 39 | 74 |
| HTEPE35 | 948475 | 1838 | HMMER | PFAM: | PF00387 | 163.8 | 839 | 507 |
| | | | 2.1.1 | Phosphatidylinositol- | | | | |
| | | | | specific phospholipase C, | | | | |
| | | | | Y domain | | | | |
| | | | blastx.2 | 1-phosphatidylinositol- | pir\|S14113\|S14113 | 48% | 1 | 750 |
| | | | | 4,5-bisphosphate | | | | |
| | | | | phosphodiesterase 1 | | | | |
| HTEOY82 | 948845 | 1839 | blastx.14 | (AJ010949) calcium | gi\|4186073\|emb\|CAA | 97% | 165 | 374 |
| | | | | channel alpha-2-delta-C | 09423.1\| | | | |
| | | | | subunit [Mus musculus] | | | | |
| HTEMV66 | 813038 | 1852 | HMMER | PFAM: Eukaryotic protein | PF00069 | 27.8 | 154 | 315 |
| | | | 2.1.1 | kinase domain | | | | |
| HTEMU66 | 944419 | 1853 | HMMER | PFAM: Eukaryotic protein | PF00069 | 114.85 | 613 | 963 |
| | | | 1.8 | kinase domain | | | | |
| | | | blastx.2 | MEK Kinase 3 [Mus | gb\|AAB03535.1\| | 49% | 604 | 948 |
| | | | | musculus] | | 29% | 209 | 340 |
| HTEMO58 | 964769 | 1855 | blastx.14 | casein kinase 1 gamma 1 | gi\|854733\|gb\|AAC52 | 82% | 395 | 195 |
| | | | | isoform [Rattus | 200.1\| | 65% | 482 | 423 |
| | | | | norvegicus] | | 87% | 424 | 401 |
| | | | | | | 77% | 214 | 188 |
| HTEKH17 | 942526 | 1867 | blastx.2 | (AF016184) putative | gb\|AAC53331.1\| | 70% | 300 | 88 |
| | | | | pheromone receptor | | 53% | 602 | 378 |
| | | | | [Rattus norvegicus] | | 52% | 85 | 29 |
| HTEGJ74 | 765901 | 1892 | HMMER | PFAM: Tudor domain | PF00567 | 38.5 | 6 | 167 |
| | | | 2.1.1 | | | | | |
| HTEDH90 | 909165 | 1924 | HMMER | PFAM: BTB/POZ domain | PF00651 | 38.1 | 195 | 308 |
| | | | 2.1.1 | | | | | |
| | | | blastx.14 | (AF097916) HIV-1 | gi\|3860089\|gb\|AAC7 | 45% | 150 | 308 |
| | | | | inducer of short | 2973.1\| | 39% | 348 | 416 |
| | | | | transcripts binding protein | | | | |
| | | | | [Homo sapiens] | | | | |
| HTEDH42 | 615250 | 1926 | HMMER | PFAM: ADP-ribosylation | PF00025 | 156.4 | 42 | 353 |
| | | | 2.1.1 | factor family | | | | |
| HTEDF22 | 908406 | 1935 | HMMER | PFAM: Zinc finger, | PF00098 | 20.37 | 250 | 297 |
| | | | 1.8 | CCHC class | | | | |
| | | | blastx.2 | nucleic acid binding | gb\|AAA89198.1\| | 46% | 52 | 303 |
| | | | | protein [Mus sp.] | | | | |
| HTECC09 | 678659 | 1952 | HMMER | PFAM: Zinc finger, | PF00097 | 14.18 | 261 | 338 |
| | | | 1.8 | C3HC4 type (RING | | | | |
| | | | | finger) | | | | |
| | | | blastx.2 | (AF151048) HSPC214 | gb\|AAF36134.1\|AF1 | 85% | 111 | 332 |
| | | | | [Homo sapiens] | 51048_1 | | | |
| HPWTA06 | 936026 | 1982 | blastx.14 | Collagenase precursor | gi\|1742347\|dbj\|BAA1 | 100% | 624 | 454 |
| | | | | (EC 3.4.-.-). [Escherichia | 5068.1\| | 100% | 359 | 207 |
| | | | | coli] | | 100% | 457 | 362 |
| | | | | | | 58% | 216 | 115 |
| | | | | | | 64% | 169 | 86 |
| HPWSA52 | 727294 | 1983 | HMMER | PFAM: Homeobox | PF00046 | 11.67 | 215 | 262 |
| | | | 1.8 | domain | | | | |
| HPWAJ39 | 575271 | 1993 | HMMER | PFAM: Phorbol esters/ | PF00130 | 2.68 | 81 | 122 |
| | | | 1.8 | diacylglycerol binding | | | | |
| | | | | domain | | | | |
| HPRAG45 | 939849 | 2672 | HMMER | PFAM: WD domain, G- | PF00400 | 21.65 | 135 | 212 |
| | | | 1.8 | beta repeats | | | | |
| HPMGR15 | 660374 | 2040 | HMMER | PFAM: Phorbol esters/ | PF00130 | 2.84 | 307 | 333 |
| | | | 1.8 | diacylglycerol binding | | | | |
| | | | | domain | | | | |
| HPLAI10 | 968707 | 2074 | blastx.14 | AT motif-binding factor | gi\|1345408\|dbj\|BAA0 | 33% | 443 | 496 |
| | | | | [Mus musculus] | 5046.1\| | | | |
| HPJEV95 | 929723 | 2076 | HMMER | PFAM: ATP synthase A | PF00119 | 20.61 | 169 | 393 |
| | | | 1.8 | chain | | | | |
| HPJDT03 | 922815 | 2083 | HMMER | PFAM: WW/rsp5/WWP | PF00397 | 9.71 | 294 | 371 |
| | | | 1.8 | domain containing | | | | |
| | | | | proteins | | | | |
| HPJDA25 | 951281 | 2087 | blastx.2 | (AF047690) ATP-binding | gb\|AAD15748.1\| | 73% | 291 | 488 |
| | | | | cassette protein M-ABC1 | | | | |
| | | | | [Homo sapiens] | | | | |
| HPJDA25 | 951284 | 2676 | blastx.14 | (AF047690) ATP-binding | gi\|4321407\|gb\|AAD1 | 87% | 219 | 97 |
| | | | | cassette protein M-ABC1 | 5748.1\| | | | |
| | | | | [Homo sapiens] | | | | |
| HPIAQ70 | 973604 | 2130 | HMMER | PFAM: Flagella basal | PF00460 | 41.51 | 206 | 298 |
| | | | 1.8 | body rod proteins | | | | |
| | | | blastx.14 | Flagellar hook-associated | gi\|1651528\|dbj\|BAA3 | 77% | 322 | 498 |
| | | | | protein 1 (hap1). | 5891.1\| | 100% | 194 | 322 |
| | | | | [Escherichia coli] | | | | |
| HPCTD03 | 922149 | 2191 | HMMER | PFAM: Pterin 4 alpha | PF01329 | 143.1 | 6 | 305 |
| | | | 2.1.1 | carbinolamine | | | | |
| | | | | dehydratase | | | | |
| | | | blastx.14 | pterin-4a-carbinolamine | gi\|848985\|gb\|AAA69 | 62% | 18 | 311 |
| | | | | dehydratase [Homo | 662.1\| | | | |
| | | | | sapiens] | | | | |
| HPCOV68 | 911075 | 2195 | blastx.14 | (AC004500) GDF-9 | gi\|2996640\|gb\|AAC0 | 64% | 2 | 160 |
| | | | | [Homo sapiens] | 8450.1\| | | | |
| HPCAO89 | 946913 | 2196 | HMMER | PFAM: Serpins (serine | PF00079 | 53.12 | 94 | 309 |
| | | | 1.8 | protease inhibitors) | | | | |
| | | | blastx.2 | leupin [Homo sapiens] | emb\|CAA61420.1\| | 39% | 82 | 327 |
| | | | | | | 45% | 309 | 452 |
| HOVEE20 | 909030 | 2207 | HMMER | PFAM: KRAB box | PF01352 | 105.4 | 229 | 348 |
| | | | 2.1.1 | | | | | |
| | | | blastx.14 | zinc finger protein 30 | gi\|456269\|emb\|CAA8 | 67% | 193 | 348 |
| | | | | [Mus musculus | 2913.1\| | 33% | 367 | 429 |
| | | | | domesticus] | | | | |
| HOVCO50 | 932544 | 2211 | HMMER | PFAM: Zinc-binding | PF00099 | 2.22 | 464 | 508 |
| | | | 1.8 | metalloprotease domain | | | | |
| | | | blastx.14 | (AF072860) protein | gi\|3290198\|gb\|AAC2 | 82% | 458 | 577 |
| | | | | activator of the 1 | 5672.1\| | 43% | 204 | 251 |
| HOOKF04 | 925784 | 2244 | blastx.14 | (AF092091) cp431 | gi\|3851160\|gb\|AAC7 | 94% | 2 | 157 |
| | | | | [Rattus norvegicus] | 2234.1\| | 94% | 158 | 265 |
| | | | | | | 29% | 5 | 127 |
| | | | | | | 27% | 5 | 115 |
| HOOJN04 | 925783 | 2246 | blastx.14 | (AF011336) putative E1- | gi\|2944187\|gb\|AAC0 | 100% | 4 | 153 |
| | | | | E2 ATPase [Mus | 5245.1\| | | | |
| | | | | musculus] | | | | |
| HONAD02 | 859016 | 2261 | HMMER | PFAM: Polyprenyl | PF00348 | 38.5 | 753 | 905 |
| | | | 2.1.1 | synthetases | | | | |
| HOGAM56 | 908904 | 2276 | blastx.14 | ZINC FINGER [CLONE | sp\|G299838\|G299838 | 63% | 6 | 179 |
| | | | | ZNF78L1]. | | 68% | 3 | 152 |
| | | | | | | 56% | 33 | 176 |
| | | | | | | 50% | 188 | 235 |
| | | | | | | 46% | 191 | 235 |
| HOFNW65 | 815822 | 2286 | HMMER | PFAM: Calpain family | PF00648 | 34.2 | 18 | 89 |
| | | | 2.1.1 | cysteine protease | | | | |
| HOFNW07 | 953436 | 2288 | HMMER | PFAM: Cytochrome c/cl | PF01265 | 21.1 | 259 | 354 |
| | | | 2.1.1 | heme lyase | | | | |
| | | | blastx.14 | holocytochrome c-type | gi\|1209635\|gb\|AAB1 | 71% | 190 | 360 |
| | | | | synthetase [Homo | 9007.1\| | 83% | 139 | 192 |
| | | | | sapiens] | | | | |
| HOFNI10 | 964682 | 2301 | blastx.14 | similar to Human zinc- | gi\|1504012\|dbj\|BAA1 | 100% | 150 | 269 |
| | | | | finger protein, | 3205.1\| | 90% | 64 | 153 |
| | | | | BR140(P1:JC2069) | | 100% | 271 | 291 |
| | | | | [Homo sapiens] | | 66% | 293 | 319 |
| HOFNC80 | 835718 | 2303 | HMMER | PFAM: IG | PF00047 | 11.98 | 148 | 291 |
| | | | 1.8 | (immunoglobulin) | | | | |
| | | | | superfamily | | | | |
| | | | blastx | (AF111714) junctional | gb\|AAD42051.1\|AF1 | 71% | 28 | 303 |
| | | | | adhesion molecule [Bos | 11714_1 | 94% | 306 | 362 |
| | | | | taurus] | | 33% | 306 | 359 |
| HOFMT55 | 888552 | 2311 | HMMER | PFAM: Caspase | PF00619 | 43 | 111 | 239 |
| | | | 2.1.1 | recruitment domain | | | | |
| HOFMS43 | 947973 | 2313 | HMMER | PFAM: Sushi domain | PF00084 | 64 | 174 | 302 |
| | | | 2.1.1 | (SCR repeat) | | | | |
| | | | blastx.2 | porcine membrane | dbj\|BAA20476.1\| | 47% | 12 | 317 |
| | | | | cofactor protein [Sus | | | | |
| | | | | scrofa] | | | | |
| HOFMP09 | 943358 | 2315 | HMMER | PFAM: Immunoglobulin | PF00047 | 27.5 | 34 | 144 |
| | | | 2.1.1 | domain | | | | |
| | | | blastx | B-CAM [Homo sapiens] | emb\|CAA56327.1\| | 76% | 31 | 351 |
| | | | | | | 49% | 300 | 494 |
| | | | | | | 85% | 473 | 553 |
| | | | | | | 33% | 247 | 372 |
| | | | | | | 46% | 283 | 327 |
| | | | | | | 43% | 91 | 138 |
| HOFMF82 | 693987 | 2317 | HMMER | PFAM: Zinc finger, C2H2 | PF00096 | 10.91 | 44 | 106 |
| | | | 1.8 | type | | | | |
| HOFMF82 | 694062 | 2688 | HMMER | PFAM: Zinc finger, C2H2 | PF00096 | 53.7 | 372 | 440 |
| | | | 2.1.1 | type | | | | |
| HOFMF82 | 909248 | 2689 | HMMER | PFAM: Zinc finger, C2H2 | PF00096 | 48.3 | 61 | 129 |
| | | | 2.1.1 | type | | | | |
| | | | blastx.14 | zinc finger protein [Homo | gi\|495568\|gb\|AAC50 | 52% | 19 | 429 |
| | | | | sapiens] | 264.1\| | 50% | 55 | 429 |
| | | | | | | 50% | 25 | 402 |
| | | | | | | 44% | 79 | 429 |
| | | | | | | 28% | 4 | 66 |
| HOFAF25 | 942367 | 2320 | blastx.2 | (AF036696) contains | gb\|AAB88349.1\| | 39% | 289 | 969 |
| | | | | similarity to Brassica | | | | |
| | | | | oleracea non-green 1 | | | | |
| | | | | (GB:U13632) | | | | |
| | | | | [Caenorhabditis elegans] | | | | |
| HODFF88 | 974911 | 2341 | HMMER | PFAM: Eukaryotic protein | PF00069 | 101.43 | 98 | 370 |
| | | | 1.8 | kinase domain | | | | |
| | | | blastx.14 | mixed-lineage protein | pir\|S32467\|JU0229 | 74% | 131 | 493 |
| | | | | kinase 1 - human | | 81% | 763 | 921 |
| | | | | | | 30% | 751 | 915 |
| HODFD73 | 909812 | 2343 | HMMER | PFAM: GTPase-activator | PF00616 | 34 | 190 | 390 |
| | | | 2.1.1 | protein for Ras-like | | | | |
| | | | | GTPase | | | | |
| | | | blastx.14 | (AB016962) synGAP-b1 | gi\|4417207\|dbj\|BAA7 | 98% | 4 | 480 |
| | | | | [Rattus norvegicus] | 4972.1\| | | | |
| HODCZ64 | 745966 | 2357 | blastx.2 | elastin like protein | emb\|CAA59990.1\| | 75% | 3 | 86 |
| | | | | [Drosophila melanogaster] | | 42% | 364 | 405 |
| | | | | | | 42% | 358 | 399 |
| HODAK55 | 745532 | 2383 | HMMER | PFAM: ATPases | PF00004 | 60.69 | 11 | 157 |
| | | | 1.8 | associated with various | | | | |
| | | | | cellular activities (AAA) | | | | |
| HOCPH02 | 917453 | 2400 | HMMER | PFAM: Zinc finger, | PF00097 | 8.27 | 265 | 309 |
| | | | 1.8 | C3HC4 type (RING | | | | |
| | | | | finger) | | | | |
| HNIAB26 | 974750 | 2412 | blastx.14 | PR-1-like protein | gi\|166861\|gb\|AAA32 | 37% | 388 | 143 |
| | | | | [Arabidopsis thaliana] | 863.1\| | | | |
| HLWFB01 | 915399 | 2419 | blastx.14 | (AL117637) hypothetical | gi\|5912226\|emb\|CAB | 94% | 155 | 328 |
| | | | | protein [Homo sapiens] | 56026.1\| | | | |
| HLWBC21 | 869611 | 2443 | HMMER | PFAM: Src homology | PF00018 | 3.29 | 350 | 379 |
| | | | 1.8 | domain 3 | | | | |
| HLWBA27 | 931387 | 2445 | blastx.14 | (AF070657) glutathione | gi\|4454690\|gb\|AAD2 | 93% | 89 | 286 |
| | | | | S-transferase subunit 13 | 0963.1\| | 75% | 486 | 533 |
| | | | | homolog [Homo sapiens] | | 100% | 277 | 306 |
| HLWAW86 | 941397 | 2692 | HMMER | PFAM: Integrins alpha | PF00357 | 163.29 | 115 | 459 |
| | | | 1.8 | chain | | | | |
| HLWAR08 | 959139 | 2448 | HMMER | PFAM: Ank repeat | PF00023 | 13.97 | 3 | 44 |
| | | | 1.8 | | | | | |
| HLWAL31 | 971312 | 2693 | HMMER | PFAM: Leucine rich | PF01463 | 51.7 | 317 | 466 |
| | | | 2.1.1 | repeat C-terminal domain | | | | |
| | | | blastx.2 | (AF133270) SLIT2 | gb\|AAD25539.1\|AF1 | 89% | 77 | 565 |
| | | | | [Homo sapiens] | 33270_1 | 37% | 77 | 481 |
| | | | | | | 35% | 92 | 505 |
| | | | | | | 30% | 92 | 553 |
| | | | | | | 72% | 495 | 524 |
| | | | | | | 57% | 493 | 534 |
| HJMAU07 | 961623 | 2466 | blastx.14 | (AB016088) RNA binding | gi\|5821145\|dbj\|BAA8 | 75% | 321 | 1 |
| | | | | protein [Homo sapiens] | 3714.1\| | | | |
| HETLF29 | 909762 | 2471 | HMMER | PFAM: Eukaryotic protein | PF00069 | 143.18 | 6 | 416 |
| | | | 1.8 | kinase domain | | | | |
| | | | blastx.14 | similar to cAMP- | gi\|3878636\|emb\|CAA | 56% | 6 | 416 |
| | | | | dependant protein kinase; | 88953.1\| | | | |
| | | | | cDNA EST 1 1 1 | | | | |
| HETBE61 | 965638 | 2483 | blastx.14 | (AF151833) CGI-75 | gi\|4929619\|gb\|AAD3 | 88% | 347 | 526 |
| | | | | protein [Homo sapiens] | 4070.1\|AF151833_1 | 77% | 247 | 339 |
| | | | | | | 93% | 318 | 365 |
| | | | | | | 81% | 215 | 262 |
| HEQCC01 | 924849 | 2488 | blastx.14 | (AF151878) CGI-120 | gi\|4929709\|gb\|AAD3 | 73% | 892 | 422 |
| | | | | protein [Homo sapiens] | 4115.1\|AF151878_1 | 69% | 343 | 266 |
| HEQBG85 | 827915 | 2492 | HMMER | PFAM: Peroxidases | PF00141 | 24.44 | 13 | 162 |
| | | | 1.8 | | | | | |
| HEQAD73 | 914044 | 2500 | blastx.14 | (AL023286) hypothetical | gi\|3116115\|emb\|CAA | 38% | 319 | 444 |
| | | | | protein | 18866.1\| | 39% | 463 | 546 |
| | | | | [Schizosaccharomyces | | 70% | 203 | 232 |
| | | | | pombe] | | | | |
| HEPCB04 | 941270 | 2502 | blastx.14 | (AF153605) androgen | gi\|5231135\|gb\|AAD4 | 97% | 524 | 387 |
| | | | | induced protein [Homo | 1087.1\|AF153605_1 | | | |
| | | | | sapiens] | | | | |
| HEPAJ04 | 933091 | 2513 | blastx.14 | (AL034368) predicted | gi\|4760337\|emb\|CAB | 44% | 95 | 148 |
| | | | | using hexExon; L779.3,1 | 39078.2\| | 87% | 302 | 325 |
| | | | | | | 50% | 201 | 236 |
| | | | | | | 50% | 1 | 42 |
| | | | | | | 45% | 230 | 262 |
| HEGBC03 | 922550 | 2516 | blastx.14 | similar to collagen | gi\|3873667\|emb\|CAA | 57% | 252 | 293 |
| | | | | [Caenorhabditis elegans] | 94874.1\| | 66% | 229 | 255 |
| HEEAX09 | 912065 | 2525 | HMMER | PFAM: lipocalins | PF00061 | 12.2 | 86 | 205 |
| | | | 1.8 | | | | | |
| | | | blastx.14 | epididymal secretory | gi\|56117\|emb\|CAA42 | 39% | 86 | 208 |
| | | | | protein I (ESP I) [Rattus | 493.1\| | 39% | 8 | 76 |
| | | | | norvegicus] | | 33% | 206 | 259 |
| HEEAG51 | 930810 | 2533 | blastx.14 | (AF083108) sirtuin type 3 | gi\|5225322\|gb\|AAD4 | 82% | 94 | 282 |
| | | | | [Homo sapiens] | 0851.1\|AF083108_1 | 75% | 260 | 295 |
| HUCOMM05 | 925952 | 2554 | HMMER | PFAM: Src homology | PF00018 | 59.48 | 178 | 342 |
| | | | 1.8 | domain 3 | | | | |
| | | | blastx.2 | epidermal growth factor | gb\|AAA62280.1\| | 46% | 445 | 840 |
| | | | | receptor kinase substrate | | 43% | 115 | 435 |
| | | | | [Homo sapiens] | | 23% | 43 | 222 |
| HCHOX63 | 957690 | 2556 | blastx.14 | CDC42 GTPase- | gi\|409027\|gb\|AAA16 | 64% | 112 | 597 |
| | | | | activating protein [Homo | 142.1\| | 78% | 661 | 702 |
| | | | | sapiens] | | | | |
| HCHNW48 | 862478 | 2557 | HMMER | PFAM: Laminin B | PF00052 | 1.52 | 230 | 289 |
| | | | 1.8 | (Domain IV) | | | | |
| HCHMW18 | 966985 | 2559 | blastx.14 | (AB017614) OASIS | gi\|4519621\|dbj\|BAA7 | 100% | 538 | 386 |
| | | | | protein [Mus musculus] | 5670.1\| | 68% | 440 | 222 |
| | | | | | | 39% | 308 | 240 |
| HCHMI15 | 935298 | 2562 | blastx.14 | PSD-95/SAP90-associated | gi\|1864093\|gb\|AAB4 | 52% | 181 | 582 |
| | | | | protein-4 [Rattus | 8590.1\| | 75% | 682 | 825 |
| | | | | norvegicus] | | 91% | 584 | 691 |
| | | | | | | 50% | 620 | 667 |
| HCHAI62 | 743411 | 2570 | HMMER | PFAM: Core histones | PF00125 | 8.45 | 2 | 76 |
| | | | 1.8 | H2A, H2B, H3 and H4 | | | | |
| HCDMC22 | 672815 | 2578 | HMMER | PFAM: Core histones | PF00125 | 9.49 | 182 | 241 |
| | | | 1.8 | H2A, H2B, H3 and H4 | | | | |
| HBGTT76 | 903653 | 2619 | HMMER | PFAM: Ank repeat | PF00023 | 62.3 | 197 | 295 |
| | | | 2.1.1 | | | | | |
| | | | blastx.14 | (AJ133120) Proline rich | gi\|5262748\|emb\|CAB | 72% | 131 | 556 |
| | | | | synapse associated protein | 45688.1\| | 47% | 499 | 561 |
| | | | | 2 [Rattus norvegicus] | | | | |
| HBGMT82 | 954374 | 2624 | blastx.14 | (AJ004801) very large | gi\|2653311\|emb\|CAA | 37% | 187 | 267 |
| | | | | virion protein (tegument) | 06097.1\| | 35% | 91 | 201 |
| | | | | [Bovine herpesvirus type | | 32% | 91 | 201 |
| | | | | 1.1] | | | | |
| HBGDF39 | 861602 | 2631 | HMMER | PFAM: Response | PF00072 | 44.82 | 158 | 355 |
| | | | 1.8 | regulator receiver domain | | | | |
| HBCPV80 | 932817 | 2639 | HMMER | PFAM: WW domain | PF00397 | 64.2 | 71 | 160 |
| | | | 2.1.1 | | | | | |
| HAQCD07 | 958959 | 2649 | blastx.14 | (AC005581) R31237_1, | gi\|3510234\|gb\|AAC3 | 100% | 1 | 108 |
| | | | | partial CDS [Homo | 3487.1\| | | | |
| | | | | sapiens] | | | | |

[0088] Table 2 further characterizes certain encoded polypeptides of the invention, by providing the results of comparisons to protein and protein family databases. The first column provides a unique clone identifier, “Clone ID NO:”, corresponding to a cDNA clone disclosed in Table 1A. The second column provides the unique contig indentifier, “Contig ID:” which allows correlation with the information in Table 1A. The third column provides the sequence identifier, “SEQ ID NO: X”, for the contig polynucleotide sequences. The fourth column provides the analysis method by which the homology/identity disclosed in the row was determined. The fifth column provides a description of PFam/NR hits having significant matches identified by each analysis. Column six provides the accession number of the PFam/NR hit disclosed in the fifth column. Column seven, “Score/Percent Identity”, provides a quality score or the percent identity, of the hit disclosed in column five. Comparisons were made between polypeptides encoded by polynucleotides of the invention and a non-redundant protein database (herein referred to as “NR”), or a database of protein families (herein referred to as “PFam”), as described below.

[0089] The NR database, which comprises the NBRF PIR database, the NCBI GenPept database, and the SIB SwissProt and TrEMBL databases, was made non-redundant using the computer program nrdb2 (Warren Gish, Washington University in Saint Louis). Each of the polynucleotides shown in Table 1A, column 3 (e.g., SEQ ID NO: X or the ‘Query’sequence) was used to search against the NR database. The computer program BLASTX was used to compare a 6-frame translation of the Query sequence to the NR database (for information about the BLASTX algorithm please see Altshul et al., J. Mol. Biol. 215:403-410 (1990), and Gish et al., Nat. Genet. 3:266-272 (1993)). A description of the sequence that is most similar to the Query sequence (the highest scoring ‘Subject’) is shown in column five of Table 2 and the database accession number for that sequence is provided in column six. The highest scoring ‘Subject’ is reported in Table 2 if (a) the estimated probability that the match occurred by chance alone is less than 1.0 e-07, and (b) the match was not to a known repetitive element. BLASTX returns alignments of short polypeptide segments of the Query and Subject sequences which share a high degree of similarity; these segments are known as High-Scoring Segment Pairs or HSPs. Table 2 reports the degree of similarity between the Query and the Subject for each HSP as a percent identity in Column 7. The percent identity is determined by dividing the number of exact matches between the two aligned sequences in the HSP, dividing by the number of Query amino acids in the HSP and multiplying by 100. The polynucleotides of SEQ ID NO: X which encode the polypeptide sequence that generates an HSP are delineated by columns 8 and 9 of Table 2.

[0090] The PFam database, PFam version 5.2, (Sonnhammer et al., Nucl. Acids Res., 26:320-322, (1998)) consists of a series of multiple sequence alignments; one alignment for each protein family. Each multiple sequence alignment is converted into a probability model called a Hidden Markov Model, or HMM, that represents the position-specific variation among the sequences that make up the multiple sequence alignment (see, e.g., R. Durbin et al., Biological sequence analysis: probabilistic models of proteins and nucleic acids, Cambridge University Press, 1998 for the theory of HMMs). The program HMMER version 1.8 (Sean Eddy, Washington University in Saint Louis) was used to compare the predicted protein sequence for each Query sequence (SEQ ID NO: Y in Table 1A) to each of the HMMs derived from PFam version 5.2. A HMM derived from PFam version 5.2 was said to be a significant match to a polypeptide of the invention if the score returned by HMMER 1.8 was greater than 0.8 times the HMMER 1.8 score obtained with the most distantly related known member of that protein family. The description of the PFam family which shares a significant match with a polypeptide of the invention is listed in column 5 of Table 2, and the database accession number of the PFam hit is provided in column 6. Column 7 provides the score returned by HMMER version 1.8 for the alignment. Columns 8 and 9 delineate the polynucleotides of SEQ ID NO: X which encode the polypeptide sequence which shows a significant match to a PFam protein family.

[0091] As mentioned, columns 8 and 9 in Table 2, “NT From” and “NT To”, delineate the polynucleotides of “SEQ ID NO: X” that encode a polypeptide having a significant match to the PFam/NR database as disclosed in the fifth column of Table 2. In one embodiment, the invention provides a protein comprising, or alternatively consisting of, a polypeptide encoded by the polynucleotides of SEQ ID NO: X delineated in columns 8 and 9 of Table 2. Also provided are polynucleotides encoding such proteins, and the complementary strand thereto.

[0092] The nucleotide sequence SEQ ID NO: X and the translated SEQ ID NO: Y are sufficiently accurate and otherwise suitable for a variety of uses well known in the art and described further below. For instance, the nucleotide sequences of SEQ ID NO: X are useful for designing nucleic acid hybridization probes that will detect nucleic acid sequences contained in SEQ ID NO: X or the cDNA contained in Clone ID NO: Z. These probes will also hybridize to nucleic acid molecules in biological samples, thereby enabling immediate applications in chromosome mapping, linkage analysis, tissue identification and/or typing, and a variety of forensic and diagnostic methods of the invention. Similarly, polypeptides identified from SEQ ID NO: Y may be used to generate antibodies which bind specifically to these polypeptides, or fragments thereof, and/or to the polypeptides encoded by the cDNA clones identified in, for example, Table 1A.

[0093] Nevertheless, DNA sequences generated by sequencing reactions can contain sequencing errors. The errors exist as misidentified nucleotides, or as insertions or deletions of nucleotides in the generated DNA sequence. The erroneously inserted or deleted nucleotides cause frame shifts in the reading frames of the predicted amino acid sequence. In these cases, the predicted amino acid sequence diverges from the actual amino acid sequence, even though the generated DNA sequence may be greater than 99.9% identical to the actual DNA sequence (for example, one base insertion or deletion in an open reading frame of over 1000 bases).

[0094] Accordingly, for those applications requiring precision in the nucleotide sequence or the amino acid sequence, the present invention provides not only the generated nucleotide sequence identified as SEQ ID NO: X, and a predicted translated amino acid sequence identified as SEQ ID NO: Y, but also a sample of plasmid DNA containing cDNA Clone ID NO: Z (deposited with the ATCC on Oct. 5, 2000, and receiving ATCC designation numbers PTA 2574 and PTA 2575; deposited with the ATCC on Jan. 5, 2001, having the depositor reference numbers TS-1, TS-2, AC-1, and AC-2; and/or as set forth, for example, in Table 1A, 6 and 7). The nucleotide sequence of each deposited clone can readily be determined by sequencing the deposited clone in accordance with known methods. Further, techniques known in the art can be used to verify the nucleotide sequences of SEQ ID NO: X.

[0095] The predicted amino acid sequence can then be verified from such deposits. Moreover, the amino acid sequence of the protein encoded by a particular clone can also be directly determined by peptide sequencing or by expressing the protein in a suitable host cell containing the deposited human cDNA, collecting the protein, and determining its sequence.

[0096] RACE Protocol For Recovery of Full-Length Genes

[0097] Partial cDNA clones can be made full-length by utilizing the rapid amplification of cDNA ends (RACE) procedure described in Frohman, M.A., et al., Proc. Nat'l. Acad. Sci. USA, 85:8998-9002 (1988). A cDNA clone missing either the 5′ or 3′ end can be reconstructed to include the absent base pairs extending to the translational start or stop codon, respectively. In some cases, cDNAs are missing the start codon of translation. The following briefly describes a modification of this original 5′ RACE procedure. Poly A+ or total RNA is reverse transcribed with Superscript II (Gibco/BRL) and an antisense or complementary primer specific to the cDNA sequence. The primer is removed from the reaction with a Microcon Concentrator (Amicon). The first-strand cDNA is then tailed with dATP and terminal deoxynucleotide transferase (Gibco/BRL). Thus, an anchor sequence is produced which is needed for PCR amplification. The second strand is synthesized from the dA-tail in PCR buffer, Taq DNA polymerase (Perkin-Elmer Cetus), an oligo-dT primer containing three adjacent restriction sites (XhoI, SalI and ClaI) at the 5′ end and a primer containing just these restriction sites. This double-stranded cDNA is PCR amplified for 40 cycles with the same primers as well as a nested cDNA-specific antisense primer. The PCR products are size-separated on an ethidium bromide-agarose gel and the region of gel containing cDNA products the predicted size of missing protein-coding DNA is removed. cDNA is purified from the agarose with the Magic PCR Prep kit (Promega), restriction digested with XhoI or SalI, and ligated to a plasmid such as pBluescript SKII (Stratagene) at XhoI and EcoRV sites. This DNA is transformed into bacteria and the plasmid clones sequenced to identify the correct protein-coding inserts. Correct 5′ ends are confirmed by comparing this sequence with the putatively identified homologue and overlap with the partial cDNA clone. Similar methods known in the art and/or commercial kits are used to amplify and recover 3′ ends.

[0098] Several quality-controlled kits are commercially available for purchase. Similar reagents and methods to those above are supplied in kit form from Gibco/BRL for both 5′ and 3′ RACE for recovery of full length genes. A second kit is available from Clontech which is a modification of a related technique, SLIC (single-stranded ligation to single-stranded cDNA), developed by Dumas et al., Nucleic Acids Res., 19:5227-32 (1991). The major differences in procedure are that the RNA is alkaline hydrolyzed after reverse transcription and RNA ligase is used to join a restriction site-containing anchor primer to the first-strand cDNA. This obviates the necessity for the dA-tailing reaction which results in a polyT stretch that is difficult to sequence past.

[0099] An alternative to generating 5′ or 3′ cDNA from RNA is to use cDNA library double-stranded DNA. An asymmetric PCR-amplified antisense cDNA strand is synthesized with an antisense cDNA-specific primer and a plasmid-anchored primer. These primers are removed and a symmetric PCR reaction is performed with a nested cDNA-specific antisense primer and the plasmid-anchored primer.

[0100] RNA Ligase Protocol for Generating the 5′ or 3′ End Sequences to Obtain Full Length Genes

[0101] Once a gene of interest is identified, several methods are available for the identification of the 5′ or 3′ portions of the gene which may not be present in the original cDNA plasmid. These methods include, but are not limited to, filter probing, clone enrichment using specific probes and protocols similar and identical to 5′ and 3′ RACE. While the full length gene may be present in the library and can be identified by probing, a useful method for generating the 5′ or 3′ end is to use the existing sequence information from the original cDNA to generate the missing information. A method similar to 5′ RACE is available for generating the missing 5′ end of a desired full-length gene. (This method was published by Fromont-Racine et al., Nucleic Acids Res., 21(7):1683-1684 (1993)). Briefly, a specific RNA oligonucleotide is ligated to the 5′ ends of a population of RNA presumably containing full-length gene RNA transcript. A primer set containing a primer specific to the ligated RNA oligonucleotide and a primer specific to a known sequence of the gene of interest, is used to PCR amplify the 5′ portion of the desired full length gene which may then be sequenced and used to generate the full length gene. This method starts with total RNA isolated from the desired source, poly A RNA may be used but is not a prerequisite for this procedure. The RNA preparation may then be treated with phosphatase if necessary to eliminate 5′ phosphate groups on degraded or damaged RNA which may interfere with the later RNA ligase step. The phosphatase, if used, is then inactivated and the RNA is treated with tobacco acid pyrophosphatase in order to remove the cap structure present at the 5′ ends of messenger RNAs. This reaction leaves a 5′ phosphate group at the 5′ end of the cap cleaved RNA which can then be ligated to an RNA oligonucleotide using T4 RNA ligase. This modified RNA preparation can then be used as a template for first strand cDNA synthesis using a gene specific oligonucleotide. The first strand synthesis reaction can then be used as a template for PCR amplification of the desired 5′ end using a primer specific to the ligated RNA oligonucleotide and a primer specific to the known sequence of the reproductive system antigen of interest. The resultant product is then sequenced and analyzed to confirm that the 5′ end sequence belongs to the relevant reproductive system antigen.

[0102] The present invention also relates to vectors or plasmids, which include such DNA sequences, as well as the use of the DNA sequences. The material deposited with the ATCC (deposited with the ATCC on Oct. 5, 2000, and receiving ATCC designation numbers PTA 2574 and PTA 2575; deposited with the ATCC on Jan. 5, 2001, having the depositor reference numbers TS-1, TS-2, AC-1, and AC-2; and/or as set forth, for example, in Table 1A, 6 and 7) is a mixture of cDNA clones derived from a variety of human tissue and cloned in either a plasmid vector or a phage vector, as shown, for example, in Table 7. These deposits are referred to as “the deposits” herein. The tissues from which some of the clones were derived are listed in Table 7, and the vector in which the corresponding cDNA is contained is also indicated in Table 7. The deposited material includes cDNA clones corresponding to SEQ ID NO: X described, for example, in Table 1A (Clone ID NO: Z). A clone which is isolatable from the ATCC Deposits by use of a sequence listed as SEQ ID NO: X, may include the entire coding region of a human gene or in other cases such clone may include a substantial portion of the coding region of a human gene. Furthermore, although the sequence listing may in some instances list only a portion of the DNA sequence in a clone included in the ATCC Deposits, it is well within the ability of one skilled in the art to sequence the DNA included in a clone contained in the ATCC Deposits by use of a sequence (or portion thereof) described in, for example Tables 1A or 2 by procedures hereinafter further described, and others apparent to those skilled in the art.

[0103] Also provided in Table 7 is the name of the vector which contains the cDNA clone. Each vector is routinely used in the art. The following additional information is provided for convenience.

[0104] Vectors Lambda Zap (U.S. Pat. Nos. 5,128,256 and 5,286,636), Uni-Zap XR (U.S. Pat. Nos. 5,128,256 and 5,286,636), Zap Express (U.S. Pat. Nos. 5,128,256 and 5,286,636), pBluescript (pBS) (Short, J. M. et al., Nucleic Acids Res. 16:7583-7600 (1988); Alting-Mees, M. A. and Short, J. M., Nucleic Acids Res. 17:9494 (1989)) and pBK (Alting-Mees, M. A. et al., Strategies 5:58-61 (1992)) are commercially available from Stratagene Cloning Systems, Inc., 11011 N. Torrey Pines Road, La Jolla, Calif., 92037. pBS contains an ampicillin resistance gene and pBK contains a neomycin resistance gene. Phagemid pBS may be excised from the Lambda Zap and Uni-Zap XR vectors, and phagemid pBK may be excised from the Zap Express vector. Both phagemids may be transformed into E. coli strain XL-1 Blue, also available from Stratagene.

[0105] Vectors pSport1, pCMVSport 1.0, pCMVSport 2.0 and pCMVSport 3.0, were obtained from Life Technologies, Inc., P. O. Box 6009, Gaithersburg, Md. 20897. All Sport vectors contain an ampicillin resistance gene and may be transformed into E. coli strain DH10B, also available from Life Technologies. See, for instance, Gruber, C. E., et al., Focus 15:59-(1993). Vector lafmid BA (Bento Soares, Columbia University, New York, N.Y.) contains an ampicillin resistance gene and can be transformed into E. coli strain XL-1 Blue. Vector pCR®2.1, which is available from Invitrogen, 1600 Faraday Avenue, Carlsbad, Calif. 92008, contains an ampicillin resistance gene and may be transformed into E. coli strain DH10B, available from Life Technologies. See, for instance, Clark, J. M., Nuc. Acids Res. 16:9677-9686 (1988) and Mead, D. et al., Bio/Technology 9: (1991).

[0106] The present invention also relates to the genes corresponding to SEQ ID NO: X, SEQ ID NO: Y, and/or the deposited clone (Clone ID NO: Z). The corresponding gene can be isolated in accordance with known methods using the sequence information disclosed herein. Such methods include preparing probes or primers from the disclosed sequence and identifying or amplifying the corresponding gene from appropriate sources of genomic material.

[0107] Also provided in the present invention are allelic variants, orthologs, and/or species homologs. Procedures known in the art can be used to obtain full-length genes, allelic variants, splice variants, full-length coding portions, orthologs, and/or species homologs of reproductive system associated genes corresponding to SEQ ID NO: X or the complement thereof, polypeptides encoded by SEQ ID NO: X or the complement thereof, and/or the cDNA contained in Clone ID NO: Z, using information from the sequences disclosed herein or the clones deposited with the ATCC. For example, allelic variants and/or species homologs may be isolated and identified by making suitable probes or primers from the sequences provided herein and screening a suitable nucleic acid source for allelic variants and/or the desired homologue.

[0108] The polypeptides of the invention can be prepared in any suitable manner. Such polypeptides include isolated naturally occurring polypeptides, recombinantly produced polypeptides, synthetically produced polypeptides, or polypeptides produced by a combination of these methods. Means for preparing such polypeptides are well understood in the art.

[0109] The polypeptides may be in the form of the secreted protein, including the mature form, or may be a part of a larger protein, such as a fusion protein (see below). It is often advantageous to include an additional amino acid sequence which contains secretory or leader sequences, pro-sequences, sequences which aid in purification, such as multiple histidine residues, or an additional sequence for stability during recombinant production.

[0110] The polypeptides of the present invention are preferably provided in an isolated form, and preferably are substantially purified. A recombinantly produced version of a polypeptide, including the secreted polypeptide, can be substantially purified using techniques described herein or otherwise known in the art, such as, for example, by the one-step method described in Smith and Johnson, Gene 67:31-40 (1988). Polypeptides of the invention also can be purified from natural, synthetic or recombinant sources using techniques described herein or otherwise known in the art, such as, for example, antibodies of the invention raised against the reproductive system polypeptides of the present invention in methods which are well known in the art.

[0111] The present invention provides a polynucleotide comprising, or alternatively consisting of, the nucleic acid sequence of SEQ ID NO: X, and/or the cDNA sequence contained in Clone ID NO: Z. The present invention also provides a polypeptide comprising, or alternatively, consisting of, the polypeptide sequence of SEQ ID NO: Y, a polypeptide encoded by SEQ ID NO: X or a complement thereof, a polypeptide encoded by the cDNA contained in Clone ID NO: Z, and/or the polypeptide sequence encoded by a nucleotide sequence in SEQ ID NO: B as defined in column 6 of Table 1B. Polynucleotides encoding a polypeptide comprising, or alternatively consisting of the polypeptide sequence of SEQ ID NO: Y, a polypeptide encoded by SEQ ID NO: X, a polypeptide encoded by the cDNA contained in Clone ID NO: Z and/or a polypeptide sequence encoded by a nucleotide sequence in SEQ ID NO: B as defined in column 6 of Table 1B are also encompassed by the invention. The present invention further encompasses a polynucleotide comprising, or alternatively consisting of, the complement of the nucleic acid sequence of SEQ ID NO: X, a nucleic acid sequence encoding a polypeptide encoded by the complement of the nucleic acid sequence of SEQ ID NO: X, and/or the cDNA contained in Clone ID NO: Z.

[0112] Moreover, representative examples of polynucleotides of the invention comprise, or alternatively consist of, one, two, three, four, five, six, seven, eight, nine, ten, or more of the sequences delineated in Table 1B column 6, or any combination thereof. Additional, representative examples of polynucleotides of the invention comprise, or alternatively consist of, one, two, three, four, five, six, seven, eight, nine, ten, or more of the complementary strand(s) of the sequences delineated in Table 1B column 6, or any combination thereof. In further embodiments, the above-described polynucleotides of the invention comprise, or alternatively consist of, sequences delineated in Table 1B, column 6, and have a nucleic acid sequence which is different from that of the BAC fragment having the sequence disclosed in SEQ ID NO: B (see Table 1B, column 5). In additional embodiments, the above-described polynucleotides of the invention comprise, or alternatively consist of, sequences delineated in Table 1B, column 6, and have a nucleic acid sequence which is different from that published for the BAC clone identified as BAC ID NO: A (see Table 1B, column 4). In additional embodiments, the above-described polynucleotides of the invention comprise, or alternatively consist of, sequences delineated in Table 1B, column 6, and have a nucleic acid sequence which is different from that contained in the BAC clone identified as BAC ID NO: A (see Table 1B, column 4). Polypeptides encoded by these polynucleotides, other polynucleotides that encode these polypeptides, and antibodies that bind these polypeptides are also encompassed by the invention. Additionally, fragments and variants of the above-described polynucleotides and polypeptides are also encompassed by the invention.

[0113] Further, representative examples of polynucleotides of the invention comprise, or alternatively consist of, one, two, three, four, five, six, seven, eight, nine, ten, or more of the sequences delineated in column 6 of Table 1B which correspond to the same Clone ID NO: Z (see Table 1B, column 1), or any combination thereof. Additional, representative examples of polynucleotides of the invention comprise, or alternatively consist of, one, two, three, four, five, six, seven, eight, nine, ten, or more of the complementary strand(s) of the sequences delineated in column 6 of Table 1B which correspond to the same Clone ID NO: Z (see Table 1B, column 1), or any combination thereof. In further embodiments, the above-described polynucleotides of the invention comprise, or alternatively consist of, sequences delineated in column 6 of Table 1B which correspond to the same Clone ID NO: Z (see Table 1B, column 1) and have a nucleic acid sequence which is different from that of the BAC fragment having the sequence disclosed in SEQ ID NO: B (see Table 1B, column 5). In additional embodiments, the above-described polynucleotides of the invention comprise, or alternatively consist of, sequences delineated in column 6 of Table 1B which correspond to the same Clone ID NO: Z (see Table 1B, column 1) and have a nucleic acid sequence which is different from that published for the BAC clone identified as BAC ID NO: A (see Table 1B, column 4). In additional embodiments, the above-described polynucleotides of the invention comprise, or alternatively consist of, sequences delineated in column 6 of Table 1B which correspond to the same Clone ID NO: Z (see Table 1B, column 1) and have a nucleic acid sequence which is different from that contained in the BAC clone identified as BAC ID NO: A (see Table 1B, column 4). Polypeptides encoded by these polynucleotides, other polynucleotides that encode these polypeptides, and antibodies that bind these polypeptides are also encompassed by the invention. Additionally, fragments and variants of the above-described polynucleotides and polypeptides are also encompassed by the invention.

[0114] Further, representative examples of polynucleotides of the invention comprise, or alternatively consist of, one, two, three, four, five, six, seven, eight, nine, ten, or more of the sequences delineated in column 6 of Table 1B which correspond to the same contig sequence identifer SEQ ID NO: X (see Table 1B, column 2), or any combination thereof. Additional, representative examples of polynucleotides of the invention comprise, or alternatively consist of, one, two, three, four, five, six, seven, eight, nine, ten, or more of the complementary strand(s) of the sequences delineated in column 6 of Table 1B which correspond to the same contig sequence identifer SEQ ID NO: X (see Table 1B, column 2), or any combination thereof. In further embodiments, the above-described polynucleotides of the invention comprise, or alternatively consist of, sequences delineated in column 6 of Table 1B which correspond to the same contig sequence identifer SEQ ID NO: X (see Table 1B, column 2) and have a nucleic acid sequence which is different from that of the BAC fragment having the sequence disclosed in SEQ ID NO: B (see Table 1B, column 5). In additional embodiments, the above-described polynucleotides of the invention comprise, or alternatively consist of, sequences delineated in column 6 of Table 1B which correspond to the same contig sequence identifer SEQ ID NO: X (see Table 1B, column 2) and have a nucleic acid sequence which is different from that published for the BAC clone identified as BAC ID NO: A (see Table 1B, column 4). In additional embodiments, the above-described polynucleotides of the invention comprise, or alternatively consist of, sequences delineated in column 6 of Table 1B which correspond to the same contig sequence identifer SEQ ID NO: X (see Table 1B, column 2) and have a nucleic acid sequence which is different from that contained in the BAC clone identified as BAC ID NO: A (See Table 1B, column 4). Polypeptides encoded by these polynucleotides, other polynucleotides that encode these polypeptides, and antibodies that bind these polypeptides are also encompassed by the invention. Additionally, fragments and variants of the above-described polynucleotides and polypeptides are also encompassed by the invention.

[0115] Moreover, representative examples of polynucleotides of the invention comprise, or alternatively consist of, one, two, three, four, five, six, seven, eight, nine, ten, or more of the sequences delineated in the same row of Table 1B column 6, or any combination thereof. Additional, representative examples of polynucleotides of the invention comprise, or alternatively consist of, one, two, three, four, five, six, seven, eight, nine, ten, or more of the complementary strand(s) of the sequences delineated in the same row of Table 1B column 6, or any combination thereof. In preferred embodiments, the polynucleotides of the invention comprise, or alternatively consist of, one, two, three, four, five, six, seven, eight, nine, ten, or more of the complementary strand(s) of the sequences delineated in the same row of Table 1B column 6, wherein sequentially delineated sequences in the table (i.e. corresponding to those exons located closest to each other) are directly contiguous in a 5′ to 3′ orientation. In further embodiments, above-described polynucleotides of the invention comprise, or alternatively consist of, sequences delineated in the same row of Table 1B, column 6, and have a nucleic acid sequence which is different from that of the BAC fragment having the sequence disclosed in SEQ ID NO: B (see Table 1B, column 5). In additional embodiments, the above-described polynucleotides of the invention comprise, or alternatively consist of, sequences delineated in the same row of Table 1B, column 6, and have a nucleic acid sequence which is different from that published for the BAC clone identified as BAC ID NO: A (see Table 1B, column 4). In additional embodiments, the above-described polynucleotides of the invention comprise, or alternatively consist of, sequences delineated in the same row of Table 1B, column 6, and have a nucleic acid sequence which is different from that contained in the BAC clone identified as BAC ID NO: A (see Table 1B, column 4). Polypeptides encoded by these polynucleotides, other polynucleotides that encode these polypeptides, and antibodies that bind these polypeptides are also encompassed by the invention.

[0116] In additional specific embodiments, polynucleotides of the invention comprise, or alternatively consist of, one, two, three, four, five, six, seven, eight, nine, ten, or more of the sequences delineated in column 6 of Table 1B, and the polynucleotide sequence of SEQ ID NO: X (e.g., as defined in Table 1B, column 2) or fragments or variants thereof. Polypeptides encoded by these polynucleotides, other polynucleotides that encode these polypeptides, and antibodies that bind these polypeptides are also encompassed by the invention.

[0117] In additional specific embodiments, polynucleotides of the invention comprise, or alternatively consist of, one, two, three, four, five, six, seven, eight, nine, ten, or more of the sequences delineated in column 6 of Table 1B which correspond to the same Clone ID NO: Z (see Table 1B, column 1), and the polynucleotide sequence of SEQ ID NO: X (e.g., as defined in Table 1A or 1B) or fragments or variants thereof. In preferred embodiments, the delineated sequence(s) and polynucleotide sequence of SEQ ID NO: X correspond to the same Clone ID NO: Z. Polypeptides encoded by these polynucleotides, other polynucleotides that encode these polypeptides, and antibodies that bind these polypeptides are also encompassed by the invention.

[0118] In further specific embodiments, polynucleotides of the invention comprise, or alternatively consist of, one, two, three, four, five, six, seven, eight, nine, ten, or more of the sequences delineated in the same row of column 6 of Table 1B, and the polynucleotide sequence of SEQ ID NO: X (e.g., as defined in Table 1A or 1B) or fragments or variants thereof. In preferred embodiments, the delineated sequence(s) and polynucleotide sequence of SEQ ID NO: X correspond to the same row of column 6 of Table 1B. Polypeptides encoded by these polynucleotides, other polynucleotides that encode these polypeptides, and antibodies that bind these polypeptides are also encompassed by the invention.

[0119] In additional specific embodiments, polynucleotides of the invention comprise, or alternatively consist of a polynucleotide sequence in which the 3′ 10 polynucleotides of one of the sequences delineated in column 6 of Table 1B and the 5′ 10 polynucleotides of the sequence of SEQ ID NO: X are directly contiguous. Nucleic acids which hybridize to the complement of these 20 contiguous polynucleotides under stringent hybridization conditions or alternatively, under lower stringency conditions, are also encompassed by the invention. Polypeptides encoded by these polynucleotides and/or nucleic acids, other polynucleotides and/or nucleic acids that encode these polypeptides, and antibodies that bind these polypeptides are also encompassed by the invention. Additionally, fragments and variants of the above-described polynucleotides, nucleic acids, and polypeptides are also encompassed by the invention.

[0120] In additional specific embodiments, polynucleotides of the invention comprise, or alternatively consist of, a polynucleotide sequence in which the 3′ 10 polynucleotides of one of the sequences delineated in column 6 of Table 1B and the 5′ 10 polynucleotides of a fragment or variant of the sequence of SEQ ID NO: X are directly contiguous Nucleic acids which hybridize to the complement of these 20 contiguous polynucleotides under stringent hybridization conditions or alternatively, under lower stringency conditions, are also encompassed by the invention. Polypeptides encoded by these polynucleotides and/or nucleic acids, other polynucleotides and/or nucleic acids encoding these polypeptides, and antibodies that bind these polypeptides are also encompassed by the invention. Additionally, fragments and variants of the above-described polynucleotides, nucleic acids, and polypeptides are also encompassed by the invention.

[0121] In specific embodiments, polynucleotides of the invention comprise, or alternatively consist of, a polynucleotide sequence in which the 3′ 10 polynucleotides of the sequence of SEQ ID NO: X and the 5′ 10 polynucleotides of the sequence of one of the sequences delineated in column 6 of Table 1B are directly contiguous. Nucleic acids which hybridize to the complement of these 20 contiguous polynucleotides under stringent hybridization conditions or alternatively, under lower stringency conditions, are also encompassed by the invention. Polypeptides encoded by these polynucleotides and/or nucleic acids, other polynucleotides and/or nucleic acids encoding these polypeptides, and antibodies that bind these polypeptides are also encompassed by the invention. Additionally, fragments and variants of the above-described polynucleotides, nucleic acids, and polypeptides are also encompassed by the invention.

[0122] In specific embodiments, polynucleotides of the invention comprise, or alternatively consist of, a polynucleotide sequence in which the 3′ 10 polynucleotides of a fragment or variant of the sequence of SEQ ID NO: X and the 5′ 10 polynucleotides of the sequence of one of the sequences delineated in column 6 of Table 1B are directly contiguous. Nucleic acids which hybridize to the complement of these 20 contiguous polynucleotides under stringent hybridization conditions or alternatively, under lower stringency conditions, are also encompassed by the invention. Polypeptides encoded by these polynucleotides and/or nucleic acids, other polynucleotides and/or nucleic acids encoding these polypeptides, and antibodies that bind these polypeptides are also encompassed by the invention. Additionally, fragments and variants of the above-described polynucleotides, nucleic acids, and polypeptides, are also encompassed by the invention.

[0123] In further specific embodiments, polynucleotides of the invention comprise, or alternatively consist of, a polynucleotide sequence in which the 3′ 10 polynucleotides of one of the sequences delineated in column 6 of Table 1B and the 5′ 10 polynucleotides of another sequence in column 6 are directly contiguous. Nucleic acids which hybridize to the complement of these 20 contiguous polynucleotides under stringent hybridization conditions or alternatively, under lower stringency conditions, are also encompassed by the invention. Polypeptides encoded by these polynucleotides and/or nucleic acids, other polynucleotides and/or nucleic acids encoding these polypeptides, and antibodies that bind these polypeptides are also encompassed by the invention. Additionally, fragments and variants of the above-described polynucleotides, nucleic acids, and polypeptides are also encompassed by the invention.

[0124] In specific embodiments, polynucleotides of the invention comprise, or alternatively consist of, a polynucleotide sequence in which the 3′ 10 polynucleotides of one of the sequences delineated in column 6 of Table 1B and the 5′ 10 polynucleotides of another sequence in column 6 corresponding to the same Clone ID NO: Z (see Table 1B, column 1) are directly contiguous. Nucleic acids which hybridize to the complement of these 20 lower stringency conditions, are also encompassed by the invention. Polypeptides encoded by these polynucleotides and/or nucleic acids, other polynucleotides and/or nucleic acids encoding these polypeptides, and antibodies that bind these polypeptides are also encompassed by the invention. Additionally, fragments and variants of the above-described polynucleotides, nucleic acids, and polypeptides are also encompassed by the invention.

[0125] In specific embodiments, polynucleotides of the invention comprise, or alternatively consist of, a polynucleotide sequence in which the 3′ 10 polynucleotides of one sequence in column 6 corresponding to the same contig sequence identifer SEQ ID NO: X (see Table 1B, column 2) are directly contiguous. Nucleic acids which hybridize to the complement of these 20 contiguous polynucleotides under stringent hybridization conditions or alternatively, under lower stringency conditions, are also encompassed by the invention. Polypeptides encoded by these polynucleotides and/or nucleic acids, other polynucleotides and/or nucleic acids encoding these polypeptides, and antibodies that bind these polypeptides are also encompassed by the invention. Additionally, fragments and variants of the above-described polynucleotides, nucleic acids, and polypeptides are also encompassed by the invention.

[0126] In specific embodiments, polynucleotides of the invention comprise, or alternatively consist of a polynucleotide sequence in which the 3′ 10 polynucleotides of one of the sequences delineated in column 6 of Table 1B and the 5′ 10 polynucleotides of another sequence in column 6 corresponding to the same row are directly contiguous. In preferred embodiments, the 3′ 10 polynucleotides of one of the sequences delineated in column 6 of Table 1B is directly contiguous with the 5′ 10 polynucleotides of the next sequential exon delineated in Table 1B, column 6. Nucleic acids which hybridize to the complement of these 20 contiguous polynucleotides under stringent hybridization conditions or alternatively, under lower stringency conditions, are also encompassed by the invention. Polypeptides encoded by these polynucleotides and/or nucleic acids, other polynucleotides and/or nucleic acids encoding these polypeptides, and antibodies that bind these polypeptides are also encompassed by the invention. Additionally, fragments and variants of the above-described polynucleotides, nucleic acids, and polypeptides are also encompassed by the invention.

[0127] Many polynucleotide sequences, such as EST sequences, are publicly available and accessible through sequence databases and may have been publicly available prior to conception of the present invention. Preferably, such related polynucleotides are specifically excluded from the scope of the present invention. Accordingly, for each contig sequence (SEQ ID NO: X) listed in the third column of Table 1A, preferably excluded are one or more polynucleotides comprising a nucleotide sequence described by the general formula of a−b, where a is any integer between 1 and the final nucleotide minus 15 of SEQ ID NO: X, b is an integer of 15 to the final nucleotide of SEQ ID NO: X, where both a and b correspond to the positions of nucleotide residues shown in SEQ ID NO: X, and where b is greater than or equal to a+14. More specifically, preferably excluded are one or more polynucleotides comprising a nucleotide sequence described by the general formula of a−b, where a and b are integers as defined in columns 4 and 5, respectively, of Table 3. In specific embodiments, the polynucleotides of the invention do not consist of at least one, two, three, four, five, ten, or more of the specific polynucleotide sequences referenced by the Genbank Accession No. as disclosed in column 6 of Table 3 (including for example, published sequence in connection with a particular BAC clone). In further embodiments, preferably excluded from the invention are the specific polynucleotide sequence(s) contained in the clones corresponding to at least one, two, three, four, five, ten, or more of the available material having the accession numbers identified in the sixth column of this Table (including for example, the actual sequence contained in an identified BAC clone). In no way is this listing meant to encompass all of the sequences which may be excluded by the general formula, it is just a representative example. All references available through these accessions are hereby incorporated by reference in their entirety.

TABLE 3

| | SEQ | | | | |
|---|---|---|---|---|---|
| | ID | | EST Disclaimer | | |
| Clone ID | NO: | Contig | Range | Range | |
| NO:Z | X | ID; | of a | of b | Accession #'s |

| | | | | | | |
|---|---|---|---|---|---|---|
| H7MCE35 | 11 | 928554 | 1-59 | 15-73 | | |
| H7MDC49 | 12 | 722780 | 1-148 | 15-162 | AI139000, AA884996, AA889649, and AA724461. | |
| H7MDD72 | 13 | 847688 | 1-592 | 15-606 | AW182856, AI218191, AA834537, AA804628, AA827835, AF034780, and E07989. | |
| HAOSH55 | 14 | 952380 | 1-694 | 15-708 | AI681511, AA677498, AI799484, AI360937, AI378075, AI457270, AI363333, AI681227, | |
| | | | | | AI806180, AI363339, AA972313, AA627925, AI984311, AA483815, N25951, AI250808, | |
| | | | | | AI417147, AW297301, AI079688, AW009637, AI289263, AA768395, AA769533, AW085089, | |
| | | | | | AW368116, AW067835, AI110587, N26848, W15533, AI129095, AW298190, AI300955, | |
| | | | | | AI870137, AW410019, AI808400, AA748383, AA479673, AW269239, AA281561, AA807144, | |
| | | | | | AW291197, AW373450, and N42781. | |
| HAQAK73 | 15 | 764671 | 1-728 | 15-742 | H93040, H93056, AA719305, AA808945, AI342677, AA742815, AC006581, AP000045, | |
| | | | | | AP000113, AC007684, AC002404, AC003070, AC003042, AP000327, AC003043, AC005829, | |
| | | | | | AB023048, AP000123, AP000170, AP000055, AC007066, AC002350, AC005399, AL135744, | |
| | | | | | AC005031, AF001549, AC004913, Z95114, AL031663, AL008729, Z97054, AL133355, | |
| | | | | | AC000381, AC005207, AC009516, U80017, Z81370, AC006023, AC006449, AC005296, | |
| | | | | | AC005069, AC000118, AC004821, AC006146, AC005037, AC006441, AL109798, AL031432, | |
| | | | | | AL080243, AC004819, AL109627, AC002477, and AC004882. | |
| HAQAM17 | 16 | 664979 | 1-347 | 15-361 | | |
| HAQBF84 | 17 | 783259 | 1-56 | 15-70 | | |
| HAQBJ71 | 18 | 839982 | 1-409 | 15-423 | | |
| HAQBQ50 | 19 | 522004 | 1-83 | 15-97 | | |
| HAQBS37 | 20 | 847519 | 1-710 | 15-724 | AW168869, and AI904433. | |
| HAUBD69 | 21 | 529711 | 1-121 | 15-135 | | |
| HAUBU10 | 22 | 968339 | 1-324 | 15-338 | AW419224, AW419225, and AW419223. | |
| HBCJS08 | 23 | 957826 | 1-492 | 15-506 | AL119483, AA809125, AL119444, AA835346, AA188940, AC016027, AC016830, AC005529, | |
| | | | | | AC005261, AC004531, AC005255, AC006137, AC006080, AL049874, AL132777, L44140, | |
| | | | | | AL031983, AC006515, AC004659, Z85987, AC005531, AF134726, AC006441, AC004858, | |
| | | | | | AF053356, AP000552, AC005740, AP000503, AC012627, AC004882, AC003108, AC007934, | |
| | | | | | AL049758, AC005181, AF109907, AC004033, AC005091, AC007685, AC005971, AC003663, | |
| | | | | | AC005274, AC005089, AL049829, AC006449, U96629, AC004973, AL049872, AC007283, | |
| | | | | | AC005057, AC004231, AL035413, AL078638, AC006023, AC005815, AL031311, AL023803, | |
| | | | | | AC005821, AL049780, AL031228, AC005919, AP000555, AL049631, AC004895, AC005072, | |
| | | | | | AC005736, AL021155, AL022165, AL133448, AL133245, AC007055, AL008718, AC004526, | |
| | | | | | AC007065, AL049776, U07563, AL035681, AP000114, AP000046, AF205588, AC005231, | |
| | | | | | AC005841, AC004491, AC007193, AC007878, AL031591, AF038458, AL049869, AC012384, | |
| | | | | | AC003002, AL133485, AL109984, AC004983, AL121653, AC005049, AG005839, AC002418, | |
| | | | | | AC004386, D84401, AC003037, AC002091, AL049538, AC002070, AF045555, Z93244, | |
| | | | | | AC006468, AL022316, AC006141, AC004854, AC005067, AC005768, AC007993, AL008719, | |
| | | | | | AC004522, AC004099, AC006512, AC005088, AC004884, AL031427, AD000092, AC005624, | |
| | | | | | AL109758, Z70281, AC004859, AC005081, AL079295, AC002425, AB026898, AC004985, | |
| | | | | | AL035072, AC005484, AC004816, AC005914, AL121754, AC004890, AC005746, AL121757, | |
| | | | | | Z86090, AL109627, AL133163, AC000003, AC009721, Z82250, AC007057, and AC005071. | |
| HBCPD14 | 24 | 963634 | 1-127 | 15-141 | | |
| HBCQJ03 | 25 | 922401 | 1-124 | 15-138 | AW392670, Z99396, AL119319, AL036418, AL036858, AW372827, AW384394, AL119457, | |
| | | | | | AL119483, AL119324, AW363220, AL119484, AL119391, AL119497, AL119522, U46351, | |
| | | | | | AL119418, AL119355, AL119443, AL119363, AL037094, AL119341, U46341, AL134902, | |
| | | | | | AL119396, U46349, AL119401, U46350, U46347, AL042551, AL037205, AL119335, | |
| | | | | | AL119496, AL119439, AL134536, AL036196, AL037082, AL119444, AL134525, AL036268, | |
| | | | | | U46346, AL038837, AL042614, AL134920, AL043019, AL042984, AL037051, AL042965, | |
| | | | | | AL042975, AL036725, AL042544, AA631969, AL119399, AL134538, U46345, AL042542, | |
| | | | | | AL043029, AL042450, AL043003, AL036924, AL037526, AL119464, AR066494, AR060234, | |
| | | | | | A81671, AB026436, AD001527, AR054110, AR023813, AR064707, and AR069079. | |
| HBCQS90 | 26 | 951787 | 1-507 | 15-521 | AA191298, AW364854, AI205727, R16601, and AI188004. | |
| HBCQS93 | 27 | 930682 | 1-607 | 15-621 | AA703200, W88470, and Z39990. | |
| HBGBD28 | 28 | 525846 | 1-314 | 15-328 | | |
| HBGBFS6 | 29 | 957870 | 1-240 | 15-254 | | |
| HBGBG42 | 30 | 922396 | 1-689 | 15-703 | N33183, AA169202, AI393342, AW172574, AA731731, AI961101, AA872188, W17122, | |
| | | | | | AI219418, AA609341, AA485152, AW293905, AI221103, AI910881, AW195626, AA856740, | |
| | | | | | AA767183, AW072218, AA929018, AI338682, AA836394, AA448345, AW293908, AI264116, | |
| | | | | | W26762, AA766127, AA761418, H30745, AA315954, AI022328, AI032738, AI203338, | |
| HBGBH43 | 31 | 524532 | 1-183 | 15-197 | AI863446, AI188331, AW014913, AI073437, AW291378, AI130693,AI768987, and | |
| HBGBS07 | 32 | 954299 | 1-403 | 15-417 | AA229977, N41881, N23545, H78888, H54240, AW270016, and AAS69612. | |
| HBGBT79 | 33 | 525352 | 1-318 | 15-332 | | |
| HBGBW60 | 34 | 954916 | 1-555 | 15-569 | AI808278, AI697307, AI936570, AW167940, AI379188, AI669686, AI751739, AW450137, | |
| | | | | | AI868311, AI203915, AW182104, AW014255, AI766481, AI821507, AA548667, AA194990, | |
| | | | | | AF061970, U81600, and X52875. | |
| HBGBW72 | 35 | 524956 | 1-321 | 15-335 | | |
| HBGDA44 | 36 | 525618 | 1-493 | 15-507 | | |
| HBGDE85 | 37 | 524875 | 1-125 | 15-139 | | |
| HBGDS13 | 38 | 971696 | 1-245 | 15-259 | | |
| HBGDT43 | 39 | 974223 | 1-433 | 15-447 | AI567076, AW270343, AA169263, AW275510, AI801482, AA362511, AI933534, AA847499, | |
| | | | | | AA580808, AA226363, AA502104, AI311927, AA569471, AL042753, AL048925, AA502860, | |
| | | | | | AI133297, AI499588, AW021583, AA531079, AW248819, F25733, AW341900, AA101689, | |
| | | | | | R86151, AA494102, AA482923, AA715255, AA715267, AA516222, AA758934, AI783494, | |
| | | | | | AA602047, AI751216, AA664909, T60681, AA320966, AL119691, AA428792, AA828042, | |
| | | | | | AI445674, AW062724, AA493695, AW302013, AA469451, AI281881, AW193461, AI919265, | |
| | | | | | AA484679, AA632612, AI085719, AA601202, AA653375, AA491862, AA713891, AI687343, | |
| | | | | | AA491650, AI584186, AA468456, AA757775, AW438643, AL036037, AA577959, AI873990, | |
| | | | | | AA568869, AA515334, AA668807, AA508359, AI872020, AW023990, AA643455, AI282511, | |
| | | | | | AA658362, AA724333, H73082, AI538870, AW073060, AA908687, AA487621, AA493621, | |
| | | | | | AA620467, AI471887, AI368256, AI240168, AI345157, AL038705, AA683238, AI568678, | |
| | | | | | H71429, AA662225, AA470969, AI797903, AA488746, AA719292, AA846952, AA804925, | |
| | | | | | AW084466, F27407, AA837791, AI589461, AA747594, AI933299, AI564454, AI924872, | |
| | | | | | AA572713, AI708139, AA490183, AA019312, AI583283, AI054343, AL042547, AW274349, | |
| | | | | | AA811153, AA446544, F17555, AA368059, AW050498, AI338350, AA478355, AA773472, | |
| | | | | | AA634889, AA502155, AA665021, AI247199, AI559251, R02632, AA484373, AW050734, | |
| | | | | | AW235497, R40056, AW193265, AW273218, AW021207, AI472222, AA633753, AW408047, | |
| | | | | | AW303196, AI350211, AW301809, AA668639, AA584581, AA573725, AW247819, AI669453, | |
| | | | | | AA805846, T06754, 109071, AA623002, AW104030, AA806796, AA773902, AA577906, | |
| | | | | | AI625647, AA515909, AI521679, AW302903, AA483223, AI801600, AA581903, AW075948, | |
| | | | | | AI692808, AA503600, AI284640, AI589230, AI744995, AI860013, AW407578, AA629874, | |
| | | | | | AW327868, AI702314, AA181823, AA704009, AA189117, AA743716, AL135377, AL044858, | |
| | | | | | AI859742, AA179944, AI110844, AI110770, AW300625, AI754658, AL119984, AI354388, | |
| | | | | | AI285576, AI873852, AI903462, AA487417, N64587, AW131155, AW301350, AA578861, | |
| | | | | | AA493708, AW196064, AI241821, AL119166, T74382, AI807762, AI381253, AA828767, | |
| | | | | | AI656840, AA501615, AA758366, AL078634, U82671, AP000569, AP000301, AC006255, | |
| | | | | | AP000114, AP000045, AC005668, AG007556, AC007878, AC005191, AF085954, AC005089, | |
| | | | | | AC005261, AL133276, U67827, X75335, AC006571, Z68278, AF039906, AL022320, | |
| | | | | | AL049758, AC007286, AC012599, AC004230, AC002310, AC005385, U62317, Z97053, | |
| | | | | | AC004112, AL022316, AC010200, AC002091, AL031283, AF107885, AC005284, AC005406, | |
| | | | | | Z84484, AL049776, Z98949, AC005295, AL078603, L29074, AL049853, AC005296, U67825, | |
| | | | | | X55929, M22900, AC004076, AL050348, AL049736, AL022725, AB0 14079, AD000833, | |
| | | | | | AL121778, U29953, Z82245, Z69713, AF002993, Z92845, AL133494, AC005306, U76377, | |
| | | | | | Z92846, AC006139, AC002384, AL022311, AF104455, AC007033, AP000339, AF157623, | |
| | | | | | AP000326, AL008728, AC004389, AF038458, AF095725, AP000054, AP000169, AP000123, | |
| | | | | | AP000495, AP000122, AP000217, AL022717, AC005162, AC004991, AP000345, AC003686, | |
| | | | | | AC004842, AC004150, AC004466, AF196972, AL035696, AP000689, AL031588, AL049557, | |
| | | | | | AC005589, AL049697, Z85986, AP000346, AC005837, AL022721, AC006529, AC009399, | |
| | | | | | AC005028, AC004554, AP000493, AC005071, AC005332, AC006042, X55931, AC011625, | |
| | | | | | AL049545, D63507, AF067122, AC003108, AC005765, AC007792, AC000070, AC005514, | |
| | | | | | AC005920, AC007297, AC006312, AC002316, AC004161, U95739, AL023575, Z95113, | |
| | | | | | AL110502, AC006538, AP000517, AC007567, AL021977, D83989, U18390, X55932, | |
| | | | | | AC003029, AL109799, AC005193, AC002119, AL049759, AL035252, Z22650, D83737, | |
| | | | | | AC004615, AC007364, AF001298, AB003151, Z69666, U75285, AC005745, AL022168, | |
| | | | | | Z54146, AP000298, AC004693, Z68869, AB023052, Z69838, Z54334, AF015723, Z97634, | |
| | | | | | Z82976, AC007787, AC006138, AC004152, AC004678, AC004490, AC005790, AC008975, | |
| | | | | | AF006752, AC004036, AC005620, AC002314, AF039907, AC002984, AC005175, AC004205, | |
| | | | | | AC007565, AC004210, AC007229, AL049856, AP000401, AC003960, AC005781, AC005619, | |
| | | | | | AL080242, AP000261, AL031273, AC006388, AC006561, AC005072, AF146367, AC002390, | |
| | | | | | AC004455, AC004650, AC004901, AC004024, Z99569, AL096794, AC004149, Z97988, | |
| | | | | | Z97196, AC002559, AP000246, AL024474, AF190465, AL008710, AL031594, AL022240, | |
| | | | | | AP000035, AP000044, AP000112, AP000513, AP000100, AP000159, AP000017, AP000508, | |
| | | | | | AC004522, AL050341, Z99916, AC006004, AC002115, AC004584, AL009051, AF124523, | |
| | | | | | AC006037, AC004226, AL050401, AC007242, AL049699, AC006539, AC002468, AC005532, | |
| | | | | | AC010209, AC004815, AC006458, AC003982, AC005996, AC005045, AL031295, AC005247, | |
| | | | | | AC006019, AC004933, Z97056, AL034561, AC005244, AL078624, AF118808, AF207550, | |
| | | | | | AC007228, and AC004883. | |
| HBGFA62 | 40 | 954306 | 1-628 | 15-642 | AI479262, AW082836, AA877924, AA513292, AA700228, AI244885, AL041763, AI345227, | |
| | | | | | AW275318, D25718, AW001271, AI902419, AA687630, AI349742, AI306060, AI309420, | |
| | | | | | AI307478, AI343141, AW075033, AI266766, AI371550, and AW075142. | |
| HBGMD05 | 41 | 870189 | 1-575 | 15-589 | AW393804, AW001436, W42981, AI766185, AA706041, AI365102, AI380655, AW290901, | |
| | | | | | and AI126989. | |
| HBGMD62 | 42 | 933763 | 1-315 | 15-329 | Z98258. | |
| HBGMF10 | 43 | 966132 | 1-555 | 15-569 | AA532449, AA043318, AI872402, AI524324, AA527086, AA514662, AA659799, AA971274, | |
| | | | | | AA470758, AA602448, AI022054, AA861977, AI636322, AI865691, AI209021, AI055999, | |
| | | | | | AA640580, AA053310, T52958, AI313402, AA058606, AW166625, AW004703, AI348693, | |
| | | | | | AA436104, T61144, T52957, AL696664, AA043317, AW449638, AA129864, AI499456, | |
| | | | | | AI972817, AI424348, AI918494, and AA436005. | |
| HBGMG29 | 44 | 845194 | 1-328 | 15-342 | | |
| HBGMZ39 | 45 | 947112 | 1-588 | 15-602 | AI820661, AI79 1493, AA989356, AI791282, AI732537, AI792053, AW207804, R22360, | |
| | | | | | R72427, AA505927, R22019, and R72474. | |
| HBGNA08 | 46 | 958257 | 1-223 | 15-237 | | |
| HBGND09 | 47 | 848219 | 1-1164 | 15-1178 | AA781868, AW152318, AA482996, AA909463, AA758672, and AF156271. | |
| HBGNJ14 | 48 | 914594 | 1-317 | 15-331 | AC004156. | |
| HBGNM13 | 49 | 912730 | 1-348 | 15-362 | AW177440, C14389, T03269, AI905856, AW352117, AW179328, AW360811, AW178893, | |
| | | | | | AW366296, AW375405, D58283, AW378532, D59859, D80022, C14331, D80166, D80195, | |
| | | | | | AW177501, D80193, D59927, D59467, D51423, D59619, AW177511, D80210, D51799, | |
| | | | | | D80391, D80164, D59275, D80240, D80253, D80043, D59787, D80227, D59502, D81030, | |
| | | | | | D80212, D80196, D80188, D80219, C14014, AW176467, C15076, D80038, D80269, D59610, | |
| | | | | | D57483, D80366, AA305409, C14429, D51022, D50979, D50995, D59889, AW178762, | |
| | | | | | D80024, AW377671, D80378, AW178775, AW360844, D80045, AW360817, AA305578, | |
| | | | | | D51060, AW375406, AW378534, AW179332, AW377672, AW179023, AW178905, D80134, | |
| | | | | | D81026, D51097, AW352170, AW352158, AW352171, AW377676, AW177731, AW178907, | |
| | | | | | AW178906, D80248, AW179019, AW179024, D80522, AA514186, AA514188, C75259, | |
| | | | | | D80133, AW177505, AW179020, D58253, AW178909, AW177456, D80251, AW179329, | |
| | | | | | AW178980, AW177733, AW378528, AW178908, AW178754, AW179018, D80132, | |
| | | | | | AW367967, D80268, AW179004, D80302, AW178914, AW178911, D80439, D80247, | |
| | | | | | AW178774, AW352174, T48593, AW177723, AW178983, D51103, AW367950, AW178986, | |
| | | | | | AI535850, D45260, X82626, A84916, A67220, D89785, A62300, A62298, Y17188, A78862, | |
| | | | | | D34614, D26022, D88547, AJ132110, AR018138, X67155, A25909, AR025207, AB028859, | |
| | | | | | AR008278, Y12724, AF058696, AB012117, A94995, AR008443, A85396, AR066482, I18367, | |
| | | | | | A44171, A85477, I19525, A86792, I50126, I50132, I50128, I50133, X93549, AR066488, | |
| | | | | | D88507, A82595, AR066490, AR016514, D13509, D50010, AR060138, A45456, A26615, | |
| | | | | | AR052274, Y09669, AR060385, AB002449, AR066487, A43192, A43190, AR038669, A30438, | |
| | | | | | AR008408, U79457, AR060133, AF135125, and AR008382. | |
| HBGNO07 | 50 | 952212 | 1-369 | 15-383 | AA488707, AA129219, H49568, AI345366, AI310873, AA476397, AA535216, AA086368, | |
| | | | | | AI268334, AI268336, AW021583, AI500453, AA420998, AA421078, AA657835, AL041345, | |
| | | | | | T11634, AA601327, AA431949, AI762314, AA676971, AW157005, AA346367, AI537041, | |
| | | | | | AW008450, AA600869, AA346368, AI051037, AA493621, AA527209, AA186329, AA533281, | |
| | | | | | AA186367, AA579367, AA683238, AA418861, AI884383, AA744018, AA776899, N23392, | |
| | | | | | AL038736, AA478716, N29455, AI702314, AW276835, AA833896, AA833875, AA484373, | |
| | | | | | H56430, AI028510, AA992126, AA579208, AW189384, H49091, AI469599, AA522642, | |
| | | | | | AI590580, AL031710, AC007617, D32060, AC004859, AC008372, AL079340, U52112, | |
| | | | | | AL022311, AC002364, Z74739, AC005089, AL023575, AL031779, AL033522, AL035086, | |
| | | | | | AC011331, Z93783, Z82249, AL022237, AL049643, AD000684, AC002128, AL080242, | |
| | | | | | AC000056, AL022150, AL049538, AC005800, AL109657, AC002565, AL022312, AC007242, | |
| | | | | | AP001054, AL031296, AL024498, AC002312, AC005189, AC004032, AF048729, AC007787, | |
| | | | | | AC004017, AC007999, AL022320, U78027, AC004548, AC005091, AC005833, AL035422, | |
| | | | | | AC000029, AC0075 10, AC006013, AL121769, AL022165, AC004887, AC007055, AC009498, | |
| | | | | | U47621, AC006166, AB023051, AC004099, AC005027, AP000512, AL031466, U89337, | |
| | | | | | Z95113, AF129756, AB007944, AC004699, Z97054, AC005066, AP000505, AC002997, | |
| | | | | | AC002511, AC006057, AC005254, AP000348, AC005619, AP000220, AP000159, AP000084, | |
| | | | | | AC005095, AL031846, AL078593, AL133485, AC006316, AC004033, Z97053, AC002465, | |
| | | | | | AC005609, AC007879, AC005011, AC006064, AC005237, AC005234, AC005158, AL022330, | |
| | | | | | Z99716, AL109984, U73635, U07561, AC004462, AC003072, AC004030, AC002984, | |
| | | | | | AC005387, AL121934, AF184110, AL109952, AC004656, AC005219, AC004771, AL031594, | |
| | | | | | Z98048, AC003688, AC008103, AL008715, AC003103, AC007326, AC006597, AF128525, | |
| | | | | | Z93023, AL021155, L77570, AL050310, AL031005, AC004408, AC002996, AC004796, | |
| | | | | | AC003964, AC005608, Z84480, AC003982, AL022326, AB023049, AL031295, AC004822, | |
| | | | | | AC007845, AC005738, AL021528, AL133245, AL121653, AL049636, AC005880, AC004984, | |
| | | | | | AC005399, AC005666, AC004832, AC005220, AC005411, AL031120, AC007325, AC016025, | |
| | | | | | AC004805, AC006059, Z98050, AC016026, AL135744, AL109865, AC007156, AC005323, and | |
| | | | | | Z95114. | |
| HBGNQ31 | 51 | 887152 | 1-355 | 15-369 | AI097455, AW073155, AI690321, AA283204, AI739096, and AI968607. | |
| HBGNW29 | 52 | 969396 | 1-421 | 15-435 | AI809990. | |
| HBGOB07 | 53 | 883111 | 1-465 | 15-479 | R15924, AI796491, AI346263, AA767342, AW173117, AW148990, AA860973, AI014603, | |
| | | | | | AI640629, AI658566, AA506436, AI368262, AA768887, AI500714, AI355779, AI458779, | |
| | | | | | AI811626, AW081866, AA761573, AI683292, AI472126, S69381, AL008706, AF106657, and | |
| | | | | | T66550. | |
| HBGOJ28 | 54 | 967261 | 1-585 | 15-599 | AW406518, R27278, W05444, W87344, AI159814, N56542, W87345, AA053475, AI905956, | |
| | | | | | T53519, AW004657, AI743733, AA468421, AW001343, AA860298, and AA578670. | |
| HBGOK53 | 55 | 848156 | 1-621 | 15-635 | AI459692, AW150902, AA781854, AI823723, and AC006255. | |
| HBGOL08 | 56 | 958290 | 1-449 | 15-463 | AA113287, D29499, AW294903, AW298373, AW297351, AW294452, Z40314, AI623657, | |
| | | | | | D29192, and AI143487. | |
| HBGPE04 | 57 | 926876 | 1-480 | 15-494 | Z98049. | |
| HBGPH02 | 58 | 918513 | 1-508 | 15-522 | AI167166, AI034322, AA084622, AA457685, AI246080, AA448838, AI754291, AW243793, | |
| | | | | | AI285521, AI816537, H55894, AC003037, Z97054, AC005913, AC006077, AL023879, | |
| | | | | | AC003007, AC004953, AC005632, AP000356, AL049776, AC003108, AL035086, AF134471, | |
| | | | | | AC002126, AC016027, AL022323, AC006312, AL133448, AJ003147, AC020663, AC005908, | |
| | | | | | AL031295, AC005972, AC003051, AC016830, AC007845, AL096701, AC009509, AC006040, | |
| | | | | | AC002432, AC006211, AC008126, AF196779, AC006538, AL096791, AC007686, AC002470, | |
| | | | | | AC009516, AL008718, AC016025, AC005071, AC007308, AP000555, AL139054, AC005971, | |
| | | | | | AP000501, AC006536, AL135744, AC003 109, AC002365, AC004257, AC003029, AC006254, | |
| | | | | | AC002351, AC004148, AC005015, AL080243, AC005412, AF207550, AC005057, AC003104, | |
| | | | | | L78810, AC006111, AL133249, AL031662, AL022165, AL121655, AL035415, AF067844, | |
| | | | | | AC008044, AL031432, AC007216, AC005778, AC008372, AC003110, AC004167, AC005696, | |
| | | | | | AL049692, AL021453, AC009464, AC007011, AL022326, AC007285, AC012627, AF031078, | |
| | | | | | AL023807, AC000068, AL024498, U95740, AF111169, AF030876, AC005409, AC000134, | |
| | | | | | AL035455, AL022476, AL022316, AC007363, AL034548, AC004990, AC011311, AC005841, | |
| | | | | | AB023049, AC006468, AC004813, AP000512, AC005529, AC004024, AL024507, AL033527, | |
| | | | | | AL022163, AL034549, AC004883, AC004448, AL117344, AC003101, AC007240, AC005920, | |
| | | | | | AP000503, AC007688, AL031311, AC004821, AC005411, AC005519, AC002456, AL133163, | |
| | | | | | AC002312, AC004859, AF091512, AC007488, AC005488, AL031255, AC005940, AC004934, | |
| | | | | | Z82215, AC005484, AC005081, U78027, AC010206, AL133245, AL008582, Z93023, | |
| | | | | | AC006511, AC006285, AL132712, AC002531, AC005666, AC004019, AC006965, and Z95114. | |
| HBGPK33 | 59 | 973425 | 1-696 | 15-710 | | |
| HBGPV05 | 60 | 930706 | 1-607 | 15-621 | | |
| HBGQG66 | 61 | 954302 | 1-356 | 15-370 | | |
| HBG5D40 | 62 | 923142 | 1-526 | 15-540 | AI554033, AW072396, AI391722, AI703323, AI278195, AI681504, AW015130, AI378014, | |
| | | | | | AI869650, AA028102, AW341627, AI674186, AA253036, AA918302, AI242366, H27749, | |
| | | | | | R52130, AI203836, AA253072, AI473245, H18391, H29918, H45059, H46854, H46789, | |
| | | | | | H18178, H18179, H46768, H45025, AA028123, H29829, H46718, and H18392. | |
| HBGTK11 | 63 | 965509 | 1-261 | 15-275 | | |
| HBGTL01 | 64 | 914573 | 1-636 | 15-650 | AI333621, AI655982, AI635579, AW014176, AI365145, AA758176, and Z97986. | |
| HBGTR84 | 65 | 886529 | 1-753 | 15-767 | | |
| HBNAB01 | 66 | 966536 | 1-126 | 15-140 | AI865067, AW272770, Z28887, R71650, H97886, AA564346, H68773, H59762, AA025159, | |
| | | | | | AA025578, AA129730, AA167746, AA416665, AI359427, AA908506, AA554889, AI040310, | |
| | | | | | AA890292, AW085815, AA292680, AI192586, AI672645, AI086456, AI086880, AI289899, | |
| | | | | | AA524469, AA708866, AA630222, AI435170, AI192590, AI027640, AA541738, AI660871, | |
| | | | | | AI346559, AI970609, AA873432, AA815359, AI300157, AI300558, AI346676, AW044620, | |
| | | | | | AI982695, AI986013, N23343, AA872691, AA741346, AA873873, AA777182, AA857133, | |
| | | | | | AA676868, N53944, H80871, N53661, R31880, H51417, R85259, AA775814, R31095, | |
| | | | | | AA906957, H57155, N93620, H02122, AA659321, AW020777, N28815, AA417245, AI422162, | |
| | | | | | H96301, H51459, AA025977, AA133344, H23915, and AF129332. | |
| HBNAF14 | 67 | 660800 | 1-267 | 15-281 | | |
| HBNAI71 | 68 | 655514 | 1-321 | 15-335 | | |
| HBNAN41 | 69 | 655842 | 1-299 | 15-313 | | |
| HBNAW92 | 70 | 524954 | 1-274 | 15-288 | AF107885. | |
| HBNAX71 | 71 | 530843 | 1-73 | 15-87 | | |
| HBNAY58 | 72 | 558193 | 1-492 | 15-506 | T47565. | |
| HBNBT52 | 73 | 524869 | 1-366 | 15-380 | | |
| HBZAJ09 | 74 | 655769 | 1-329 | 15-343 | | |
| HBZSH16 | 75 | 655619 | 1-384 | 15-398 | | |
| HBZSH71 | 76 | 760418 | 1-288 | 15-302 | AI339869, AA669158, AI589895, AI055909, AW131819, AA994746, AI055952, AW072134, | |
| | | | | | AA504384, AA588867, AA558699, and AA504125. | |
| HBZSI73 | 77 | 655737 | 1-339 | 15-353 | | |
| HBZSK17 | 78 | 664013 | 1-369 | 15-383 | AA300051, AA317019, AA086322,AA147482, AA112027, AI903350, AI903380, AI903419, | |
| | | | | | R48705, AC005005, AF115565, Y13492, AJ010306, AF064238, and Z49989. | |
| HCBMV01 | 79 | 914333 | 1-310 | 15-324 | AI493588, AL134598, AA928539, AI500061, AI440260, AI539690, AW300782, AW300889, | |
| | | | | | AW089844, AA641818, N22276, AI335235, W48671, AL046926, AI766348, AI587114, | |
| | | | | | AI114703, AI473536, AW020046, AI631240, AL118752, AI349279, AW020419, AI702065, | |
| | | | | | AW075382, AI251221, AI687130, AL047422, AL038605, AW022102, AI539260, AW020693, | |
| | | | | | AI590043, AI336513, AI969655, AI307569, AL048323, AI348895, AI307494, AL047172, | |
| | | | | | AI336495, AI335476, AI335363, AI815855, AL048340, AI340627, AI334450, AA555145, | |
| | | | | | AW021662, AI348854, AI344935, AI334895, AI866465, AI865116, AI349245, AI559752, | |
| | | | | | AI538850, AI499570, AI310930, AI446721, AI567971, AA503384, AI401697, AI538564, | |
| | | | | | AL118781, AI312261, AI349958, AL046200, AL047344, AI349814, AI638644, H41759, | |
| | | | | | AI336503, AI866646, AW020397, AW301861, AI267185, AI345005, H92687, AI553645, | |
| | | | | | N25033, AL047655, AW023338, AI349186, AI538764, AI784233, AI340511, AA808175, | |
| | | | | | AW059828, AI866503, AI345014, AW022494, AW020288, AI584118, AW162189, AA420722, | |
| | | | | | AW020095, AI624543, AL046227, AW021717, AI345527, AI345745, AL120756, AI538885, | |
| | | | | | AI340552, AI690411, AI579901, AI345736, AI345131, AL047100, AI758583, AA502794, | |
| | | | | | AW086082, AA659314, AI307736, AI335208, AI581033, AW020710, AL042745, F28295, | |
| | | | | | N29277, AI633125, AI366959, AA635382, AA176980, AI815232, AI868475, AI572096, | |
| | | | | | AL045413, AI500714, AI343030, N67350, AI538008, AI471909, AI567883, AI312210, | |
| | | | | | AI923989, AI284517, AI560545, AI627714, AI619820, AW059766, AI207656, AI611728, | |
| | | | | | AW151138, AI241678, AI634736, AI348969, AW022636, AI927233, AA062896, AA042949, | |
| | | | | | AI340603, AI801325, AI537273, AI682934, AI371251, AW152182, AI702527, AI472487, | |
| | | | | | AI436429, AI859991, N81164, AI564716, AL079963, AI690472, AL036705, AI500662, | |
| | | | | | AI624304, AI366992, T99953, AI698391, AW079768, AI868180, AI784214, AI800367, | |
| | | | | | AB029065, AF061573, X72889, A15345, AF026816, AL080124, X81464, D44497, AL049382, | |
| | | | | | and AF069506. | |
| HCBNW02 | 80 | 950897 | 1-508 | 15-522 | | |
| HCBNW07 | 81 | 951820 | 1-415 | 15-429 | AI419479, AI084317, AW072920, AI350149, AA847656, AA931572, AI423647, AI983432, | |
| | | | | | AI056162, AA826926, AI478982, T50766, C00534, and AC005803. | |
| HCBOG03 | 82 | 922351 | 1-469 | 15-483 | | |
| HCDMB01 | 83 | 915613 | 1-430 | 15-444 | AL042428. | |
| HCDMB16 | 84 | 835781 | 1-261 | 15-275 | | |
| HCDMB60 | 85 | 726339 | 1-107 | 15-121 | AI590413, AI869343, AI955933, AA593639, AI886450, AA576909, AI371486, AI971730, | |
| | | | | | AA602301, AI421322, AI383426, AI371487, AW059533, AA858249, C00365, Z41784, F17104, | |
| | | | | | AI200274, AW166558, AW337598, AA232052, AA280665, AA731352, AA729138, | |
| | | | | | AW206613, AW241202, M62039, AI932508, AA769242, AI865740, AI866738, AI858186, | |
| | | | | | H12707, AA434237, AI863089, AI874192, N22963, AI349363, AI161110, AA622939, | |
| | | | | | AI625498, AA280821, AW264859, AW198004, AI689114, AI298884, AI311832, W93266, | |
| | | | | | AW152359, AA905965, AA280666, AA044299, H20483, AW273322, AW117633, AA872094, | |
| | | | | | AI811143, AW268474, AA838719, AI858578, AW303327, AW081605, N63438, AI744276, | |
| | | | | | AI992061, AA603101, AI189379, T78004, H62603, AW291643, R72899, H53116, AW193894, | |
| | | | | | H52807, H42028, AI521005, AA745254, AI819014, AI624624, AI859693, AI613489, AI473536, | |
| | | | | | AI696603, AI284013, T69241, AA831128, AI818562, AI674627, AA102339, AL042193, | |
| | | | | | AF106657, AF184965, AL137488, AF060866, X69026, A58545, AL137284, AF076633, | |
| | | | | | AC010077, AL137657, AL080154, AL050155, AL137480, and AJ005690. | |
| HCDMC01 | 86 | 915239 | 1-1444 | 15-1458 | AI201296, AA421493, AI015515, AA401557, AA693498, AA815294, AA609724, AA608961, | |
| | | | | | AA705839, AI016248, AA400144, AA971327, AI656796, AA383127, AA725026, AA815293, | |
| | | | | | AA609137, AA421507, AI024165, and AC005789. | |
| HCDMD23 | 87 | 676799 | 1-171 | 15-185 | | |
| HCHAD40 | 88 | 923764 | 1-337 | 15-351 | AL039087, AL037259, A91754, A49700, AR031375, A58521, AR020969, A44171, I56772, | |
| | | | | | I95540, A63067, A51047, A63064, A63072, AR068507, AR068506, AR031374, AR018924, | |
| | | | | | AR000006, AR015960, AR000007, AR015961, AR051651, A94046, A94054, I58322, I58323, | |
| | | | | | A38214, A49701, E12566, E12564, E12565, AI8051, I01012, E02455, AR067785, A00782, | |
| | | | | | AI4595, AI8755, I12245, A92666, A25856, A92668, A92667, AI8050, A02741, I77211, | |
| | | | | | AR007512, A80476, A80477, I56770, I56771, I25041, AR027319, A91752, A91751, AR027318, | |
| | | | | | A95274, Z73334, A06633, AR029417, I58669, I85513, AR067733, AR027100, AR009152, | |
| | | | | | AR009151, AR027099, I07209, I07249, A63954, A93445, I25027, I26929, I44515, I26928, | |
| | | | | | I26930, I26927, I44516, Z96177, A93936, AR067731, AR067732, A60206, AR035224, A49045, | |
| | | | | | A27169, X85060, AR016495, AR029418, I91969, A60212, A60209, A60210, A60211, A93446, | |
| | | | | | I09267, I09270, I09268, I09269, I09252, I09251, A27170, A39929, A83151, A95117, AR068508, | |
| | | | | | AR068510, AR068509, AR054109, A48774, A29109, A32111, AR068550, A23373, AR068551, | |
| | | | | | A48775, E01324, I08638, A94048, A94061, A70359, AR003585, AR038066, A83180, | |
| | | | | | AR038321, AR038307, AR051652, A32110, X89399, AR067734, A64973, A83642, A83643, | |
| | | | | | AR038320, AR038306, Z73920, E01239, E01561, AR064436, A92081, A92080, A92077, | |
| | | | | | A92078, A92079, E01619, Z96705, I06159, E16475, AR055048, AR055051, AR055049, and | |
| | | | | | AR0 I2640. | |
| HCHAR16 | 89 | 675465 | 1-216 | 15-230 | AA594128, AI625342, AW057569, and AA808529. | |
| HCHAR43 | 90 | 715128 | 1-446 | 15-460 | AA459445, C18242, AC003036, and Y12781. | |
| HCHAR67 | 91 | 665184 | 1-306 | 15-320 | AI816095, AW402653, AA827700, AW449023, and AW444910. | |
| HCHBQ03 | 92 | 923763 | 1-490 | 15-504 | AL039087, AL037259, A91754, A49700, AR031375, A58521, AR020969, A44171, I56772, | |
| | | | | | I95540, A63067, A51047, A63064, A63072, AR068507, AR068506, AR000006, AR015960, | |
| | | | | | AR031374, AR018924, AR000007, AR015961, AR051651, A94046, A94054, I58322, I58323, | |
| | | | | | E12566, E12564, E12565, AI8051, I01012, E02455, AR067785, A00782, AI4595, AI8755, | |
| | | | | | I12245, A92666, A92668, A92667, AI8050, I77211, AR007512, A80476, A80477, A02741, | |
| | | | | | I25041, AR027319, A91752, A91751, AR027318, I56770, I56771, A25856, A92665, A38214, | |
| | | | | | Z73334, E16475, Z73920, A49701, A95274, Z96705, A00223, A00224, I70974, A80474, | |
| | | | | | A31896, 163070, 163071, 163072, AR066336, I21924, I44104, I44103, A06633, I85513, I46976, | |
| | | | | | AR067733, AR027100, I58669, I25027, I26929, I44515, I26928, I26930, I26927, I44516, | |
| | | | | | AR009152, AR009151, AR027099, I07209, 107249, A63954, AR029417, Z96177, A93936, | |
| | | | | | AR067731, AR067732, A60206, AR035224, A49045, A27169, X85060, AR016495, AR029418, | |
| | | | | | A93446, I91969, A60212, A60209, A60210, A60211, I09267, I09270, I09268, I09269, I09252, | |
| | | | | | I09251, A27170, A39929, A83151, A95117, AR068508, AR068510, AR068509, AR054109, | |
| | | | | | A48774, A29109, A32111, AR068550, A23373, AR068551, A48775, E01324, I08638, A94048, | |
| | | | | | A94061, A70359, AR003585, AR038066, A83180, AR038321, AR038307, AR051652, X89399, | |
| | | | | | AR067734, A64973, A83642, A83643, AR038320, AR038306, A32110, A93445, AR038762, | |
| | | | | | E01239, E01561, AR064436, A92081, A92080, A92077, A92078, A92079, E01619, 106159, | |
| | | | | | AR055048, AR055051, AR012640, and AR055049. | |
| HCHML32 | 93 | 668518 | 1-535 | 15-549 | Z59318. | |
| HCHND96 | 94 | 880585 | 1-592 | 15-606 | AA872500, AI026825, AI023522, AA769674, AA446298, AA446025, AA435968, AA719152, | |
| | | | | | AI826656, AA928442, AL043981, AA300900, AL043982, AA948304, AA961187, D45701, | |
| | | | | | N71729, AI557254, N71226, C14208, AI525796, AI541218, AI557264, D51378, AI535873, and | |
| | | | | | A84916. | |
| HCHOA76 | 95 | 740102 | 1-488 | 15-502 | AI963720, AW193265, AL046409, AI305766, AI345654, AA490183, AI431303, AA581903, | |
| | | | | | AI284640, AI613280, AI281881, AA610491, AL042853, AW303196, AW274349, AI696962, | |
| | | | | | AI355206, AW301350, AL138265, AI334443, AI270117, AI350211, F36273, AW419262, | |
| | | | | | AI799642, AI570261, AW062724, AW407632, AI679782, AI754658, AA584201, AI801482, | |
| | | | | | AL046205, AI192631, AI421841, AI589230, AW408717, AL138455, AI537506, AI890918, | |
| | | | | | AW438643, AA649642, AI133164, AL037683, AL041690, AW406755, AL119691, AA482711, | |
| | | | | | AA720702, AW029038, AW238278, AW276827, AI061334, AI962050, AI064864, A1110770, | |
| | | | | | AI624142, AI634384, AW023672, AW270270, AI358229, AL118991, AW304584, AL044940, | |
| | | | | | AI345681, AI345675, AI866856, AW083402, AA569471, AA587604, R24205, AI365988, | |
| | | | | | AW407578, AW162049, AI929531, AI270559, AI623720, AI289067, AL042420, AI754253, | |
| | | | | | AI341664, AW410400, AI890348, AW265393, AW073470, AI471481, AI339850, AI917271, | |
| | | | | | AA523815, AA551503, AI696955, AI469968, AI956131, AA491814, AI625244, AL047427, | |
| | | | | | AL120269, AI732865, AI076616, AL048626, AI357901, AA857486, AA623002, AI890923, | |
| | | | | | AI254615, AI344844, AA469451, AI610607, AI610920, AW088202, AW265385, AI457397, | |
| | | | | | AI887483, AA521323, AW249224, AI888518, AW193432, AI341548, AI368256, C75026, | |
| | | | | | AA468022, AI801600, AW265009, AI538433, AA661948, AA665330, AI619997, AI149478, | |
| | | | | | AI688846, N53150, AW103509, AI005388, AI133102, AL048925, C06327, AI305547, | |
| | | | | | AI249997, AW261871, AI792287, AA613227, AI368745, AI375710, F28204, AI904894, | |
| | | | | | AI859742, AI567674, AA877817, AI053623, AI679132, AI473943, AW088616, H71429, | |
| | | | | | AL038785, AA630362, N48230, AA631507, H90814, AW166815, AA164251, AA177061, | |
| | | | | | AA521399, AI885572, AI918421, AW272758, AI340453, C05755, AW080134, AA713815, | |
| | | | | | AA552856, AL038606, AA679514, F29989, AI358501, AI732764, AA613345, AI345518, | |
| | | | | | AA491284, AA610493, AI144055, AA846935, AA394271, AW072587, AI053672, AW440836, | |
| | | | | | AW265170, AI628288, AA828704, AA503258, AI744995, AI307608, AI471534, AI687343, | |
| | | | | | AI291124, AW439558, AI708009, AA525790, AW339687, AI110760, AI376100, AI683577, | |
| | | | | | AI921649, AW104748, AA594145, AI568678, AI860020, AW243960, AA503015, AI251436, | |
| | | | | | AI469624, AW072923, AI471543, AW270716, AW242109, AL079645, AA350859, AI267818, | |
| | | | | | AL119649, AA826303, AA584489, AI623898, AI085719, AW270382, AA134367, AW238583, | |
| | | | | | AL109985, AC005234, AF015152, I51997, AF077058, AF015147, X55925, AF015148, I248391, | |
| | | | | | AC004687, X53550, AF015149, I257007, D83989, X75335, AC005844, AC004257, I257006, | |
| | | | | | AF015156, U18395, U02531, I218392, U57009, I218394, I257005, AF015153, U18390, | |
| | | | | | AF015151, U57008, I218393, AP000556, AF015157, AC004491, X55926, X54180, I218387, | |
| | | | | | X55924, AC002470, AC004134, AC005280, U02532, I269569, X54175, X54181, X54178, | |
| | | | | | X55931, AL035587, Z98200, AC007367, AC007308, AL031295, AC007785, AC016830, | |
| | | | | | X54176, X55922, M37551, AC004596, AP000143, 1257004, X54179, AC008101, AC006998, | |
| | | | | | AC005257, AL121653, AL024497, AC004263, U67801, AC002456, AC006213, AL008629, | |
| | | | | | AL132642, AC004876, AL031276, AC004773, AF015167, Z49816, X55923, AC007637, | |
| | | | | | AL031729, AC005484, AL121825, AC002128, I218400, AB023049, AC005755, AC008079, | |
| | | | | | AF042090, AL035071, AP000557, AL021366, X54177, Z22650, AC004675, AC004475, | |
| | | | | | AC007450, AC005011, AF196779, AC005015, U91321, AL050332, AC005180, AF085913, | |
| | | | | | U67221, AL049776, AP000090, AL035451, AF088219, AC003957, AL021808, AL031848, | |
| | | | | | AC009223, AC008119, AL022322, AC006274, AL132992, AL096712, AL031005, Z83819, | |
| | | | | | AL031681, AL021393, L47228, U07000, L48038, AP000302, U47924, D87675, AC005971, | |
| | | | | | AC005682, AC005360, AF015155, U12580, AL035415, AC005747, AC004752, U12584, | |
| | | | | | AL109798, AC009516, AL035446, AC002059, AC005696, U18399, AC004947, AC005520, | |
| | | | | | Z99758, AC004682, AC007043, Z83840, U73479, AC006352, X55927, AF015166, AL031542, | |
| | | | | | AC008039, AC006511, U67229, AB023052, Z93023, AL031123, AC003043, AC002543, | |
| | | | | | AF109907, AC006449, AC004941, Z93930, AP000114, AP000046, AP000359, AF015154, | |
| | | | | | AC004526, AL022724, AL031965, AF107885, AC002041, AP000553, AL133233, AP001172, | |
| | | | | | AD000684, AP000348, AC004987, AL035079, AC000026, U95740, AC005379, AC006479, | |
| | | | | | AF111170, AC005081, AC004087, AC004858, AL132987, U67231, AL023882, AL121603, | |
| | | | | | S75201, AC005324, AP000513, AL022323, AL021918, AC005193, Z97053, AJ003147, | |
| | | | | | AC005610, AC000075, AF015162, S43650, AF015155, U62317, AC002094, AC006071, | |
| | | | | | AC006128, X55930, AC004041, AL021939, AL078477, AC002549, AC004092, AC005681, | |
| | | | | | AC006211, AC003024, AL022332, Z99129, AC006468, AJ010395, AC002350, AP000161, | |
| | | | | | AC004796, X55932, AL023575, AF045555, AC005057, AC004862, AC007688, AL031224, | |
| | | | | | AC005664, Z73988, AP000512, AC003684, AC022517, AC009069, AL049562, AC005632, | |
| | | | | | AC004111, AL050347, U62293, AL117352, AC006138, AD000092, Z86061, AL022311, | |
| | | | | | AL008720, and U18398. | |
| HCHOD89 | 96 | 954866 | 1-202 | 15-216 | | |
| HCHPO55 | 97 | 717671 | 1-116 | 15-130 | | |
| HCHQB06 | 98 | 934941 | 1-490 | 15-504 | AI569831, AI798887, AI209013, and AW300115. | |
| HCMSE07 | 99 | 927904 | 1-1366 | 15-1380 | AI681115, AI672348, AW173697, AI565451, AL079990, AW305215, AA115462, AA148788, | |
| | | | | | AW081450, AW020072, AI088661, AI051834, AA243692, AA031780, N44611, AI610893, | |
| | | | | | AI469307, AI094153, AA115214, AW130820, AI970462, AA233114, AI620951, N34679, | |
| | | | | | AA115204, N69772, AA495921, AA987696, AA495922, AI079994, AI050072, AI434100, | |
| | | | | | AW236674, AI770044, AA961227, AA115067, AA150297, AI039432, AI873440, AA938897, | |
| | | | | | AI301357, AA603790, AA326653, AA910225, AA031879, AA377521, AI702644, AI913596, | |
| | | | | | AA961701, AW452143, AI352693, AI381836, AI767254, AI247300, AA573940, AA081742, | |
| | | | | | AI830541, AI493755, AI865675, R37287, AA937056, AI648373, AA653705, AI266405, | |
| | | | | | AW138034, Z41281, N85358, AI090946, N84377, AI612953, F08269, AI572322, T49708, | |
| | | | | | AW103627, AA364595, D25919, T49717, T49709, AA094410, AA385800, AP000300, | |
| | | | | | AP000113, and AP000045. | |
| HCOMZ41 | 100 | 932878 | 1-347 | 15-361 | AA863389, AI695443, AI969882, AC006512, U47924, and AA863395. | |
| HCOOG04 | 101 | 925748 | 1-104 | 15-118 | AI922923. | |
| HCOOI07 | 102 | 951665 | 1-710 | 15-724 | | |
| HCOOM77 | 103 | 969161 | 1-502 | 15-516 | | |
| HCOOX10 | 104 | 961595 | 1-556 | 15-570 | AI913553, AI418464, AA299849, AA729782, AI547277, AC005005, and AC000403. | |
| HCOOZ11 | 105 | 965306 | 1-689 | 15-703 | AI350354, AI904299, AI902503, D61534, T78554, AW183962, AI218626, AW304978, | |
| | | | | | W74167, AI081779, AL022238, and AL137499. | |
| HCOPP18 | 106 | 954332 | 1-651 | 15-665 | T63995, and AI669879. | |
| HCOQE11 | 107 | 965299 | 1-825 | 15-839 | AI554514, AW117613, AA401269, AA894442, AI923609, AA968468, AA779787, W56250, | |
| | | | | | AI049682, AI342711, AI277156, AA424469, AA443257, AW023482, AI978942, AI611714, | |
| | | | | | AL132777, and AB024689. | |
| HCOQH12 | 108 | 969151 | 1-551 | 15-565 | AA683227, H65257, Z99396, AW392670, AW372827, AL119497, AL134531, U46341, | |
| | | | | | AW384394, AL119457, AL119483, AL119418, AL119324, AL119522, AL119319, AW363220, | |
| | | | | | AL119396, AL038837, AL119484, AL119391, U46350, AL119341, AL119443, U46349, | |
| | | | | | AL037051, AL036725, U46351, AL119335, AL119363, AL119355, AL119496, AL036418, | |
| | | | | | AA631969, U46347, AL043029, AL042989, AL119401, AL134920, AL134533, AL036924, | |
| | | | | | AL042970, AL119488, AL119439, AL042965, AL134528, AI142139, AL042975, AL043033, | |
| | | | | | AL119444, AL043011, AL037205, AL042614, AL036858, AL134538, AL042984, AL042544, | |
| | | | | | AL042542, AL043019, U46346, AL043003, AL043037, AL042551, AL042896, AL042850, | |
| | | | | | AL042995, U46345, AL037094, AL036268, AL036190, AL037639, AL036196, AL037526, | |
| | | | | | AL037085, AL036998, AL037082, AL038447, AL037615, AL036733, AR066494, AR060234, | |
| | | | | | A81671, AR023813, AB026436, AR064707, AR069079, and AR054110. | |
| HCOQQ07 | 109 | 951658 | 1-424 | 15-438 | | |
| HE8SG46 | 110 | 961388 | 1-2631 | 15-2645 | AI678080, AW118890, AI962969, AI936455, AL037402, AA969064, AI127304, AI677882, | |
| | | | | | AW195711, H19013, N33206, AI127565, AI332958, AI089991, AI253076, AW051831, | |
| | | | | | AI025225, AI004194, AI873265, AW182432, N48995, AA528395, AI290549, AI003987, | |
| | | | | | AA022465, AI377431, H81787, AA225942, N44742, H19307, W25684, AI246674, N95594, | |
| | | | | | H81786, Z42919, R52370, H98158, AI382954, Z43457, AI244671, AI093458, AI042622, | |
| | | | | | R52369, R73912, W20350, Z39530, AA022998, C04474, W92421, R74008, F02397, N92731, | |
| | | | | | AA934795, AA502534, AW081759, H98461, AA744985, AA883984, AA319261, AI619688, | |
| | | | | | AL079491, N45717, and AA662787. | |
| HEAAA42 | 111 | 963100 | 1-260 | 15-274 | AL043767, AA043579, and H42377. | |
| HEAAB77 | 112 | 574510 | 1-348 | 15-362 | AW452627, and AC009248. | |
| HEAAK46 | 113 | 574232 | 1-259 | 15-273 | AI910578. | |
| HEAAM16 | 114 | 574008 | 1-338 | 15-352 | | |
| HEAAM52 | 115 | 960579 | 1-427 | 15-441 | | |
| HEAAN18 | 116 | 932383 | 1-251 | 15-265 | | |
| HEAAQ66 | 117 | 653242 | 1-389 | 15-403 | | |
| HEAAT36 | 118 | 531348 | 1-476 | 15-490 | R90939, H66735, and R89394. | |
| HEAAT60 | 119 | 733632 | 1-459 | 15-473 | AL137566. | |
| HBAAV10 | 120 | 968200 | 1-347 | 15-361 | AL031178. | |
| HEAAV33 | 121 | 574508 | 1-436 | 15-450 | W79572, | |
| HEDAE67 | 122 | 752875 | 1-133 | 15-147 | | |
| HEEAD64 | 123 | 741305 | 1-328 | 15-342 | AI041541, and AC006116. | |
| HEEAH07 | 124 | 851219 | 1-329 | 15-343 | AI343204, R92902, AW138732, AC011331, AL137469, AB007899, Z84480, AP000228, | |
| | | | | | AP000140, U95090, AP000078, AL050067, AC010168, AC004741, AC002426, AC005668, | |
| | | | | | AL022164, AC005034, AD000685, AL035701, AC005307, AC005067, AC005572, AC003663, | |
| | | | | | AC007056, AF099810, AC004472, AF061779, AL022399, AC000025, AC005527, AL022238, | |
| | | | | | AC005529, AC005280, AP000088, AC007298, AC004964, AC002991, AL021026, AC002287, | |
| | | | | | AF181449, AL008725, AL118516, AC006271, Z94044, and AL031985. | |
| HEEAJ58 | 125 | 785121 | 1-340 | 15-354 | AA206618, AA204795, W38480, AA431939, AA587180, and AF080470. | |
| HEEAJ76 | 126 | 887321 | 1-535 | 15-549 | AW088322, D80133, D80522, D80248, D80251, C14389, D51060, D81026, D59610, D51022, | |
| | | | | | D80366, D80188, D59859, D51423, D80166, D59619, D80210, D51799, D80240, D58283, | |
| | | | | | D80253, D80241, D81030, D80269, D50979, D80024, D80212, D80195, D80043, D80022, | |
| | | | | | C14331, D80219, AW377671, D50995, D59467, D80391, D80164, D59275, D59787, D80227, | |
| | | | | | D59502, D57483, D59889, D80196, AA305409, AA305578, D59927, C15076, D80038, D80193, | |
| | | | | | C06015, D80045, C14014, D80378, D80268, D59373, AW177440, AA514186, AA514188, | |
| | | | | | D80439, C14429, AW360811, AW178893, D80302, D59627, D80247, C75259, AW178983, | |
| | | | | | T03269, AW375405, AW179328, AW378532, D80258, C05695, AW366296, AW360844, | |
| | | | | | D58253, AW360817, D80132, AW375406, AW378534, AW178906, D51759, AW179332, | |
| | | | | | AW177501, AW377672, AW179023, D80157, AW178905, AW177511, D80134, D51103, | |
| | | | | | AW178762, AW378528, D51250, T11417, AW176467, AW352171, AW377676, AW352170, | |
| | | | | | AW360834, AW177731, AW178775, AW178907, AW369651, AW179019, AW179024, | |
| | | | | | AW367967, AW352158, AW177505, AW360841, AW352117, AW179020, D59653, | |
| | | | | | AW178909, AW177456, AW179329, D59503, AW178980, AW178914, AW177733, | |
| | | | | | AW178908, AW178754, AW179018, T48593, D51213, D81111, D80064, AW378525, D51079, | |
| | | | | | AW179004, AW178774, C14227, D45260, AW179012, AW352120, AW352163, T02974, | |
| | | | | | AI910186, AW352174, AW378543, AW179009, AI905856, H67854, C14407, AW177728, | |
| | | | | | AW178911, AW378540, AW177722, D58246, F13647, D51221, AW367950, H67866, | |
| | | | | | AA514184, C03092, AW177508, AA809122, AW178781, Z21582, D80228, AI525923, | |
| | | | | | AW177497, AI535850, D60010, AI525917, D80014, AI557774, AW178986, D59474, T03116, | |
| | | | | | C14957, C14298, AW177723, AW179011, D59317, AW378533, C14973, D58101, D45273, | |
| | | | | | AW378539, AI525920, C14344, T03048, D50981, AI525235, AI557751, AW177734, D80168, | |
| | | | | | AI525227, AI535959, AI535686, AA285331, D59551, AI525912, D51097, C14046, D60214, | |
| | | | | | AI535961, D52291, AI525215, D80949, AW378542, AI525242, AI525925, AI525222, D59695, | |
| | | | | | C16955, C05763, Z33452, AW360855, H67858, AI525237, D51053, C04682, Z30160, T02868, | |
| | | | | | A62298, AR018138, AR008278, AJ132110, A84916, A62300, AF058696, AB028859, A82595, | |
| | | | | | X67155, Y17188, D26022, A25909, AR060385, Y12724, A67220, D89785, A78862, D34614, | |
| | | | | | AB002449, A94995, D88547, AR008443, I50126, I50132, I50128, I50133, AR066488, X82626, | |
| | | | | | AR016514, AR060138, A45456, A26615, AR052274, AR016808, Y09669, A43192, A43190, | |
| | | | | | AR038669, AR025207, AR066487, A30438, I14842, AR054175, D50010, AR066490, Y17187, | |
| | | | | | I18367, AR008277, AR008281, A63261, A70867, AR008408, AR062872, AR016691, | |
| | | | | | AR016690, U46128, AB012117, D13509, A64136, A68321, AR060133, X68127, I79511, | |
| | | | | | A85396, D88507, AR066482, A44171, A85477, I19525, A86792, X93549, U79457, AF123263, | |
| | | | | | AR032065, and AR008382. | |
| HEEAK22 | 127 | 673904 | 1-312 | 15-326 | | |
| HEEAK84 | 128 | 780838 | 1-293 | 15-307 | AC004549. | |
| HEEAL31 | 129 | 887312 | 1-333 | 15-347 | AL137566. | |
| HEEAN24 | 130 | 676721 | 1-335 | 15-349 | | |
| HEEAS58 | 131 | 735620 | 1-496 | 15-510 | | |
| HBEAU79 | 132 | 706935 | 1-430 | 15-444 | H64999, and AC011311. | |
| HEBAW01 | 133 | 851213 | 1-372 | 15-386 | AA368329, AI281622, AA935827, AA581317, AI350189, AW177224, AI859906, AI039257, | |
| | | | | | AA385094, H29593, F35789, AI267450, AI267356, AI245693, AA493533, AI668566, | |
| | | | | | AA364199, AL039515, AW151848, AI733523, AI732911, AI336771, AA614647, AI338575, | |
| | | | | | AA354695, H48017, R70883, AA736713, AI249688, AI982994, AA197089, AA496941, | |
| | | | | | AI671077, AL040360, AA834798, AI038304, AW023975, AA354677, AI003391, AI754567, | |
| | | | | | AI569100, AW192599, AI754105, AI755214, R70884, AA351893, AI080307, F23268, | |
| | | | | | AA813203, AA456149, AA525332, AA557945, AA077637, AA533660, N55076, AW301855, | |
| | | | | | AA504951, AI342863, H65213, AI459879, AW089395, AA155817, AA363311, AI270280, | |
| | | | | | AI624038, H43183, AI905494, AI859744, W61253, AI791227, AL041681, AL041682, | |
| | | | | | AA847341, AA522864, AA601378, AA077247, T10579, AL047645, AA579082, W69639, | |
| | | | | | AA878492, AA132445, AI791659, AW303822, T07013, W28786, AA715508, AA126475, | |
| | | | | | AI690520, AW167202, AI114645, AI370470, AA664924, AI884404, AA678616, AL039761, | |
| | | | | | AW265688, AA653291, AW026282, M78137, AA598605, AI749306, AA524846, H94979, | |
| | | | | | AA809104, AI821945, M77964, AA584525, AI468993, AI285651, AI708108, AI207534, | |
| | | | | | AA449468, AA831801, H96919, F00937, AA745628, AI018726, AA467740, AW265484, | |
| | | | | | AI016192, AA133293, AA825954, AI734119, Z94054, L78833, AC004447, AC008044, | |
| | | | | | AC006210, AL121748, AC005678, AC005537, AC005828, AP000255, AC004158, AL132987, | |
| | | | | | AP000135, U91321, AP000031, U96409, AL133241, AC007371, AC006211, AL049781, | |
| | | | | | Z99291, AL031291, AL031685, AC005527, AC005632, AL137100, AP000558, Z82208, | |
| | | | | | AC005074, AC005412, AC005180, AC002990, AC005529, Z82193, AF002223, AC004383, | |
| | | | | | AC004673, AF095725, AF196969, AC005015, AL023574, AL008718, AJ251973, AC007687, | |
| | | | | | AC005599, AC006121, AP000502, AC006120, AC005695, U91325, AC006487, AL031848, | |
| | | | | | AL035455, AC003108, AL049776, AL049699, AC004417, AL022165, AC005696, AC009516, | |
| | | | | | AF052041, Z69721, AC002492, AL022316, AL035684, AC007686, AL139054, AC003663, | |
| | | | | | AC006511, AC002045, AC004815, AL031053, AC004230,AC006111, AC004834, AF205588, | |
| | | | | | AC004486, AC005089, AC004870, AF217403, Z68331, AC007387, AC004655, AL031657, | |
| | | | | | AC002395, AC005325, AL031287, AC005746, Z93024, AL035588, AC007096, AC004098, | |
| | | | | | AL117338, AC004687, AC002301, AC002288, AP000094, AC005300, AC005231, AC007207, | |
| | | | | | AP000010, AC003037, AP000555, AF030453, AC000049, AC009275, AC008154, AC006071, | |
| | | | | | Y18000, AL035587, AC019014, AC006204, AC004682, AC005808, AC002430, AC005088, | |
| | | | | | AC006948, AF053356, AL020996, AC000111, AC005971, AC005184, AC002302, AP000213, | |
| | | | | | AP000305, AC006312, AL031432, AC005261, AL049760, AC007384, AC004854, Z98051, | |
| | | | | | AC007563, AC005324, AB016897, AL121580, AC005280, AC006079, AC009399, AC007238, | |
| | | | | | AC007676, AL034423, AC005606, AC007435, Z98745, AC004771, D87012, AP000047, | |
| | | | | | Z98742, AL050307, AC007367, AC006023, AP000355, AC004263, AL049780, AC003025, | |
| | | | | | AL096757, AL049872, AL031767, AC005821, AC005751, AC004890, AC005914, AL118497, | |
| | | | | | AC004760, AC005856, AC004900, AL031659, AC002072, AL035706, AC005874, AF134471, | |
| | | | | | Z84497, AC004242, AC004542, AC005694, AC005747, AL031680, AL031311, AC004081, | |
| | | | | | AC006020, AL008630, AF001549, AL031295, AC006017, AL133500, M92069, AF139813, | |
| | | | | | AC005081, AC008282, K03431, AL031984, M69197, AP000115, AP000692, AC004686, | |
| | | | | | AC005544, AP000030, AL020997, AL033527, AC007666, AC007240, AC009028, AF200465, | |
| | | | | | AF196779, AC004004, AC004883, U82668, AC006254, AC002350, AC006088, Z70224, | |
| | | | | | U95742, AC006455, Z97055, AC004762, AF126403, AD000833, AL049591, AP000152, | |
| | | | | | AC004106, AL033397, AL031588, AC006132, AL034553, AC005722, AC004099, AC002299, | |
| | | | | | AL022398, AL009179, AC003013, AC004975, AL049761, AC004228, AC005702, AL109963, | |
| | | | | | AC007277, Z82176, AL021368, Z95115, AC008056, AC005399, AC004882, Z95116, | |
| | | | | | AC007216, AC004812, AC004491, and AC005519. | |
| HEEAW13 | 134 | 656299 | 1-357 | 15-371 | AC005344. | |
| HEGAA24 | 135 | 676716 | 1-407 | 15-421 | AC005324. | |
| HEGAA73 | 136 | 767284 | 1-411 | 15-425 | | |
| HEGAB84 | 137 | 823900 | 1-339 | 15-353 | AI222155, and AC007040. | |
| HEGAC69 | 138 | 754344 | 1-600 | 15-614 | W21047, and AW364581. | |
| HEGAC95 | 139 | 965183 | 1-584 | 15-598 | AW275380, AW273693, AA102550, AI589713, AA515679, AA931215, AA069905, AA661692, | |
| | | | | | AI361672, AI500209, AA025822, AA447097, AI249434, AA833996, AI086891, AA342066, | |
| | | | | | R41926, AI005214, AI376215, AA992138, R37636, AW129954, AA039651, AI986034, | |
| | | | | | AI358677, R39054, AA428629, AI274337, AI352529, AI768472, T78443, AI125818, | |
| | | | | | AA977410, T91051, AI828094, AI675983, AW248442, and AI681656. | |
| HEGAI82 | 140 | 955291 | 1-594 | 15-608 | AI624142, AW393412, M62051, AI870044, AA330088, and AB014538. | |
| HEGAK04 | 141 | 887299 | 1-502 | 15-516 | AA707670. | |
| HEGAO83 | 142 | 780837 | 1-314 | 15-328 | AR064011. | |
| HEGAP06 | 143 | 934705 | 1-636 | 15-650 | AI813699, AW051520, AI312608, AI338779, AI369324, AI218925, R72618, R80387, R72688, | |
| | | | | | R80493, AA928026, R63885, AI298652, R63884, and AI214650. | |
| HEGAP31 | 144 | 697419 | 1-454 | 15-468 | U73167, and U90094. | |
| HEGAP36 | 145 | 706951 | 1-536 | 15-550 | | |
| HEGAR53 | 146 | 719387 | 1-669 | 15-683 | H83841, AA019657, and AI127286. | |
| HEQAY32 | 147 | 699906 | 1-182 | 15-196 | R55547, H12557, H27260, H00825, R23780, AA747653, H12800, T50030, H42368, and | |
| | | | | | AW361580. | |
| HEGAY52 | 148 | 726316 | 1-190 | 15-204 | AL137660. | |
| HEGAZ61 | 149 | 950033 | 1-547 | 15-561 | X66139, and X66140. | |
| HEPAA44 | 150 | 509456 | 1-313 | 15-327 | AA335025, and AA335496. | |
| HEPAB70 | 151 | 557149 | 1-341 | 15-355 | | |
| HEPAD09 | 152 | 888726 | 1-268 | 15-282 | AA335537, AA336174, AA335376, AW406878, AI541216, AI525220, AI525710, and | |
| | | | | | AL022318. | |
| HEPAD40 | 153 | 509002 | 1-254 | 15-268 | AA335399, and AA335663. | |
| HEPAD82 | 154 | 509452 | 1-185 | 15-199 | AA335412, AA335243, AA335606, and AA507007. | |
| HEPAJ70 | 155 | 586843 | 1-61 | 15-75 | AA335523, and AA335948. | |
| HEPAK01 | 156 | 518331 | 1-297 | 15-311 | AA335526, and AA347833. | |
| HEPAK41 | 157 | 925146 | 1-571 | 15-585 | AA524859, AI366999, AW274554, AW085032, AA897153, AA335550, AA405462, and | |
| | | | | | AW305246. | |
| HEPAM29 | 158 | 508706 | 1-389 | 15-403 | AA335591, andAA335639. | |
| HEPAN19 | 159 | 508694 | 1-395 | 15-409 | AA335593, AI247347, AA335892, AI700468, AI014987, AA629210, AI700878, and X66139. | |
| HEPAP02 | 160 | 926914 | 1-351 | 15-365 | T31859, AI452722, AI810976, AA039492, AW166142, T34621, AA887990, AA526699, | |
| | | | | | AI491944, AI291744, AA971270, AI291429, AI147212, AI191377, AI282167, AW194181, | |
| | | | | | AI382209, AI819092, AI125991, AI291350, AA635803, AI076763, AI025483, AW054812, | |
| | | | | | AW026209, AI872247, AA446939, AA393844, AA595299, AA588205, AA635837, AA580350, | |
| | | | | | W42714, AA652370, AI205639, AI346541, AI299347, AA618584, AA041546, AI190326, | |
| | | | | | AI589781, AI038728, AA747482, AI374991, AI186987, AI272049, AA968514, AA781105, | |
| | | | | | AA719399, AI745517, AI479431, AW005070, AI760672, AI828575, AI653887, AI983727, | |
| | | | | | AI950052, AI681964, AA953968, R60201, AW001576, R43919, AI568018, AI445351, R88422, | |
| | | | | | H14119, AI588901, T67080, H20066, Z38557, AA069378, N95318, H19689, R88071, | |
| | | | | | AA069325, AW340398, AA532555, AA742707, AI095816, AI261987, T31864, AA224332, | |
| | | | | | AI089055, AI192912, T29995, AI690936, AA490233, AA425662, AW178914, H52718, | |
| | | | | | AW178908, AI198749, AI277302, AW178907, N75536, AW178911, AI336808, AW178912, | |
| | | | | | AW050516, N91860, AW178906, AI354778, H19688, AI925482, T31898, AA308975, | |
| | | | | | AA393826, H19728, AW439026, AA362297, AA308974, AA427787, AW178913, AA375056, | |
| | | | | | AI028636, AI281040, AI955663, AA350360, AI372759, AA328758, AA223799, W23910, | |
| | | | | | R88070, AA536032, U79457, and AC005041. | |
| HEPAP12 | 161 | 968771 | 1-298 | 15-312 | A01447, and E00237. | |
| HEPA544 | 162 | 884083 | 1-371 | 15-385 | AA335822, AA335497, AA605142, AA493490, and AC005042. | |
| HEPBA39 | 163 | 919875 | 1-696 | 15-710 | AW291560, AA335715, AA897741, and AI559166. | |
| HEPBB24 | 164 | 508684 | 1-206 | 15-220 | AA335914, AA335921, and AA335993. | |
| HEPBB60 | 165 | 855597 | 1-351 | 15-365 | AA335668, AA336011, AA335983, and AA335973. | |
| HEPBG26 | 166 | 967921 | 1-344 | 15-358 | AA336199. | |
| HEPBG35 | 167 | 508686 | 1-221 | 15-235 | AA335799, AA336205, and AA653622. | |
| HEPBH28 | 168 | 508673 | 1-390 | 15-404 | AI208794, AA336191, AA150459, AI620599, and AC003090. | |
| HEPBH38 | 169 | 707524 | 1-325 | 15-339 | AA335435, AI078409, AA384480, AI635196, AI445373, AA515224, AA363957, AA551548, | |
| | | | | | AI793032, AF053356, AF111167, AC006511, AC004106, AP000044, AP000112, AF001549, | |
| | | | | | D00596, AC005531, AL080241, AC002310, AL049694, AC005043, AL049643, AL034421, | |
| | | | | | AC002350, AL022334, AL133243, AC004770, AC009225, AC005231, AC005031, AC004134, | |
| | | | | | AP000475, U80017, AL049569, Z82206, AC004000, AC007358, AC002400, AB002325, | |
| | | | | | AC005618, AC005730, AL049745, AF176815, D88268, AC005632, AC006137, AC002126, | |
| | | | | | AD000812, Z82190, AL035460, AC004223, AC002477, AL050318, AC005071, AC004692, | |
| | | | | | AC004531, AF060568, AC007055, AF015262, AJ229043, AC005261, AL022322, AC004675, | |
| | | | | | AL133245, AC001228, Z93023, AC005529, AL121973, AF134726, AC006965, AC006285, | |
| | | | | | AL008718, Z49236, Z99943, AL035086, and Z93930. | |
| HEPBH45 | 170 | 508696 | 1-312 | 15-326 | AA336047, and AA335600. | |
| HEPB069 | 171 | 888697 | 1-335 | 15-349 | AA335535, AA335244, AA335394, and AC004464. | |
| HEPBQ47 | 172 | 713836 | 1-327 | 15-341 | AA336176, AW204786, AI094626, AW246712, AI935606, and H92959. | |
| HEPBQ69 | 173 | 888693 | 1-448 | 15-462 | AA335278. | |
| HEPBS10 | 174 | 968665 | 1-391 | 15-405 | | |
| HEPBX43 | 175 | 715685 | 1-431 | 15-445 | AI827693. | |
| HEPCD36 | 176 | 523670 | 1-285 | 15-299 | AW372642, AI763257, AI828957, AW206245, and AW237541. | |
| HEPCE25 | 177 | 529343 | 1-202 | 15-216 | AL034548. | |
| HBPCO59 | 178 | 761094 | 1-150 | 15-164 | AI198719, AI381368, AI695853, AI620570, AA564802, and AA456099. | |
| HBPCT32 | 179 | 947081 | 1-843 | 15-857 | AA913839, AA429491, AA428554, AA724454, AA868848, AA336014, AI190145, and | |
| | | | | | AI125345. | |
| HEPCU32 | 180 | 931824 | 1-1512 | 15-1526 | | |
| HEQAE65 | 181 | 911438 | 1-148 | 15-162 | H83516. | |
| HEQAH70 | 182 | 699690 | 1-344 | 15-358 | AL044222, AJ007558, AB018334, and AF165926. | |
| HEQAO76 | 183 | 769973 | 1-422 | 15-436 | AL046469, AI962060, AF053944, AC006454, E07353, and AF053943. | |
| HEQAZ52 | 184 | 727051 | 1-745 | 15-759 | T85314, AI360684, T91254, T85528, and T57321. | |
| HEQBA41 | 185 | 712243 | 1-685 | 15-699 | AL039872. | |
| HETAD29 | 186 | 509311 | 1-254 | 15-268 | AA336507, AA336418, AP001042, AP001043, and AF017257. | |
| HETAF20 | 187 | 509308 | 1-331 | 15-345 | AA338023, AA336535, and AC002357. | |
| HETAF49 | 188 | 509306 | 1-500 | 15-514 | R10452, R02534, AA336773, AA336549, R00052, AA704817, AA678320, and AI248957. | |
| HETAF89 | 189 | 509300 | 1-234 | 15-248 | AA336405, AW248106, H24100, AW247283,AE161459, and AL110193. | |
| HETAH16 | 190 | 942612 | 1-335 | 15-349 | AA337683, AA336632, AA157672, AA157671, W32894, AA359882, AA706316, AA385464, | |
| | | | | | AA873028, AI961281, AW177658, and AD001502. | |
| HETAH66 | 191 | 799665 | 1-352 | 15-366 | AA336517, AA336751, AA337580, AA336640, AA337190, AA336988, and AC005858. | |
| HETAH67 | 192 | 535390 | 1-304 | 15-318 | AA336641, AA337920, and AA336746. | |
| HETAJ26 | 193 | 508994 | 1-241 | 15-255 | AA337221, and AA336756. | |
| HETAK75 | 194 | 518156 | 1-315 | 15-329 | AA336844, AA442492, AA394009, AI061614, AW327292, W76580, AA337096, N39773, | |
| | | | | | AA287514, AA022944, AA355038, W16809, AA306378, W16892, W20041, AI038286, | |
| | | | | | AA902825, AA431265, AI128035, AA437055, AA442618, H69650, AA333960, W16816, | |
| | | | | | AA471293, AA429690, N39663, T81379, N42264, AW298810, AI582147, N95146, N28024, | |
| | | | | | AA806403, AA181314, AA092603, N24270, N25823, AI206546, AI347368, AI093178, N26593, | |
| | | | | | AI290898, AA676717, W16976, AA758626, AA846456, AA838697, N57221, N40080, | |
| | | | | | AA927961, AA769954, AA729656, AA962149, AW118695, AA435600, AI187055, AI348195, | |
| | | | | | AI223403, AA939313, AA282421, AA659796, AA640163, AI207323, AA436689, AA436861, | |
| | | | | | AA437321, AA767427, AA807555, AW168756, N66030, H80473, N89586, H59458, AI292018, | |
| | | | | | AW151976, D62144, AI887826, AI097028, N30575, AA831986, N89608, AA187056, N56324, | |
| | | | | | AW137724, N27143, AA043993, AA740443, H98703, AA834618, AI269239, AA586548, | |
| | | | | | AI393728, AA022924, AA989305, AA782538, AA287386, AA769511, AA255992, N26891, | |
| | | | | | N67380, AI570699, H70497, H70481, and N89574. | |
| HETAN20 | 195 | 535359 | 1-345 | 15-359 | AA336957, AA336982, and AA336981. | |
| HETAP59 | 196 | 509118 | 1-291 | 15-305 | AA336978, AA337032, AA337033, AA279029, and AL133312. | |
| HETAP94 | 197 | 960392 | 1-307 | 15-321 | AA336825, AA337256, AA337682, and AA337525. | |
| HETAR06 | 198 | 960839 | 1-301 | 15-315 | AA337121. | |
| HETAR60 | 199 | 934444 | 1-296 | 15-310 | AA337135, AI376239, AW405016, AW392584, AA782301, AL047643, AI061313, AA741301, | |
| | | | | | AI557271, AA364567, AA412065, AL078581, AC004024, Z93023, AC004841, AC004991, | |
| | | | | | AC004019, AP000555, AC005288, AC002094, Z83820, AC006538, AL049557, AC000085, | |
| | | | | | AC004983, U91323, AP000228, AP000140, L29074, AC005844, AC004859, U95737, | |
| | | | | | AC007429, AL022476, AC005058, AC003956, AL096776, AC004861, AP000088, Z83844, | |
| | | | | | AC002350, AP000076, AC004854, D87001, D88268, AL022394, AC005746, AL022397, | |
| | | | | | AC004467, AL022326, AC002477, and AC016831. | |
| HETAT83 | 200 | 918730 | 1-797 | 15-811 | AA337275. | |
| HETAZ13 | 201 | 536192 | 1-313 | 15-327 | AA337464, and AA298457. | |
| HETBA01 | 202 | 509189 | 1-225 | 15-239 | AA337530. | |
| HETBF45 | 203 | 508655 | 1-318 | 15-332 | AA337559. | |
| HETBH48 | 204 | 720853 | 1-298 | 15-312 | AA337853. | |
| HETBR25 | 205 | 509099 | 1-482 | 15-496 | R87344, AA338031, and AW155642. | |
| HETBW39 | 206 | 523046 | 1-334 | 15-348 | | |
| HETCE12 | 207 | 971505 | 1-674 | 15-688 | AA878439, AA337500, R11423, R05601, AA337219, AW373556, and AC005876. | |
| HETCE55 | 208 | 508666 | 1-444 | 15-458 | H47564, AA336636, and AA336635. | |
| HETCG63 | 209 | 841924 | 1-1765 | 15-1779 | AA336411, AA319330, AA337238, AA337599, AA337742, AI709289, W24609, AA308045, | |
| | | | | | AI659881, AI803103, AW236950, AA336555, AW242783, AA630205, AA516061, AA337527, | |
| | | | | | AA336474, AA782919, AL021878, AC005630, AL078475, AC006023, AL133371, AJ239329, | |
| | | | | | AC007204, AC005574, AC005908, AC002485, AC004055, Z83820, AC004074, AL031432, | |
| | | | | | AC006539, and AC004381. | |
| HBTCH92 | 210 | 921390 | 1-244 | 15-258 | AA337969. | |
| HETCL55 | 211 | 522829 | 1-406 | 15-420 | AW301200, and AI057175. | |
| HETDA81 | 212 | 525412 | 1-425 | 15-439 | AI347829, AI539038, AA164850, AI862333, AI208103, T91042, W87820, AW103512, | |
| | | | | | AA164851, AI538025, T83877, AI557283, AI673742, AA827331, AI565180, AI827139, | |
| | | | | | AI590154, AA780419, AA551005, AI022058, AI886882, AI963604, AA164745, AC006047, | |
| | | | | | AP000509, AC009542, AC009330, D84394, AL080317, Z97876, Z98750, AC004185, | |
| | | | | | AC005023, and AF058907. | |
| HETDD18 | 213 | 509110 | 1-425 | 15-439 | AA337063, and AB020858. | |
| HETDE67 | 214 | 883018 | 1-352 | 15-366 | | |
| HETDE86 | 215 | 855509 | 1-384 | 15-398 | AA337665, AI818119, AA337827, H55651, AC002051, AC002054, AC007664, AC008018, and | |
| | | | | | AP000550. | |
| HETDG67 | 216 | 960870 | 1-645 | 15-659 | AA337226, AA336474, AA460382, F35658, F28539, AA634465, AI963222, AI674747, | |
| | | | | | AA337527, AA336555, AA336411, and AI709289. | |
| HETDI03 | 217 | 925489 | 1-145 | 15-159 | AL049650. | |
| HETDL92 | 218 | 508990 | 1-260 | 15-274 | AA337546. | |
| HETDN90 | 219 | 695021 | 1-257 | 15-271 | | |
| HETDP21 | 220 | 525407 | 1-281 | 15-295 | | |
| HETDT15 | 221 | 660714 | 1-788 | 15-802 | N99226, N50058, AI709289, N66257, AI333306, AA999709, R16250, AI218967, AI201148, | |
| | | | | | AI754092, AC004150, AC006539, AC007204, AC006024, U82672, AC005592, and AC004381. | |
| HETDW59 | 222 | 827093 | 1-278 | 15-292 | AA337353. | |
| HETEB68 | 223 | 917400 | 1-257 | 15-271 | | |
| HETEQ16 | 224 | 952297 | 1-259 | 15-273 | | |
| HETEZ43 | 225 | 529591 | 1-347 | 15-361 | AL034400, and AF030186. | |
| HETFA40 | 226 | 523112 | 1-464 | 15-478 | AL021920. | |
| HETFC82 | 227 | 799658 | 1-530 | 15-544 | AL121162, AI684248, AW371221, AW371225, AW371199, AW371191, AW371187, | |
| | | | | | AL035291, AJ250075, Z96050, and AF097535. | |
| HETFE482289743511-696 | 15-710 | AL035982, AI564005, AW074802, AC006062, AC007461, AL031223, AF074903, Z86064, | | | | |
| | | | | | AC005189, AL022159, AC006369, AC004787, AL049831, AL122007, AC006101, AF001552, | |
| | | | | | AL109653, U73642, AC003002, AC006265, AC006972, AC002990, AC006305, AC006354, | |
| | | | | | AC007486, AL008633, AC004382, AC005799, and AL031666. | |
| HETFG29 | 229 | 795274 | 1-958 | 15-972 | AL045331. | |
| HETFI24 | 230 | 954104 | 1-1193 | 15-1207 | AI687645, AL046701, AL041179, and AB011137. | |
| HETFI81 | 231 | 523398 | 1-349 | 15-363 | | |
| HETFL39 | 232 | 973697 | 1-532 | 15-546 | | |
| HETFM43 | 233 | 973702 | 1-399 | 15-413 | N71545, AA019707, AW301855, AI560119, AA456149, AA503144, AI749306, AA056206, | |
| | | | | | AA747375, AI125615, AL110391, T47613, AA826144, AA843450, AA828851, H94871, | |
| | | | | | AW085794, AI890857, AA488111, AA284179, AA747480, AA077637, AA173334, AA747276, | |
| | | | | | AL096775, AC005722, Z99716, U85195, AE000658, AC005037, AL135744, AC004973, | |
| | | | | | AF001548, AL008716, U15422, AL022326, U91321, AC004595, AF196779, AC005921, | |
| | | | | | AC005514, AL031687, AC006441, AL021391, AC007227, AL035588, AC008080, AL132992, | |
| | | | | | AC000070, AC005778, AC005409, AC004878, AL050312, AC005600, Z81369, AL139054, | |
| | | | | | AC002364, AC009247, AC006390, AC000082, AL021154, AP000512, AL035417, AL079295, | |
| | | | | | AL031670, AL096712, AC005829, AC007021, AC004953, AC004890, AC002115, U89337, | |
| | | | | | AC005320, AC005043, AL109984, AC006449, AC002090, AC006211, Z83844, AL135960, | |
| | | | | | AJ131016, AC005996, Z82194, AC004797, AL009179, AL034400, AC007243, D26535, | |
| | | | | | Z69709, Z81367, AC007207, Z99916, AC004517, AC005772, AL121578, AC006146, | |
| | | | | | AC005940, AL078638, AP000692, Z97630, AL035086, AC002565, AC006511, AC002996, | |
| | | | | | AC005191, AL034429, AC007436, AC004134, AC006530, AC002525, AL049830, AC005049, | |
| | | | | | Z82198, AL021407, AL031774, AL049611, U95740, AL031005, AC005094, AL008719, | |
| | | | | | AF053356, AC004913, AF052684, AC004955, AP001054, U78027, AL020995, AC005200, | |
| | | | | | AL034420, AL050318, AL035460, AC006001, AL080243, AL031848, AC005104, AC006581, | |
| | | | | | AC006536, AC002477, AC003047, AC009263, AC006116, AC007790, AL049557, AC007057, | |
| | | | | | AC003982, D00591, AC006017, AF111167, AC004707, D89927, AP001052, AL133485, | |
| | | | | | AL133448, AP000552, AL021878, AC007386, AL021937, AC005924, Z73359, AC004832, | |
| | | | | | AL034424, AC005874, AF134471, Z86090, AL035072, AP000350, AF001549, AC005088, | |
| | | | | | AC003663, AC000385, Z83826, AC006285, AC008040, AC011504, AC006312, AC007688, | |
| | | | | | AC007055, AC004531, AC005082, AD001527, AC005261, AL132777, AC005480, AF015416, | |
| | | | | | AC007917, AC007435, AL132826, AL009181, AC006071, AC005015, AC005747, AL031295, | |
| | | | | | AC005366, AC004526, AL022318, AL033504, AC005488, AC005914, AC005399, AC018769, | |
| | | | | | U07563, AC004783, AC004791, AP000140, AC004805, AC005533, AC005215, AL022721, | |
| | | | | | AL031280, AL021939, Z94721, AL022718, AB000882, AC004477, AL031289, AL035422, | |
| | | | | | AP000346, AP000563, AC004554, AC005071, AL023799, AP000359, AC007421, AL035420, | |
| | | | | | AP000558, AL035415, AC003101, AL035249, AL132712, AF200465, AC005325, AL049631, | |
| | | | | | AC005695, AC005562, and AC007387. | |
| HETGH30 | 234 | 527929 | 1-114 | 15-128 | AC007655. | |
| HETGI40 | 235 | 505383 | 1-51 | 15-65 | | |
| HETGL62 | 236 | 523372 | 1-316 | 15-330 | AA857229, and AW207714. | |
| HETGL74 | 237 | 947978 | 1-598 | 15-612 | R30743. | |
| HETGN20 | 238 | 927789 | 1-748 | 15-762 | AA524918, AA524934, AW177242, AW177240, AW177241, AW177236, AW177243, | |
| | | | | | AW177239, AI380737, and AW176018. | |
| HETGQ76 | 239 | 542486 | 1-177 | 15-191 | | |
| HETG509 | 240 | 969632 | 1-160 | 15-174 | | |
| HETHD30 | 241 | 935175 | 1-521 | 15-535 | AA333629, AA380902, AA172147, Z55371, Z60082, Z57905, and AL023755. | |
| HETHE56 | 242 | 974348 | 1-245 | 15-259 | | |
| HETHH49 | 243 | 967737 | 1-627 | 15-641 | | |
| HETHO63 | 244 | 745503 | 1-585 | 15-599 | H85494. | |
| HETHO78 | 245 | 963592 | 1-648 | 15-662 | U59298. | |
| HETHR24 | 246 | 851412 | 1-448 | 15-462 | AA296378, and AA298030. | |
| HETHT53 | 247 | 974555 | 1-427 | 15-441 | Z69905, and AL049750. | |
| HETIF01 | 248 | 966185 | 1-209 | 15-223 | AA585101, D57491, Z28355, AA585155, AA585476, AI546999, AA585098, D61254, | |
| | | | | | AI541365, R29445, C16300, C16305, AI525556, AI541374, AA585439, T11028, Z30131, | |
| | | | | | AI546875, AI525316, AI526184, AI546945, D55233, AI525431, AI547039, AI557262, | |
| | | | | | AI541523, AI526140, AI557731, R28735, AI541205, AI541535, R29218, AI540967, D57186, | |
| | | | | | AI536138, AI525306, AI526194, AI557734, D61185, D53447, AI535660, AI557727, AI557787, | |
| | | | | | AI535639, R45895, AI557740, AI541307, AA585356, AI557807, AI546891, AI541013, Z32822, | |
| | | | | | AA283326, AA170832, AI525320, AI526073, AA585329, AI557084, AI526176, C16293, | |
| | | | | | R28892, T41289, AI557763, AA585453, R28895, AI557799, D53161, R28965, R29177, D60765, | |
| | | | | | AI556967, C16292, C14723, R28967, AI526187, AI541514, AI546828, D59751, AI546996, | |
| | | | | | C15069, AI541510, AI526113, D54897, I18597, AI541508, AA174170, AI546855, AI541534, | |
| | | | | | D60844, AI541517, AI541346, AI547250, AI526180, AI557808, C15120, AI525339, AI525328, | |
| | | | | | AI541527, AI557238, AI557796, AJ541415, AI541390, AI540974, C15406, AI525856, | |
| | | | | | AL044162, AL041086, AL043496, AL041296, AL041233, AL043444, AL044529, AL044125, | |
| | | | | | C14391, AA585325, AI541017, AL040193, AJ239433, AI541533, T41329, AI546829, | |
| | | | | | AL041324, AL043538, AL040621, AL041347, AL041098, AL041163, AL041277, AL041358, | |
| | | | | | AL041096, AL047012, AL040464, AL041346, AL040155, AL041197, AL043612, AI557602, | |
| | | | | | AL039915, AL040463, AL047219, AL041227, AL047057, AL047170, AL040119, AL047036, | |
| | | | | | AL041292, AL041051, AL047183, AL040322, AL041131, AL046330, AL041278, AL041133, | |
| | | | | | AL041159, AL041238, AL041142, AL045817, AL040625, AL040510, AL043467, AL044186, | |
| | | | | | AL044037, AL040091, AL040128, AL040168, AL040255, AL040285, AL040342, AI557533, | |
| | | | | | AL040332, AL040617, AL045684, AI540882, AL040745, AL040370, AL043677, AL040529, | |
| | | | | | AL046442, AL040839, AL041752, AL041168, AL043775, AL044165, AL043492, AL041602, | |
| | | | | | AL045920, AL037436, AL038838, AL044074, AL041635, AL045990, AL040458, AL044199, | |
| | | | | | AL044187, AI557279, AL040090, AL040263, AL040294, AL040329, AL040082, AL044272, | |
| | | | | | AL040444, AL041186, AL040148, AL041730, AL041523, AL043627, AL079878, AL046392, | |
| | | | | | AL041374, AL040052, AL043845, AL039338, AL042135, AL044064, AL038983, AL039316, | |
| | | | | | AL043923, AL043814, AL043848, AL037435, AL041459, AL043570, AL041577, AL044201, | |
| | | | | | AL044258, AL046850, AL038532, AL040768, AL037727, AL046994, AL040414, AL040571, | |
| | | | | | AL046914, AI142134, AL043537, AI546831, AL041140, T23985, D59436, AI557408, | |
| | | | | | AL045725, AL040238, AA585378, AL039744, AA585434, AL040253, AI557864, AI541356, | |
| | | | | | AR062871, A25909, AR038855, Y09813, A85395, A85476, AR037157, AJ244005, Y16359, | |
| | | | | | D50010, AF082186, AJ244004, AR062872, AR062873, D78345, U94592, A20702, AR017907, | |
| | | | | | A20700, AJ244003, A43189, A43188, AR038762, AJ244007, Z32836, A70872, A70869, | |
| | | | | | A98420, A98423, A98432, A98436, A98417, A98427, A98767, A93963, A93964, I63120, | |
| | | | | | I44681, X83865, A84772, D13509, A84776, A84773, A84775, X81969, A84774, AR054109, | |
| | | | | | AR067731, AR067732, A86792, A58522, A91750, AR008429, I13349, A60212, A60209, | |
| | | | | | A60210, A60211, I18895, I05558, AI8053, AB025273, I08396, I08389, I84553, I84554, I15717, | |
| | | | | | I15718, E03627, I48927, A90655, D13316, A02712, A77094, A77095, A81878, A95051, I06859, | |
| | | | | | AI8050, A23334, A75888, I70384, A64973, A60111, A23633, AR007512, AR031566, A35536, | |
| | | | | | A35537, A02135, A02136, A04663, A04664, AR038066, I00682, AI1623, AI1624, E00609, | |
| | | | | | E13740, AI1178, E01007, AI0361, AR043601, M28262, AI1245, I03331, A02710, E12615, | |
| | | | | | AR035193, A92133, E14304, A07700, AI3392, AI3393, I62368, AR031488, I13521, I52048, | |
| | | | | | A27396, AR027100, I49890, I44531, I28266, I21869, A91965, I44516, A70040, E16678, | |
| | | | | | A82653, E16636, A93016, AF149828, A24783, A24782, A95117, A58524, A58523, I08395, | |
| | | | | | AC005913, I19525, I01995, I25027, I26929, I44515, I26928, I26930, I26927, I08051, I60241, | |
| | | | | | I60242, AR051957, A20699, E00696, E00697, E03813, I66482, AR009151, I66485, I66483, | |
| | | | | | I66484, I66498, I66497, I66496, AR027099, I66486, I66487, A22738, AR051652, AR051651, | |
| | | | | | X07299, AR064707, AJ230935, E17098, I66495, I66494, AJ230972, A22734, AJ231028, | |
| | | | | | AR022273, AJ230902, AR054723, X55486, AJ231009, AJ230845, AJ230867, AJ230951, | |
| | | | | | AR051864, I36244, A06631, S60422, X82786, AR051865, B12584, AR063812, Y14219, | |
| | | | | | AR035975, AJ231011, AR035977, AF006072, X76012, I05845, AR031358, AR031365, | |
| | | | | | AJ244006, AJ230996, AJ243486, I03669, I03668, A16035, AR003381, I33632, AR017826, | |
| | | | | | I18302, AR035974, AR035976, AR035978, E03654, A24548, A24546, AF213384, AF147331, | |
| | | | | | M11147, X03743, A62298, AR050070, A82595, A82593, X82834, M10119, A22739, A05993, | |
| | | | | | and A05991. | |
| HETIG71 | 249 | 974359 | 1-397 | 15-411 | | |
| HETIJ84 | 250 | 766589 | 1-386 | 15-400 | AA359333, H80204, T81361, W39405, W26521, AL037788, AI340563, AA831054, AI942228, | |
| | | | | | AW025654, AI656682, AI867892, AI392798, H78428, AI431922, AI935355, N74643, | |
| | | | | | AA470851, AI984946, AA136269, H58033, R24652, W25612, N88059, and AF161432. | |
| HETIJ85 | 251 | 883991 | 1-270 | 15-284 | AA336474, AA336555, AA634465, AI963222, AI674747, and AA337527. | |
| HETJQ89 | 252 | 764951 | 1-367 | 15-381 | AA732024. | |
| HETJU60 | 253 | 739804 | 1-632 | 15-646 | | |
| HETIY84 | 254 | 935947 | 1-152 | 15-166 | AW410053. | |
| HETJD30 | 255 | 974558 | 1-651 | 15-665 | | |
| HBTJD86 | 256 | 909130 | 1-637 | 15-651 | AA283174, AA813107, N85059, AI829548, H66598, H47422, AI025850, AW193437, | |
| | | | | | AL049869, AB023214, AC004230, AL133163, AL024498, AC006006, AC005393, AL031722, | |
| | | | | | AC009516, AP000557, AC004463, AC002316, AL030995, AC004799, AC004876, AC005696, | |
| | | | | | Z93023, and AC005015. | |
| HETJG63 | 257 | 950017 | 1-480 | 15-494 | | |
| HETJI32 | 258 | 806435 | 1-600 | 15-614 | R02503, AA873257, AI791771, AL021997, and AC005678. | |
| HETJK67 | 259 | 751072 | 1-491 | 15-505 | | |
| HETTN51 | 260 | 767932 | 1-544 | 15-558 | | |
| HETJT95 | 261 | 789310 | 1-401 | 15-415 | AA528140, AI375677, AW237773, AI624970, AI420574, AI244780, and AI624952. | |
| HETJX04 | 262 | 927120 | 1-848 | 15-862 | AA853282, AA370481, AA625156, AB025258, and AB025259. | |
| HETJY11 | 263 | 966194 | 1-603 | 15-617 | AA356376, AI354409, AA610255, AA577824, AA158549, AL120004, AW265688, AI583532, | |
| | | | | | AW265276, AI049630, AA701122, AI801505, AI283938, AI243793, AW403829, AA491423, | |
| | | | | | AI417469, W96277, AI565084, AI358776, AA626840, AA558404, AA502110, AW089625, | |
| | | | | | AI133514, AI733856, T47138, AW268329, AW275432, AA551067, AI049845, AI421257, | |
| | | | | | AA834816, AI061303, AI687972, AA297789, F31811, R70883, AL041375, AI912401, | |
| | | | | | AA133293, AI090334, AI538404, AI336771, AA632556, AW069227, AA176605, AA612727, | |
| | | | | | AA102737, AI252726, H95865, AI623364, AA484022, AI255083, AI634187, AW008184, | |
| | | | | | H29914, AA599532, AI369076, AA525331, AA582746, AL040430, H67064, AI671077, | |
| | | | | | AW068580, AA020873, AW243945, AA515924, AI355246, AA557945, AA513851, AI473995, | |
| | | | | | AA493789, AA581471, AA485343, AA609826, AA846923, AA018923, AW167202, | |
| | | | | | AW341955, AA608675, AA630854, AI567391, H43771, AI054030, AA376358, AW238341, | |
| | | | | | AW237905, AI932871, AI457313, AA218684, D44672, AW129188, AA084320, AI474127, | |
| | | | | | AA444166, AI431513, T15767, AW341978, AI469564, AA610433, AI520925, H01243, | |
| | | | | | AA831426, AI309943, AA491767, AA302982, AI049701, AW270385, AA182731, AA551035, | |
| | | | | | F35674, AA910941, AI720403, AI570237, AI610468, H61742, N33587, AI358928, AA489856, | |
| | | | | | AI073373, F00533, AA857812, AI125143, AW236219, AA501782, AI282724, AA666295, | |
| | | | | | AI869797, AI246386, AI816058, AC005015, AC002350, AC005839, AC002470, AC006512, | |
| | | | | | AF001550, AL133246, AL009031, AC002326, AC007225, AF064861, AC003041, AL049766, | |
| | | | | | AC002126, AC005874, AF134471, AC006277, AL109628, AC006312, Z99943, AC005089, | |
| | | | | | AC005736, AC006160, AC003037, AC009044, AP000501, AF205588, AC008372, AC005067, | |
| | | | | | AC004526, Z84487, AC006050, AC005920, AC007057, AP000252, AL132712, AP000212, | |
| | | | | | AP000134, AP000704, AF047825, AL031584, AC006449, AC005779, Z83846, AL022163, | |
| | | | | | AC006059, AC002351, AC003104, AL050318, AC004531, AL117352, L14561, AC005531, | |
| | | | | | Z95331, Z98050, AC005529, AC002128, AL135744, AC004230, AC007488, AC005722, | |
| | | | | | AL034549, AC007546, AC006501, AC004983, AC007878, AL049829, AC000004, AC006459, | |
| | | | | | AC004755, AC006285, AC009509, AC005527, AC006130, AL035587, AC006480, AL031729, | |
| | | | | | U91323, AC004686, AC005765, AC004106, AC006084, AC007226, AC004820, AC004491, | |
| | | | | | AC004019, AL031003, AC004865, AL034420, AC002045, L44140, AL031228, AL109758, | |
| | | | | | AC006380, AF111170, AL031311, AP001053, AC006529, AC007193, AC006581, AC003689, | |
| | | | | | U95090, AC004895, AC005081, AL031258, AC008040, AC003071, AP000321, AL035684, | |
| | | | | | AC006023, AC004985, AL078463, AL034417, AC006211, AC006071, AL021920, AC007308, | |
| | | | | | AC006252, AC004813, AL096712, AL096701, Z99128, Z83844, AC006946, AC005593, | |
| | | | | | AC006165, AC005300, AL031005, AC005197, AC016025, AL132987, AC007114, AC007899, | |
| | | | | | AB023051, AC007050, AC000082, AC003982, AC005914, AC007695, AL031685, AP000121, | |
| | | | | | AP000167, AP000052, AC004125, AC020663, AL121825, AC006571, AP000952, AL133245, | |
| | | | | | AF067844, AC003963, AP000512, AL031597, AC005829, AL049760, AC005696, AF196779, | |
| | | | | | AC005006, AF207550, AF157816, AC016027, AC004448, AC004408, AC006064, AC005803, | |
| | | | | | AC005523, AC007637, AC016830, AC002404, AC006121, AC004000, AL035079, AC006966, | |
| | | | | | AC005057, AL034582, AC007277, AC005755, AC008149, AL031681, AL009181, AL049776, | |
| | | | | | AL023879, AC004596, AC002312, AC005071, Z98946, Z95115, AF134726, AL096791, | |
| | | | | | AC002425, AC005086, AC004955, AF001549, AL121603, AL117337, AL021453, Z68870, | |
| | | | | | AL080243, AC004973, AL117258, Z97989, L78810, AC005900, AC004695, AL117694, | |
| | | | | | AC007151, AP000689, AL023807, Z98941, AL109798, AL022476, AP000152, Z82206, | |
| | | | | | AB020868, AL049839, AC007279, AC005037, AC007686, AC004771, AJ003147, AC004878, | |
| | | | | | AC004933, AL020997, Z95116, AL035423, AC006132, Y18000, AC004655, AP000356, | |
| | | | | | AC002476, AF165926, AC005972, AC003108, AF053356, AJ246003, AC004967, AL049712, | |
| | | | | | AC007684, AP000115, AC007649, AC003962, AC003950, AP000694, AL031588, AC005377, | |
| | | | | | AL049636, AC005004, AC002991, and AA910844. | |
| HETKA38 | 264 | 894600 | 1-649 | 15-663 | AI799104, AA972394, and R07977. | |
| HETKG67 | 265 | 974355 | 1-718 | 15-732 | AW084172. | |
| HETKH01 | 266 | 915320 | 1-302 | 15-316 | | |
| HETKH92 | 267 | 790910 | 1-198 | 15-212 | AR062277. | |
| HETKM55 | 268 | 974362 | 1-730 | 15-744 | | |
| HETKQ65 | 269 | 855449 | 1-474 | 15-488 | AA336548, AJ251025, AC002098, and AJ251029. | |
| HETKV26 | 270 | 910030 | 1-680 | 15-694 | AC003665. | |
| HETKX91 | 271 | 789797 | 1-307 | 15-321 | | |
| HETKZ65 | 272 | 941045 | 1-608 | 15-622 | AA312013, and AF067972. | |
| HETLB04 | 273 | 920894 | 1-1373 | 15-1387 | AA702803, AI803643, AI566865, AA766437, AW005007, AA043795, AA683129, AI817677, | |
| | | | | | AA512883, AA505838, AA631295, AA808400, AA599331, AI826399, AA767812, AA808767, | |
| | | | | | AW385923, AI016110, AA570116, AA437055, AA471293, AA394009, AA442492, W16809, | |
| | | | | | AA306378, AA287514, AW327292, W20041, T81379, W16892, W16816, W76580, AI086244, | |
| | | | | | AA022944, N39663, N39773, N28024, AA355038, N40080, T24737, AA333960, AA337096, | |
| | | | | | AA336844, AI061614, AA092603, H69650, N95146, W16976, AA431265, and AW298810. | |
| HETLH89 | 274 | 786458 | 1-249 | 15-263 | AA463820. | |
| HETLM46 | 275 | 974361 | 1-429 | 15-443 | AC006478. | |
| HJMAE34 | 276 | 957079 | 1-292 | 15-306 | | |
| HJMAZ84 | 277 | 919847 | 1-398 | 15-412 | AA002128, D80614, AI936856, AA454962, W45609, W25476, H79084, AA253291, D81240, | |
| | | | | | D81550, AI310465, AA454963, AW187987, H77419, AA443024, D61329, AA878315, H93507, | |
| | | | | | D61227, H77765, AI991959, AI571297, N66618, N93599, AA926681, AA861197, AW341582, | |
| | | | | | AI130710, AI089399, AA565959, AA428582, AA855002, AI052480, AA463465, AA502363, | |
| | | | | | AA926699, H93719, AA226686, H79085, AI167771, AI084567, AA594578, AA548424, | |
| | | | | | AW263196, AI123575, AI806033, AI185582, H26225, AA977298, AA904619, AA913056, | |
| | | | | | AA830635, AA809388, AI418325, AA954613, AA428581, and AF151109. | |
| HJMBT23 | 278 | 858254 | 1-657 | 15-671 | W68790, AI553754, AA741320, AI791865, H20412, AA865287, AI340302, AI681259, | |
| | | | | | AW450355, AI215794, AI767774, AI991972, AI807751, AA378382, AI369759, R43803, | |
| | | | | | AW451952, AA642194, W68697, and AA243542. | |
| HLMNG77 | 279 | 675752 | 1-238 | 15-252 | AW170054, AI198826, AW104425, AI269001, AI188129, AI217517, AI695935, AA758120, | |
| | | | | | AI016865, AW104993, AB011129, and AC020663. | |
| HLWAB50 | 280 | 856552 | 1-353 | 15-367 | | |
| HLWAD08 | 281 | 958554 | 1-282 | 15-296 | T23963. | |
| HLWAG51 | 282 | 964389 | 1-1712 | 15-1726 | AI742201, AA702146, N41421, N42024, R53820, AI040758, AI022068, N29636, R74596, | |
| | | | | | AA678080, AI743349, N92675, R56690, AA034028, AI471941, AI241444, AA331067, R81024, | |
| | | | | | H54160, H59318, AI184751, AA779352, N41642, R22378, H66306, H13492, N30300, N26409, | |
| | | | | | R27135, H00724, R74487, T86855, R56846, N73527, AA461540, R32619, R53865, R78495, | |
| | | | | | AA367506, W90130, R27290, R21881, C17564, N63764, W90088, AI220639, H67730, H54003, | |
| | | | | | R25201, C18787, R32507, R23955, H00639, R80819, AI248028, AA367507, H59271, | |
| | | | | | AA368366, R23956, H13441, AA938123, and AW390834. | |
| HLWAH41 | 283 | 944774 | 1-946 | 15-960 | R98276, I95945, W33061, AW392670, AW384394, AW363220, U46351, AL119457, | |
| | | | | | AL119324, AW372827, Z99396, AL119497, AL119319, AL119341, AL119443, U46341, | |
| | | | | | AL119355, AL119484, AL119363, AL119391, U46350, U46347, U46349, AL119444, | |
| | | | | | AL119483, AL119396, U46346, AL119335, AL119418, AL134902, AL119522, AL119439, | |
| | | | | | AL119401, AL134528, AL042450, AL119399, AL037205, AL119496, AL134533, U46345, | |
| | | | | | AL134536, AL042614, AL134525, AL134538, AL043019, AL042965, AL042975, AL042544, | |
| | | | | | AL042896, AL043033, AL042984, AL042970, AL042542, AL043029, AL042551, AL043003, | |
| | | | | | AL119464, AL119488, AC000047, AB026436, AR054110, A81671, AR066494, AR060234, and | |
| | | | | | AR069079. | |
| HLWAJ13 | 284 | 920690 | 1-869 | 15-883 | AI032745, AA024482, AA922863, AI701944, AI150858, AI270332, AI151319, AA858133, | |
| | | | | | AW135972, AI093066, W38159, AI247539, H04083, AA641624, H02150, H01456, AA382448, | |
| | | | | | H04750, T49622, AI219287, W02674, AA676625, AI961431, H02149, N27194, AA595296, | |
| | | | | | AA004543, H01225, I58656, AA649738, H01013, AA641643, AA897262, H03388, R63061, | |
| | | | | | AW386273, AA909471, AW389613, R71626, R71240, AI634930, R25176, R79411, AW389614, | |
| | | | | | R79410, R76109, AI202312, AI866010, R24676, W57657, W25628, N39940, AA393303, | |
| | | | | | AC004231, and AL117538. | |
| HLWAJ64 | 285 | 746460 | 1-36715-381 | AA654781, AA526630, AA478355, AL037771, AI630176, AW275498, AI470646, AI124610, | | |
| | | | | | AA846952, AW410354, AI042311, AA837087, AI174766, H23653, C18993, AW089101, | |
| | | | | | AL036037, AL119691, AA493695, AW238121, AI049508, H18354, AL135357, AA523841, | |
| | | | | | AI343233, AI560085, AW080811, AA302973, AA292178, AL039145, AA630672, AA063173, | |
| | | | | | AA704393, AW168520, AI933579, AL037383, AI783581, AA809546, F00107, AA468131, | |
| | | | | | AI366993, AW021735, AA507824, AW303008, AA904274, AA679936, AW168420, | |
| | | | | | AA613789, AA279421, AA640410, AA640430, AI345157, AA303007, AI963720, AW150476, | |
| | | | | | N72663, AW166808, AI246796, AW268973, AI612142, N41888, AA483256, AL043719, | |
| | | | | | AI864813, AI732120, AA174016, AW440545, AA174017, AI818737, AI687343, AA548058, | |
| | | | | | AL121871, AF196779, AL034379, AC006552, AF114156, AC004999, AC006241, AC005412, | |
| | | | | | L44140, AC006001, AC004000, AL033392, AL031283, AJ229042, AL022320, AC006316, | |
| | | | | | AC004707, AC003046, J02846, AC004156, M16553, U80017, AP000114, AF130343, | |
| | | | | | AC005877, AP000466, AP000952, AC004887, AL031311, AC002418, AL096702, AC006509, | |
| | | | | | AC006111, AC006511, AP000503, AP000151, AC005031, AP000013, AP000010, Z69719, | |
| | | | | | AL031432, Z82173, AC005701, AL078477, AL035458, AL031123, AC005089, AC004963, | |
| | | | | | AC007666, AL049569, AF134726, AC004985, AC004386, AC006115, AL034417, AC002117, | |
| | | | | | AC007151, AC004087, AL022313, D87675, AC004019, AC000052, AF031076, AL023807, | |
| | | | | | AC002310, AC004098, AC003043, AJ239322, AC006203, AC004983, AC006014, AL008729, | |
| | | | | | AC004922, AF050154, AC003684, AL135744, AC004417, AC005703, AL031594, U95739, | |
| | | | | | AC006468, AC005519, Z83846, AL049643, Y07848, AL133399, Z82214, AC007630, | |
| | | | | | AC002522, AC006960, AP000155, AC007917, AC005300, AC005207, AL021546, AC007066, | |
| | | | | | AC005156, Z54334, AL034420, AL050318, AC005231, AL035413, Z84469, AC005242, | |
| | | | | | AC004819, AC005803, AL096843, AL050325, AC007551, AL049776, AC005488, AL109758, | |
| | | | | | AC007971, AC005815, Z94044, AC004832, Z68321, AC007237, Z94056, AC005067, | |
| | | | | | AC005602, M89651, Z97630, AB023049, AC004253, AF030876, AC005940, AL035072, | |
| | | | | | AC002390, AC007686, AF064861, AC003083, AF030453, U40369, AC002377, Z99716, | |
| | | | | | AL049867, AL022721, AC007676, Z98752, AC002540, AF176815, AC006965, AL031427, | |
| | | | | | AC008394, AC000120, I05724, AC006211, AL109984, AC006985, AC003109, AC005261, | |
| | | | | | AC005307, AC002352, AC005088, AC006571, AL031257, AC005808, AC009516, AC006064, | |
| | | | | | AP000557, D00596, AC006265, AC006515, U47924, AF047825, AL121655, AC005498, | |
| | | | | | AC004217, AL022239, D83989, AC005914, AL035461, AC006261, AC004144, AC005180, | |
| | | | | | AC009247, Z98051, AC005484, AL022326, AC008044, AC005725, AF207550, Z98884, | |
| | | | | | AP000350, X54181, AC004142, AL008718, AL033543, AL031259, AC004241, Z49918, | |
| | | | | | AF024533, AL035450, AC010168, AC004968, AC006368, AC007055, Z82178, AC007298, | |
| | | | | | AL122020, AB000877, Z94721, AP000553, AL022238, U96629, AC002400, AC003982, | |
| | | | | | AC005785, AC002528, AL049766, AC003972, AC009509, AC008119, AC005520, AC007312, | |
| | | | | | AC006125, AC007292, AC007848, AC007136, AC007226, and AL035462. | |
| HLWAK69 | 286 | 694216 | 1-551 | 15-565 | H69568, and AL022393. | |
| HLWAK94 | 287 | 715727 | 1-394 | 15-408 | R80441, R53837, AA367782, AA713884, AA713743, and AB033064. | |
| HLWAR77 | 288 | 947484 | 1-1275 | 15-1289 | AA449919, AA449920, and AF119815. | |
| HLWAR78 | 289 | 723330 | 1-495 | 15-509 | AA367499, and AI138461. | |
| HLWAU18 | 290 | 666273 | 1-439 | 15-453 | H68343, AI915081, H40478, AA586433, AA326452, AA808631, AA650447, AW265688, | |
| | | | | | AA837771, F17700, N89894, AI567391, AA523293, H63660, AW264393, W18189, AA533408, | |
| | | | | | AA715955, AA582746, AA507993, AA339923, AA904211, AA452569, AL134167, AA937809, | |
| | | | | | F31867, F33037, AI791185, AA745524, AA947369, AI243793, AA878407, AA021139, R93854, | |
| | | | | | AI185394, F30310, AI801563, AI565084, AI923052, AI580707, W78056, AA297006, | |
| | | | | | AA228778, AA526424, AA936718, AI198718, AA347927, AW151541, AA297496, AW366361, | |
| | | | | | AI270647, AA668587, AI370475, AW082076, R70883, AI858889, AI821273, F09355, R70884, | |
| | | | | | AA947375, AI697242, AA658934, AA365744, AI521525, AW002831, AA558366, AC003982, | |
| | | | | | AC016025, AC005180, AC006285, AL009181, AC002310, AC005519, AC005516, AC005746, | |
| | | | | | AC004797, Z82194, AL050348, AL050307, AC002128, AC004623, U52111, AF067844, | |
| | | | | | AL080242, AP000553, AC009516, AF161800, AC005037, Z82215, AC002511, AL133353, | |
| | | | | | AL021977, AL008723, AL031577, Z82172, AC006160, AL024498, AL049538, AC020663, | |
| | | | | | AL096757, AL135922, AL023553, AC006356, AP000496, Z98200, AC000134, AC007536, | |
| | | | | | AC006205, AC007324, AC004453, Z96811, AC003002, AF104670, AC003664, AC006466, | |
| | | | | | AC005231, AC004594, AL035400, AC005182, Z82245, AP000533, AC005841, AC007688, | |
| | | | | | AL031595, AL031643, AC005899, AL078463, AC005520, AL035443, AC005383, AF111170, | |
| | | | | | AL033375, AL110503, AL132800, X87344, AF001549, AC005914, AL050318, AC006449, | |
| | | | | | AL022316, AB012113, AP001056, AF108083, AC007393, AL035659, AC003976, AL032821, | |
| | | | | | AC005486, AC009181, AL021368, AC008040, Z97183, AC006965, AC004887, Z95115, | |
| | | | | | AL109758, AC005944, AR020909, L76927, AC002120, AC002347, AC007681, AC005881, | |
| | | | | | AL031657, Z69921, I34294, AC004983, AC004961, AL034553, AC005064, AC004020, | |
| | | | | | AP000552, AC005291, AC002991, AC002492, AL022326, AP001138, AC005484, U91325, | |
| | | | | | AC005702, AL021395, AC007225, AC000353, U95742, AL133448, AL008720, AL022322, | |
| | | | | | AC006486, AC005277, AC005244, AC004832, AL033397, AC016027, AC016830, AL135960, | |
| | | | | | AJ131016, AC002044, AL132712, AC005071, AC007216, AC006035, AL049696, AC005962, | |
| | | | | | AC006166, AL049760, AP001054, AC002477, AC004631, Z97184, AF031078, AF030876, | |
| | | | | | AL031311, AL133371, AC005049, AC006529, AC007292, AC008989, AC006473, AP000695, | |
| | | | | | AC005193, AL122021, AC005378, AL049697, AP000696, AC008012, AL022721, AC002394, | |
| | | | | | L25272, U02052, D79983, AL049713, AC004653, AL035682, AC005255, AC002364, | |
| | | | | | AC006344, AL021528, AL034400, AL031667, AL021578, AC007263, AC007919, AC005940, | |
| | | | | | AC005527, AC005768, Z84496, AL024493, AL050332, AC003 688, AL049634, AL096712, | |
| | | | | | AC007395, AC005179, AB023051, AL035071, Z93930, AL008632, AC004073, AC004622, | |
| | | | | | AL035460, U91318, AP000501, AC005683, AC004056, AC006064, AC005736, AC002543, | |
| | | | | | AL096701, AC004528, AL035462, AC006388, AC008150, AL096704, AP000152, AP000011, | |
| | | | | | AL035423, AC005878, AL117344, AC005220, AC007663, AF111168, AP000300, AL049869, | |
| | | | | | AF038458, AC007695, Z98048, AF217403, AL031845, AC004030, AL031300, Z75407, | |
| | | | | | AD000684, AL110114, AC004854, AP000495, AC005476, AL031276, Z98742, and AL021939. | |
| HLWBA11 | 291 | 966796 | 1-338 | 15-352 | | |
| HLWBA25 | 292 | 677944 | 1-440 | 15-454 | N47928, D78769, AA002046, AI655391, and C16888. | |
| HLWBE31 | 293 | 934562 | 1-329 | 15-343 | | |
| HLWBE92 | 294 | 791362 | 1-505 | 15-519 | AA368122. | |
| HLWBJ02 | 295 | 919639 | 1-371 | 15-385 | AL133404. | |
| HLWBK40 | 296 | 711000 | 1-432 | 15-446 | | |
| HLWBN49 | 297 | 713600 | 1-1086 | 15-1100 | R27276, R83085, N79154, R67710, H67488, R66311, H54211, H80349, R27267, H66895, | |
| | | | | | H87378, N99360, W03263, N62439, N69438, N71427, and AC005281. | |
| HLWBO68 | 298 | 529323 | 1-221 | 15-235 | N52311. | |
| HLWBQ84 | 299 | 782938 | 1-251 | 15-265 | | |
| HLWBQ86 | 300 | 703465 | 1-475 | 15-489 | AA947352, AA493245, AI307563, R00693, AI358505, AA629668, AA772493, AA557945, | |
| | | | | | AA640305, AA152398, I47075, AA633804, AI344906, AI754257, AI523356, AA584360, | |
| | | | | | H81012, AI620666, AI459879, AI318548, AI885896, AI567676, R79396, T52366, AI114755, | |
| | | | | | AA155817, AA156183, AA349923, AA636077, F35374, AI631299, AA643768, AA524604, | |
| | | | | | AI300507, AW157128, AI969090, W03800, AI803824, AW080118, AW407679, AA601290, | |
| | | | | | AA573564, AW277240, AA369465, AI309059, AI251024, AI828721, AA569220, AA995445, | |
| | | | | | R26871, AW021674, AA015948, AI572680, AW149241, R87909, AI147511, R88475, | |
| | | | | | AI925588, M77964, AI860648, AA447247, AI174701, AW273201, AW273146, AA804975, | |
| | | | | | AW192002, AA522864, AA809104, AI821945, F00937, H53109, AA639209, AA486896, | |
| | | | | | AA526542, R91138, T57516, AA021061, AI002950, AA503932, AW008217, AA604601, | |
| | | | | | AA579082, R86876, AW366198, AA669458, AA351868, AA629533, T57562, W69639, | |
| | | | | | AL022097, AL031594, AC006315, AC016027, AP000692, AC005932, AC003102, AC007298, | |
| | | | | | AC016830, Z97630, AC005255, Z69650, AL022323, U80017, AC005844, AF207550, | |
| | | | | | AL031311, AC004447, AC007227, AC007707, AC005031, AL008734, AC004999, AC007690, | |
| | | | | | AL121603, AL132994, AC006120, AC005516, Z97632, AL133355, AC006162, AL035458, | |
| | | | | | AL031427, AC007381, AC000003, AL031229, Z74696, AC005664, AC005206, AP000275, | |
| | | | | | AC005355, AC005251, AC005667, AC002491, AC004913, AP000037, AP000105, AP000469, | |
| | | | | | AL031657, Z98950, AC005993, AC002395, AP000356, AL049759, AC007263, AC006948, | |
| | | | | | AC006538, AC004856, AL121652, AC004477, AC004835, AJ003147, AC002465, AP000694, | |
| | | | | | AC004997, AC005703, AB001523, AC005581, AL121580, AP000509, AC005585, AC000084, | |
| | | | | | AF111169, AC005821, AC005663, AL049562, AL022165, AL096712, AL021877, AC005231, | |
| | | | | | AB023051, AL049761, AC004991, AL034420, AL031177, AC005589, AC004257, AC005180, | |
| | | | | | AC004953, AL031291, AC006512, AL021393, AL080243, AL122020, AC004805, AL022726, | |
| | | | | | AC007022, AB020873, AL139054, U51280, AC007243, AC005331, AC005305, AC006048, | |
| | | | | | AC007283, AC006057, AP000099, AL008716, AC004150, AL031680, AC005913, AC004876, | |
| | | | | | AC001551, AC004806, AC007361, Z83826, AL035079, AC004914, AC007877, AC004458, | |
| | | | | | AC005632, AC006312, AC005914, AL049776, Z84718, AC007637, AC005209, AP000512, | |
| | | | | | AJ251973, AC002369, AC004254, AC005519, AC008115, AP000036, AC000070, AC003999, | |
| | | | | | AC005602, AL035460, AF006501, AL031674, AP000351, AL031186, AC002477, AL096701, | |
| | | | | | AL049709, AL031284, AC006236, AC007390, AL020997, AL110502, AL024498, Z84469, | |
| | | | | | AC004859, AL035455, AC007564, AC006079, AC004832, AC005822, AL121595, AL022067, | |
| | | | | | AC007314, AL096791, AC005746, AC005041, AF107885, AC004801, AL135744, AL049780, | |
| | | | | | AC007055, AC002524, AC005049, AF109907, AL031721, L47334, AC010205, AF015262, | |
| | | | | | AC004076, AC004560, AL133448, AL022315, AF205588, D34619, AC004921, AJ229043, | |
| | | | | | AL021395, Z98742, AC016025, AL132826, AC003957, AC008171, AL031670, AC002079, | |
| | | | | | U73479, AC000075, AP000260, U95739, AL035209, Z82201, AC006547, Z81450, AC002302, | |
| | | | | | AC004652, AP000503, AC004659, AC006013, AC007050, Z82198, AC005060, AC004500, | |
| | | | | | AC005755, AL096757, AJ133269, AC006511, AC009405, AF111168, AC005318, AC004032, | |
| | | | | | AL021391, AL049777, AC005837, AL031985, AC005759, AC004854, U89337, AP000030, | |
| | | | | | AL021155, AL031587, Z83846, AC006390, AL031058, AC002364, AL031767, AL022326, | |
| | | | | | Z97056, AC006597, AC005856, AL022313, AC004000, AL022302, AL132992, AC004099, | |
| | | | | | AC004796, AL022336, AC004695, and U91326. | |
| HLWB514 | 301 | 925300 | 1-271 | 15-285 | | |
| HLWB543 | 302 | 774175 | 1-448 | 15-462 | | |
| HLWBZ74 | 303 | 679215 | 1-532 | 15-546 | H12696, AA367915, and AC005281. | |
| HLWCA67 | 304 | 577929 | 1-886 | 15-900 | W81241, H12868, H60705, AW393433, R73306, R65857, AI091425, AI808222, AI149187, | |
| | | | | | AA994537, AA700322, AC000115, Z97632, and AF137387. | |
| HLWCM44 | 305 | 727699 | 1-310 | 15-324 | AL121578. | |
| HLWCM70 | 306 | 926850 | 1-343 | 15-357 | W31589, AI829352, AI982989, R45778, AI346428, AA031570, AA602550, AA455757, | |
| | | | | | AI342486, AA031571, AI394271, AI754665, N51169, AI908523, N50210, and AC005832 | |
| HLWCO66 | 307 | 750779 | 1-519 | 15-533 | | |
| HLWCQ53 | 308 | 869700 | 1-632 | 15-646 | R24069, AI148527, AA513449, AI809692, AW452872, AA954445, AA812573, H57889, | |
| | | | | | AW183378, AI619978, AA813225, AW197888, and R26598. | |
| HLWCQ62 | 309 | 742778 | 1-824 | 15-838 | AI024849, AI024871, N47115, and N50324. | |
| HLWCQ76 | 310 | 768018 | 1-261 | 15-275 | AI828591, AI954470, AI799304, AI814054, AA455520, T91958, AL135108, and D80002. | |
| HLWDA01 | 311 | 913768 | 1-530 | 15-544 | AB020629. | |
| HLWDB18 | 312 | 790969 | 1-688 | 15-702 | Z43873, AA502583, W23097, AL048979, AI797390, AI656908, AI194040, and X99253. | |
| HLWDD02 | 313 | 953283 | 1-412 | 15-426 | | |
| HLWDE60 | 314 | 868276 | 1-439 | 15-453 | AC007073, U95626, and AC004065. | |
| HLWDL71 | 315 | 759843 | 1-38 | 15-52 | | |
| HLWEE76 | 316 | 973315 | 1-384 | 15-398 | | |
| HLWFG82 | 317 | 929647 | 1-545 | 15-559 | AI802325, AI161267, AI885931, AA219338, AI660388, AW170791, AW410057, and S56581. | |
| HLWFQ04 | 318 | 856488 | 1-703 | 15-717 | AB023186. | |
| HMVDU41 | 319 | 957804 | 1-600 | 15-614 | AW195334. | |
| HNBTP01 | 320 | 914428 | 1-943 | 15-957 | AI218626, AI076006, AI922744, AI797880, AI872391, AI559566, AW162613, AI565503, | |
| | | | | | AA449042, AI857802, AW248493, AA074070, AA679085, AI922373, W76538, AA581796, | |
| | | | | | AI292006, AW172513, AI609183, AI682939, AA747871, AA449757, AI885613, AW268637, | |
| | | | | | AA928020, AA568598, AI683858, AW073851, N79729, N62781, AI371131, AI367698, | |
| | | | | | AI884907, AW191998, AW016535, N93245, AA379280, AA568887, AA649970, AW264577, | |
| | | | | | H20460, AI221886, AW000860, AI275195, R42681, AW162711, AA460372, AI699657, | |
| | | | | | AW304978, AI081779, AI560482, AI279653, AW243790, AI951374, AW183962, AI696251, | |
| | | | | | AI904299, T78554, R43259, AW079129, AA147203, AI499410, AI475009, AA732831, | |
| | | | | | AA375228, AA379846, AA783050, R51077, N47545, AI474934, Z41466, AA160401, | |
| | | | | | AI678630, Z41592, AW079321, N47546, AI252528, R58857, AA971563, AL022238, and | |
| | | | | | AL137499. | |
| HNBTT79 | 321 | 965424 | 1-228 | 15-242 | | |
| HNBTX52 | 322 | 965428 | 1-327 | 15-341 | F35097, F24745, AW071109, AA528500, AA460268, H48768, AA715075, AA593273, | |
| | | | | | AA715173, AI820526, H73306, AA648957, AA836548, AW439703, AA846482, T47889, | |
| | | | | | AA708194, AA772704, AA302690, AA890060, T54173, N36143, AA058312, H58883, | |
| | | | | | AL117352, AC007011, Z97056, AC002425, AC003982, AL022336, AC002492, AC002070, | |
| | | | | | AC004125,AC005753, AC004963, AL035461, AC005520, Z95152, AL031984, Z95115, | |
| | | | | | Z85996, AL035681, AL035455, AL031284, AC005243, AC007707, AC005233, AC002310, | |
| | | | | | AL035088, AF165926, AL117337, AL034549, AL132712, AC005666, AC002563, AL033538, | |
| | | | | | AC002420, AF205588, Z96753, AL135783, AL031657, AL109628, AC002045, AL049576, | |
| | | | | | AC000015, AL031283, AC004962, AC000026, Z93241, AC006449, AC002059, AC005225, | |
| | | | | | AF129756, AC007057, Z82182, AL034429, L78810, U67809, AC004167, AC009044, | |
| | | | | | AC006064, AC005962, AC006360, AL023807, Z86090, AC007201, AC007880, AC003666, | |
| | | | | | AC007283, AC003070, AC002369, AC004851, AC005519, AC004638, AC006262, AC005081, | |
| | | | | | AC007919, M89651, AC005971, AC004601, AC005940, AL021977, AC005730, AC002452, | |
| | | | | | AC004923, AL050318, AC009509, AC005231, AL080243, AC002390, AC009288, AL031643, | |
| | | | | | AC004832, AC004821, AC005722, AC003681, AL049776, AC002429, AP000552, AL031651, | |
| | | | | | AC006958, Z83846, AC005684, AC005335, AC004882, AC005924, AP000135, Z82205, | |
| | | | | | AC004554, AF196969, AC012085, AC004703, AC011718, AC005102, AC005191, AD001527, | |
| | | | | | and AC007052. | |
| HNBUM19 | 323 | 933672 | 1-469 | 15-483 | AI460390, AI141130, AA364420, AA557913, AI185394, AI267884, AI251429, AA639114, | |
| | | | | | AA687542, AL042771, AW264901, AA603264, AI821805, AI821056, AI792092, AA278496, | |
| | | | | | AI446205, AW270768, H72278, AW008074, AI291037, AW277174, N27751, AI436378, | |
| | | | | | H63154, AC005180, AC004895, AL049795, AC002091, AC005562, AC009516, AC005015, | |
| | | | | | AC008044, AF030453, AC007565, AC003663, AL096791, AL049780, AC004985, AC005914, | |
| | | | | | AC003101, AL049776, AL080243, AC006312, AC005081, AF053356, AC007676, AC005229, | |
| | | | | | AC005755, AP000558, AC006571, AL022313, AL031427, AC007686, AC005088, AL133163, | |
| | | | | | AC002477, AB023049, AC005003, AP000552, Z83826, AL079304, AC004386, AC006088, | |
| | | | | | AC006530, Z97054, Z93023, AC004890, AC000353, AC007226, AC005971, AP000704, | |
| | | | | | AL049757, AC002301, U91323, AC008372, AC003982, Z83840, AF207550, AL109628, | |
| | | | | | AC005829, AC002350, AL008582, AL135744, AL139054, AC006039, AC004491, AF050154, | |
| | | | | | AC004033, AJ003147, AC005500, AP000557, AL049653, AC002310, AL031680, AC004967, | |
| | | | | | AP000556, AC004019, AC006509, AL049766, AL031311, AC005086, AC006285, AC004662, | |
| | | | | | AC007540, AP000501, AC005037, AC004878, AL024498, AL035079, Z85986, AC005225, | |
| | | | | | AL031587, Z98200, AC004821, Z97056, Y14768, AC006511, AC004841, AF024534, | |
| | | | | | AC008040, AC007283, AC006101, AF047825, AC005921, AL096701, AC007546, Z95331, | |
| | | | | | AC007229, AC004144, AL023553, AC002418, AC005412, AP000505, AC005519, AC007216, | |
| | | | | | AC005071, AC005261, AL034451, AC005332, AC007151, AC002365, AL035072, AL031255, | |
| | | | | | AC005839, AC006468, AP000512, AC006064, AC005484, AL008718, AF111167, AC006111, | |
| | | | | | AC004876,U80017, AL034429, AC005666, AC004526, AF111168, AC006277, AL031659, | |
| | | | | | AP000008, AC002492, AP000692, AC007055, AP000555, AF165926, AC005488, AC006211, | |
| | | | | | AC005746, AL022163, AF196969, AC005295, AF067844, AL022302, AC002115, U29895, | |
| | | | | | AC002996, AF129756, AC005031, AF134726, AP001052, AL023575, AC005940, AL022721, | |
| | | | | | AL022318, AL031005, AC004477, AC005695, AC004854, AC005944, AL049692, AP000553, | |
| | | | | | AC002375, Z82203, Z98742, AC004832, AC005841, AF196779, AL031589, AC007993, | |
| | | | | | AC005300, AC005696, AL078581, AC005049, U82828, Z82976, AC006160, AC005529, | |
| | | | | | AC006251, and AC002126. | |
| HNBUR07 | 324 | 951814 | 1-442 | 15-456 | AA759267. | |
| HNGAO08 | 325 | 958685 | 1-286 | 15-300 | AC003101, AC006974, and AC004099. | |
| HNNNA06 | 326 | 917723 | 1-1581 | 15-1595 | AA779932, AW069784, AW194351, AI202042, AI128373, AI128364, AI143847, AI990994, | |
| | | | | | AI421235, W95217, W78812, AA855140, AA527080, AI151527, W68234, AA441818, | |
| | | | | | AA143612, AI275577, AI278683, AA908252, W68235, AW195552, AA676541, AI219401, | |
| | | | | | AW291524, AI299109, AI192236, AA862317, H01997, H56734, H83578, AA884790, H82711, | |
| | | | | | AA774498, AA633305, H94868, H79699, H84425, R09902, I90526, AA904994, AA441880, | |
| | | | | | H03628, AI219227, H03629, AI080080, R73007, H56655, AI567570, R81684, W94691, R81474, | |
| | | | | | R81669, T83566, R12503, H52108, T83061, AI444952, AA342086, H02094, H84426, N58039, | |
| | | | | | AI658795, W80711, and H79700. | |
| HNNNA09 | 327 | 917724 | 1-548 | 15-562 | AW069784, AI128373, AI128364, AI202042, AI143847, AI421235, AA779932, AI990994, | |
| | | | | | AA143612, AI151527, AW194351, AA441818, AI275577, AA527080, AI278683, AA908252, | |
| | | | | | W68235, AA855140, AI219401, AA676541, AW195552, AI299109, AI192236, AA862317, | |
| | | | | | H01997, H56734, H82711, AA884790, H94868, AA774498, AA633305, H03629, T90526, | |
| | | | | | AA904994, AI219227, AI567570, AI080080, R12503, R81669, W94691, H52108, AI444952, | |
| | | | | | AA342086, H84426, W78812, N58039, W80711, H84425, R73007, H79700, H03628, and | |
| | | | | | AI658795. | |
| HNNNA77 | 328 | 917725 | 1-1103 | 15-1117 | AW291524, H83578, AI202042, AA779932, AW069784, AA143612, AI128373, AI128364, | |
| | | | | | AI143847, AA441818, AI219401, AI278683, AA862317, AA884790, AA633305, AA774498, | |
| | | | | | AA527080, AI421235, AI275577, W68235, AA908252, AA676541, AI151527, AI299109, | |
| | | | | | AI990994, AW194351, H56734, AI192236, H94868, AW195552, H01997, H82711, AA904994, | |
| | | | | | AA855140, AI219227, H03629, AI080080, R81684, I90526, AI567570, W94691, R81669, | |
| | | | | | W68234, R12503, H52108, T83061, AI444952, AA342086, H56655, W80711, R09902, T83566, | |
| | | | | | H84426, N58039, H79699, W95217, H79700, and W78812. | |
| HNOA506 | 329 | 933730 | 1-738 | 15-752 | AW183087, AA437061, AI992344, AI351831, AA423954, AI655434, AA029186, AI421314, | |
| | | | | | AI025154, AA905377, AI189632, AI148753, AI971532, T77225, T77438, T53640, AA889771, | |
| | | | | | AA029185, and N27393. | |
| HNOAX12 | 330 | 969363 | 1-777 | 15-791 | N59866, N22173, H24646, H27385, AL119324, AL119457, AL042544, AL119399, AL119464, | |
| | | | | | AW392670, AL119443, U46349, AL119418, AL134902, Z99396, AL119444, U46351, | |
| | | | | | AL119391, AL119363, AL042965, AL119319, AL119355, AL119483, AW372827, AW363220, | |
| | | | | | U46350, U46347, AW384394, AL119439, AL119484, AL119497, AL119401, AL134538, | |
| | | | | | AL119341, U46346, AL134536, U46341, AL134525, AL119335, AL037205, U46345, | |
| | | | | | AL043019, AL042450, AL042984, AL042542, AL042614, AL042975, AL043029, AL119304, | |
| | | | | | AL043003, AL042551, AP000473, AR066494, AR060234, AR054110, A81671, and AB026436. | |
| HNOBF57 | 331 | 927903 | 1-769 | 15-783 | AI672348, AW173697, AL079990, AI565451, AW305215, AA115462, AW081450, AW020072, | |
| | | | | | AA031780, AA115214, AI094153, AI610893, AI088661, AI051834, AA233114, AA115204, | |
| | | | | | AI469307, AI970462, AI620951, AW130820, N69772, AA495921, N34679, AA987696, | |
| | | | | | AA495922, AA115067, AI770044, AI079994, AA150297, AI434100, AW236674, AI039432, | |
| | | | | | AA961227, AI873440, AA938897, AI681115, AA031879, AA603790, AI301357, N44611, | |
| | | | | | AA243692, AA377521, AA910225, AI913596, AI702644, AA961701, AW452143, AI352693, | |
| | | | | | AI381836, AI767254, AI247300, AI050072, AI830541, AI865675, AI493755, AA573940, | |
| | | | | | AA937056, AI266405, AW138034, AA148788, AA653705, R37287, Z41281, AI090946, | |
| | | | | | AI612953, AW103627, AA326653, AI572322, T49708, T49709, N85358, T49717, N84377, | |
| | | | | | D25919, AP000300, AP000113, and AP000045. | |
| HNOCQ04 | 332 | 964933 | 1-686 | 15-700 | AI717999, AW404782, AI831040, C15687, AW410719, AI634938, AI479751, AA723194, | |
| | | | | | AA398997, AA455667, AW410718, AI589849, AA584383, AI130687, AI190201, AI525790, | |
| | | | | | AI460181, W69759, AA456685, AA632185, AA456287, AI298115, R53507, AA644652, | |
| | | | | | D45471, AI368832, AW300844, AI762742, AA976082, AA621626, AI912458, AA781178, | |
| | | | | | AA292406, AA643693, AI814720, AA399628, AI351664, AA989507, AW408212, AA132709, | |
| | | | | | F20423, AA292771, AA765663, AA417936, AA026022, AI282190, AA394242, AA586966, | |
| | | | | | AI351631, AA620713, AA582000, AI708099, R55785, AI039470, AI498903, AA132838, | |
| | | | | | AW406442, AA327225, AA777017, AA564894, AA635420, AI832846, AI203528, AI274498, | |
| | | | | | AA774256, N71139, AA328719, AA418114, AA810589, AA303814, AI832934, T54206, | |
| | | | | | AA084447, AA093329, AA720518, AA552845, D81168, AA304523, AA582959, AA298391, | |
| | | | | | AA838663, AA765473, AA411181, AA187606, AW404897, AA411255, AI814800, AA025235, | |
| | | | | | H80024, AW375226, AA651654, W01588, AW008079, AA405649, AI283769, AA384979, | |
| | | | | | F25444, AI916435, AA776514, AW407879, AA308415, AA318663, AA081629, AW175606, | |
| | | | | | AI569238, AI245051, AA758698, AI268159, AA707891, AI695095, T65944, AA394168, | |
| | | | | | AA405650, R55866, W69865, T48798, D44876, and AF061177. | |
| HNOCT39 | 333 | 952611 | 1-101 | 15-115 | AA806386, AI244963, AW069189, AA811454, AW069641, AA228016, AI926450, N20102, | |
| | | | | | AA984503, AI283001, AI335808, AI022959, AI699076, AW008997, AI092767, AI358493, | |
| | | | | | AI289652, AI309309, AA747446, AA521303, AI460092, AI354930, AW105294, AA902193, | |
| | | | | | AI358182, AA975250, AA576719, AI766428, AI335889, AA071293, T10067, R58045, and | |
| | | | | | AI355753. | |
| HNOCU05 | 334 | 957833 | 1-733 | 15-747 | AW364014, AW364012, AW364015, AW364019, AI760785, AI267509, AI224905, R80458, | |
| | | | | | N76465, AI384093, N59362, AA513728, AA729606, R80659, AI351352, AI499874, D61921, | |
| | | | | | R69849, AA573139, R31977, and AB033047. | |
| HOCMU03 | 335 | 922418 | 1-602 | 15-616 | | |
| HOCPJ03 | 336 | 917484 | 1-299 | 15-313 | AW374051, AW374048, AW374059, AA047322, AA573420, AA873293, H50745, T67156, and | |
| | | | | | AI718619. | |
| HODAD73 | 337 | 973463 1-490 | 15-504 | AC004889. | | |
| HODAD95 | 338 | 974043 1-577 | 15-591 | Z93783. | | |
| HODAG37 | 339 | 529410 1-224 | 15-238 | | | |
| HODAH32 | 340 | 859509 1-305 | 15-319 | AA076906, and AC004976. | | |
| HODAJ01 | 341 | 921666 1-570 | 15-584 | | | |
| HODAJ35 | 342 | 529405 1-325 | 15-339 | AC005618. | | |
| HODAK38 | 343 | 529404 1-310 | 15-324 | | | |
| HODAK95 | 344 | 960179 1-690 | 15-704 | AI333350, AI522314, N93898, AI539488, AI276544, AW292555, AA194179, AA193323, | | |
| | | | | | AA621456, and N64007. | |
| HODAO16 | 345 | 529401 | 1-271 | 15-285 | | |
| HODAT56 | 346 | 529402 | 1-354 | 15-368 | | |
| HODAV80 | 347 | 859519 | 1-287 | 15-301 | | |
| HODAW60 | 348 | 692684 | 1-315 | 15-329 | | |
| HODAW84 | 349 | 775425 | 1-503 | 15-517 | AI800919, AI741507, N21056, AA969954, AA669258, AI018174, AI243491, and AI342531. | |
| HODBC01 | 350 | 921662 | 1-290 | 15-304 | | |
| HODBC07 | 351 | 954161 | 1-317 | 15-331 | | |
| HODBE01 | 352 | 921655 | 1-102 | 15-116 | | |
| HODBH16 | 353 | 927781 | 1-286 | 15-300 | | |
| HODBO85 | 354 | 859559 | 1-156 | 15-170 | | |
| HODBT58 | 355 | 678444 | 1-303 | 15-317 | AA224807, AI355986, AI791718, C14330, AA778962, N94325, AA312559, H71678, H19817, | |
| | | | | | AA483141, N41775, AW440368, W02497, AI824476, AA224917, H12857, AA747609, | |
| | | | | | AI823705, AI925065, AI025930, AW088631, N68449, AW238253, N69399, AA610381, | |
| | | | | | T54144, AI459943, AI282629, H40324, AA326904, W24312, AA088834, AA721545, R69819, | |
| | | | | | AI246061, AA579152, AI434513, C06004, AI693979, AA993636, AI459904, H68343, | |
| | | | | | AW176639, T94140, AI749893, R42902, AA742815, AA278496, AA550850, C14480, | |
| | | | | | AW162227, N88725, H93152, R93919, AI306717, AA679353, C14557, AW023111, AA225627, | |
| | | | | | AA135811, R92421, AI201474, AA614595, AI609972, AI446336, AI002928, AA622910, | |
| | | | | | AI339725, AL042667, AL042670, N67810, AA648957, AW054936, AI054090, N27874, | |
| | | | | | T40629, AA356310, AA857622, AA838091, AI133514, C18253, R89081, H25938, AA836548, | |
| | | | | | AL041375, AW408767, AA135988, AI417586, AA199864, AA311376, AI445373, AI284543, | |
| | | | | | AA804297, AI254770, N54397, AA730359, AI251944, AA558404, AI251034, AI251203, | |
| | | | | | AI251284, AI250552, AW390309, H19851, AI207738, AA312115, AL096763, AC004841, | |
| | | | | | AC003080, AC005399, AC005566, Z84487, AL096816, AC005082, AF045555, AL049776, | |
| | | | | | AC004814, AC002310, AC004531, AC005736, AC004099, AC004448, AC004112, AL121603, | |
| | | | | | AL049713, AC005632, AP000500, AC005520, AL024498, AC007225, AC005229, AC005081, | |
| | | | | | AC004882, AP000311, AL031407, AC006312, AL049709, Z98048, AP000553, AC008040, | |
| | | | | | AC006441, AC002059, AC005562, AC004129, Z93241, AL031665, AC005529, AC004685, | |
| | | | | | AC007298, AC002070, AF030876, AL022326, AF001549, AC004552, AF111168, AC007199, | |
| | | | | | AC006013, AC000120, U52112, AP000143, AP000555, AF165926, AL020997, AL035086, | |
| | | | | | AC005180, AP000953, AL049779, AC005071, AC005015, Z98946, AC005011, AL031589, | |
| | | | | | AC000026, Z97054, AL109627, AC006468, AC002301, AL022316, AC005844, AC003030, | |
| | | | | | AC005482, AL049778, U07563, AF181897, AC003101, AC005189, AL023879, L78833, | |
| | | | | | AF139813, AF002223, AL050307, AC004408, AL121657, U95742, AF053356, AC005839, | |
| | | | | | AL020993, AC003956, AC005598, AC005846, AL049814, AF047825, AC006576, AL031680, | |
| | | | | | AF001550, AL022476, AC006026, AL021917, AC007283, AC005899, AC007216, AL050348, | |
| | | | | | AP000355, AC006976, AR036572, U91328, AC004999, AC005902, AC004638, AC007308, | |
| | | | | | AF003626, AF126403, AC005531, AC002551, AL080243, AC004859, AC002470, AC003962, | |
| | | | | | AC004125, AC005095, AC005207, AL031447, AC002350, AC004458, AC004988, AL049757, | |
| | | | | | AL031666, AC002302, AL021578, AC000134, AC007546, AC005318, AC007707, AL122020, | |
| | | | | | AC002044, AC006014, AC005519, U80017, AL031291, Z95114, AL133243, AC009516, | |
| | | | | | AL031985, AC006536, AC004991, AP000952, AC005940, AC003108, AL034549, AL008582, | |
| | | | | | AP000510, AJ251973, AC006208, AC008072, AC004551, AL031281, AF109907, AC005516, | |
| | | | | | AL022238, AL133246, AC004983, AL121652, AC005722, AC002381, M89651, AC005751, | |
| | | | | | AC002094, AL023803, AL136295, Y10196, AL117355, AC005049, AF111169, AC002531, | |
| | | | | | AC005332, AC005005, AL049692, AC007934, AC004883, AC006960, AC002073, AC006285, | |
| | | | | | AL034548, AL031255, AF205588, AC005911, AC007687, AC007193, Z93020, AF123462, | |
| | | | | | AL031659, AL021878, U85195, AC002565, AL121825, AL022328, AC005288, AC004820, | |
| | | | | | AC004854, AC005799, AL049631, AL049569, AP000503, AP000556, AC006430, AE000658, | |
| | | | | | AP000552, AC004019, AL096791, AL049540, AL031685, AL133448, AL035495, AC004447, | |
| | | | | | AC005214, AC006111, Z93244, AC006571, Z98304, AP000563, AC016831, AC003667, | |
| | | | | | AC007226, Z92845, AP000116, AP000049, AC010205, and AC002530. | |
| HODBU95 | 356 | 529329 | 1-327 | 15-341 | | |
| HODBV71 | 357 | 761447 | 1-330 | 15-344 | AA115711. | |
| HODCAI1 | 358 | 967732 | 1-201 | 15-215 | AC006977. | |
| HODCA68 | 359 | 529400 | 1-256 | 15-270 | | |
| HODCD05 | 360 | 932218 | 1-767 | 15-781 | AA393097, H60256, T97474, R08469, N52915, and AC000955. | |
| HODCH64 | 361 | 529327 | 1-111 | 15-125 | AA480604, and AA420518. | |
| HODCJ11 | 362 | 967320 | 1-344 | 15-358 | AI378046, | |
| HODCJ42 | 363 | 932638 | 1-324 | 15-338 | | |
| HODCL88 | 364 | 529334 | 1-409 | 15-423 | W94969, W93385, and H70278. | |
| HODCM62 | 365 | 859556 | 1-298 | 15-312 | | |
| HODCO09 | 366 | 573202 | 1-343 | 15-357 | | |
| HODCO46 | 367 | 573200 | 1-312 | 15-326 | | |
| HODCO82 | 368 | 573195 | 1-321 | 15-335 | | |
| HODCP69 | 369 | 507249 | 1-332 | 15-346 | | |
| HODCR43 | 370 | 529332 | 1-422 | 15-436 | Z57028, and Z57027. | |
| HODCT07 | 371 | 954149 | 1-303 | 15-317 | AL035420. | |
| HODCU01 | 372 | 917270 | 1-358 | 15-372 | | |
| HODCU02 | 373 | 920698 | 1-618 | 15-632 | AC018633, and AC005271. | |
| HODCU62 | 374 | 524314 | 1-347 | 15-361 | AI190063, AA661921, AA063173, AA635739, AA984295, AA613591, F34498, AA584739, | |
| | | | | | AW168618, AI918465, AA322792, AA507547, AA559290, N35894, AA483204, T92797, | |
| | | | | | AA630925, AI284640, AA644070, AI250083, AA362349, M86120, AA295742, AI433008, | |
| | | | | | AF039185, W45625, AA769720, AW021735, F25199, H65170, AA661814, AI223604, | |
| | | | | | AI816141, AA664700, D52587, AA484373, AA508359, AI674174, AA683283, M77986, | |
| | | | | | AA747070, AA486131, AW084466, AA316905, AL042853, AA491814, AI002720, AA866015, | |
| | | | | | M77865, AA309533, AA493695, AA099939, H53984, AW149313, AA493954, AA834707, | |
| | | | | | AI494203, AI345157, AI687343, AI209074, AA279421, AA640635, AA515440, AA788990, | |
| | | | | | AL041619, AA577824, AI471887, N71728, AA376120, AA324585, AI311684, AA838190, | |
| | | | | | AI039584, AI700109, AI904219, N49368, T94317, AA502529, AW150635, AA358515, | |
| | | | | | AL034417, Y14782, AC006205, AC002300, X06123, X61109, AC002094, AL132800, | |
| | | | | | AL133500, AL136295, U18181, AC002565, AC004848, AC004882, AC005529, X14448, | |
| | | | | | U78027, Y18000, U08988, A67988, AC006976, AL031255, Z96074, AC006115, Z94801, | |
| | | | | | AF023268, AC006116, AC006007, AC004031, AC005952, AC005523, AC004953, AL009031, | |
| | | | | | AC002326, AC005781, AL133312, AC007919, AL049692, AC003035, Y09781, AL022164, | |
| | | | | | U62292, AL008730, AC007239, AD000684, AL049871, AC005902, U66059, AF114156, | |
| | | | | | AC005512, Z83846, M61835, AC006356, AC007100, AJ006996, AL132712, AB023053, | |
| | | | | | AP000517, AC006432, AC008044, AC002074, AC005280, AC002430, AC007384, X55923, | |
| | | | | | D26141, AC005548, AL117356, Z98051, AL133241, U95742, Z84470, AC007216, AC005772, | |
| | | | | | AC004385, AC007686, AF118885, AC002540, AC004069, AC007681, AC006026, AC004643, | |
| | | | | | AL031577, AL035079, AL050306, AC005217, AC005245, AL033521, AC007242, AC006344, | |
| | | | | | AC006965, AC002524, AL049198, M37547, Z13983, AL035402, AC004979, AL031729, | |
| | | | | | AC007666, AL008638, AL049647, AC000052, AC004019, AF097026, AR036572, U91328, | |
| | | | | | AC006120, AC005094, AC004920, AC007298, AL133448, AL121603, AL023284, K00063, | |
| | | | | | AC003100, AC006239, AC009533, AL117342, AC004028, Z95400, AL021407, AC006322, | |
| | | | | | AC005699, AC005342, AC006511, AC005754, J04809, AL034373, AC004987, AC005007, | |
| | | | | | AP000459, AC004687, U85195, AC005998, AC005295, AP000470, AC004756, AL035694, | |
| | | | | | AC005393, AC007011, AC005746, AC005837, AE000658, L49046, AP000150, AC005026, | |
| | | | | | AC007099, D83989, U02531, X53549, M12523, I55948, AC005907, AC004034, AC004234, | |
| | | | | | Z81369, AL079295, AL135746, AF123462, AL022322, AL078463, AC005046, M96868, | |
| | | | | | AC002477, AL031722, AC006484, AP000299, AF039907, AC004221, AC005862, AC006077, | |
| | | | | | AC004771, AC004030, AP000365, AL031678, AL031295, AP000548, AC006998, AC004033, | |
| | | | | | AL110292, AC005500, AC004381, U57005, AC002395, AL096765, AP000009, AC010072, | |
| | | | | | AF015151, AC005175, AL020996, Z78022, AC007043, AL031282, AC007541, AC005535, | |
| | | | | | U18393, AC006486, AC004651, AF084195, AC004232, Z99129, L35930, AC002507, | |
| | | | | | AP001136, AC005250, AB020874, U85196, AL008721, AF064861, U85198, AL035552, | |
| | | | | | Z98200, AC010722, AL008718, AC006080, AL050308, AE000661, AC004066, Z82210, | |
| | | | | | AC005058, AL024509, AR068368, X12751, AF001298, AL024496, AC004761, AC005525, | |
| | | | | | AF002991, M63796, AC006537, AC008981, AC005253, AC005604, AC005387, AL121934, | |
| | | | | | AC004940, AC008168, U69730, Z98046, AC004650, Z84482, and AL121591. | |
| HODCV09 | 375 | 973487 | 1-602 | 15-616 | H01843, AA988637, AA487321, AI820602, AW068586, AI097301, AI279255, AA247291, | |
| | | | | | AW138282, AA599014, AI862060, AF034209, AC005172, Z98304, AC005134, AL049744, | |
| | | | | | AC005186, AL109622, AC001227, AC002101, AL021397, AC006362, AC008080, AL008730, | |
| | | | | | AC000114, AC005375, AL021408, AC006568, AC007459, AC004552, AC005881, AL135784, | |
| | | | | | AF003529, AL034350, AL049760, AC006963, AC006926, AC004915, AP000459, AC005070, | |
| | | | | | AC006007, AL031121, AC004388, AC010722, AL023283, AL031779, AL121587, AC007688, | |
| | | | | | and AJ011930. | |
| HODCW17 | 376 | 960051 | 1-337 | 15-351 | | |
| HODCW37 | 377 | 575256 | 1-270 | 15-284 | AL133353. | |
| HODCZ20 | 378 | 859580 | 1-342 | 15-356 | AC007938. | |
| HODDD20 | 379 | 933726 | 1-219 | 15-233 | | |
| HODDD41 | 380 | 529390 | 1-323 | 15-337 | | |
| HODDE28 | 381 | 529169 | 1-355 | 15-369 | AC008063. | |
| HODDF51 | 382 | 937759 | 1-255 | 15-269 | | |
| HODDG57 | 383 | 806204 | 1-694 | 15-708 | N69445. | |
| HODDH52 | 384 | 742217 | 1-487 | 15-501 | AL040588. | |
| HODDM21 | 385 | 523270 | 1-236 | 15-250 | | |
| HODDM25 | 386 | 780472 | 1-566 | 15-580 | R06499. | |
| HODDM78 | 387 | 859516 | 1-357 | 15-371 | | |
| HODDN40 | 388 | 859518 | 1-727 | 15-741 | AA812474, AC012039, and Z98172. | |
| HODDN59 | 389 | 975437 | 1-646 | 15-660 | | |
| HODDN93 | 390 | 891236 | 1-521 | 15-535 | R22206, AI635500, AI769453, and AI743579. | |
| HODDQ02 | 391 | 920962 | 1-271 | 15-285 | | |
| HODDQ21 | 392 | 919295 | 1-375 | 15-389 | AA148171, AA136605, W86355, AA295674, AA320600, AA303426, AI391670, H79980, | |
| | | | | | AI952411, AW000989, AI885634, AW450872, AW411085, W90311, AB018358, AB020712, | |
| | | | | | AB018359, AF161393, AF161452, and AF034582. | |
| HODDR13 | 393 | 529640 | 1-202 | 15-216 | U95122, AF073503, AF073502, AF073504, and AF073505. | |
| HODD567 | 394 | 567197 | 1-341 | 15-355 | AW238853, T08054, N36319, AA191661, F13217, T57711, T75430, AL039920, H00125, | |
| | | | | | T36199, R15057, AC007225, AF191298, and U47024. | |
| HODDU70 | 395 | 529290 | 1-344 | 15-358 | AC002075. | |
| HODDX35 | 396 | 531209 | 1-312 | 15-326 | | |
| HODEA90 | 397 | 782242 | 1-675 | 15-689 | | |
| HODEB04 | 398 | 927022 | 1-356 | 15-370 | AF011889. | |
| HODEC76 | 399 | 952204 | 1-599 | 15-613 | | |
| HODED11 | 400 | 966085 | 1-525 | 15-539 | | |
| HODBD55 | 401 | 859368 | 1-595 | 15-609 | | |
| HODED87 | 402 | 915909 | 1-1433 | 15-1447 | AI290807, AA843195, AI924510, AW205119, AI348581, AI337545, H82747, N33608, | |
| | | | | | AI810344, AI970945, H83622, AI873082, AI690115, AI199002, AW296637, AA600866, | |
| | | | | | AA928078, N49452, AI468390, AA371877, AI204414, AI628721, AI092558, AI309751, and | |
| | | | | | AI692784. | |
| HODEF10 | 403 | 963494 | 1-595 | 15-609 | D80188, D59859, C14389, D59927, D58283, D81030, D51799, D80253, D80166, D80043, | |
| | | | | | D51423, D59619, D80210, D80240, D80212, D80391, D59787, D50979, D80227, D80022, | |
| | | | | | C14331, D80219, D80195, D80196, D59467, D80164, D59275, D80366, D59502, D57483, | |
| | | | | | D59610, D59889, AA514188, D81026, AA305409, D80248, D80024, D80269, AA305578, | |
| | | | | | C15076, D30522, D80045, D80038, C14014, D51022, D50995, D80193, D80251, D80378, | |
| | | | | | AA514186, D80241, D51060, AW360811, D80133, AW177440, D80268, C14429, AW178893, | |
| | | | | | AW375405, C75259, T03269, D80247, AW179328, AW360844, AW366296, AW377671, | |
| | | | | | AW360817, AW375406, D80439, AW378534, AW179332, AW377672, AW179023, | |
| | | | | | AW178905, C05695, D80302, AW378532, D80134, AW177501, AW177511, AW352171, | |
| | | | | | D58253, AW377676, AW352170, D80132, AW177731, AW178907, AW178906, D51759, | |
| | | | | | AW178762, AW179019, AW179024, D59373, D51250, AW177505, AW360841, AW179020, | |
| | | | | | AW178775, AW178909, AW177456, T11417, AW369651, AW179329, AW178980, D80157, | |
| | | | | | AW177733, AW378528, AW178908, AW178754, AW179018, AW352158, D51079, | |
| | | | | | AW352117, AW176467, AW352174, D51103, AW367967, AW179004, F13647, AW179012, | |
| | | | | | AW178914, D80949, AW378525, D52291, D80064, AI910186, C14227, D80168, AW177728, | |
| | | | | | AW179009, D58246, D81111, AW178774, AW178911, AW378543, AW177722, AW352163, | |
| | | | | | C14298, AW178983, T48593, AI905856, C14407, D59653, AW178781, C06015, D59503, | |
| | | | | | D45260, AW352120, D58101, AW360834, AW177723, AW378540, Z21582, D59474, D59627, | |
| | | | | | D80258, H67854, AA809122, AW367950, AW378533, C03092, H67866, AW177508, | |
| | | | | | AI535850, AA514184, D45273, AI525923, AA285331, D80228, AI525917, AW178986, | |
| | | | | | AW177497, D51213, D51097, C14957, AI525912, D80014, D51221, T03116, D59317, D60010, | |
| | | | | | C14973, AW177734, AI525920, C14344, AI557751, D50981, AI525227, AI535686, D59551, | |
| | | | | | AI525235, C14046, D60214, AI557774, T03048, AI525222, C16955, AI525215, AI525242, | |
| | | | | | AW378542, AI525925, AW378539, C05763, Z33452, T02974, D31458, AI525237, AW360855, | |
| | | | | | D51053, H67858, C04682, AF053356, AR008278, A62298, AR018138, AB028859, AJ132110, | |
| | | | | | A84916, A62300, AF058696, X67155, Y17188, D26022, Y12724, A25909, A67220, D89785, | |
| | | | | | A78862, D34614, A82595, A94995, D88547, AB002449, AR060385, AR016808, AR008443, | |
| | | | | | X82626, I50126, I50132, I50128, I50133, AR025207, AR066488, AR016514, AR060138 | |
| | | | | | A45456, A26615, AR052274, Y09669, A43192, A43190, AR038669, AR066490, AR066487, | |
| | | | | | A30438, I18367, AR054175, I14842, D50010, Y17187, AB012117, AR008277, AR008281, | |
| | | | | | A63261, AR008408, X68127, AR062872, A70867, AR016691, AR016690, U46128, A85396, | |
| | | | | | D88507, AR066482, A44171, A85477, D13509, I19525, A64136, A68321, A86792, AR060133, | |
| | | | | | I79511, X93549, U79457, AF123263, AR032065, X72378, and AR008382. | |
| HODEF87 | 404 | 974342 | 1-617 | 15-631 | C14389, D59859, D80195, D80043, D80188, D80166, D51799, D51423, D59619, D80210, | |
| | | | | | D80240, D80253, D81030, D80164, D58283, D80193, AA305409, D80212, D80022, C14331, | |
| | | | | | D80024, D80219, D59467, D80391, D59275, D59889, D59787, D80227, D59502, D57483, | |
| | | | | | D80366, D80196, C15076, D51060, D59927, D59610, D80269, D80038, D50979, D50995, | |
| | | | | | D80045, D80378, C14014, D80241, C14429, D51022, AA305578, AW177440, D80248, | |
| | | | | | AW179328, T03269, C75259, AW178893, AA514186, D81026, D80251, AW378532, | |
| | | | | | AA514188, D80134, D80522, D80133, AW360811, AW178762, AW178775, D58253, D51250, | |
| | | | | | F13647, AW369651, AW375405, AW177501, AW177511, D80268, D51111, C05695, D52291, | |
| | | | | | D51079, AW377671, AW366296, D80949, AW360844, AW352158, AW360817, AW375406, | |
| | | | | | AW378534, AW179332, AW377672, AW179023, AW178905, D80302, AI910186, AW352117, | |
| | | | | | AW176467, D80439, D80168, AW377676, D80064, Z21582, C14298, C14227, AW352171, | |
| | | | | | D80132, AW352170, AW177731, AW178907, AW179019, AW179024, D59373, D80247, | |
| | | | | | AI905856, AW177505, AW178906, AW179020, AW360841, AW178909, AW177456, C06015, | |
| | | | | | AW179329, C14407, AW178980, AW177733, AW352174, AW378528, AW178908, | |
| | | | | | AW178754, AW179018, T11417, AW378540, D51759, AW179004, D80157, AW179012, | |
| | | | | | AW178914, AW378525, D51103, AW367967, AW177728, AW179009, D58246, AW178774, | |
| | | | | | AW178911, AW378543, AW177722, AW352163, AW360834, AA285331, AW178983, D51097, | |
| | | | | | AW178781, AI557751, T48593, D59503, AI525923, AW352120, A62298, AJ132110, | |
| | | | | | AR018138, A84916, A62300, AR008278, AB028859, AF058696, X67155, Y17188, D26022, | |
| | | | | | A25909, D89785, A67220, A78862, and D34614. | |
| HODEG86 | 405 | 784833 | 1-634 | 15-648 | | |
| HODEH08 | 406 | 963895 | 1-129 | 15-143 | AA370640, AW248314, AA371439, AA344067, AA370162, D31255, AA340719, AA331358, | |
| | | | | | AW248978, AA488592, AW406647, W44489, AI083656, AA358813, AA360045, T97410, | |
| | | | | | R07253, AI582770, H29999, Z59378, Z64078, Z64079, and Z54696. | |
| HODEH22 | 407 | 974329 | 1-411 | 15-425 | | |
| HODEI13 | 408 | 859318 | 1-599 | 15-613 | | |
| HODE148 | 409 | 841906 | 1-660 | 15-674 | | |
| HODEK50 | 410 | 859307 | 1-728 | 15-742 | AC007075, AC007226, AL080243, AC004967, AC002352, U91321, AC006275, AC002551, | |
| | | | | | AC005519, AC004832, AF196779, AD001527, AC002404, AC005089, AC005952, AC005280, | |
| | | | | | AC003684, AL031431, and AC005972. | |
| HODEL92 | 411 | 859313 | 1-252 | 15-266 | | |
| HODEN75 | 412 | 772940 | 1-579 | 15-593 | AW339014, and AC005630. | |
| HODE087 | 413 | 930735 | 1-164 | 15-178 | | |
| HODEP04 | 414 | 926984 | 1-585 | 15-599 | AA317093. | |
| HODEP12 | 415 | 965534 | 1-427 | 15-441 | | |
| HODEP86 | 416 | 784846 | 1-404 | 15-418 | | |
| HODEQ28 | 417 | 972808 | 1-438 | 15-452 | | |
| HODEQ79 | 418 | 859287 | 1-516 | 15-530 | AB033061. | |
| HODER91 | 419 | 789661 | 1-338 | 15-352 | AA233995, and AB033047. | |
| HODE586 | 420 | 784815 | 1-920 | 15-934 | AA063018, AA063458, AI444822, AA666066, T94072, C15362, AA890123, AW190277, | |
| | | | | | N54301, AI866580, AA363003, AI277783, AI018726, AA368329, AA366676, AA329535, | |
| | | | | | AA078184, AL119028, AI926296, H60331, AW243945, AW083934, AA504951, AA702637, | |
| | | | | | AI054414, AW162303, AA584207, AW089016, AW162047, AI818702, AW270429, AA341865, | |
| | | | | | M86102, C15811, AW161786, AA577824, AW270351, AA501781, AL037632, AI904944, | |
| | | | | | AI224619, AL118912, AI369076, AI268019, R56349, AI654520, AI565084, AI246061, | |
| | | | | | AA356376, AI432298, AA552724, R98835, AI130709, AI536858, AI537995, AA508882, | |
| | | | | | AI278847, AA626840, AA773473, AW051819, AA339789, AA302982, AW069227, | |
| | | | | | AW272640, AW148775, AI668566, AI814682, AA326904, AI291439, AI720403, T62078, | |
| | | | | | AI873627, AA504892, AW337526, AA910941, AA365318, R44855, AW381816, AA126271, | |
| | | | | | AI634187, AA904211, AA626595, AA745628, AI354330, AI381490, AI457313, AA827383, | |
| | | | | | AW132065, AA513189, AA827875, AI357109, AA632556, AA604149, AL134418, AA078137, | |
| | | | | | AI247101, H13120, AI125615, AA314338, AA362440, AW236288, AA888638, T02817, | |
| | | | | | AI251968, AI251976, AI308598, H27788, AI254673, AI246059, AI255003, AI241970, | |
| | | | | | AI223508, AI254658, AI252933, AI251598, AI251298, AI251380, AI254937, AA628740, | |
| | | | | | H65697, H65213, AW337483, AI049630, H03243, T06485, AI521042, AA297776, AI679045, | |
| | | | | | AA525517, H73550, AA351893, AA297496, AA721523, AA721530, AA380781, AA101264, | |
| | | | | | AA564714, AA362569, AI254798, AI199816, AA378195, AA937687, AA584525, AA572813, | |
| | | | | | T06876, AI831172, AW103395, AI284684, AI252207, AA862312, AI270149, N54179, U02047, | |
| | | | | | AC004531, AC004382, AP000116, X58139, AC007114, AP000310, AP000547, AC004646, | |
| | | | | | AC005242, Z94161, AC004644, U89336, AL049650, AC006057, AF139813, AC007023, | |
| | | | | | AC005899, U77079, U77081, AC000061, AC003110, AC006450, AF015416, AL133289, | |
| | | | | | AC004552, AC008103, Z98051, AC004834, AL132712, AP000513, Z98745, AC005320, | |
| | | | | | AC006482, AL049591, X96421, AC007325, AC004228, AC005778, Z73963, U77080, U77078, | |
| | | | | | AL049829, AC004494, Z84487, AF196969, L22968, AC005678, AC005544, AC004999, | |
| | | | | | AL022323, AC004585, AC006441, AC005224, AC006277, AL022728, Z68872, AC005399, | |
| | | | | | AC005175, AC004551, AC011422, AF111168, AP000260, AC006084, Z68756, AC005237, | |
| | | | | | AC000003, AC006430, Z84497, AC002375, AC002352, AL133448, AC006049, AC004832, | |
| | | | | | AC005632, U69641, AC003689, AF053356, Z98044, AL035405, AL096767, AL023513, | |
| | | | | | AC004841, AC002312, AF196779, AP001053, AC004998, AL024507, Z84719, AL034423, | |
| | | | | | AC007204, AC003109, AL023807, Z99291, D89927, AL031984, AL031776, AC008044, | |
| | | | | | AC005232, AC002504, AC002425, AF030453, AF196971, AC004217, AC003682, U85195, | |
| | | | | | AC002325, AL132774, AB023049, AP001056, U73644, AC004263, AC002384, AC005872, | |
| | | | | | AL022313, AC008055, AC004820, AE000658, AC003080, AD001502, AC006312, AC009784, | |
| | | | | | AC004782, AL031667, AC003107, AC000052, AC007015, AC006251, AC005338, AC004988, | |
| | | | | | AC007314, Z82190, AC000379, AC006285, AC005666, AC006947, AL078581, AC004253, | |
| | | | | | U91323, AP001137, AP000099, AC002314, AL008712, AL035703, AC007057, AC000118, | |
| | | | | | AL133396, AC006543, AC005514, AC004876, Z83845, AC007666, AF038458, AC005180, | |
| | | | | | AL135960, AJ131016, X82877, AL031736, AC004815, AC004882, AL035450, AL008718, | |
| | | | | | AL049776, Z98200, AL022144, U91327, L47234, AC006948, AC005351, Z93244, AC006075, | |
| | | | | | AL034555, AL049636, AC006544, Z97030, AL009183, AC005372, Z95115, M25828, Z70289, | |
| | | | | | AP000690, AC005565, AL020997, AC007687, AC006051, AL031427, AC003030, X94652, | |
| | | | | | AC002996, AL021307, AC004492, AC005620, AC002347, 548539, AC003663, AC009363, | |
| | | | | | AP000952, AC006474, AC006241, AC004905, AC005049, AL031602, Z93024, AC005274, | |
| | | | | | D86995, AC007182, Z54246, AF001550, AC004865, AC002365, AC005820, AL031315, | |
| | | | | | AC005562, AP000023, AC005070, Z81357, AC006538, AC005014, AC004796, AC002369, | |
| | | | | | AC005771, AC002302, AC007124, AF073485, AP000055, AP000170, AF015720, AF146367, | |
| | | | | | AC004890, AL031005, AL133163, AP000036, AC006561, AL109847, Z82215, U07562, | |
| | | | | | AC006065, AL109939, and AC007065. | |
| HODET03 | 421 | 922988 | 1-485 | 15-499 | | |
| HODEV13 | 422 | 859302 | 1-756 | 15-770 | | |
| HODEX10 | 423 | 926260 | 1-373 | 15-387 | | |
| HODBX31 | 424 | 922473 | 1-512 | 15-526 | | |
| HODEY08 | 425 | 972984 | 1-1100 | 15-1114 | AI084273, AA573804, AI131332, AI597908, AW166900, AA335039, AA826556, AA451989, | |
| | | | | | AA286811, AA953404, AW075574, AA605285, AA919038, AA701491, AW086028, AI565546, | |
| | | | | | AA885214, AI248960, AA884815, and AA974731. | |
| HODEY13 | 426 | 859323 | 1-686 | 15-700 | | |
| HODEY80 | 427 | 859296 | 1-873 | 15-887 | AL049821. | |
| HODEZ02 | 428 | 918672 | 1-208 | 15-222 | | |
| HODEZ11 | 429 | 952166 | 1-431 | 15-445 | AF195658, AL049780, and AC006530. | |
| HODFA38 | 430 | 934266 | 1-627 | 15-641 | AA570447. | |
| HODFB05 | 431 | 929733 | 1-627 | 15-641 | | |
| HODFB57 | 432 | 972810 | 1-641 | 15-655 | | |
| HODFB88 | 433 | 792979 | 1-620 | 15-634 | AA381448, AA381591, AA307619, and U46407. | |
| HODFD08 | 434 | 958371 | 1-383 | 15-397 | | |
| HODFD10 | 435 | 963516 | 1-560 | 15-574 | | |
| HODFD45 | 436 | 780531 | 1-387 | 15-401 | AC009263. | |
| HODFE69 | 437 | 859338 | 1-288 | 15-302 | | |
| HODFG37 | 438 | 782219 | 1-523 | 15-537 | AL009031, and AC002326. | |
| HODFH02 | 439 | 915257 | 1-280 | 15-294 | | |
| HODFH76 | 440 | 783783 | 1-521 | 15-535 | | |
| HODFJ01 | 441 | 859549 | 1-488 | 15-502 | | |
| HODFK18 | 442 | 974313 | 1-728 | 15-742 | AW194418, and AI859957. | |
| HODFK94 | 443 | 974318 | 1-635 | 15-649 | | |
| HODFL91 | 444 | 918456 | 1-517 | 15-531 | AL009031, and AC002326. | |
| HODFN19 | 445 | 859334 | 1-507 | 15-521 | AI498226, AI468496, AI675849, AA411880, U95626, AL022334, AC005234, AC002524, | |
| | | | | | AC006031, L47334, AL049594, and AC005011. | |
| HODFN42 | 446 | 921529 | 1-304 | 15-318 | AI670069, and AA934600. | |
| HODFO03 | 447 | 859329 | 1-297 | 15-311 | AC002044. | |
| HODF037 | 448 | 859314 | 1-530 | 15-544 | AI669554, AA854975, AI016754, AA024782, and AA009958. | |
| HODFP40 | 449 | 921651 | 1-902 | 15-916 | AW195474, AI754576, AI301859, AA846702, and AC004889. | |
| HODFQ02 | 450 | 918637 | 1-601 | 15-615 | | |
| HODFQ06 | 451 | 934304 | 1-524 | 15-538 | AI523074, AI709307, AI284105, AA904211, AI271762, AI735609, AW270258, AI031759, | |
| | | | | | AW082076, AA515351, AW083934, AA744227, AA713765, AI955029, Z33592, AA478602, | |
| | | | | | AW028376, AA744094, AA548692, AI492579, AI267356, AA297496, AA493628, AA912287, | |
| | | | | | AI431513, AA492524, AI247101, AI061313, AI267450, AI613389, AI311796, AA657374, | |
| | | | | | AI281818, AW274078, AW303196, AW274349, AI348597, AI889579, AW272640, AW089016, | |
| | | | | | AA604831, H52283, AA837642, AA827383, AA744048, T49184, AI253376, AC005815, | |
| | | | | | AC008132, AC007981, AC012330, AP000550, AC008018, AC007324, AC007325, AC009288, | |
| | | | | | AP000552, AC007664, AC007708, AC009399, AC007917, AL034419, AC005209, AP000511, | |
| | | | | | AL050341, AL035681, AL022329, AC004832, AF205588, AC004019, AC005250, 134294, | |
| | | | | | AF030453, Z97054, AC005837, AL139054, AC005529, AC004525, AC005519, AC007450, | |
| | | | | | AL049712, AC007225, AL031594, AC004675, AL121825, AC010205, AL031311, Z81366, | |
| | | | | | AF088219, AL117354, AC005740, AC005102, AC005089, AL133448, AC002312, AC005037, | |
| | | | | | AL049631, AL024498, AC003043, Z85987, AC006443, AC005914, AC005399, AC005081, | |
| | | | | | AC004893, AC006538, AC005800, AL049569, AL117352, AL135744, AC005881, AC006241, | |
| | | | | | AC016027, AC006126, AC004757, AL022313, AP000257, AC006501, AC006014, AC005527, | |
| | | | | | AL049759, AC006430, AC006285, AC004878, AC008101, AP000501, AL121757, AL034417, | |
| | | | | | AL008726, AL035685, M90058, AP000512, AP000704, AC005901, AC004884, AL031670, | |
| | | | | | AC004491, AC006511, U80017, AL034418, Z97630, AL078463, AC005231, AL035462, | |
| | | | | | AF207550, AC005488, Z98051, AL133382, AF053356, AL022316, AF092858, AC005940, | |
| | | | | | AP000355, AC008038, AC005015, AB003151, AC006536, AC005920, AC004167, AC003101, | |
| | | | | | Z97056, AC007057, AC005962, AC002316, M84371, AP000347, AL031681, AL022238, | |
| | | | | | Z94801, AP001054, AC005736, AL031282, AP000098, AL133353, Z75741, AC002128, | |
| | | | | | AL008582, AC005695, AC016830, Z85986, U96629, AC002039, AL132857, AC005220, | |
| | | | | | AP000694, AL121658, AC004752, AF017104, AF045555, AL031602, AC007546, AC005088, | |
| | | | | | AC002301, AP000557, AC004992, AC004659, Z82190, AL031662, AC016025, AC002401, | |
| | | | | | AC004655, AC016831, Z69705, AC007406, AC006121, AC005755, AC002369, AC006211, | |
| | | | | | Z98946, AC005730, AC002352, AC004662, AB023049, Z84466, AD000091, AC005031, | |
| | | | | | AD000092, AC002470, AP000692, AL020995, AC009247, AC004653, AC004754, AC004859, | |
| | | | | | AL031776, AC002115, AC018769, AP000348, Z83846, AC004139, AL020997, AL034369, | |
| | | | | | AC003982, U34879, AC005300, AC003991, AC006064, AF111167, AC009510, AL133246, | |
| | | | | | AL049758, AC002310, AC004531, AC005360, AB023051, AP000252, AL033527, AP000504, | |
| | | | | | AC005697, AL096701, AC005793, AC002351, AC002073, AC007227, AC002551, AB016897, | |
| | | | | | AC006125, AC006449, AL031667, AC002350, AC004587, AF134726, AC007298, AL008583, | |
| | | | | | U91326, AC007993, AL109839, AC007536, AC007637, AL078581, AC006101, Z94056, | |
| | | | | | AC005162, AL022315, AL121653, AC005005, AC005316, AC005874, AF134471, AC004953, | |
| | | | | | AC006071, AC005726, AL022237, AL079342, AP000212, AP000134, AC004685, and | |
| | | | | | AC005768. | |
| HODFT52 | 452 | 915232 | 1-789 | 15-803 | | |
| HODFU02 | 453 | 918536 | 1-386 | 15-400 | | |
| HODFU06 | 454 | 934229 | 1-625 | 15-639 | Z68868. | |
| HODFU47 | 455 | 806232 | 1-641 | 15-655 | AW265148. | |
| HODFU54 | 456 | 965526 | 1-123 | 15-137 | | |
| HODFW17 | 457 | 859322 | 1-599 | 15-613 | AW008635, AC018633, and AC005271. | |
| HODFX57 | 458 | 975259 | 1-407 | 15-421 | | |
| HODFY16 | 459 | 958329 | 1-776 | 15-790 | AA262613. | |
| HODFY79 | 460 | 975253 | 1-525 | 15-539 | | |
| HODFZ11 | 461 | 965104 | 1-349 | 15-363 | | |
| HODGC04 | 462 | 926863 | 1-201 | 15-215 | AC019014. | |
| HODGC61 | 463 | 973449 | 1-512 | 15-526 | | |
| HODGD05 | 464 | 931071 | 1-135 | 15-149 | | |
| HODGH02 | 465 | 917969 | 1-626 | 15-640 | D80164, C14389, D80227, D59467, C15076, D50979, D80269, D80195, D59275, D59502, | |
| | | | | | D58283, D51799, D59859, D80022, C14331, D80166, D80043, D51423, D59619, D81030, | |
| | | | | | D80210, D80391, D80240, D80253, D59787, D59610, D80188, D80038, D80378, D80212, | |
| | | | | | D80193, D80196, D80219, D59927, D57483, AA305409, D80366, D59889, D50995, D80024, | |
| | | | | | D80241, AW177440, AA305578, D80045, C14429, D51022, D51060, T03269, D81026, | |
| | | | | | AW178893, AW378532, AA514188, C75259, C14014, D80251, D80248, AW179328, D80522, | |
| | | | | | D59695, D80134, D52291, D51250, AW369651, AW178775, D58253, AW177501, AW177511, | |
| | | | | | AW178762, AW176467, F13647, AA514186, D80133, AW360811, AW352117, AW352158, | |
| | | | | | C05695, D80168, AW375405, AW377671, C14298, D80268, AI910186, AW179332, | |
| | | | | | AW378540, D80132, AW366296, AW360844, AW360817, AW375406, AW378534, | |
| | | | | | AW377672, AW179023, AW178905, AI905856, D80302, AW378528, D59373, D51103, | |
| | | | | | AW352171, Z21582, D80439, AW377676, AW178906, AW352170, AW177731, AW178907, | |
| | | | | | AW179019, AW179024, D80247, T11417, AW179329, AW177505, AW179020, AW360841, | |
| | | | | | AW378543, AW178909, AW177456, AW360834, AW178980, AW177733, AW352174, | |
| | | | | | AW178908, AW178754, AW179018, AW378525, D59627, AI557751, AW179004, AA285331, | |
| | | | | | AW179012, AW178914, D51097, AW367967, D80157, AW177722, AW177728, D51759, | |
| | | | | | AI535850, AW179009, AW178774, AW178911, AW352163, C06015, D58246, D59503, | |
| | | | | | AW178983, AW352120, AW178781, T48593, D80258, D58101, AW177723, AI525923, | |
| | | | | | D80014, D59653, AW378533, AW177508, D45260, D51213, AA809122, C14975, C03092, | |
| | | | | | AW367950, D59317, H67854, AI557774, H67866, D59551, AW177497, AW178986, T03116, | |
| | | | | | D80064, D45273, D81111, AI525227, D51221, AW177734, AI525925, AA514184, AI525917, | |
| | | | | | C14227, C14973, AW378539, C14344, AI535686, T02974, D60010, D59474, AI525920, | |
| | | | | | C14407, D60214, AW378542, AI535961, C14957, C14046, T03048, AI525242, AI525235, | |
| | | | | | AI525912, D31458, AI525215, C16955, AW300744, C05763, Z33452, AI525237, AI525222, | |
| | | | | | AW360855, AJ132110, A84916, A62300, A62298, AR018138, AB028859, AF058696, X67155, | |
| | | | | | Y17188, D26022, A25909, AR008278, A67220, D89785, A78862, D34614, AC007860, D88547, | |
| | | | | | I82448, X82626, Y12724, AR025207, A82595, AR060385, A94995, AB002449, AR016808, | |
| | | | | | AR008443, AB012117, X68127, I50126, I50132, I50128, I50133, A85396, AR066482, A44171, | |
| | | | | | AR066488, AR016514, A85477, I19525, A86792, AR060138, A45456, A26615, AR052274, | |
| | | | | | U87250, X93549, Y09669, A43192, A43190, AR038669, AR066490, AR066487, I14842, | |
| | | | | | A30438, AR054175, I18367, D88507, D50010, Y17187, A63261, X64588, AR008277, | |
| | | | | | AR008281, AR008408, AR062872, A70867, AR016691, AR016690, U46128, AF135125, | |
| | | | | | I79511, D13509, A64136, A68321, AR060133, U79457, AF123263, AB033111, AR032065, | |
| | | | | | AR060382, AR064240, X93535, and AR008382. | |
| HODGH04 | 466 | 926255 | 1-617 | 15-631 | C14389, D58283, D80043, D80391, D59787, D80253, D80196, D59467, D51022, D80366, | |
| | | | | | D80188, D59859, D80022, C14331, D80166, D80195, D51423, D59619, D80210, D51799, | |
| | | | | | D80164, D59275, D80240, D81030, D80227, D59927, D59502, D50995, D50979, D80212, | |
| | | | | | D57483, D80219, C15076, D80269, D59610, D80038, AW177440, AA305409, D59889, | |
| | | | | | D80193, D80024, AA305578, D80378, D80522, D80241, D81026, D51060, C14429, D80045, | |
| | | | | | AW178893, C75259, D80251, AW179328, T03269, D80248, AA514188, AW378532, C14014, | |
| | | | | | AW177501, AW177511, AA514186, D80133, AW360811, AW178762, D58253, D51250, | |
| | | | | | D80134, AW377671, AW178775, F13647, D80132, C05695, AW176467, AW369651, | |
| | | | | | AW375405, T11417, D80268, AW352117, AI910186, AW179024, AW352158, AW366296, | |
| | | | | | D80168, AW360844, AW360817, AW375406, AW378534, AW179332, AW377672, | |
| | | | | | AW179023, AW178905, D52291, D80247, D80302, AW352171, D80439, AW377676, | |
| | | | | | AW178906, AW352170, AW177731, AW178907, AW179019, AW179018, D59373, AI905856, | |
| | | | | | AW177505, C14407, AW179020, AW360841, AW378528, AW178909, AW177456, | |
| | | | | | AW179329, AW178980, AW177733, AW178908, AW178754, AW352174, AW378540, | |
| | | | | | AW360834, AW378525, AW179004, AW179012, AW178914, D51103, Z21582, AW367967, | |
| | | | | | D80157, AW177722, AW177728, AW378543, AA809122, D51759, AW179009, AW178774, | |
| | | | | | AW178911, AW352163, D59627, D58246, AW352120, AA285331, AW178983, C06015, | |
| | | | | | D51097, AW178781, D59503, T48593, D58101, D80258, AI557751, D80014, AW177723, | |
| | | | | | D59653, H67866, D51213, AW177508, AI535850, D45260, AW378533, C14975, AW367950, | |
| | | | | | H67854, C03092, C14227, AW177497, D60010, AI525923, AW178986, D80064, D59474, | |
| | | | | | C14973, D81111, AI525227, C14957, AW177734, T03116, AI525917, D59317, 102974, | |
| | | | | | D45273, C14344, D51221, D50981, AI525920, AA514184, AI557774, AI535686, AI535961, | |
| | | | | | D59551, C14046, D60214, AI525912, C04682, AI525235, T03048, AW378542, C16955, | |
| | | | | | H67858, AW378539, AI525242, AI525925, Z33452, AI525215, C05763, AI525222, AW360855, | |
| | | | | | AI525237, C14298, AJ132110, AR018138, A84916, A62300, A62298, AB028859, AR008278, | |
| | | | | | AF058696, X67155, Y17188, D26022, A25909, A67220, D89785, A78862, D34614, D88547, | |
| | | | | | Y12724, X82626, AR016808, AR025207, A82595, AB002449, A94995, AR060385, AR008443, | |
| | | | | | I50126, I50132, I50128, I50133, AB012117, AR066488, AR016514, AR060138, A45456, | |
| | | | | | A26615, AR052274, X68127, Y09669, A85396, A43192, A43190, AR038669, AR066482, | |
| | | | | | AR066490, A44171, AR066487, A85477, A30438, I19525, A86792, I18367, D88507, I14842, | |
| | | | | | AR054175, X93549, D50010, Y17187, A63261, AR008277, AR008281, X64588, AR008408, | |
| | | | | | AR062872, A70867, AR016691, AR016690, U46128, D13509, A64136, A68321, AR060133, | |
| | | | | | I79511, AF135125, U79457, AF123263, X72378, AR032065, and AR008382. | |
| HODGH07 | 467 | 951933 | 1-538 | 15-552 | AI686005, and AI658703. | |
| HODGH11 | 468 | 965105 | 1-631 | 15-645 | AL050320. | |
| HODGH91 | 469 | 968794 | 1-527 | 15-541 | AL033547. | |
| HODGI08 | 470 | 958235 | 1-253 | 15-267 | | |
| HODGJ67 | 471 | 974297 | 1-520 | 15-534 | | |
| HODGL54 | 472 | 859303 | 1-686 | 15-700 | AI701008. | |
| HODGM46 | 473 | 974051 | 1-1000 | 15-1014 | AW407007, AI125143, AA847341, AL044966, AA837771, AA582746, AA557945, AA610255, | |
| | | | | | AA368329, AI732911, F35684, AA579082, AA522864, R67701, AI459879, AA635150, | |
| | | | | | AI633386, F26395, AW021674, AW028376, AI468993, F00937, AA846046, AA640563, | |
| | | | | | AW304580, AI25 1024, AA354868, AA158549, AI370470, AW275432, AI445699, AI538404, | |
| | | | | | AA507990, AA219166, AI308529, H47461, W69639, AA825954, AI367551, W45215, | |
| | | | | | AA610644, AA015948, AW407679, AA506734, AI636734, AI572680, AA507291, AA351868, | |
| | | | | | AA569206, AI246386, AA368659, R79396, AA935827, AW238016, AA578245, AL135490, | |
| | | | | | AW196288, AI828721, AI520984, AA661590, AW029626, W45416, AA460786, AI355246, | |
| | | | | | H29914, H68343, AI921765, AA155817, AA219349, F16409, AI475611, AI888050, H79277, | |
| | | | | | AI884404, AA706202, AW023975, AI281622, AW162314, AA468458, F34151, AL079894, | |
| | | | | | AA804694, T03928, AA132445, AI567676, AI114494, AI245693, AA664963, AI434103, | |
| | | | | | AA349016, AW162332, AA362440, AA831919, AA557790, AA225630, N66744, AI619727, | |
| | | | | | AA582374, AA828834, AA778580, AA650528, AA719523, AI250552, T40838, AI251034, | |
| | | | | | AI254770, AI284543, AA664126, AI350189, AI054090, AA715508, AA714011, AA385094, | |
| | | | | | H78984, AW020682, AA176476, AA828840, AW023390, AI925588, AI733717, AI523356, | |
| | | | | | AW151015, Z36862, AI337612, AI564209, F24745, AA364147, T94394, AL134940, T05617, | |
| | | | | | W27084, AI053978, AW407889, AA226532, T15890, T40853, AI251284, AI251203, AI193417, | |
| | | | | | AI223626, AW020150, H81406, AA358531, AA749196, AI537368, AI249853, AI221027, | |
| | | | | | AA599423, AI963816, AI702049, AI339725, AI694154, AI246061, T50676, F34157, AI348780, | |
| | | | | | AC004253, AC005913, U47924, AL109952, AC007201, Z85987, AC004587, AC004973, | |
| | | | | | AL031447, AL022578, AC005067, AC007030, AL049735, AC007204, AC007285, AC003109, | |
| | | | | | AP000692, AC005914, AC002369, AL133163, AC007637, AD000864, AC005971, AC007792, | |
| | | | | | AC007193, AC004079, AC005726, Z82201, AC005021, AC005015, AC008929, AC006539, | |
| | | | | | AC005317, Z84466, AF031078, AC004264, AC002126, AF030876, AC005197, AC004598, | |
| | | | | | AL035450, AL110122, AC006597, AC004796, AC002091, AC007390, AL133245, AB017602, | |
| | | | | | AL022313, AC004491, AL031666, Z81364, Z82248, AC005800, AC002549, AL117354, | |
| | | | | | AL021407, AL034420, AC003041, AC002077, AC006071, AC004106, AC005291, AP000502, | |
| | | | | | AL049761, AP000696, U73634, AL049869, AL049776, AC005214, AL117258, AC005566, | |
| | | | | | AC005765, AL008724, AC003030, AC000159, AL033538, AC004881, AC007395, AC004895, | |
| | | | | | AC004812, AC002107, AL008712, AL035422, AL031848, Z98950, AC005746, AC007371, | |
| | | | | | AC005531, AC005046, AF139813, AC005793, AL031904, AC005900, AL135783, AC007277, | |
| | | | | | AL133353, AC006581, AC005887, AC000004, AL121852, AL034417, AP000511, AC006130, | |
| | | | | | M87912, AC000082, AC004844, AC005601, AC004228, AL031258, AC005696, AP000116, | |
| | | | | | AC005921, AL122020, AC002350, AC003692, AC004762, AF146024, AC006531, Z97630, | |
| | | | | | AL049591, AL049729, AC004042, AC002302, AC006163, AC004859, Z85996, AL049872, | |
| | | | | | AL022336, AC005736, AF064019, AL049610, AC006275, AC006222, AC000353, AF217403, | |
| | | | | | Z68165, AC005763, D87018, AP000268, AP000103, AP000033, Z85999, AC004706, | |
| | | | | | AC002073, AC007993, AL078463, AL022721, U91318, AP000089, AP000142, AL049759, | |
| | | | | | AL121915, Z93020, AC003025, AC006561, AL080245, Z98750, AL118516, AP000503, | |
| | | | | | AL133312, AC005832, AJ243213, AP000952, Y18762, AL049839, AC004904, AC005940, | |
| | | | | | AC005081, Z95118, Z93017, AC007225, AC005952, AL022311, AC005962, Z97633, | |
| | | | | | AC004843, AC005859, AP000008, AP000704, AC006287, AL008707, AC006014, AC006077, | |
| | | | | | AC004408, AP000243, AP000203, AF196972, AC006251, AL034548, AC007376, D87675, | |
| | | | | | K00061, AL049611, AC002463, AL050308, Z83848, AL031685, AL050348, AP000030, | |
| | | | | | AC004522, AL110200, AC016025, AC005288, Z95116, AL035587, AC005697, AL031733, | |
| | | | | | AL024498, AC004616, AC006946, AC002418, AL034423, AC003029, AC003098, AL022331, | |
| | | | | | AL023575, AC005532, AL096702, AL035659, AC006057, U02052, AC003969, U52427, | |
| | | | | | AC005828, AL031433, AL096757, AL049838, AL031291, AL035249, AC005072, AL021154, | |
| | | | | | AL035420, L78810, U52112, AL136363, AL031803, AC007388, AL135879, AL121790, | |
| | | | | | U29953, AL024494, Z78021, AC004156, AP001063, AC005379, AC005775, and AC005074. | |
| HODGO46 | 474 | 883087 | 1-599 | 15-613 | | |
| HODGP37 | 475 | 974293 | 1-552 | 15-566 | AF152364. | |
| HODGP83 | 476 | 889967 | 1-223 | 15-237 | | |
| HODGP95 | 477 | 908650 | 1-345 | 15-359 | AC005189. | |
| HODGQ08 | 478 | 958237 | 1-390 | 15-404 | | |
| HODGQ22 | 479 | 974290 | 1-527 | 15-541 | | |
| HODGQ32 | 480 | 974294 | 1-658 | 15-672 | | |
| HODGQ92 | 481 | 894368 | 1-392 | 15-406 | AW369682, and AB018255. | |
| HODGT62 | 482 | 974052 | 1-547 | 15-561 | | |
| HODGW08 | 483 | 958277 | 1-553 | 15-567 | | |
| HODGX10 | 484 | 963427 | 1-313 | 15-327 | Z84478. | |
| HODGX29 | 485 | 913879 | 1-256 | 15-270 | AC006017. | |
| HODGZ06 | 486 | 933783 | 1-488 | 15-502 | AC007685, and AC007284. | |
| HODGZ10 | 487 | 961977 | 1-460 | 15-474 | | |
| HODHC03 | 488 | 922987 | 1-597 | 15-611 | AI284176, AI907957, and U73642. | |
| HODHD16 | 489 | 974924 | 1-477 | 15-491 | AI557250. | |
| HODHG71 | 490 | 926203 | 1-533 | 15-547 | | |
| HODHH82 | 491 | 964935 | 1-316 | 15-330 | AA002213. | |
| HODHI07 | 492 | 952195 | 1-629 | 15-643 | | |
| HODHI26 | 493 | 973423 | 1-537 | 15-551 | | |
| HODHK02 | 494 | 918613 | 1-289 | 15-303 | | |
| HODHL19 | 495 | 973433 | 1-588 | 15-602 | AC005083. | |
| HODHL56 | 496 | 847724 | 1-636 | 15-650 | AA398482, and T63250. | |
| HODH011 | 497 | 965529 | 1-270 | 15-284 | | |
| HODH534 | 498 | 965460 | 1-497 | 15-511 | | |
| HODHY53 | 499 | 914554 | 1-663 | 15-677 | | |
| HODJR03 | 500 | 922484 | 1-537 | 15-551 | AC004804. | |
| HODJY33 | 501 | 951404 | 1-609 | 15-623 | H04619, AW089973, AW002729, AA584259, AI147246, AA196770, and AC007279. | |
| HODJZ90 | 502 | 965049 | 1-250 | 15-264 | | |
| HODKN07 | 503 | 933320 | 1-620 | 15-634 | L44297. | |
| HOFAA15 | 504 | 659522 | 1-422 | 15-436 | | |
| HOFAB40 | 505 | 964113 | 1-543 | 15-557 | AA825531, AA604776, AI245442, AI188441, AI244061, AI753232, AI571537, AW022503, | |
| | | | | | AI222789, AA679606, R40840, AA528442, AI753812, R44539, AI972757, AI095711, | |
| | | | | | AI818331, AW193103, AI479622, AI984270, AI206770, AW188420, AI568325, AI282612, | |
| | | | | | AI127300, AI085566, AI457985, AI273179, and AF095728. | |
| HOFAB71 | 506 | 573337 | 1-365 | 15-379 | | |
| HOFAD05 | 507 | 932211 | 1-294 | 15-308 | | |
| HOFAE31 | 508 | 772992 | 1-208 | 15-222 | AI718967, AI066500, AI191408, AA970891, W16766, AI074219, F25014, N45385, AA465517, | |
| | | | | | AA602119, N94010, F32882, F26209, F25830, N98860, AI934901, N77808, AA528414, | |
| | | | | | AI338326, AW088372, AW102799, AA320204, AA768215, AI151192, AW419435, AA788658, | |
| | | | | | AI150785, C03969, AI302844, AA725287, AL038871, AI350125, AI568272, AA983392, | |
| | | | | | AA525200, AA977031, AI093521, AI580262, AI720008, H97078, AI313204, AI626036, | |
| | | | | | AA526171, AA877563, AI144433, AA934574, AI079769, AA573686, AA639915, AA574008, | |
| | | | | | AA976783, T51767, AA492272, AI189510, AI281422, W70094, AI926973, AA845331, N75412, | |
| | | | | | AI279463, AA568387, AI201886, AA526497, AW084218, W05113, AI626023, AA315135, | |
| | | | | | AI417313, AA642788, AW192600, AW102964, AA894481, AA737308, AA872663, H93685, | |
| | | | | | AI440105, AI187012, AA829129, AA609288, AA760958, AI187043, AA448150, AI205981, | |
| | | | | | N94451, R77045, AI187001, AA578537, AA181352, R76883, H20456, AI219168, AA614765, | |
| | | | | | AI185992, AA738347, AA708433, F29053, AI984516, AA492189, AI869280, R83917, W30797, | |
| | | | | | AA503282, AA781308, AI301663, AA782226, AA448007, H94367, AA771978, AA844201, | |
| | | | | | AA134082, AI984517, AA782267, AA843941, AA928994, AI205979, AA732966, AA508863, | |
| | | | | | AA349148, AW161501, AI815573, AI816249, AI027040, AA962040, AA373789, AI336883, | |
| | | | | | AA081960, AW082030, AA132228, AA047332, N88037, AW156995, F20253, AI565512, | |
| | | | | | AI041418, AA662040, AW078808, AI818057, AA484511, AA093070, AI581654, AI582679, | |
| | | | | | AI097353, AA171667, AA315167, AA188617, W39735, AI469808, AI364733, AA602974, | |
| | | | | | AI266413, F37845, AA365505, AA132332, AI720272, AA885755, AW071223, W03821, | |
| | | | | | F27365, AW238838, N85440, AA305795, F26565, AA026450, AA082027, H45296, AA188736, | |
| | | | | | AA573675, H49316, N88105, W24397, N88030, AA090865, M36647, Y00764, and 561826. | |
| HOFAE61 | 509 | 707359 | 1-372 | 15-386 | AI694793, AW328387, AA287690, AW166132, AI701814, AI393309, AW005351, AI807923, | |
| | | | | | AA304908, AA194090, AI799077, AI916382, AI131240, AI630546, AA308513, AW087574, | |
| | | | | | AI138878, AA855025, AI188081, AW300307, AW340414, and R01958. | |
| HOFAF84 | 510 | 868887 | 1-352 | 15-366 | | |
| HOFMA24 | 511 | 782275 | 1-333 | 15-347 | R06046, N24376, AA431932, H96741, AI632470, AW130380, AW197748, AI183539, and | |
| | | | | | AB032969 | |
| HOFMB78 | 512 | 572941 | 1-386 | 15-400 | AJ388527, M21456, and X54067. | |
| HOFMB83 | 513 | 572839 | 1-343 | 15-357 | | |
| HOFMD13 | 514 | 916959 | 1-393 | 15-407 | | |
| HOFMB41 | 515 | 867993 | 1-354 | 15-368 | X52381, AF163863, M64428, X56219, AF076492, and X56223. | |
| HOFMF03 | 516 | 924679 | 1-434 | 15-448 | | |
| HOFMF70 | 517 | 734917 | 1-374 | 15-388 | AA078777, AW205164, M59936, AF099730, AJ004856, and AF052692. | |
| HOFMG21 | 518 | 973358 | 1-485 | 15-499 | AI870389, AI870412, AA443366, AI766675, AI304388, AA669930, W72592, W76106, N34142, | |
| | | | | | AA446942, AI203601, AI021941, AI304344, W88877, AA703026, N21316, AI144379, | |
| | | | | | AI499002, AA081147, AA906273, AI346611, N42641, AI525737, AA865339, AW005448, | |
| | | | | | N46027, AA733097, W67866, AA894580, N41872, N40396, N31251, H70758, AW172490, | |
| | | | | | W35238, AI311556, H95094, AA907108, AA860195, AA890706, AI688154, AI192484, | |
| | | | | | AA516363, AI288868, W80864, AA774581, AL038165, AA193154, AA908255, W67811, | |
| | | | | | AA676415, N67021, AA393462, N56626, AA075113, W24284, AA075002, AI264657, | |
| | | | | | AI025716, AW408230, AI023409, W81429, AI807013, AA772235, AI860208, AI269880, | |
| | | | | | AA644550, H03534, N44250, AA988507, AI051331, AI201765, N80176, AL043900, | |
| | | | | | AA081004, AA923183, H58732, N76206, W03500, AI193593, AW384875, N66943, AA706242, | |
| | | | | | N26033, N40857, AW236343, AW157602, AW131477, AI906913, AA886238, AW272410, | |
| | | | | | AA808734, AA534807, N30627, AA608755, AA454946, AA831555, AA724567, AI743703, | |
| | | | | | D63411, U21871, D13641, AF098274, AF098275, AC004074, AF098276, AC006001, and | |
| | | | | | AF126961. | |
| HOFMH12 | 519 | 964722 | 1-464 | 15-478 | X59697. | |
| HOFMH38 | 520 | 920365 | 1-401 | 15-415 | AA070567, AA171448, AA307051, AA298011, AL120861, AI797040, AA314999, AA297768, | |
| | | | | | AA171428, AA306518, AA297854, AA298067, AA297773, AA297845, AA297622, AA297767, | |
| | | | | | AA174031, AA130315, AA298079, AA297689, AA297215, AA297921, AA297687, AA297842, | |
| | | | | | Z31555, A45919, D43950, and AB022158. | |
| HOFMH95 | 521 | 973359 | 1-197 | 15-211 | | |
| HOFMI01 | 522 | 609722 | 1-108 | 15-122 | AW372827, AL134528, AL134518, U46346, AL119444, AL119391, AL042965, AL119363, | |
| | | | | | AL119496, AL119319, U46341, AL119443, AL042970, AL134538, AL134532, AL119439, | |
| | | | | | AL119484, AL042850, AL119418, AL119304, AL119320, and A81671. | |
| HOFMI62 | 523 | 796358 | 1-440 | 15-454 | AJ388527, M21456, and X54067. | |
| HOFMI63 | 524 | 745133 | 1-211 | 15-225 | | |
| HOFMJ44 | 525 | 719663 | 1-385 | 15-399 | AA037037, AA046808, AI074059, AI025254, AI038824, AA046825, AI335087, W46671, | |
| | | | | | AI141435, AI141175, W20117, AI081430, AA156232, R78487, F20461, W61182, AI086672, | |
| | | | | | AI308846, AA157472, AA470526, W24222, AA302416, H40198, AA147488, AA804565, | |
| | | | | | AI086624, AI074781, AI147805, AA888822, AI085738, AI088093, AI391491, AI146608, | |
| | | | | | AI095699, AI312528, AI075648, AA927030, AI309731, AA863122, AA844067, AI831194, | |
| | | | | | AI000826, AW263203, AA960909, AI571404, AI073644, AA927505, AA996038, AA888166, | |
| | | | | | AA788786, AI085956, AA366542, AI079406, AA746698, W46844, AA485185, AI041513, | |
| | | | | | AI880811, AA676445, AA974466, N95533, AA156054, AA082321, AI001112, W47172, | |
| | | | | | N23131, AA225981, AA576992, AI741287, AI075640, AA975580, AI028417, AI023076, | |
| | | | | | AI203524, AI079595, AI719742, AA046974, AA862562, AA382891, AI031831, AA082294, | |
| | | | | | AA046881, N29263, AA071499, AA788814, AA137139, H81768, N20551, AA557947, | |
| | | | | | AA854218, F29921, N28749, AI192144, AA071339, AA137068, AI085091, N49765, H98947, | |
| | | | | | W61183, and AF070668. | |
| HOFMK22 | 526 | 675122 | 1-346 | 15-360 | AW247757, AW239330, AA211149, AW249015, AW361739, AI557500, R18319, AF161479, | |
| | | | | | AJ238379, AJ238742, AJ238741, and AJ238743. | |
| HOFMM27 | 527 | 973349 | 1-604 | 15-618 | R80841. | |
| HOFMM72 | 528 | 464015 | 1-405 | 15-419 | | |
| HOFMN30 | 529 | 514556 | 1-724 | 15-738 | W46445, W46513, AA179186, AA128660, AA804464, AW196128, AA583251, AI953806, | |
| | | | | | AI872319, AI284510, AI610404, AI926755, and AL133074. | |
| HOFMP31 | 530 | 698097 | 1-292 | 15-306 | | |
| HOFMP79 | 531 | 775242 | 1-431 | 15-445 | AA448573, AA252446, AA082102, W73318, AA339599, N24290, AA887226, R10417, | |
| | | | | | AA037118, and U62940. | |
| HOFMQ04 | 532 | 823439 | 1-333 | 15-347 | | |
| HOFMQ31 | 533 | 906933 | 1-437 | 15-451 | | |
| HOFMQ65 | 534 | 789347 | 1-390 | 15-404 | AW408436, AA403226, AW408309, AA323398, AA101050, and AL050369. | |
| HOFMS68 | 535 | 464075 | 1-338 | 15-352 | | |
| HOFMS74 | 536 | 514568 | 1-580 | 15-594 | AI276023, AI627898, AI539262, AI953242, AA947158, AA152216, T08709, H11221, and | |
| | | | | | AC004126. | |
| HOFMS89 | 537 | 575820 | 1-502 | 15-516 | | |
| HOFMT20 | 538 | 669738 | 1-288 | 15-302 | | |
| HOFMT43 | 539 | 811542 | 1-504 | 15-518 | X07382, and Z28396. | |
| HOFMT66 | 540 | 754251 | 1-328 | 15-342 | AI432644, AI623302, AL134524, AI432654, AI432653, AW051103, AI432650, AI432677, | |
| | | | | | AI431230, AI431307, AI431316, AW128900, AL045327, AI431328, AI431353, AI431312, | |
| | | | | | AI432655, AI431310, AI431354, AI431323, AI431238, AI432666, AI431255, AI431347, | |
| | | | | | W68610, AI432661, AL042898, AI431337, AI492519, AI432675, AI431246, AI431321, | |
| | | | | | AI431315, AI431243, AI431351, AI431235, AI432651, AI432647, U46344, AL042508, | |
| | | | | | AI432674, AI431330, AI791349, AI432649, AI431248, AI431241, AA362690, AI868154, | |
| | | | | | AA362688, AW128884, AL042729, AI432672, AI431357, AI432665, AL042931, AI431254, | |
| | | | | | AA362689, T29199, AI061457, AI432662, AI431345, AL047163, AL042842, AL042655, | |
| | | | | | AI431346, AL042853, AI431231, AI432676, AI432673, AI432658, AL043166, AI431257, | |
| | | | | | AL042533, AL047611, AI682915, AI431340, AL135012, AI872319, AI432657, AL042802, | |
| | | | | | AI431247, AW128846, AI432664, AI432645, AL042787, AL042515, AL042832, AI431751, | |
| | | | | | AL043295, AI927233, AI436446, AI866484, AW337580, AI431350, AI492510, AL043091, | |
| | | | | | AI431318, AI431314, AI268898, AI886152, AI492520, AA130341, AL040207, AW128897, | |
| | | | | | AI924051, AI866786, AW129223, AL042488, R42123, AI432643, AI932620, AI282247, | |
| | | | | | AL042741, R43626, AI440238, AL043089, AI432656, AL046356, AL043321, AW194509, | |
| | | | | | AL045328, R46015, AI431333, AL042420, AL047675, AI492509, AL043278, AA743065, | |
| | | | | | AI654286, AL045891, Y17793, AL133074, I66487, I66498, AL133076, AF064854, AF019249, | |
| | | | | | A49045, AR067731, AR067732, AL133053, AL133049, I07209, I09269, I66486, I09270, | |
| | | | | | I09268, I07249, I09252, I09251, AR068508, AR068510, AR067734, AR068509, A63954, | |
| | | | | | I09267, I91969, A49701, A29109, A32111, I66495, AR068550, A23373, AR068551, I66494, | |
| | | | | | AR038307, AR038321, E01324, I08638, A94048, A94061, AR035224, A94046, A94054, | |
| | | | | | I58322, I58323, AL122101, I66497, I66496, A27169, A27170, A39929, A83151, AL133068, | |
| | | | | | AF118094, and AC005144. | |
| HOFMT72 | 541 | 563575 | 1-314 | 15-328 | | |
| HOFMU33 | 542 | 702492 | 1-360 | 15-374 | | |
| HOFMU63 | 543 | 744325 | 1-231 | 15-245 | | |
| HOFMU75 | 544 | 713809 | 1-261 | 15-275 | | |
| HOFMV84 | 545 | 859109 | 1-390 | 15-404 | | |
| HOFNA04 | 546 | 615287 | 1-361 | 15-375 | AJ223493, and U42725. | |
| HOFNA92 | 547 | 792734 | 1-329 | 15-343 | | |
| HOFNC63 | 548 | 973354 | 1-342 | 15-356 | | |
| HOFND14 | 549 | 658476 | 1-354 | 15-368 | | |
| HOFND40 | 550 | 867984 | 1-329 | 15-343 | | |
| HOFND50 | 551 | 727285 | 1-433 | 15-447 | AI311825, AI673069, AL039753, AW151107, AW103107, and M85165. | |
| HOFND52 | 552 | 727173 | 1-395 | 15-409 | AI492509, AI432658, AI431351, AI492520, AI431356, AI431346, AI431357, AI431342, | |
| | | | | | AI432645, AI431236, AI431240, AI432662, AI431751, AI432676, AF064854, and AF048686. | |
| HOFND90 | 553 | 716670 | 1-430 | 15-444 | | |
| HOFND94 | 554 | 717067 | 1-212 | 15-226 | | |
| HOFNG01 | 555 | 859106 | 1-268 | 15-282 | | |
| HOFNG06 | 556 | 935569 | 1-261 | 15-275 | | |
| HOFNH33 | 557 | 715101 | 1-152 | 15-166 | AW411124. | |
| HOFNI08 | 558 | 974435 | 1-412 | 15-426 | W17180. | |
| HOFNI48 | 559 | 708727 | 1-364 | 15-378 | AW245211. | |
| HOFNI82 | 560 | 717355 | 1-349 | 15-363 | | |
| HOFNL18 | 561 | 666498 | 1-393 | 15-407 | AA304945, AA355289, AA312114, AA495817, W72340, AA477457, AI669118, N79824, | |
| | | | | | AI245484, AI372958, AW079905, N21556, AI093765, AW450650, AA099228, R56490, | |
| | | | | | H15484, AW451773, AW236015, AL080166, and AL031432. | |
| HOFNL25 | 562 | 916963 | 1-502 | 15-516 | | |
| HOFNL37 | 563 | 906250 | 1-382 | 15-396 | AA853578, and AA853315. | |
| HOFNL40 | 564 | 711205 | 1-212 | 15-226 | | |
| HOFNL92 | 565 | 770088 | 1-402 | 15-416 | | |
| HOFNM85 | 566 | 869113 | 1-328 | 15-342 | AW245750, AL035943, AW247594, N57316, N57425, T08768, Z43415, AW402184, | |
| | | | | | AA313360, AA670088, W40348, W21269, T72713, AL035940, AW160492, AA313277, | |
| | | | | | AW247213, AA361071, R94160, AL036958, W19964, R18379, T80869, AW405965, | |
| | | | | | AW401713, AA378756, AA325636, N23610, AA340025, W17327, N55688, R19889, | |
| | | | | | AA314671, AA853510, AW403145, AW401537, W22385, W46199, AA773406, W22826, | |
| | | | | | AA345752, AA377322, AA346880, AA367230, AI034239, N87501, R12313, AI033895, | |
| | | | | | AA295206, AW402954, AA204793, W45011, AI191804, AW366672, D31767, and AF085348. | |
| HOFNT59 | 567 | 615305 | 1-467 | 15-481 | | |
| HOFNU72 | 568 | 705435 | 1-324 | 15-338 | W20014, AW160778, AA400658, AA340701, AW402919, AW238859, AW161153, AW239281, | |
| | | | | | AW408414, AA355461, AJ012504, AF107837, AF083245, AB009398, and AF086708. | |
| HOFNW10 | 569 | 916588 | 1-466 | 15-480 | | |
| HOFNW79 | 570 | 973351 | 1-542 | 15-556 | AJ388527, M21456, and X54067. | |
| HOFNY02 | 571 | 920218 | 1-569 | 15-583 | | |
| HOFNY50 | 572 | 715312 | 1-481 | 15-495 | AF047704. | |
| HOFNZ15 | 573 | 660317 | 1-394 | 15-408 | | |
| HOFNZ16 | 574 | 859104 | 1-367 | 15-381 | | |
| HOFNZ21 | 575 | 677372 | 1-444 | 15-458 | AA172312, AW245781, AW245685, AI922686, AI752241, AL045207, AW162793, AW239365, | |
| | | | | | AW250530, AI815398, AA306149, AA223817, AA314658, W44751, AW083164, AI123512, | |
| | | | | | AF100752, AC004472, M30143, and U11760. | |
| HOFNZ58 | 576 | 683473 | 1-363 | 15-377 | | |
| HOFNZ94 | 577 | 794308 | 1-334 | 15-348 | Z86062. | |
| HOFOA17 | 578 | 935553 | 1-357 | 15-371 | | |
| HOFOB88 | 579 | 751692 | 1-489 | 15-503 | AI290790, AW192390, AW291738, AA836267, AA885601, AA911254, AA908258, AI123091, | |
| | | | | | AA262071, AI279611, AA987244, AA335969, AB007946, AB007923, and AF139185. | |
| HOFOB91 | 580 | 827631 | 1-220 | 15-234 | | |
| HOFOE94 | 581 | 924473 | 1-532 | 15-546 | | |
| HOFOF57 | 582 | 666909 | 1-406 | 15-420 | N40054, N27721, AI131355, AA436038, AA292974, AI557218, AW274996, AA631848, | |
| | | | | | AI539429, AI146318, AI804348, AA233902, AI525325, W25483, T47061, AA211343, C17967, | |
| | | | | | AA299376, AW005799, AI090743, T78524, AI363335, AI082444, AI096906, AA327206, | |
| | | | | | AI422717, AI347590, H44711, AI087101, AA743800, AA557194, AI022687, AA234130, | |
| | | | | | AA732876, AW136326, AA339885, AA211344, AI547066, AI333899, AA810604, AI359155, | |
| | | | | | H43647, AA810608, AA771974, AI142815, AI924652, AI219430, W19321, and AD000671. | |
| HOFOF84 | 583 | 739399 | 1-627 | 15-641 | | |
| HOGAF39 | 584 | 947431 | 1-346 | 15-360 | AI885126, AW166364, AA490377, AA808700, AA811849, AA524458, AA714038, AA293472, | |
| | | | | | AA890365, AI027804, AI479104, and AF176525. | |
| HOGAU90 | 585 | 954011 | 1-388 | 15-402 | | |
| HOGAV36 | 586 | 926098 | 1-825 | 15-839 | AI346561, AI380209, and AW135850. | |
| HOGBF78 | 587 | 575929 | 1-429 | 15-443 | AA080880. | |
| HOGCQ05 | 588 | 950216 | 1-478 | 15-492 | W60879, AI017482, AI928127, AA635802, AI474401, H20562, H18660, AW104847, | |
| | | | | | AA196061, AI337811, R49248, AI479145, R42810, W55877, AA708337, R08049, AA746497, | |
| | | | | | AI039052, AA767341, AA485383, AA446217, AA618521, AA993040, AI097619, AA424341, | |
| | | | | | W93047, AA721661, AA993427, AA810160, AI027510, AW006638, N95297, AI215635, | |
| | | | | | AI004757, AA401727, AI537770, AA435959, AI394624, AI913889, AI559985, AI369769, | |
| | | | | | N90601, AW003287, AI870166, AI570651, AI138811, AI763307, AA290608, AA417963, | |
| | | | | | AW006982, AA281628, AA687619, Z39492, AW241279, AI420717, F02765, AA719464, | |
| | | | | | AA678086, W92459, F03750, AA011105, AI022646, F10173, D51379, AA781896, AI168342, | |
| | | | | | AI081609, AI684382, AA719707, AI202625, H02623, W55878, T33859, N91472, T98912, | |
| | | | | | R83010, AI568204, H46724, H26709, AI383107, AL079597, AA082037, AI368048, AA610613, | |
| | | | | | T16672, AW197260, AA041211, T32957, AI089022, AA678434, AA493501, AI365549, | |
| | | | | | AI912693, AA418140, AI199525, AA446216, AI266356, AW444914, AA055740, AA702510, | |
| | | | | | R59227, AA505711, AW394008, AA251476, AI825733, AW385277, AI690768, AA280842, | |
| | | | | | AW023656, AI608689, D19949, AI907549, AA397950, AC004447, and AB002363. | |
| HOGCR32 | 589 | 575931 | 1-195 | 15-209 | D86958. | |
| HOGCT45 | 590 | 717068 | 1-549 | 15-563 | AI929611, and AW161854. | |
| HOGCX95 | 591 | 890607 | 1-767 | 15-781 | AI073430, AA406136, AW269419, AI004814, AA707533, and AA383178. | |
| HOGEE76 | 592 | 968956 | 1-871 | 15-885 | AI056641, AW117435, N72573, AA375847, AA375611, AA380835, AA677344, AI271175, | |
| | | | | | AI307084, AI337700, AI305507, AI340671, AI312153, AI224651, AI275349, AI310667, | |
| | | | | | AI349142, AW269088, AI271176, AI224760, AI311163, AI311628, AI345622, AW074879, | |
| | | | | | AI251594, AI792507, AI254775, AI252013, AI306337, AI252014, AI054093, AI224693, | |
| | | | | | AI305393, AI224324, AI271313, AI792707, AI820860, AI251151, AI287949, AI287943, | |
| | | | | | AI249867, AI254561, AI305649, AI252915, AI345009, AW073435, AI349992, AI271146, | |
| | | | | | AI250142, AI252424, AI305931, AI306018, AI305395, AI336707, AI336820, AI337695, | |
| | | | | | AI337711, and AI337773. | |
| HOGEU49 | 593 | 961587 | 1-272 | 15-286 | | |
| HOOJQ59 | 594 | 965013 | 1-699 | 15-713 | AA551303, H77748, AI341538, AA281640, AA838724, AA523324, AI023519, AA887803, | |
| | | | | | AI681516, AI371385, AA962758, AA994841, AI868341, AA670061, AA778604, AA865306, | |
| | | | | | AI360419, AI041265, AI050715, AI193427, AI569655, AA554009, AA315106, AI357495, | |
| | | | | | AA044296, AA535136, AI015647, AA131586, AI735282, AA126719, AA976084, AI523059, | |
| | | | | | AA659914, AA879213, AA748069, F33750, AI002087, H04044, R38305, AW131546, | |
| | | | | | AW391885, AI354856, AA458689, AI479801, F27238, AI311108, AA720819, AA044123, | |
| | | | | | AA334077, and AC006509. | |
| HOVAF17 | 595 | 576627 | 1-344 | 15-358 | | |
| HOVAF71 | 596 | 757294 | 1-370 | 15-384 | | |
| HOVAG49 | 597 | 927320 | 1-479 | 15-493 | AA143074, AA987383, W60511, AA680304, AA827641, AA308290, AA401334, F25999, | |
| | | | | | AA313726, F22587, AI358423, AA315506, AI141189, W58769, AA575866, AA515848, | |
| | | | | | F19218, F19304, AA156103, F37437, F33656, N98867, F25212, AA740468, AA157759, | |
| | | | | | AA728989, P24956, AA608827, F36060, AA737291, AA194358, AA932208, AI143027, | |
| | | | | | F24362, F31772, F27422, F32057, T57362, AA192185, F24856, AA995725, AA741404, | |
| | | | | | AA314904, P34156, AA889507, AW022412, N55638, F20992, AA526390, W90626, AA007592, | |
| | | | | | F21312, AA954254, AI749361, AA148433, AA579682, F29723, T57445, AI291661, AI282169, | |
| | | | | | F29662, AA491525, AA747585, P22463, P29957, F31884, AI536594, AA664969, F31246, | |
| | | | | | F33617, AA730678, AA385186, F35367, F20491, F29466, F37060, F24202, AA705812, | |
| | | | | | AA492193, AA382505, W88582, AA314719, F34612, W04663, AA157650, F30675, F23580, | |
| | | | | | F27384, F31800, F27612, AI933136, AA974467, F35170, AI826775, AA528421, F29578, | |
| | | | | | F23463, AA767198, F34150, F24124, AA384045, AA492088, F27860, N56464, F31547, | |
| | | | | | F34856, AA594575, AI276978, F33998, AA316521, AI133697, P28088, F29835, F37748, | |
| | | | | | AI384039, AI810403, W81175, AI867973, T74339, AI701341, AA639064, AA976781, | |
| | | | | | AW241684, AA247353, AA007389, F23553, N89217, F27386, T23491, Z40911, T16443, | |
| | | | | | W90249, and AD017710. | |
| HOVAI41 | 598 | 670963 | 1-93 | 15-107 | | |
| HOVAM50 | 599 | 723671 | 1-350 | 15-364 | | |
| HOVAO76 | 600 | 770066 | 1-860 | 15-874 | H13051, R31396, Z36861, AC007057, and AL049872. | |
| HOVBQ10 | 601 | 964671 | 1-808 | 15-822 | AW449247, AI089920, AW452240, AI378795, AA431282, AI188684, AI800797, AA236983, | |
| | | | | | AI078809, AI147017, W07506, AI217995, AA976845, AI093869, AA405781, AI150770, | |
| | | | | | AA405716, AI014997, AA235925, AA578443, AA257058, AA773503, and AL078474. | |
| HOVBY34 | 602 | 706816 | 1-404 | 15-418 | AA846482, AA728911, AL043212, AI653783, T47138, AA832016, AA831801, AI185394, | |
| | | | | | F31951, T52772, AW079737, AW271085, AA714073, AA552724, AA810154, AA018923, | |
| | | | | | AA012829, AA633565, AI061619, AI306717, AW419389, H91047, AI800343, AI342786, | |
| | | | | | AI300413, AA356376, AA846923, AA496309, AI915081, AA745628, AA298569, H43183, | |
| | | | | | AI417586, AA640252, AW019964, H62550, AI873627, T40629, AA053463, AI300818, | |
| | | | | | AI310992, AW302670, AI270120, AA230146, AA805848, AI671077, AW084173, AA568856, | |
| | | | | | AL134332, AA626632, AI583291, AA366601, T62078, AI904944, AI133418, AA862029, | |
| | | | | | AA513884, AI889579, AW002330, AI479148, AA568314, AA768179, AI278847, AI627868, | |
| | | | | | AA297789, AI434037, AI251809, R84528, AW272640, AI130709, M78021, AI536858, | |
| | | | | | AI537995, AW073598, AW089016, AI287766, AA434078, AA745543, AL039761, AI281818, | |
| | | | | | F31811, AI445373, AA742775, AI619994, AA811954, N69399, AI302277, AA167179, | |
| | | | | | AA678616, AW341955, AI814682, AW243945, AI291439, AA715605, AL134418, AA728874, | |
| | | | | | H73306, AL037632, AL041375, H84412, H43771, AW078821, AI431513, R70883, AA904211, | |
| | | | | | AA173166, AI678476, AA856866, AA469282, R87912, AW169118, AA633039, AW390284, | |
| | | | | | AW117723, AA569597, AI347665, H67172, AI865776, AA244181, AA714921, AI955029, | |
| | | | | | AW190277, R87883, AI472736, AI591134, H42893, N91138, AW079667, AW089950, | |
| | | | | | AA599532, R70884, AW272815, AA644223, AW148775, N73060, AA371410, AA420729, | |
| | | | | | AW440568, AI343669, AI064781, AI309121, AA581498, AI583466, AW274191, AI306232, | |
| | | | | | AI251576, AI733856, AI612810, AI817108, AA678932, AI811647, AW002831, AW081610, | |
| | | | | | AA483606, AA019003, AI816058, AA515351, AI628859, AA229988, AA363003, H86221, | |
| | | | | | T74524, AA937809, AA515924, H29914, AL039309, AA630845, AI889995, AI859744, | |
| | | | | | AW117704, AA302661, AI370170, AC006487, AP000555, AC006312, U18271, AC005231, | |
| | | | | | AC005037, U73330, AC002467, AC004491, AC005288, AC004843, AL008629, AC007686, | |
| | | | | | AC007298, AC004878, AL031120, AC007269, AF027390, AC007055, AF039906, AP000300, | |
| | | | | | AP000113, AP000045, AC005740, AC005529, AC003101, AC004526, AF112482, Z79996, | |
| | | | | | AC003086, AL096761, AC002544, AJ246003, AP000884, AC009247, AC004651, AC004760, | |
| | | | | | AF176815, AC005005, AC006111, AL121658, AC005003, AC008078, AC004991, AL024508, | |
| | | | | | AC005553, AB023050, AP000212, AP000134, AC005089, AC006061, AC004601, AC005684, | |
| | | | | | AC006101, AP000350, AL121754, AC008064, AL096775, AC005532, AC004883, AL096791, | |
| | | | | | AC007514, Z98304, AL031575, U95739, Z83845, AL031005, AL031433, AC002117, U51244, | |
| | | | | | AL031585, AL049575, AL049550, AC008082, AC006449, AC003051, AC004084, AL049610, | |
| | | | | | AC007225, U91319, U91320, AC008545, AC002549, AL031584, AC007344, AL022318, | |
| | | | | | AC008040, AC005940, AF115566, AL109758, U95742, AL117351, AL034423, AF111169, | |
| | | | | | AC006392, AC002543, Z81365, AC005081, AC007277, AC004692, AL049776, AC005015, | |
| | | | | | M87889, AC000090, AP000252, AC005031, AP000030, U80017, AL022396, AC004655, | |
| | | | | | AC006360, AC004025, AC007666, AC004686, U02047, AP000122, AP000054, AL121825, | |
| | | | | | AP000289, AC005480, AP000042, AP000110, AL008730, AL031289, AC005011, AC007182, | |
| | | | | | AL121652, Z98036, AB003151, Z95114, AC004687, AL096818, Z48051, AC002100, | |
| | | | | | AP000067, AC006162, L47234, Z83733, AL035072, AL049749, AC003983, AC000159, | |
| | | | | | AF196970, AL031429, AL031664, AP000355, AL023775, AL031737, AF001552, AC004896, | |
| | | | | | AC005519, U94776, Z75407, AL109627, AL035422, AC007358, AC003108, AC005899, | |
| | | | | | AF196779, AC000134, AL031431, AC006238, AC005602, AL049872, AC005409, Z85986, | |
| | | | | | AL049764, AD000812, AC003072, AL049733, AL023575, AC002126, AL035681, Z93930, | |
| | | | | | AC004540, AC006501, AC000111, AC006013, AL031228, AC004895, AC004776, AC005924, | |
| | | | | | AL080250, AC004000, L78810, AC004231, AL031311, AL117337, AC007736, AC005722, | |
| | | | | | AC005274, AF205588, AP000116, AP000049, AC005247, AL021878, Z99716, AC003690, | |
| | | | | | AL022574, AC004073, AL008635, AC004535, AF196969, AL031295, AF207550, AL078603, | |
| | | | | | AL033381, Z83820, AC007878, AC009509, AC005036, AF130343, AC005207, AP000311, | |
| | | | | | AL035420, AC006388, AP000313, AL078471, AP000194, AP000050, AP000117, AC006141, | |
| | | | | | AB001913, U73628, AC007216, AL031722, U07562, AC005593, AL022320, AC007242, | |
| | | | | | AC004822, AC004812, AC002432, Z98884, AC006536, AB016897, AL031767, AL109827, | |
| | | | | | AC002477, AC006473, AC002400, Z94801, I34294, AP000322, AC005625, AC006163, | |
| | | | | | AC003959, AP000152, and AP000053. | |
| HOVBZ26 | 603 | 888442 | 1-203 | 15-217 | | |
| HOVCA52 | 604 | 727170 | 1-409 | 15-423 | | |
| HOVCD39 | 605 | 705406 | 1-360 | 15-374 | AA535937, AC002314, AC005206, AC005667, AL049832, AC005668, AF111169, AL022316, | |
| | | | | | AC007376, AF001549, AC006160, AC005412, AC007955, U78027, AC007041, AL035422, | |
| | | | | | AC006285, AC005261, AC007227, AF134726, AL031311, X14448, AC005786, AC006257, and | |
| | | | | | AL049830. | |
| HOVCI76 | 606 | 858845 | 1-346 | 15-360 | AL049694. | |
| HOVCI77 | 607 | 713792 | 1-263 | 15-277 | | |
| HOVCJ24 | 608 | 858844 | 1-305 | 15-319 | | |
| HOVCM22 | 609 | 674177 | 1-475 | 15-489 | AF150146. | |
| HOVCO11 | 610 | 970814 | 1-1454 | 15-1468 | AI923848, AI680189, AI401617, AI373875, AA455317, AA701656, AI472034, AI573004, | |
| | | | | | AL120931, AA398429, AI051123, AI624093, AI248617, H99041, AI355692, AA687849, | |
| | | | | | AI355703, AI359209, AA757226, AW131426, N33217, N91144, AI342620, N27564, AI298478, | |
| | | | | | AI589126, AW193312, AI923367, AI890992, AI435647, AA788753, AA601557, AI682609, | |
| | | | | | AI583218, AA678000, AW168929, AA614659, AI298694, AA036731, N66889, H97544, | |
| | | | | | AA745905, D62527, H18598, N89744, AI245176, AA403052, AA150090, AI248821, AI287545, | |
| | | | | | N22090, AI263846, AI245198, AA894619, AI185100, AI272966, R69930, AI075972, AI242237, | |
| | | | | | AI435894, AI348194, AA479068, H46858, AI511692, N47754, AI784586, AW058621, | |
| | | | | | AW081918, AW168028, AI346563, AI566456, AI186661, AI433476, AI770052, AI963008, | |
| | | | | | AI187073, R69882, AA812522, AI888697, F36516, AI890986, AA514269, F11075, C02214, | |
| | | | | | AW002830, AA381400, AA381382, AI143203, AI350680, AI375753, AA968981, AI432046, | |
| | | | | | AI080704, AW169284, AI866206, AA150159, AA381630, AI566594, AA381701, AA381636, | |
| | | | | | R76807, R20526, AA844237, AA381643, R27302, AA381945, AA904561, AI280761, R66707, | |
| | | | | | AI382360, H04179, D61736, AI697429, AW378387, R67586, AA805532, AA381644, | |
| | | | | | AI932870, N93493, AA381602, H18624, AA381460, AA381275, AA476343, AA654417, | |
| | | | | | AW104101, N90151, AI805033, AA347509, R32649, R33334, F31071, AW051256, N56395, | |
| | | | | | AA455704, AA744342, AA291227, AA089961, AA761970, N40385, W17019, R07700, N41931, | |
| | | | | | AW021551, R66241, AA284149, AA381605, R52479, T75133, R75976, AW152083, AA167390, | |
| | | | | | W81443, AA804381, AA366783, AW057830, AA482823, AF139791, AA427526, H27061, | |
| | | | | | AA909840, AI802150, AW378359, AA808476, AI679723, AA765452, H39601, AA889282, | |
| | | | | | H18597, AI679152, W04813, AI216644, AW378412, AA036938, T20149, AI915452, | |
| | | | | | AA130568, R33333, AI570298, N34507, AI280767, AA632567, AA216333, and AC004520. | |
| HOVCO58 | 611 | 736065 | 1-408 | 15-422 | | |
| HOVCQ47 | 612 | 496190 | 1-628 | 15-642 | AA176289, AI341253, AI476272, AI631533, AA609460, AA503370, AI797388, AA421578, | |
| | | | | | AA421007, and AA310749. | |
| HOVDY04 | 613 | 926219 | 1-532 | 15-546 | AA725889, AI937507, AI090742, AI190613,AI363396, AA485978, AW137065, AI061260, | |
| | | | | | AA029073, AW449608, AA488604, AA928760, AI560967, AA908207, AI499789, AI499666, | |
| | | | | | AI638627, AI638193, AA670299, AI699081, AI695989, AI538115, AA700477, AA969203, | |
| | | | | | AW207595, AW007189, AA693349, AA029072, AW453024, AL119457, AL119324, | |
| | | | | | AL119418, AW392670, Z99396, AL119443, AL042544, AL119399, AW372827, AW384394, | |
| | | | | | AL119319, AW363220, AL119497, AL134902, U46351, AL119484, AL119391, AL119522, | |
| | | | | | AL119363, AL119355, AL119483, U46350, U46341, AL119341, AL119335, AL119396, | |
| | | | | | U46349, AL119496, U46347, AL042965, AL037205, AL119464, AL119444, AL119401, | |
| | | | | | AL119439, AL134525, AL134536, U46346, AL134538, AL134531, AL042614, AL042984, | |
| | | | | | AL043019, AL042975, U46345, AL043029, AL042542, AL042551, AI142132, AL042450, | |
| | | | | | AL043003, AR060234, AR066494, A81671, AB026436, AR054110, and AR069079. | |
| HOVEE58 | 614 | 968699 | 1-251 | 15-265 | AA370036. | |
| HOVEK70 | 615 | 909138 | 1-804 | 15-818 | AI126171, AI807074, AW172978, AI802445, AI811298, AI624106, AI635206, W96514, | |
| | | | | | AI190433, AI810701, AI271523, H43143, AI911113, AI803788, AI566934, AI187824, | |
| | | | | | AA644026, AL043767, AI869010, AI015017, R55050, AA043579, AL045986, W96481, and | |
| | | | | | AA568260. | |
| HOVEV36 | 616 | 959234 | 1-531 | 15-545 | | |
| HOVJA10 | 617 | 961467 | 1-430 | 15-444 | | |
| HPCAB21 | 618 | 573829 | 1-141 | 15-155 | | |
| HPCAB31 | 619 | 698320 | 1-456 | 15-470 | R73849, | |
| HPCAE18 | 620 | 574952 | 1-343 | 15-357 | AI910277, AW339592, AI492757, AA767543, AA568133, AB014555, and AB013384. | |
| HPCAH18 | 621 | 573395 | 1-337 | 15-351 | AL096817. | |
| HPCAH88 | 622 | 953808 | 1-624 | 15-638 | R61213, AA021151, AL118746, and AA336609. | |
| HPCAI21 | 623 | 655535 | 1-293 | 15-307 | | |
| HPCAI68 | 624 | 655536 | 1-346 | 15-360 | | |
| HPCAK16 | 625 | 662121 | 1-622 | 15-636 | | |
| HPCAK57 | 626 | 734931 | 1-407 | 15-421 | AL031665. | |
| HPCAL60 | 627 | 655723 | 1-317 | 15-331 | AI287445. | |
| HPCAL86 | 628 | 924709 | 1-308 | 15-322 | | |
| HPCAM22 | 629 | 655607 | 1-415 | 15-429 | AC002381. | |
| HPCAN59 | 630 | 655742 | 1-282 | 15-296 | | |
| HPCAO04 | 631 | 655732 | 1-316 | 15-330 | AA622352, and Z18305. | |
| HPCPF05 | 632 | 927168 | 1-525 | 15-539 | AW294804, AI193110, AI300529, AI336265, AI160012, AA029612, AI832813, AA722195, | |
| | | | | | AA121508, AI860181, AI141465, AI570532, AI857944, R32118, AA099271, AI096365, | |
| | | | | | AI342221, AI808491, AI862033, AI559677, AW023430, AI361255, AI371048, AA865682, | |
| | | | | | AA748042, AI336001, AW022229, AI359397, AA026111, AA115634, AI431331, AI911906, | |
| | | | | | AI680468, W93126, AI954960, AW088396, AI190286, AI346804, AI130942, AI091483, | |
| | | | | | AW189276, AA688307, AI189025, AI767694, AI799469, AW380356, AA807668, AI354954, | |
| | | | | | AW380375, AA043929, AW022523, W02100, H92712, AI301595, AI202850, AW380384, | |
| | | | | | H99705, AI982790, AW237470, R65725, AA098892, AA470877, R24056, AA564293, | |
| | | | | | AI651164, AW271629, AW380377, AA853830, T17200, AA468597, AI651187, R79227, | |
| | | | | | AI686761, AI805208, AA873325, AI077608, R32496, N80064, AI758913, C00620, AI214710, | |
| | | | | | AI783865, AW380370, AA127733, N91757, R65726, AI689514, AI687869, W07026, W00844, | |
| | | | | | AP000315, AP000165, and AP000118. | |
| HPCPO07 | 633 | 951826 | 1-289 | 15-303 | | |
| HPCQY57 | 634 | 927135 | 1-357 | 15-371 | AW008782, AW050625, AI631996, AI738644, AW050639, AI826984, AI865021, AI823343, | |
| | | | | | AI983601, AI522217, AW195206, AI748866, AI439278, and AF157630. | |
| HPDOT03 | 635 | 922481 | 1-370 | 15-384 | AI929455, AI816461, AI650907, AW138789, AA577366, AI633916, AA974004, and W57636. | |
| HPDOY06 | 636 | 929318 | 1-243 | 15-257 | | |
| HPDPJ69 | 637 | 966158 | 1-592 | 15-606 | AW168960, AA833900, AA384359, AI761053, AW169324, AL080317, AL031073, AF179874, | |
| | | | | | AC007068, Z98750, AC007319, AC006047, D84394, and AP000509. | |
| HPDPK12 | 638 | 969340 | 1-304 | 15-318 | AA424185, R07403, AI074550, AI074543, AA829693, AA603234, M77858, H56912, | |
| | | | | | AA193445, AA640755, AA296002, N72812, AI803827, N63746, T85040, AA346355, | |
| | | | | | AA865344, W37250, AW245054, AA278641, AI803791, AA669238, AI708384, W42997, | |
| | | | | | AW075979, N71033, T63772, AA189154, R43401, AA837708, C14614, AW073510, R65651, | |
| | | | | | AA504561, AW438765, AI473581, AA740297, AI224583, AA282951, AI049845, AI027056, | |
| | | | | | AI689695, AI192839, AW151713, AI554399, N22797, AA657505, AA129133, AA088727, | |
| | | | | | AA830594, AA569474, AA586661, T92947, AI821239, AW150476, AI350189, AI611331, | |
| | | | | | AI421257, AI362442, H65404, AW342029, AW166879, AI340280, AI433131, AW440315, | |
| | | | | | AI761120, AI342863, AA974503, AI611736, AA748913, AA483211, AW082470, AA299220, | |
| | | | | | C05714, AA526630, H73230, AI702522, AI791336, AA532594, Z83822, AC007676, AL078593, | |
| | | | | | AL117338, AL110161, AC004070, AC002412, AC005911, AL109853, AL049759, AC006115, | |
| | | | | | AC005944, AC004750, AC004647, AL049776, AC005060, AD000833, AL096766, AC004149, | |
| | | | | | AL078644, AC002563, AC005519, AC009247, AC007461, AL133445, Z93242, Z97056, | |
| | | | | | AC005682, AC004771, Z82180, AF003626, AC008044, AL035667, AL009179, U52112, | |
| | | | | | AC006265, AL135744, AP000959, AL022313, AP000011, AL132712, AC009178, AC007790, | |
| | | | | | AC006597, AC007546, U95742, AC007216, AC000088, AC000082, AC003037, AC006511, | |
| | | | | | AC006197, AL035400, AL079295, AR060469, AC006140, AB023052, AC005933, Z82976, | |
| | | | | | AC004559, AC005943, Z84721, AL050306, AL023575, AC006974, AP000513, AL050341, | |
| | | | | | AC005004, AC005281, AC004796, AL034408, AC004686, AC006571, AC004126, AC007425, | |
| | | | | | AL031848, AF064862, AC002553, Z83844, AP000555, AC005618, AL110505, AC005037, | |
| | | | | | AC004893, AC005150, AF141309, AC005544, AC004655, AC006001, AC005089, 877127, | |
| | | | | | AB023049, AC004188, AL021807, AC006071, AP000516, AL035659, AC003663, AC007666, | |
| | | | | | AF159056, AC007214, AC006033, AC003080, AF111169, AC000052, AC004019, AJ011930, | |
| | | | | | AC007051, AF001552, AC003982, AC007919, AC003953, AC007685, AC005666, M87896, | |
| | | | | | AL022324, U63630, AP000302, AC000073, AC006162, M89651, AC004073, AC005183, | |
| | | | | | AL023578, Z98752, AP000114, AP000046, AP000141, AC000085, AL031133, AC006539, | |
| | | | | | AC004150, AP001054, AC002477, AC006236, AC004659, AF001548, AC006036, AL133353, | |
| | | | | | AC004832, AP000088, AC006116, AC004386, AL031283, AC006249, AC005291, AC003106, | |
| | | | | | AB003151, AP000688, AC005386, AC005841, AL049576, AP000509, AC006261, AC000075, | |
| | | | | | AC005885, AL034555, AL031670, AC004020, AF165926, AC006199, AL021917, AC007344, | |
| | | | | | AC003101, AC004526, AC002544, AL109963, AF196970, AC005082, AL096791, D86995, | |
| | | | | | AC002316, AC007283, AC007207, AC005664, AC003108, AC005369, AC002454, AC004820, | |
| | | | | | L44140, U78027, Z97206, AL035422, AC003071, AC007556, AC006461, AC007537, | |
| | | | | | AL031255, AL121653, AC004017, and AC002039. | |
| HPDPQ40 | 639 | 922464 | 1-615 | 15-629 | AI911379, AI382036, AI523065, AI567528, AA628532, AI359162, AI356788, AA483453, | |
| | | | | | AA483438, AI811858, and T07668. | |
| HPDQ005 | 640 | 929274 | 1-1104 | 15-1118 | AI023890, AI744865, AI961389, AA694270, and AA778846. | |
| HPDRB01 | 641 | 914437 | 1-540 | 15-554 | AA508138, AI950798, AA013140, AA013366, and AL035594. | |
| HPDRD28 | 642 | 957791 | 1-498 | 15-512 | AI803130. | |
| HPDRG92 | 643 | 967704 | 1-347 | 15-361 | T96738, R90778, H47758, R94024, AA323896, N51812, and AB033116. | |
| HPDRO20 | 644 | 957678 | 1-208 | 15-222 | AI925316, C20550, and AW383499. | |
| HPDVB07 | 645 | 951634 | 1-661 | 15-675 | AL008628. | |
| HPDVE05 | 646 | 928647 | 1-828 | 15-842 | AA621983, AI738475, AI380189, AI380858, AI127232, AA622706, AW204003, AA621975, | |
| | | | | | AI587036, AA665743, AI692234, AI249654, AI246971, AI246864, AW268783, AI692219, | |
| | | | | | AI002242, AW137282, AW295910, AI308015, AI318288, AW301462, AI246934, AW268311, | |
| | | | | | AI345591, AI246816, AI318117, AW301382, AI311495, AI610947, AI252418, AW086332, | |
| | | | | | AI251546, AI792842, AI792856, AI345144, AW072879, AI313327, AJ223366, AI249650, and | |
| | | | | | AI318575. | |
| HPDVF03 | 647 | 922193 | 1-834 | 15-848 | AI183572, W03052, AI656704, AI916980, AA642326, AA337377, AA337144, and AA249832. | |
| HPDVK12 | 648 | 968977 | 1-560 | 15-574 | AI148863, AJ765291, N70646, AI914033, AI458020, AA551814, AI311395, and AW175659. | |
| HPDVM06 | 649 | 933443 | 1-673 | 15-687 | AI377852, AI283476, AA954783, AI914476, AI918738, AA371003, AW372827, AL119363, | |
| | | | | | AI142137, AL119444, AL043011, AL119319, AL119304, AL134528, AL134518, AL119483, | |
| | | | | | AL119522, AL134538, AL119439, AL119484, AL119391, AL119496, AL042970, AL119396, | |
| | | | | | U46346, AL043033, and AL031777. | |
| HPDVY17 | 650 | 955902 | 1-432 | 15-446 | | |
| HPEAF19 | 651 | 867892 | 1-291 | 15-305 | | |
| HPEBA06 | 652 | 960802 | 1-242 | 15-256 | AA299493, AI580853, AA303099, AI287555, AA299492, AI279700, AA559290, N71724, | |
| | | | | | AF177861, AW338869, AA493503, AA367546, AL031777, AC006130, U73024, AC009509, | |
| | | | | | Y10196, U63721, AC006333, AC004047, AJ012197, AL139054, AL050333, AC006544, | |
| | | | | | AC004527, and D87008. | |
| HPEEA51 | 653 | 723298 | 1-423 | 15-437 | N69328. | |
| HPEBD31 | 654 | 655760 | 1-538 | 15-552 | AA196263. | |
| HPEBE44 | 655 | 716911 | 1-456 | 15-470 | T72867, AA610577, and AC007695. | |
| HPEKG18 | 656 | 914115 | 1-84 | 15-98 | AF111167. | |
| HPEKJ42 | 657 | 922391 | 1-214 | 15-228 | | |
| HPEKU27 | 658 | 921663 | 1-428 | 15-442 | | |
| HPEKX12 | 659 | 969251 | 1-355 | 15-369 | AA737020, AW134485, AI874258, AI217712, AA935591, and AW389859. | |
| HPFAA06 | 660 | 960801 | 1-429 | 15-443 | AC004111. | |
| HPFCA36 | 661 | 524720 | 1-275 | 15-289 | AI798807, AC007065, AF073930, and AF064804. | |
| HPFCA71 | 662 | 655596 | 1-351 | 15-365 | | |
| HPFCF09 | 663 | 536666 | 1-343 | 15-357 | AA617957, AI168322, AC005886, AC006071, AC006561, AL096791, AC004223, AC005670, | |
| | | | | | AC002094, AC005156, AC002300, AC004815, AC007308, AP000212, AP000134, AP000030, | |
| | | | | | AC006255, AC004685, AL132987, Z93017, AC002425, AL096701, L77570, AL021453, | |
| | | | | | AC004890, AL049766, AP000555, Z83840, AC005089, AL049650, AC005756, AC008116, | |
| | | | | | Z98941, AL034549, AL109952, Z98036, AL023575, AC002470, AL133445, AC007077, | |
| | | | | | AL121658, AC005187, AC007279, AL080243, AC007546, AC006962, Z95113, AC005332, | |
| | | | | | AC008372, AL031587, and AL035249. | |
| HPFCF24 | 664 | 655744 | 1-398 | 15-412 | | |
| HPFCF40 | 665 | 968600 | 1-339 | 15-353 | | |
| HPFCF83 | 666 | 781490 | 1-329 | 15-343 | AI749823, R99144, AA302658, AW161459, F24175, AI243793, AW161879, AI191343, | |
| | | | | | AA130647, AI679221, AI003797, AA936548, W45457, H24953, AC005057, U62293, U63721, | |
| | | | | | AC005829, AC005102, Z97630, AC005229, AL049830, AF111168, AL035658, AL132712, | |
| | | | | | Z97054, AP000116, AC006241, AC000159, AC002300, AC005747, AB023051, AC009946, | |
| | | | | | AC005323, AC006121, AL049692, AC003030, AC007536, AF047825, AL049757, AC004253, | |
| | | | | | AC004520, AL109952, AC004030, AL023882, AP000512, U91321, AL022313, AF196779, | |
| | | | | | AC020663, M55987, AC004893, Z75407, AF102137, AC003665, AC004033, AC002477, | |
| | | | | | AF207550, AC012331, AC007666, AF064861, AL049548, Z84480, AC002107, AL030996, | |
| | | | | | AL024507, AC006057, AC004841, AL078644, AC005480, AC002310, Z83838, AL022326, | |
| | | | | | AC005332, AF165926, AC006061, AC005529, U07561, AC008044, Z95114, X14448, | |
| | | | | | AC004522, AL050307, U63834, AC005846, AL035086, AL022322, AC007226, AP000065, | |
| | | | | | AC005755, AC005914, AC002115, AC005015, AC002073, AC005971, AL031311, AC002350, | |
| | | | | | AC004876, AL022163, Z93930, AC005920, AL031295, AC005527, AC016831, AC005105, | |
| | | | | | AC005081, AC004890, AC002351, AL049780, AC004560, AL020997, AC006449, AC006251, | |
| | | | | | AC008012, AL034379, AC007055, AF001549, AC004475, AL035405, AC003682, AC006512, | |
| | | | | | U80017, AC006480, AL035450, AC006285, AD000092, AL023803, AL080243, AD000671, | |
| | | | | | AC005409, AC005274, AF001550, AC004129, AC002492, Z98950, AC005632, AC007263, | |
| | | | | | U91326, AL034555, AC005839, AL031289, Z82203, AC002365, U91323, AL031659, | |
| | | | | | AF045555, Z84469, AL022336, AF148808, AC005722, AL049869, AC006948, AC003041, | |
| | | | | | AL022316, AC005184, AC007304, AC005874, AF134471, AP000502, AP000010, Z86090, | |
| | | | | | AC005182, AC005479, AL031685, AL031393, U78027, AL021368, AC007207, AC004815, | |
| | | | | | AC005363, AC002470, Z93017, AL021546, AP000553, Z99716, M63543, AC007917, Z95331, | |
| | | | | | AL121754, AC002395, AC004884, AC005625, AC004859, L78810, AC007021, L44140, | |
| | | | | | AC005399, AL021878, AL034553, AP000691, AL031230, AC006453, AC002316, AC004024, | |
| | | | | | AC006211, AP000547, AC006515, AL049569, AC002106, and AL031591. | |
| HPFCH15 | 667 | 655768 | 1-344 | 15-358 | | |
| HPFCH89 | 668 | 655538 | 1-226 | 15-240 | | |
| HPFCM41 | 669 | 655736 | 1-356 | 15-370 | | |
| HPFCM87 | 670 | 925495 | 1-305 | 15-319 | | |
| HPFCN08 | 671 | 960365 | 1-363 | 15-377 | AA651633. | |
| HPFCO02 | 672 | 867871 | 1-263 | 15-277 | W85782, AA703530, T99014, and C14044. | |
| HPFCO67 | 673 | 867880 | 1-293 | 15-307 | | |
| HPFCQ88 | 674 | 655749 | 1-387 | 15-401 | AI821958, AW150896, and AW205057. | |
| HPFCR21 | 675 | 655621 | 1-452 | 15-466 | | |
| HPFCR82 | 676 | 655533 | 1-389 | 15-403 | | |
| HPFCT09 | 677 | 655563 | 1-311 | 15-325 | | |
| HPFCT53 | 678 | 974257 | 1-634 | 15-648 | AI525556, AI546855, Z28355, AI526194, AI546999, AI525328, AI556967, AI525316, | |
| | | | | | AI541374, Z30131, AA585356, C16300, AI525306, AI541508, AA585101, AI541523, | |
| | | | | | AA585439, AI546945, AI546899, AI557799, AI541510, AI525431, AI557731, AI557082, | |
| | | | | | AI541013, AI546875, AI557807, AI546828, AI541534, AI540967, AI526180, AI541307, | |
| | | | | | AL134524, D61254, AI547039, AI541535, AI526140, AI541365, AI526184, AI536138, | |
| | | | | | AI557262, T11028, AI540920, AI535660, AI557238, R29445, AI525653, D57491, AI525321, | |
| | | | | | AI557796, AA585453, AI557787, AI547071, AI535813, AI526144, AL041197, AL040155, | |
| | | | | | AL041346, AA585476, AL041096, AL047012, AL041358, AL041277, AL041163, AL041098, | |
| | | | | | AL040621, AL043538, AL041324, AL040464, AL044162, AL041086, AL043496, AL041296, | |
| | | | | | AL041233, AI541415, AI541017, AI5415 14, AL045725, AL041140, T23985, AL040193, | |
| | | | | | AI541205, AL043612, R28735, AL040149, AL039915, AI535639, C16305, AA585440, | |
| | | | | | AL040463, AI546971, AI525320, AI557084, AL047219, AL041227, AL047057, AL047170, | |
| | | | | | AL040119, AL047036, C15189, AL041292, AL041051, AL047183, AL040322, AL041131, | |
| | | | | | AL046330, AL041133, AL041238, AL041142, AL045817, AL040529, AL040625, AL040510, | |
| | | | | | AL043467, AL044186, AL040553, AL044037, AL040091, AL040128, AL040168, AL040255, | |
| | | | | | AL040285, AL040342, AL040332, AL040617, AL045684, AL040745, AL040370, AL043677, | |
| | | | | | AL046442, AL041 159, AL041246, AL040839, AL041752, AL043775, AL044165, AL043492, | |
| | | | | | AL04 1602, AL043444, AL045920, AL038838, AL044074, AL04 1635, AL045990, AL040458, | |
| | | | | | AL044199, AL044187, AL040253, AL040263, AL040090, AL040294, AL040329, AL040082, | |
| | | | | | AL044272, AL041 186, AL040444, AL040148, AL041730, AL041523, AL043627, AL043537, | |
| | | | | | AL046392, AL041374, AL040052, AL041347, AL043845, AL044529, AL039338, AL042135, | |
| | | | | | AL044064, AL039316, AL043923, AL038983, AL043814, AL043848, AI526196, AL040576, | |
| | | | | | AL041459, R29177, AL043570, AL041577, AL044258, AL044201, AL046850, AL038532, | |
| | | | | | AL040768, AL037727, AL045753, AL038761, AL040075, AL046994, AI526187, AL040414, | |
| | | | | | AL040571, AL044274, AL046914, AL079878, AL049018, AI142134, AI557802, AL045857, | |
| | | | | | AL041278, AL039744, R29218, T41289, AL038822, D55233, AL080031, AL046327, | |
| | | | | | AL041168, AL045671, AL049069, AI557808, AL040472, AL041955, I18597, AL040238, | |
| | | | | | AA585155, AI541075, AI546891, AJ239433, AL045989, AL039360, AI546810, AI541317, | |
| | | | | | AL042096, AL079852, AL046147, AI540916, R45895, AI557727, AI541390, AI526073, | |
| | | | | | AI525856, AL044125, AA174170, AI541345, D61185, AI557734, AI547006, AI557740, | |
| | | | | | AL039643, AA585434, AI557279, Z32822, R28967, D57186, AI541517, AI525339, AR038762, | |
| | | | | | X81969, I13349, AR017907, A25909, A91965, AR062871, I66485, AR038855, I66487, A85395, | |
| | | | | | A85476, I18895, AR008429, AJ244004, AR037157, AJ244005, AC005913, AR062872, | |
| | | | | | AR062873, AJ244003, AF082186, U94592, A20702, A20700, A43189, A43188, AJ244007, | |
| | | | | | I63120, A98767, A93963, A93964, A98420, A98423, A98432, A98436, A98417, A98427, | |
| | | | | | I44681, X83865, A84772, D78345, A84776, A84773, A84775, A84774, Y16359, AR054109, | |
| | | | | | AR067731, I15717, I15718, Y09813, AR067732, A86792, A58522, A91750, I08396, M28262, | |
| | | | | | I08395, A60212, A60209, A60210, A60211, E03627, AI8053, I48927, I06859, I84553, I84554, | |
| | | | | | I00682, A02712, I49890, A77094, A77095, A81878, A35536, A35537, A11623, A11624, | |
| | | | | | E00609, A95051, A02135, A04663, A02136, A04664, AI8050, A23334, A75888, I70384, | |
| | | | | | A64973, A60111, A23633, E13740, AR007512, AI1178, E01007, AI0361, Z32836, I62368, | |
| | | | | | AI1245, A93016, AR043601, I03331, A02710, E12615, AR035193, AF149828, E14304, | |
| | | | | | A07700, AI3392, AI3393, AR031488, I13521, I52048, A27396, D50010, AR027100, I44531, | |
| | | | | | I28266, A90655, I21869, A92133, I44516, A70040, AR031566, E16678, A82653, E16636, | |
| | | | | | A95117, AR038066, A24783, A24782, A58524, I01995, A58523, I25027, I08051, I26929, | |
| | | | | | I44515, I26928, I26930, I26927, I60241, I60242, A20699, E00696, E00697, E03813, I66482, | |
| | | | | | AR009151, I66483, I66484, I66498, I66497, I66496, AR027099, I66486, AR051652, AR051651, | |
| | | | | | AF134471, A70872, AJ230935, I05558, AJ230902, A70869, AJ230972, I08389, I34294, | |
| | | | | | AC012099, D13509, AC007200, AC006057, AC002045, D13316, A22738, AC002037, | |
| | | | | | AC007707, AP000310, AP000116, AJ131757, AP000299, AP000045, AP000113, AL049570, | |
| | | | | | AC005944, AP000156, AL096803, AP000014, AL035461, AC003009, AL031664, AC005740, | |
| | | | | | AC007860, AC004830, AC005874, AB025273, AC005559, AC008039, Z84468, AL022156, | |
| | | | | | AC000394, AC004130, AP000252, AL109963, AP000030, AP000212, AP000134, AC005630, | |
| | | | | | X55503, U07807, AC004653, AL109956, AC000003, Z98272, AC005202, AC004079, | |
| | | | | | AC005476, Z95889, AL080250, AC005284, AC005777, AL023694, AL035457, AC009263, | |
| | | | | | AJ006216, AC008545, AC005480, AC004148, AC006966, AJ003081, AL035462, AC006208, | |
| | | | | | AF207550, AC007993, AC005509, AL050318, AC006011, AC007687, AC006312, X99832, | |
| | | | | | U72788, AL009183, AC008967, AL049633, U80017, AC003667, Z97055, AC005383, | |
| | | | | | AL049697, and AC006480. | |
| HPFCT62 | 679 | 655432 | 1-310 | 15-324 | AA487150, AA486829, AA347969, AA622801, AI078409, AA602906, AA084609, AL078621, | |
| | | | | | Z96201, AC005484, AF064861, AC004862, AL021393, AP000501, Z97056, AC005244, | |
| | | | | | AL049569, AC005225, AC005318, AC007371, AC002477, AL035443, AF111168, AC004821, | |
| | | | | | AC005104, AL133448, AC006388, AC005839, AL035249, AL022336, AF196969, AC004448, | |
| | | | | | AC009247, AC005562, AC005058, AL079305, Z98051, AL132985, AC005261, AC005089, | |
| | | | | | AC002350, AP000116, AC003102, AC005071, AL050318, AC004525, AC005332, AC006449, | |
| | | | | | AF001550, AC005409, AC004967, AC006312, AC005924, AP001052, AC005519, AC005920, | |
| | | | | | AC010205, Z83838, AC004685, AC005231, AC004814, AC004878, AC005081, AL049776, | |
| | | | | | AC004983, AF130248, AC006946, AL034429, Z86090, AL031984, AC004851, AL109627, | |
| | | | | | AC003663, AL031286, AL049636, AB023049, AL008720, AC004584, AL109798, AC005880, | |
| | | | | | AC002527, AP000553, AL033527, AC004253, AL034420, AC006441, AC000353, AC002303, | |
| | | | | | AC004678, AL008726, AP000692, AL133246, AC004905, AC005015, AC005037, AC002551, | |
| | | | | | AC005088, AL049780, AC002094, AL031587, AL031282, AC004531, AC004655, AL035691, | |
| | | | | | AL024498, AL035458, AC006965, Z95152, AL022238, AP000689, AC004811, AL049539, | |
| | | | | | AC005479, AF001549, and AC002400. | |
| HPFCV19 | 680 | 655706 | 1-302 | 15-316 | AI279012. | |
| HPFCV71 | 681 | 525554 | 1-536 | 15-550 | R31337, AW028647, and AF178081, | |
| HPFCX18 | 682 | 655588 | 1-325 | 15-339 | | |
| HPFDD06 | 683 | 960700 | 1-291 | 15-305 | AI557495, and AI557116. | |
| HPFDE38 | 684 | 655704 | 1-343 | 15-357 | AI417952. | |
| HPFDB61 | 685 | 974249 | 1-681 | 15-695 | | |
| HPFDF79 | 686 | 973732 | 1-576 | 15-590 | | |
| HPFDG58 | 687 | 655610 | 1-310 | 15-324 | | |
| HPFDI23 | 688 | 655549 | 1-355 | 15-369 | | |
| HPFDL90 | 689 | 954333 | 1-193 | 15-207 | U73330. | |
| HPFDS59 | 690 | 655543 | 1-267 | 15-281 | AC004111. | |
| HPFDT17 | 691 | 581133 | 1-359 | 15-373 | | |
| HPFDT54 | 692 | 655530 | 1-310 | 15-324 | AA593648. | |
| HPFDT61 | 693 | 974569 | 1-345 | 15-359 | | |
| HPFDU30 | 694 | 522113 | 1-357 | 15-371 | AL079301, and AC004530. | |
| HPFDU38 | 695 | 867879 | 1-365 | 15-379 | | |
| HPFDU59 | 696 | 739617 | 1-357 | 15-371 | AC005225, AL049835, and AL031297. | |
| HPFDV71 | 697 | 867870 | 1-680 | 15-694 | AW303098, AI061313, AI251203, AI251284, AI250552, AL046519, AI284543, T74524, | |
| | | | | | AI223626, H07953, AI206841, AI254770, AI189682, AW023111, AI826761, AI357823, | |
| | | | | | AI251034, AI249853, AA572813, AI375542, AI755202, AI066646, AW410409, AA129746, | |
| | | | | | AI732430, AA757661, AW276678, AI679759, AW149288, AI635819, AI355007, AW439703, | |
| | | | | | AI491765, AI753113, AW237905, AI149537, AA702637, AI864500, AI334443, AW192179, | |
| | | | | | AL038936, AA904211, AI587583, AA614214, AI247101, AL031730, AC002316, AL031311, | |
| | | | | | AL022328, AC007055, AL022326, AC006965, AL109865, AF109907, AC005081, AL034343, | |
| | | | | | AC005592, AL133485, AL049538, AL022238, AC005355, AC005011, AC007358, AC005291, | |
| | | | | | AL049540, AC008123, AP000688, AC004491, AL080243, AC008372, AL133445, AC003043, | |
| | | | | | AC004685, AC005874, AF134471, AP000501, AF111167, Z83844, AC004675, AL049780, | |
| | | | | | AF088219, AC006552, AJ011930, AC007277, AC005330, AC007243, AC006046, AC004686, | |
| | | | | | AC005363, AC005209, AC005231, AC005746, Z97056, AL135960, AJ131016, AC004883, | |
| | | | | | AC005619, AC005189, AC002430, AP000511, AL032821, AC006213, AF134726, AC007384, | |
| | | | | | AC006130, U91326, AC002544, AC004084, AC004067, AL121603, AC005519, AC005899, | |
| | | | | | AC004821, AF031078, AC008064, AJ010770, AC002369, AF030876, AC009731, AC005844, | |
| | | | | | AC009510, AL031228, AC005406, AL079352, AC005884, AL022721, AL022476, AL049795, | |
| | | | | | AC004879, AC005821, AL049760, AC005234, AC004593, AC007129, AC016830, AP000031, | |
| | | | | | AL023284, X55927, AC006960, AC006203, AC005911, AF001548, AC010202, AC005368, | |
| | | | | | U07563, AC004542, AL096701, AC006241, Z98750, AC005015, AC004656, AF015416, | |
| | | | | | AF001549, Z82171, AC002350, AP000134, AP000212, AP000030, U91325, AC007385, | |
| | | | | | D84401, AC002404, AC007637, AC006511, AC006480, AL031803, AC005606, AC002347, | |
| | | | | | AC000115, AC005829, AF031076, AL031281, AF053356, AC004051, AL096791, AC005072, | |
| | | | | | AL049758, AL133353, AC005565, AC016027, AC003101, AC005531, AC004990, AF001552, | |
| | | | | | AL121652, AC004517, AL117351, AC007011, AC004033, U95742, AC003109, Z70280, | |
| | | | | | Z83845, AC004147, AC007216, AC004805, AC006079, Z84470, AC005747, AC005225, | |
| | | | | | AB023048, AC005099, AC005500, AC004526, AC005701, D87675, AC004841, AC005722, | |
| | | | | | AF111168, AC007041, AC004963, AC004385, AC004131, Z98200, AL031659, AL121653, | |
| | | | | | AL050318, AC006538, AL078581, AC007731, AC007253, AL008582, AB011399, AL022323, | |
| | | | | | Z98949, AC004129, Z97054, AL117344, AP000151, AL022165, AC004893, AC007684, | |
| | | | | | AC005050, AC000052, AC006946, AC006139, U78027, AL049557, AC005409, AL021026, | |
| | | | | | AC006121, AC005726, AC005512, AC004230, AL133448, AC007406, AC005696, AP001052, | |
| | | | | | AC005154, AF196779, AC007225, AL049712, AF165926, AC004222, Z84480, AP000010, | |
| | | | | | AB016897, AC005921, AC002300, AL034374, AC004125, AC009247, AL021808, AL008723, | |
| | | | | | AC006211, AC003026, Y18000, AL009181, AL031584, Z69905, AP000359, AC004976, | |
| | | | | | U18394, AC004770, and AP000962. | |
| HPFDX13 | 698 | 655571 | 1-641 | 15-655 | W67821, AI934358, AW183528, N55430, AW008575, W67636, AA825800, and N55148. | |
| HPFDZ20 | 699 | 655764 | 1-328 | 15-342 | | |
| HPFEA08 | 700 | 960372 | 1-386 | 15-400 | Z82203. | |
| HPFEA32 | 701 | 925499 | 1-295 | 15-309 | | |
| HPFMA06 | 702 | 953536 | 1-213 | 15-227 | AJ559365, N40914, AI275689, AJ769835, AI935795, AW016872, AA528426, N90231, | |
| | | | | | AI041472, AI074180, AI151237, N40445, AI016719, AI352160, AA828194, H09741, AI982675, | |
| | | | | | AI628382, AI912707, AA918026, N35976, AA460976, AI742265, AA151707, AI191783, | |
| | | | | | AA165615, W74067, AI167928, AA937011, AA724886, R01930, AI863504, AI346991, | |
| | | | | | AI309905, AA992772, AA946858, AI521733, AA055546, AA829079, AI867798, AI636334, | |
| | | | | | AI636278, AA101634, AA992190, AI573041, AA044901, AA128910, N94816, AA708943, | |
| | | | | | AA609789, AA041398, AI056570, AI539174, AI571014, AI318378, AA443890, AI609286, | |
| | | | | | AW235575, AJ768743, AA903691, AW028229, AA773169, AI337984, AW273159, AI571376, | |
| | | | | | N33273, AI498347, AW103657, AI824744, H97981, AI433353, AI250273, AI189253, W74059, | |
| | | | | | AI277240, AI200413, AA024491, AW262540, AI767595, AI269009, AI805098, N69196, | |
| | | | | | AI768580, AI689518, AA570675, AA374175, W37740, AA594795, AW088741, AW197140, | |
| | | | | | AA165407, AA165437, AA604629, AI744021, AA780710, AA581888, AA722100, N66617, | |
| | | | | | N30750, N25542, N26634, D61746, AI364247, AI363458, AI719503, Z39345, AA165599, | |
| | | | | | H89567, F04672, AI708771, N91853, AI654339, AI719808, F10645, N71113, AA044690, | |
| | | | | | AI695775, D51138, H89566, AI828511, AI423935, D19831, AI364605, R38667, AA461285, | |
| | | | | | D51197, AI913698, T62947, D62512, AA063398, AI766125, T31394, AL133241, AL009179, | |
| | | | | | and AC008126. | |
| HPFML02 | 703 | 917775 | 1-102 | 15-116 | AI535639, Z33559, Z32887, T18597, AI541356, C14228, D59751, AI557864, D50992, | |
| | | | | | AI526078, AI557084, AI541205, AI536138, AA492147, AI535660, AI557262, AI540903, | |
| | | | | | AI557082, AI557474, AI525302, AI525500, AI525556, AI557533, AA058620, AI557317, | |
| | | | | | AI525316, AI557809, AI541075, AI557155, H65400, AI541321, AI541365, AI525757, | |
| | | | | | AI557312, AI557602, AI557731, AI525852, AI525661, AI541353, AI541034, R29657, | |
| | | | | | AI525856, AI557258, N71206, AI536150, AI557810, AI541450, AI541346, AI557238, | |
| | | | | | AI540974, AI546829, D30843, AI535828, AI557543, AI535813, AI536070, AI535994, | |
| | | | | | AI557039, AI541154, AI547177, AI557041, AI557408, AI541027, AI541048, AI557154, | |
| | | | | | U45328, AR050070, A62300, A62298, A82595, A82593, U94592, Z30183, AF006072, and | |
| | | | | | AR025466. | |
| HPIAE79 | 704 | 655748 | 1-382 | 15-396 | | |
| HPIAO83 | 705 | 655595 | 1-413 | 15-427 | | |
| HPIAQ49 | 706 | 919469 | 1-424 | 15-438 | | |
| HPIAQ76 | 707 | 655573 | 1-47 | 15-61 | | |
| HPIA540 | 708 | 928614 | 1-450 | 15-464 | AA195825, AA306492, AA418582, C16647, AW160459, AA309024, AA308183, AI571333, | |
| | | | | | AA738174, AA195976, AI570688, AA612815, AA995713, AA418567, AI376546, AA977055, | |
| | | | | | AW162470, AA575997, AA083678, AA100585, R35954, AA643289, AI566298, AI094772, | |
| | | | | | F00910, AI282111, AA492519, AI564065, AA676682, AA622171, AA378734, R35925, | |
| | | | | | AA884373, AI138493, AA156573, AA111863, AI305825, AA553893, AI557187, AA618507, | |
| | | | | | AA469352, AA159175, AI266155, AA469274, N74960, AA412547, W05658, N39508, | |
| | | | | | AA658912, AA083301, AA328913, F26029, AF088991, AF044954, AF067169, AC005363, | |
| | | | | | AC005606, X63224, AF088992, and AF088993. | |
| HPIAV80 | 709 | 615007 | 1-211 | 15-225 | | |
| HPIAX11 | 710 | 925424 | 1-596 | 15-610 | AA312500, AA354863, AA319616, T69203, AA491370, H16422, AW403746, and AL031427. | |
| HPIAZ37 | 711 | 655753 | 1-300 | 15-314 | | |
| HPIBQ37 | 712 | 884289 | 1-411 | 15-425 | AA101561, W76302, C17760, AA227408, AA215609, AA101519, AA626769, AA359412, | |
| | | | | | T73746, AI927392, AF111713, A91701, A91699, AF207907, AF172398, AF154005, and | |
| | | | | | AB017568. | |
| HPIBR51 | 713 | 725539 | 1-454 | 15-468 | | |
| HPIBT49 | 714 | 655719 | 1-426 | 15-440 | | |
| HPIBY65 | 715 | 655757 | 1-421 | 15-435 | | |
| HPICC89 | 716 | 786117 | 1-400 | 15-414 | R43644, AA953944, and AL035454. | |
| HPJAB19 | 717 | 655540 | 1-191 | 15-205 | AA741301, AA331014, AA461592, AI300413, AI342786, H42893, AI302277, AW407007, | |
| | | | | | AI018726, AW157173, AW162314, AW162332, AW168699, R71796, AA657910, AI818313, | |
| | | | | | AA429481, AA633068, AW082076, AL041733, AI471455, AI687343, AI473671, AI963816, | |
| | | | | | H86579, AA225239, H30595, H30568, AA018923, AA012829, AI290145, AI459866, | |
| | | | | | AA643451, AL037006, F35902, AI679759, AW392414, AA084595, AI474085, AI476386, | |
| | | | | | AI925462, AI440243, AA092862, W45457, AI951112, AI620045, AI183426, AA225630, | |
| | | | | | AI167360, H99222, N21300, AA992562, AW190925, AI936229, AW080772, AA829669, | |
| | | | | | AI376239, AI017733, AL039117, AA381880, AW105346, AA112864, C14599, F26285, | |
| | | | | | AA587536, H27788, AA904211, AA827383, AW019964, AW262466, AI799260, AI860535, | |
| | | | | | AA460880, AA643441, AI962050, AI917271, AA604149, AI358557, AI032411, AI131261, | |
| | | | | | AW162303, AA362440, AW162047, AW247089, AA132929, AI341664, AW161786, | |
| | | | | | AA339789, AA339592, AA507990, X84712, AI902426, AA025083, AI873916, AI955029, | |
| | | | | | H74309, AA578590, M85711, AI620266, AA608635, AI357628, AI345256, AI066646, | |
| | | | | | AI049680, AI471476, AA019043, AI475164, H94979, AA829693, AW130427, AI755202, | |
| | | | | | AI523813, AI311796, AA828154, AI267356, C14880, AA665123, AI065031, AL096791, | |
| | | | | | AL034548, AL032821, AB014079, AC004991, AC007263, AL031732, AL109827, AL034549, | |
| | | | | | AC004542, AP000352, AP000514, AC006139, AC008132, AC006991, AC007320, AC002088, | |
| | | | | | AC004743, AC007637, AC006487, AC005971, AC004167, AF124523, AP000552, AL121754, | |
| | | | | | U95740, U91323, AL050350, AL021706, AC004051, AC006160, AP000133, AP000211, | |
| | | | | | AL021391, AD000813, AL049761, AC007993, AL133445, AC003693, AL049766, AB011399, | |
| | | | | | AC005227, Z93784, AC006430, AC004526, AC002465, AL035072, AP000023, AC004918, | |
| | | | | | AC000097, AC007664, AC006547, AB016897, AC000118, AC006084, AL024509, AP000248, | |
| | | | | | AC004466, AC006322, U89335, AC010170, AL031587, AC005293, AC005208, AJ006345, | |
| | | | | | AC006515, AC004805, AC003682, AC005291, AC005104, AC006251, AC004100, AF109907, | |
| | | | | | AC005018, AL035588, Z97876, AP000550, AC004882, AC005949, AC005553, AC008018, | |
| | | | | | AC005375, AC004478, AL031728, AC006947, AL022343, AC003002, AP000567, AL049839, | |
| | | | | | AF178030, AF064858, AC006006, AL035423, AF205588, AC006236, AC007528, AL008718, | |
| | | | | | AC004076, AC005225, AC004876, AC004874, AC005529, AC001231, AJ010770, AL139165, | |
| | | | | | AC007312, AC005516, AP000143, AC007401, AC000083, AL049713, AC007676, AL034379, | |
| | | | | | AP000090, AL031283, AC005899, AL132708, AP000210, AP000132, AF001549, AC011718, | |
| | | | | | AC005046, AB020867, AL034423, AL080250, AC005011, AC010072, AC005664, AL049830, | |
| | | | | | AC007773, AL121653, AC009288, Z83822, Z84487, AC005598, AL035249, K03021, | |
| | | | | | AC005184, AC008000, AC006432, AC004765, AL021707, AC006441, AC004695, AL096774, | |
| | | | | | D87675, AC004013, AC005183, AP000563, AL078638, AC005007, AF049895, AC003972, | |
| | | | | | AC000353, AC002347, AL035461, AC004671, U73630, AC002115, AC006064, AL022318, | |
| | | | | | AC004797, AC008009, AC005755, AC005589, AL049548, U07000, AF196971, AC006948, | |
| | | | | | AF069291, AL031803, AC005390, AC005952, AC006254, AC004985, AC005920, AL121748, | |
| | | | | | AL022396, AC005332, AC005049, AP000256, AP000566, AP000098, AC004686, Z85996, | |
| | | | | | AC007436, AC006581, AL049828, Z73496, AP000052, AP000018, AP000160, AC004605, | |
| | | | | | AC007731, AC007955, AC007385, AC005500, AC005192, Z83846, AC005041, AC004838, | |
| | | | | | AC005480, AC003010, AC004962, AL049832, AL121838, AP000556, AC005027, AC004864, | |
| | | | | | AC004539, AC005565, Z94801, AL049569, AC006538, AC006210, AC003106, AL035415, and | |
| | | | | | AC000120. | |
| HPJAB84 | 718 | 655531 | 1-314 | 15-328 | | |
| HPJAC36 | 719 | 655601 | 1-401 | 15-415 | AI167181. | |
| HPJAC92 | 720 | 867831 | 1-338 | 15-352 | | |
| HPJAD09 | 721 | 655712 | 1-329 | 15-343 | AL080239. | |
| HPJAD66 | 722 | 655694 | 1-276 | 15-290 | Z83851. | |
| HPJAD82 | 723 | 655765 | 1-237 | 15-251 | AI979243, and AI967993. | |
| HPJAV07 | 724 | 952852 | 1-321 | 15-335 | | |
| HPJAW56 | 725 | 823393 | 1-757 | 15-771 | T93943, T93893, AA399372, and T81024. | |
| HPJBI17 | 726 | 655761 | 1-417 | 15-431 | | |
| HPJBI89 | 727 | 655708 | 1-69 | 15-83 | AC006071. | |
| HPJBK52 | 728 | 655751 | 1-249 | 15-263 | AW275406, and AC000378. | |
| HPJBU08 | 729 | 958979 | 1-351 | 15-365 | | |
| HPJBV17 | 730 | 655729 | 1-286 | 15-300 | | |
| HPJCC04 | 731 | 926787 | 1-357 | 15-371 | AF108195, AF159714, AF186379, AF106698, AB025784, and AF049330. | |
| HPJCP10 | 732 | 964259 | 1-421 | 15-435 | | |
| HPJCP11 | 733 | 966676 | 1-325 | 15-339 | T08031, and AB011095. | |
| HPJC584 | 734 | 590404 | 1-333 | 15-347 | AP000494. | |
| HPJCV50 | 735 | 968095 | 1-535 | 15-549 | AC005923. | |
| HPJCX15 | 736 | 655730 | 1-320 | 15-334 | | |
| HPJCX26 | 737 | 655600 | 1-337 | 15-351 | | |
| HPJCY70 | 738 | 655569 | 1-218 | 15-232 | | |
| HPJCZ03 | 739 | 922850 | 1-171 | 15-185 | | |
| HPJCZ06 | 740 | 934170 | 1-278 | 15-292 | AI133297, AW163293, AW303196, AA191659, AW080777, AW084466, AI499588, AA279421, | |
| | | | | | AA548890, AA431949, AA486131, AW301350, AA457070, H71429, AI040342, AW275510, | |
| | | | | | H52274, AL133909, H82316, AI250083, AA661921, AW102846, AL042420, AI953275, | |
| | | | | | AA476397, AI766906, M77893, AA630672, AI205010, AI284640, AL038498, C18550, | |
| | | | | | AA320966, AA579179, AI393931, AA114983, AA774780, AL119713, AI002720, AW274349, | |
| | | | | | AA508359, AI818231, AI271164, AA838190, AI806102, AA577824, AA385798, AI708009, | |
| | | | | | AA578327, AI889566, AA832188, AI499301, AI801482, AI298061, T92347, AW103927, | |
| | | | | | AA984295, AA558884, AA055871, AI733755, AA584876, AA504877, AA127426, AA669155, | |
| | | | | | H09071, AI805363, AI203925, N23504, AA101689, AW104793, AI168167, AI694130, | |
| | | | | | AA572971, AI950983, AI056913, AI345157, AI924872, AW316873, AL046689, AA653857, | |
| | | | | | AA323701, AA772851, AA526787, AA778992, R64559, R95448, AA490183, H49568, | |
| | | | | | AW022897, AA402129, AA493695, AA834707, AA738253, AA719073, T99179, AL035209, | |
| | | | | | AL035450, AC000119, AC002529, AL133371, AC002310, AC007446, AC007845, AC002127, | |
| | | | | | AJ003147, AC007652, AL031053, AC005215, AC003100, AC004638, AC006314, AL033523, | |
| | | | | | AC002416, AC006466, AC006112, AC006312, AC005998, AC004745, U57009, AL049773, | |
| | | | | | AL049733, AC006989, AC012599, AL035608, X53548, AC004161, X54175, D83989, | |
| | | | | | AC005258, AC005072, AC006478, Z98750, AC006539, AL1 21653, AC004895, AL023799, | |
| | | | | | AC005026, AC0072 14, AC002350, AC007437, AC006238, AL022 163, Z82 170, AC002300, | |
| | | | | | AC006045, X76666, AC003965, AC004030, AC004940, Z83733, AL024506, AP000967, | |
| | | | | | AL049565, AC006963, AC002527, AL049749, AL032822, AP000204, AP0G0 126, AC00591 1, | |
| | | | | | AL080241, AL021155, AL034395, AC005162, AL031630, AF227510, AC005048, AC004675, | |
| | | | | | Z82214, AC007228, AC003977, AC004592, Z95 113, AC004047, U623 17, AC002430, | |
| | | | | | AL121603, AC007193, AC006058, AP000244, AC006195, AF042090, AC018767, AC007384, | |
| | | | | | AC007406, AF123462, AF088219, AL031054, AC007298, AC002385, U66059, AC008372, | |
| | | | | | AC007564, AC006071, AC005839, AL035633, AL049649, AL022170, AL050326, AC007848, | |
| | | | | | AL022166, AC004594, AP000950, AC007360, AC000066, AP000081, Z99497, AC007043, | |
| | | | | | AC007243, AJ010770, AC005066, AC002559, Y09781, AL023879, AC004028, AC003683, | |
| | | | | | AC004525, Z84487, AC005154, AC006374, AC007436, AC005774, AC011362, AP000962, | |
| | | | | | AC005725, AF012654, X55926, AC005011, Z73417, AC004224, AC004756, Z99569, Z82193, | |
| | | | | | AC004987, AC004865, AL035455, AL021918, AC007387, AL096701, AL022721, AC006369, | |
| | | | | | AF001549, M22900, AC002115, AC006479, AC007955, AP000348, AL121934, AL035462, | |
| | | | | | AP000563, AP000275, AC002466, AC005480, AP000037, AP000105, AP000211, AP000133, | |
| | | | | | AP000201, AL049550, Z98753, AL031259, AP000097, AL033377, AC007023, AL022316, | |
| | | | | | AC005940, AC004098, AL023284, AP000240, AL049781, AC006239, AC006211, AL078634, | |
| | | | | | Z69838, AC004262, AC005233, AL096776, AC005301, AC007064, AC005534, AC010202, | |
| | | | | | AL008718, AC007682, AL034384, AC005412, K00063, U67233, AC007510, X78081, | |
| | | | | | AC006005, AC005200, AC005213, AC005226, AJ239322, AC005138, AL049557, Z84483, | |
| | | | | | U95742, AC007041, AJ133269, AC006213, AL049853, AC007263, Z69922, AC005032, | |
| | | | | | AL031721, AC005952, AC005490, AC004210, AL021977, AL031186, AF002994, AL021546, | |
| | | | | | AF009660, U69730, AC004948, AC005363, Z98051, AC004502, Y07848, AC005606, | |
| | | | | | AL008728, AF003626, AC006974, AC005250, AL096770, AP000508, AP000020, AP000161, | |
| | | | | | AL008731, AL034374, AP000359, AC006004, AC004548, AC004132, AL031774, and | |
| | | | | | AC005091. | |
| HPJDA08 | 741 | 958182 | 1-1026 | 15-1040 | AJ003623, and AB033053. | |
| HPJDJ58 | 742 | 906904 | 1-557 | 15-571 | | |
| HPJDP05 | 743 | 931027 | 1-607 | 15-621 | | |
| HPJDX94 | 744 | 838748 | 1-237 | 15-251 | | |
| HPJEE38 | 745 | 954970 | 1-778 | 15-792 | AI371073, AI219866, AA994007, AI624792, AA455079, AA731668, and AI357531. | |
| HPJEI55 | 746 | 926815 | 1-218 | 15-232 | | |
| HPJEJ39 | 747 | 930988 | 1-534 | 15-548 | AL121576. | |
| HPJEQ04 | 748 | 927618 | 1-353 | 15-367 | N31776, D81937, AA308517, W24026, AA188787, T85662, AA486505, AA296183, AA371449, | |
| | | | | | AA480085, H68032, AI905771, N24360, AI557456, AA378402, N44103, AJ230778, N36604, | |
| | | | | | R06524, AA315510, R96861, AW405225, AA377571, AW405277, AA331149, AA317807, | |
| | | | | | T81882, AA113774, AA491834, N55922, AA114293, AA312037, H15644, AA349981, | |
| | | | | | AA350397, R12355, AI815626, AA315400, AW405355, N87264, AI929151, AW160663 | |
| | | | | | AA378061, AW163412, T80452, AA314941, AA314112, AI929706, AW411183, AW406481, | |
| | | | | | H78627, R35762, AA357940, AI929710, N56557, AA358387, C03712, AA339645, AA135815, | |
| | | | | | AA211277, AA306543, T82235, H73536, AI133457, W46178, AA481926, W95766, R25753, | |
| | | | | | AA135170, AA095966, AI278664, AA069646, AA046483, AA333829, AA383525, AA089954, | |
| | | | | | AA188820, AA196885, W46472, AA091086, AW405268, T94167, H73790, AW406536, | |
| | | | | | W44612, R32549, AA206938, AW405651, R32535, N99534, AA094637, AW406320, T77143, | |
| | | | | | AW406699, N80654, H66547, H38190, W47474, H89815, AI174721, AA360029, AW406684, | |
| | | | | | AI110648, N79200, AW406674, W60906, AW405310, AA338579, W25182, C02931, | |
| | | | | | AA331216, AI336620, R37281, H15645, AA961815, AI651492, AA385664, AA091960, | |
| | | | | | T76978, H80216, AA039312, R39058, AA857214, and AA350396. | |
| HPJEQ22 | 749 | 867725 | 1-629 | 15-643 | | |
| HPJET90 | 750 | 836503 | 1-542 | 15-556 | T03269, D58283, D80022, D80195, D80193, D59927, D51423, D59619, D80210, D51799, | |
| | | | | | D80391, D80240, D81030, D80253, D80227, D80196, D80188, D59275, D80219, D80366, | |
| | | | | | D80043, D80038, D59859, D80166, D80212, AI905856, D80269, D50995, D59889, C14429, | |
| | | | | | D50979, D80134, D80378, D80024, D80045, C75259, AW178893, C14014, D59502, D57483, | |
| | | | | | D59787, D59610, D51097, D80164, D80241, F13647, D80268, C14331, D51060, AW177440, | |
| | | | | | D58253, C15076, D59467, D80949, D80168, C14227, AA305409, AW378532, AW178775, | |
| | | | | | AW179328, C14389, AW352117, AW352158, AW177501, AW177511, D51079, AW178762, | |
| | | | | | D51022, AW366296, AW360811, AW176467, AW375405, AA305578, AW377671, D59695, | |
| | | | | | AW179220, AW360844, AW360817, D81026, AW375406, D80248, AW378534, AW179332, | |
| | | | | | AW377672, AW179023, AW178905, AA514188, D52291, D80251, D80132, AW352170, | |
| | | | | | AW352171, D80522, AW377676, AW177731, AW178907, AW179019, AW179024, AA514186, | |
| | | | | | D80133, AW178906, AW177505, AW179020, AW178909, AW177456, AW179329, | |
| | | | | | AW178980, AW177733, AW378528, AW178908, AW178754, AW179018, AW179004, | |
| | | | | | AW178914, AW178911, AW367967, AA033512, AW352174, D80302, AW178774, AW177723, | |
| | | | | | D80439, D80247, T48593, AW178983, D51103, AI535850, AW367950, C14975, AW178986, | |
| | | | | | D45260, A67220, A62300, A62298, D34614, D26022, X67155, A25909, A84916, D89785, | |
| | | | | | A78862, AR025207, D88547, AJ132110, AB012117, Y17188, A85396, AR066482, X82626, | |
| | | | | | A85477, A86792, X93549, I19525, A44171, AR018138, X68127, AF135125, U87250, | |
| | | | | | AF058696, AR008278, Y12724, AB028859, AR064240, A94995, D88507, AR008443, | |
| | | | | | AB033111, I18367, I50126, I50132, I50128, I50133, AR066488, A82595, AR066490, | |
| | | | | | AR016514, D50010, D13509, AR060138, A45456, A26615, AR052274, Y09669, AR060385, | |
| | | | | | AB002449, AR066487, A43192, Z32749, A43190, AR038669, A30438, AR008408, U87247, | |
| | | | | | U79457, AB023656, AR060133, X93535, and AR008382. | |
| HPJEV06 | 751 | 934096 | 1-504 | 15-518 | | |
| HPLAN47 | 752 | 717680 | 1-488 | 15-502 | R77414, R76671, R69252, R76677, R32705, R68709, R62204, H68658, R66563, R69804, | |
| | | | | | H79604, R79061, R28309, H78098, R80677, H13421, H12467, R28193, R26740, R63675, | |
| | | | | | R79115, R28382, R26685, R71045, R80483, AI147439, AA367784, R67876, R75656, R62719, | |
| | | | | | N45236, AI685384, AW074013, AI744897, AI682985, AI830819, AI051767, AW298380 | |
| | | | | | AA429290, AI672705, R79114, H28769, AI961748, AI719461, AA411112, AA292246, | |
| | | | | | AA411111, AA565430, R32518, H03930, AA428704, AA235525, AI244500, AA367885, | |
| | | | | | AW081078, R94826, AW135966, R69938, H13465, H78097, R24254, AI962580, AI656685, | |
| | | | | | R63981, T95910, R76350, R23579, AI765947, R81427, R22392, AA236697, AI096455, T24700, | |
| | | | | | AA430655, R28308, AA564171, R23234, AA811964, AA177137, AA483918, H68983, H00975, | |
| | | | | | R32651, H12520, R28594, AA806843, AA292545, R25221, AA744128, AA640543, AA427477, | |
| | | | | | H79603, AA320868, R77413, AA377663, AA525377, H90432, H03929, R69134, H70222, | |
| | | | | | R26973, AA329358, T35477, T31730, T34672, D81451, T19025, AA143133, AA902113, | |
| | | | | | H08404, H08284, R52419, AA902115, R35278, R59021, R36040, Z43118, AF085838, | |
| | | | | | AC005281, AP000884, D28589, AC007114, and AL110197. | |
| HPLAR41 | 753 | 557554 | 1-278 | 15-292 | AA367867, AA367898, D58066, AA385928, AA610791, AI803229, AI004961, AA298314, | |
| | | | | | AW157413, AI291353, F35348, AL041411, AA663300, AA132536, AI990650, AW139132, | |
| | | | | | N94967, AI290861, AI961193, AA584498, AA657353, AA081993, H96719, AI025602, | |
| | | | | | AA501873, C17730, AA911409, H04879, AA055654, AI250812, AI921101, AI925647, | |
| | | | | | AI559442, AI955464, AA508451, AA946637, AI632138, AW102963, AI568919, AA659014, | |
| | | | | | AI872191, AA862481, AI869945, AI871616, AI538654, AI902795, W45291, W58428, | |
| | | | | | AA166854, AA629837, AA460715, AA092309, AA287329, AI952804, AA176355, AA130476, | |
| | | | | | AI817158, AA767353, AI285660, F16040, AA932087, AI246569, AW262471, N77920, | |
| | | | | | AI862212, AA811111, AI819528, AA864823, AJ601265, AI858607, R33901, AI524900, | |
| | | | | | AA771730, AA771711, AI336355, F33397, AA347740, AI421777, N79992, AI499286, | |
| | | | | | AI440018, AW272376, AI453790, N31608, N33132, N20064, AI375417, AI540098, N30146, | |
| | | | | | AI310239, AA364962, AI591332, AA132716, AI628308, N90055, W19865, AA830701, | |
| | | | | | AA129986, AL044349, AI271865, AI457328, AI027421, AA807609, AW085676, AI376984, | |
| | | | | | AL038713, AL119517, AA136576, AI095849, AI082077, N24958, AA961590, H06476, | |
| | | | | | AA779937, AI028382, AA309496, AA091111, AI827493, H01157, AW419031, AA492106, | |
| | | | | | AI088245, AW272291, T48029, AW072619, AA136630, AA099788, AI733728, AL034400, | |
| | | | | | AF030186, AC005350, AL031294, AB020871, AC005852, AC005688, AC006363, Z95328, | |
| | | | | | AC004910, AC002448, AL022151, AF064862, AC004081, AL137191, AC007262, AC004384, | |
| | | | | | AL133233, AL049871, AC006559, AL136504, AP000079, AC006989, AC002524, AC007444, | |
| | | | | | AF002997, AC001604, AC001157, AC005579, AL023582, AC008165, AC006525, AL021307, | |
| | | | | | U60822, AC003083, Z96811, AC010196, AC000114, AC005988, AL096699, AL035089, | |
| | | | | | Z83313, AL096706, AC007736, AL023806, AC003073, Z69721, AC005603, AP000265, | |
| | | | | | Z73497, AC000021, AC005604, AL035666, AC005487, AL079334, AC002071, AC006981, | |
| | | | | | AL022308, AC004452, AF164343, AC006963, AL049562, AC005994, AC004924, AC007286, | |
| | | | | | AL022100, AC002564, AL078601, AL035608, AL096799, AP000078, AP000019, AP000161, | |
| | | | | | AP000126, AP000204, AP000034, AP000101, AC004048, AL031780, AC008174, Z82212, | |
| | | | | | AC004519, AL023798, AC000403, AL049792, AL049611, AC003086, AL031446, AC004054, | |
| | | | | | AC004614, AC002551, AL109620, AL030998, AC005884, AF196972, AC003085, Z83822, | |
| | | | | | AL049734, AC005856, AF165138, AC004944, AC004047, AC004837, AC006355, AL021919, | |
| | | | | | AC004648, AC007628, AC006054, AC004960, AC005993, AC018833, AC003668, AL022577, | |
| | | | | | AC006500, AC003081, AP000244, AC004970, AC005668, Z93019, AC006332, AC004911, | |
| | | | | | AC004626, AC010722, AL035251, AC005249, AC006050, AC006382, AC004065, AC007876, | |
| | | | | | AC006230, AC005552, AC009514, AC006370, AC007486, AF123462, L29074, AL117340, | |
| | | | | | AL049835, AC005019, AL079305, AC005832, AC007207, AL132985, AL139165, AL034384, | |
| | | | | | AC004388, AF130343, Z95325, AC006222, AC007023, AL049588, AC002412, U95743, | |
| | | | | | AC010072, AL033525, AP000542, AC007785, Z81145, AF008243, Z75896, AC001642, | |
| | | | | | AC000368, U69569, Z73361, AC004523, AC004201, AC005584, U69729, AC005689, | |
| | | | | | AC004536, Z98749, AC002545, AF198097, Z92546, AL031176, AC005355, AB026899, | |
| | | | | | AL096757, AL135784, AF130249, AP000499, AP000018, AP000518, AP000160, AL109611, | |
| | | | | | AC004225, AC012380, AF188024, AC004748, AL096862, AL030995, Z82196, AC004259, | |
| | | | | | AC005741, AC003051, AC006463, AC006084, AP000353, AC002402, AC004600, AC005858, | |
| | | | | | AL033504, AJ010598, AL031650, Z82206, AL022720, AL022345, AC004738, Z77249, Z74696, | |
| | | | | | U82672, AC006353, AC004746, AL033403, AC005345, AB023054, AC004894, AC006199, | |
| | | | | | AP000457, AC006366, AC005082, AC006991, AC010183, AC006257, AC011362, AC004887, | |
| | | | | | AC006427, AC007250, U82828, AL022726, AC006313, AC005740, AL109865, Z93242, | |
| | | | | | AL050308, AL050317, AP000500, AF011889, AC007392, U01308, M22332, AL033533, | |
| | | | | | AC005885, AC006479, K01669, U96409, U08211, AC007350, M22334, and L24756. | |
| HPLBB50 | 754 | 503751 | 1-292 | 15-306 | AA368037, and AA368044. | |
| HPLBL31 | 755 | 503732 | 1-349 | 15-363 | AA368423, and AA368422. | |
| HPLBL57 | 756 | 503730 | 1-261 | 15-275 | AA303008, AA303009, and AC002427. | |
| HPLB061 | 757 | 558187 | 1-229 | 15-243 | AA368593, AA758725, and D86985. | |
| HPMAG19 | 758 | 705471 | 1-290 | 15-304 | AA369206, AA369215, AW276918, AI498304, AI859717, AI635381, AI873828, AI806367, | |
| | | | | | AA992384, AI651551, AI073771, N26890, AI479551, AA287708, AI628336, N21211, | |
| | | | | | AI942382, AA553615, AA479887, AW085308, AW137286, AA873472, AA679635, AA586824, | |
| | | | | | AA708432, and AB023229. | |
| HPMAH75 | 759 | 766443 | 1-301 | 15-315 | AA303039, AA369332, AA335519, AA553332, AA745302, N63749, Z95331, AC003682, | |
| | | | | | AL022327, AC005488, AL035685, AL031587, AC004856, AC005015, AC005899, AL109628, | |
| | | | | | Z98884, AL035684, AL031589, AC003030, AL133245, AC007842, AC007685, AC005231, | |
| | | | | | AL133163, AL049759, AC005788, AL109801, AL031283, AC005412, AL049874, and | |
| | | | | | AC002349. | |
| HPMBK34 | 760 | 954057 | 1-374 | 15-388 | AA662989, AA668148, AA513884, AI912401, AA303131, AA077247, AA654482, AA493618, | |
| | | | | | AL038527, AI872000, AW105463, AA515351, AA744423, AI590404, F26713, R48980, | |
| | | | | | AW273146, AW273201, AA309232, AI439393, AI926656, H43771, AA631515, AA569715, | |
| | | | | | AI929796, AI798407, AW194077, AA758131, AW157731, AA488903, AW162750, AW003612, | |
| | | | | | AC005940, AC007240, AC005519, Z83840, AC006455, AC005899, AC005482, AL022322, | |
| | | | | | AP000555, Z83822, Z83844, AC007358, AL031255, AC005280, AP000347, AL022313, | |
| | | | | | AC005722, Z98051, AL035415, AL121653, AC005300, AC004084, AC007193, U95742, | |
| | | | | | AL049709, U95739, AL049835, AC007216, AL022329, AL034419, AC002301, AF111169, | |
| | | | | | AC005412, AC004878, Z83843, AC004253, AC000353, AC002477, AC003026, AC005207, | |
| | | | | | AC007435, AF027390, AL008725, AC010205, AC004991, AC008116, AC005829, AP000694, | |
| | | | | | AC005409, AC002425, AP000512, AC006011, AL135744, AL031588, AC005971, AC005529, | |
| | | | | | AC007227, AL031651, AE000658, AC004887, AC002544, AC007308, AF001548, AP000553, | |
| | | | | | AC004019, AP000008, AP000501, AC002300, Z83820, AC004386, AC005015, AB023049, | |
| | | | | | AC004491, AP000704, AC005086, AC004702, AC006372, AC002351, AC002059, AL050318, | |
| | | | | | AC006126, AL132777, Z95114, AF109907, AC005332, AC009247, U95740, AC005102, | |
| | | | | | AC008115, AC004805, AC006285, AC007731, AC006039, AC005839, AC016830, AC006459, | |
| | | | | | AF196970, AC006509, AB023048, AL022238, AP001063, AC006468, AC002470, Z98036, | |
| | | | | | AL008718, AC005088, AC005527, AC006449, AD000092, AC007421, AC007649, AC005484, | |
| | | | | | U47924, AL109758, AL035249, AL139054, Z95113, AF196779, AC006057, AC004517, | |
| | | | | | AC005072, AC005859, AC008012, AL022237, AC007073, AL049552, AC005696, AP000503, | |
| | | | | | AC005089, AF107885, AC005500, AP000692, AC004876, AC005411, AL035587, AC005803, | |
| | | | | | AC005520, AL023575, AC004263, AL022323, AP000504, AC006992, AF029308, AC000052, | |
| | | | | | AC007880, AL133163, AJ003147, AC005746, AC006111, AC007387, AC007276, AC005695, | |
| | | | | | AC008125, AF129756, AC007226, AC004938, Z83838, Z93017, AL035419, AC007011, | |
| | | | | | AC004169, AC005355, AC004382, AL035659, AC005377, AF196972, AL031282, AC008015, | |
| | | | | | AL049697, AP000689, AL031577, AL031291, AC005914, AP000123, AP000055, AP000170, | |
| | | | | | AC005049, AC006120, AF134726, AC003101, AC005005, U52112, AL022316, AC005225, | |
| | | | | | AC007934, Z97054, Z82189, AP000510, AC002094, AC005261, AC007546, AL031123, | |
| | | | | | AC004686, AC007685, AL034548, AC004801, AC003043, AL023513, AC005895, AL117258, | |
| | | | | | AL035684, AL031295, U73024, AC005516, AC004583, Z97055, AC002418, AL031311, | |
| | | | | | AP000346, AC003663, AC004813, AC002400, AC006515, AC007450, AC005383, AC002992, | |
| | | | | | AL121655, AD000864, U91321, AB003151, AC006441, AC006241, AL024509, AC005486, | |
| | | | | | AL035405, AL035691, Z85996, and AL031650. | |
| HPMBK49 | 761 | 577661 | 1-416 | 15-430 | AA253119, and AA256187. | |
| HPMBM48 | 762 | 575626 | 1-489 | 15-503 | | |
| HPMBN02 | 763 | 920865 | 1-106 | 15-120 | AL031848. | |
| HPMBO10 | 764 | 968365 | 1-349 | 15-363 | | |
| HPMBO61 | 765 | 867677 | 1-431 | 15-445 | AL133650. | |
| HPMBR17 | 766 | 785732 | 1-415 | 15-429 | | |
| HPMBU81 | 767 | 557870 | 1-470 | 15-484 | | |
| HPMBX35 | 768 | 531058 | 1-195 | 15-209 | | |
| HPMBX79 | 769 | 577637 | 1-372 | 15-386 | | |
| HPMBY76 | 770 | 531338 | 1-332 | 15-346 | | |
| HPMBY83 | 771 | 527006 | 1-428 | 15-442 | AI590323, AW379794, and AW379800. | |
| HPMBZ05 | 772 | 932527 | 1-211 | 15-225 | | |
| HPMCB65 | 773 | 531289 | 1-403 | 15-417 | T47761. | |
| HPMCC73 | 774 | 531066 | 1-301 | 15-315 | | |
| HPMCD77 | 775 | 529960 | 1-266 | 15-280 | AI141166, AL040565, and AP000495. | |
| HPMCI02 | 776 | 381961 | 1-416 | 15-430 | R53558, AW183662, AI936591, AI554166, Z39384, and AI658791. | |
| HPMCI65 | 777 | 577598 | 1-275 | 15-289 | | |
| HPMCJ14 | 778 | 524768 | 1-393 | 15-407 | AC000105, AL031591, and AC004032. | |
| HPMCJ19 | 779 | 531279 | 1-241 | 15-255 | | |
| HPMCJ48 | 780 | 577601 | 1-291 | 15-305 | | |
| HPMCK65 | 781 | 742095 | 1-319 | 15-333 | H64820, AA092052, and AL023807. | |
| HPMCS19 | 782 | 954056 | 1-195 | 15-209 | AW136091, and AL031710. | |
| HPMCS65 | 783 | 961250 | 1-120 | 15-134 | AC005923. | |
| HPMCV93 | 784 | 657532 | 1-429 | 15-443 | AA128929, R11967, T78064, AA449505, T74763, and AB018281. | |
| HPMCW25 | 785 | 867673 | 1-630 | 15-644 | AA429660, AI375673, AI656667, AA320869, and AI222277. | |
| HPMCW53 | 786 | 727392 | 1-190 | 15-204 | | |
| HPMCX11 | 787 | 967655 | 1-300 | 15-314 | AW029019. | |
| HPMCY30 | 788 | 867687 | 1-344 | 15-358 | | |
| HPMCY31 | 789 | 725180 | 1-325 | 15-339 | AA113940. | |
| HPMCY35 | 790 | 571411 | 1-637 | 15-651 | T95994, and AW440904. | |
| HPMDJ09 | 791 | 582594 | 1-290 | 15-304 | | |
| HPMDL78 | 792 | 577590 | 1-340 | 15-354 | AF111168. | |
| HPMDO39 | 793 | 531275 | 1-192 | 15-206 | | |
| HPMDR07 | 794 | 867682 | 1-285 | 15-299 | | |
| HPMDT91 | 795 | 745346 | 1-334 | 15-348 | | |
| HPMDU19 | 796 | 577626 | 1-313 | 15-327 | N69438, N71427, N62439, H80350, R83031, H66851, H67489, R62741, AA918030, H54212, | |
| | | | | | and AC005281. | |
| HPMDY52 | 797 | 531274 | 1-39 | 15-53 | | |
| HPMDZ62 | 798 | 531276 | 1-360 | 15-374 | | |
| HPMBB66 | 799 | 531349 | 1-397 | 15-411 | AC006500. | |
| HPMEC16 | 800 | 867658 | 1-299 | 15-313 | | |
| HPMEC36 | 801 | 668897 | 1-333 | 15-347 | | |
| HPMEC69 | 802 | 702501 | 1-270 | 15-284 | N20192, and AC008123. | |
| HPMED52 | 803 | 531347 | 1-438 | 15-452 | AI906494, and AC005004. | |
| HPMEE48 | 804 | 531321 | 1-428 | 15-442 | AC007966. | |
| HPMEE66 | 805 | 577619 | 1-323 | 15-337 | | |
| HPMEG50 | 806 | 925080 | 1-140 | 15-154 | | |
| HPMEI39 | 807 | 784781 | 1-704 | 15-718 | AA029876, AA029112, AI089387, W80831, H23039, AA314213, AA209372, AA209368, | |
| | | | | | H55702, AA304885, AI218927, AL021707, AL050345, AJ236698, AL080313, and AC006441. | |
| HPMFB02 | 808 | 920308 | 1-391 | 15-405 | AW197446, AI972578, AI657152, AW204366, AA436769, AA442937, AI261197, AA421160, | |
| | | | | | AA034360, and AI675734. | |
| HPMFB28 | 809 | 575934 | 1-327 | 15-341 | | |
| HPMFB37 | 810 | 575620 | 1-648 | 15-662 | T58945, T58884, and AI352293. | |
| HPMFB75 | 811 | 526594 | 1-220 | 15-234 | F19258, AW419161, AW438916, AI205126, AA077817, AI565245, F35659, AA318652, | |
| | | | | | AA551509, N87410, W60516, AA515938, AW029038, AA025083, AI252554, AA743956, | |
| | | | | | AI285615, AA618158, AA932099, AW275674, AW236342, AI679045, AI446601, AA177061, | |
| | | | | | F29989, AL133862, AI200051, AI469641, AA631363, AL041368, AA327782, AA626637, | |
| | | | | | H04821, AA745410, AI873916, AL040130, AW440976, AA501600, AI049634, AW008317, | |
| | | | | | AW338500, AA441788, AW069227, AL040913, AI824562, AI633007, AA503454, AA602069, | |
| | | | | | AA228420, AW207652, AI962050, AI358229, AA557879, F36373, AW166815, AW406755, | |
| | | | | | AI985519, AI634187, AI365988, AA713815, AA610786, AI917271, AI457313, AL048925, | |
| | | | | | AI251002, F32705, AI003743, AL042213, AI918421, AW129262, AA886584, AA484059, | |
| | | | | | AL040072, AA515051, AW339687, AI246796, AI929531, H65428, AI291124, AI151261, | |
| | | | | | AA515224, AA340960, AI904894, AL120008, AI499094, AW419118, AI635272, AA229785, | |
| | | | | | AI291268, AI802526, AW069807, AA559290, AI521679, AI537030, AI890923, AI922002, | |
| | | | | | AW162049, AW080134, AI474713, AI433187, AA501722, AI608626, H69041, AA469451, | |
| | | | | | AI049722, U02048, AP000158, 875337, AL035555, Z72521, AF015162, AL031670, AC004057, | |
| | | | | | A39972, U14701, AF140763, AL121603, AF017257, U14684, U14691, U14685, U14686, | |
| | | | | | U14687, U14688, U14689, U14692, U14699, U14702, U14707, U14710, 575201, U14711, | |
| | | | | | U14712, U14713, AP000014, U14714, U14715, AL020997, U14716, AP000692, U14717, | |
| | | | | | U14718, U12580, U14719, AC005412, AL096712, AC006315, AL122020, AC004617, | |
| | | | | | AC005324, Z93024, AC009241, Z94801, AL031577, AL117328, AP000497, AC007395, | |
| | | | | | AC004125, AL133312, AF015167, AF015160, AL121578, AC005389, Z68192, AC005006, | |
| | | | | | AF124523, AC006365, AF053356, AC007298, AL109627, AC009178, U14695, U14703, | |
| | | | | | U14705, AL033521, AC005695, AJ239318, Z98752, AC002433, AC005401, AF131217, | |
| | | | | | AC005765, AP000252, AL121923, AL031846, AC000052, AF111167, AC005779, AC006064, | |
| | | | | | AF086558, AC005911, AL021332, AC004817, AL135960, AJ131016, AF205588, Z84477, | |
| | | | | | AC004907, AJ006996, AP000212, AP000134, AL049610, AL078581, AC004841, AL022718, | |
| | | | | | L81415, AL109798, AC005222, AC004694, AC006210, AC006023, AC005619, AP000031, | |
| | | | | | AF015171, AC004858, AL096703, AL022328, AL139054, AC007686, U95740, AL035552, | |
| | | | | | AC002558, AL034420, AJ223364, AC007541, AC004675, AC004909, AC004008, AJ246003, | |
| | | | | | AC000353, U12583, AF164343, AC006313, U12581, AF002991, AF015170, S70694, | |
| | | | | | AC000039, Z81309, AC007666, S70707, L35531, AF015169, Z86090, AC002465, AC005099, | |
| | | | | | AC004263, AC006001, AL031587, AL049830, AC002094, AL133448, AF088219, AL121655, | |
| | | | | | AL035684, Z98304, AL109980, AF015168, AF128846, AF128847, AC006299, AF120990, | |
| | | | | | AF190465, S48196, AL033533, AL033527, AC005972, AL096774, AL031312, AL117355, | |
| | | | | | AL009031, AC002457, U51281, Z75889, AC002326, AC006373, AC005229, Z69921, Z85989, | |
| | | | | | AC007285, AL049757, AC002287, Z82246, AC004108, X62354, AC008126, AC004804, | |
| | | | | | AL035681, AC004024, AL049223, AC005057, AC000392, U95743, AL035450, AC004542, | |
| | | | | | X53550, AF037338, AL035410, AL022238, AL035407, AL033392, AP000512, AL031393, | |
| | | | | | AC004383, Z82201, AL031118, AC007690, AF147439, AC005699, AP000193, X53795, and | |
| | | | | | U40369. | |
| HPMFB84 | 812 | 577593 | 1-347 | 15-361 | AA917042, AA476820, AA861762, AW197737, AA883969, AI222281, AI394043, AI476496, | |
| | | | | | AI420953, AI816942, AW418714, AI337319, AI312584, AI268413, W60319, H72483, | |
| | | | | | AI125256, AI198189, AI739036, Z57770, Z59847, and Z57771. | |
| HPMFE35 | 813 | 577633 | 1-415 | 15-429 | AC005909. | |
| HPMFE60 | 814 | 577636 | 1-309 | 15-323 | | |
| HPMFE73 | 815 | 575941 | 1-416 | 15-430 | AL009031, and AC002326, | |
| HPMFH21 | 816 | 575943 | 1-447 | 15-461 | | |
| HPMFJ50 | 817 | 575932 | 1-475 | 15-489 | R20682, T65200, Z44442, and F11983. | |
| HPMFJ55 | 818 | 577588 | 1-369 | 15-383 | | |
| HPMFL08 | 819 | 959569 | 1-452 | 15-466 | AA555286, AA640814, AI281916, AW073979, AI378363, R70468, AW242350, AW013856, | |
| | | | | | AA644290, AW449140, Z93016, AC012384, AL035541, AC005228, AC003662, and | |
| | | | | | AC009300. | |
| HPMFL80 | 820 | 874359 | 1-440 | 15-454 | AA313895, AA834888, AA362291, AW366931, AA436945, AA496034, AI834310, AA402490, | |
| | | | | | AI039687, and AC004841. | |
| HPMFM29 | 821 | 582595 | 1-860 | 15-874 | AA255639, R53909, AI492887, H09275, AW192355, N48929, and AL117598. | |
| HPMFN12 | 822 | 968821 | 1-499 | 15-513 | | |
| HPMFP05 | 823 | 867662 | 1-413 | 15-427 | | |
| HPMFP30 | 824 | 577629 | 1-335 | 15-349 | AC008072. | |
| HPMFP38 | 825 | 575914 | 1-342 | 15-356 | AC006121. | |
| HPMFQ84 | 826 | 867651 | 1-678 | 15-692 | R31294, AI823535, AI823533, AL038977, AW271095, AI252141, AL135383, AI792856, | |
| | | | | | AA594742, AW302832, AA828911, AI284536, AI251563, AI733946, AA578905, AI383596, | |
| | | | | | AI733930, AL047645, AI792695, AI792746, AI792842, AI252190, AI281401, AI689198, | |
| | | | | | T56025, AA553900, AA557493, AA809125, AA484022, AA219181, AJ859906, AI089178, | |
| | | | | | AA551067, AI884861, AA169245, AA494047, H81918, AI798313, AI298660, AI038324, | |
| | | | | | AI798569, AI869786, AW269071, AI347649, AI347478, AI761677, AA599080, AC006060, | |
| | | | | | AL022318, AF111168, AL049779, AL034420, X14448, AL021978, AC007731, AC005500, | |
| | | | | | AJ010598, AC000071, U78027, AC015853, AC005932, AC004033, AF001549, AL035422, | |
| | | | | | AC006312, AC004263, AC004000, AC005037, AC005412, AL008715, AC005006, AC006057, | |
| | | | | | AC002544, AC006088, AL133243, AL009051, AL031255, AC005828, Z85996, AC004771, | |
| | | | | | AC006946, AC004527, AL031577, AC005071, AC004675, AC002470, AC002045, AC002390, | |
| | | | | | AC009263, AL135744, AC004821, AC002300, AC005295, AC005952, AL022316, M26434, | |
| | | | | | AF088219, AL035634, Z98941, Z97053, AC005527, AC005048, AC002106, AC007050, | |
| | | | | | AC008124, AC004262, AC005363, AF015416, AC005730, AC007686, AJ006216, AB017602, | |
| | | | | | AJ246003, AL031133, AF172277, AP000248, AP000704, AL096702, Z81364, AC004912, | |
| | | | | | AL020997, Z83844, AB020868, AL110121, AC006023, AL035681, AL080243, AL008721, | |
| | | | | | AL132987, AL121658, AL049745, AC005368, Z98742, Z85987, AL021391, AC007227, | |
| | | | | | AF196972, AC000025, AL031428, AL132642, AC005520, AC005041, AL049692, AL031673, | |
| | | | | | U95742, AL049776, AP000555, AL031846, AL049694, AC004143, AC002115, AC004531, | |
| | | | | | AC006480, AL033517, AL132777, AC004491, AC002350, AL049872, AC007216, AC004129, | |
| | | | | | L78810, AC004797, AL035398, AP000692, AC004941, AC005829, AC005529, L44140, | |
| | | | | | AL022719, AL008718, AL020993, U52112, AC007676, AC006064, AC006356, AC002509, | |
| | | | | | AP000047, AP000226, AF134726, AC004223, AC002477, AC004805, AP000326, Z84466, | |
| | | | | | AC003689, AF030453, AC007151, AC002394, AC009464, AP000501, Y07950, AC008372, | |
| | | | | | AC007566, AC004887, AL031602, AC004841, AC004150, AP000054, AP000169, AP000122, | |
| | | | | | AC004812, AL049569, AC005326, AL109984, AC005323, AL031228, AC004983, AL035416, | |
| | | | | | AF109907, AP000049, AC005800, AP000115, AL031311, AP000311, AC006241, AC004383, | |
| | | | | | U85195, AL023876, AP000131, AP000209, AC007435, AP000087, AC005229, AL031433, | |
| | | | | | Z98304, AC005088, and Z85986. | |
| HPMF541 | 827 | 711640 | 1-422 | 15-436 | Z95331. | |
| HPMFT04 | 828 | 916662 | 1-316 | 15-330 | | |
| HPMFU89 | 829 | 575894 | 1-326 | 15-340 | | |
| HPMFV28 | 830 | 652097 | 1-330 | 15-344 | AA434145, AI422195, and AC007239. | |
| HPMFV82 | 831 | 575911 | 1-363 | 15-377 | AL120663. | |
| HPMFV88 | 832 | 956263 | 1-353 | 15-367 | R56205, N31111, AW403866, and AA338327, | |
| HPMFW25 | 833 | 960065 | 1-266 | 15-280 | | |
| HPMFW78 | 834 | 932529 | 1-466 | 15-480 | C18404. | |
| HPMFX13 | 835 | 575908 | 1-436 | 15-450 | AI245605, AI733581, AW195539, AA994974, and AL050350. | |
| HPMFX65 | 836 | 867657 | 1-341 | 15-355 | AL031282. | |
| HPMFX70 | 837 | 577642 | 1-346 | 15-360 | AC005383. | |
| HPMFX92 | 838 | 577603 | 1-348 | 15-362 | AL008730. | |
| HPMGA83 | 839 | 968359 | 1-512 | 15-526 | | |
| HPMGB22 | 840 | 506379 | 1-308 | 15-322 | Z85999. | |
| HPMGC07 | 841 | 920313 | 1-367 | 15-381 | AI214759. | |
| HPMGC23 | 842 | 703835 | 1-421 | 15-435 | AA309957. | |
| HPMGE31 | 843 | 867648 | 1-422 | 15-436 | | |
| HPMGE95 | 844 | 873392 | 1-796 | 15-810 | | |
| HPMGF06 | 845 | 954823 | 1-551 | 15-565 | AA034305, AI752781, W38450, AA295920, W69345, AW368627, W01351, AW167099, | |
| | | | | | AA491113, AI093592, AI628843, AA470016, AA459627, R70436, W16698, H30472, R72510, | |
| | | | | | R27103, AI986035, AI926603, H25748, AA432254, W67475, R53035, AA617710, AA865403, | |
| | | | | | AA412294, AA431234, AA514353, AI002434, W69267, R37917, R24912, AA443912, H24995, | |
| | | | | | R72497, and X52574. | |
| HPMGF32 | 846 | 577615 | 1-355 | 15-369 | AC006960. | |
| HPMGH16 | 847 | 577641 | 1-402 | 15-416 | | |
| HPMGI03 | 848 | 924521 | 1-387 | 15-401 | AA308643. | |
| HPMGI84 | 849 | 920326 | 1-269 | 15-283 | | |
| HPMGJ93 | 850 | 864040 | 1-347 | 15-361 | AA361434. | |
| HPMGK37 | 851 | 575924 | 1-414 | 15-428 | | |
| HPMGK59 | 852 | 671936 | 1-492 | 15-506 | W51873, AA215789, AA215316, AI654057, AI809466, AI761758, AA292627, N24002, | |
| | | | | | AI860134, AA279010, AA215628, AC003032, and Z56178. | |
| HPMGK62 | 853 | 730751 | 1-517 | 15-531 | R82057, and AI828591. | |
| HPMGM33 | 854 | 854081 | 1-648 | 15-662 | AA702486, AI630976, AW339792, AW418628, AI690212, AI350097, AA830893, AA703551, | |
| | | | | | AI458500, AA936420, AW402861, and AB020714. | |
| HPMGM54 | 855 | 577599 | 1-342 | 15-356 | AL050074. | |
| HPMGR80 | 856 | 506235 | 1-380 | 15-394 | AW409684, T06413, AB003151, AP000688, and AB033064. | |
| HPMG509 | 857 | 575951 | 1-99 | 15-113 | | |
| HPMG524 | 858 | 796440 | 1-354 | 15-368 | | |
| HPMGT67 | 859 | 970815 | 1-111 | 15-125 | | |
| HPMGV12 | 860 | 968364 | 1-288 | 15-302 | | |
| HPMGV15 | 861 | 582596 | 1-261 | 15-275 | | |
| HPMGV59 | 862 | 577635 | 1-264 | 15-278 | AW242577. | |
| HPMGW48 | 863 | 920309 | 1-428 | 15-442 | | |
| HPMGX23 | 864 | 575903 | 1-301 | 15-315 | AI806968, AI080168, AI207589, AB006572, and AF09I095. | |
| HPMHA80 | 865 | 970813 | 1-282 | 15-296 | AL133605. | |
| HPMHB74 | 866 | 577595 | 1-539 | 15-553 | H09672, and AI937462. | |
| HPMHB83 | 867 | 531382 | 1-364 | 15-378 | | |
| HPMHC74 | 868 | 577631 | 1-357 | 15-371 | AL008709, and AL020990. | |
| HPMHD66 | 869 | 928433 | 1-429 | 15-443 | AI247199, AW166611, AI254913, AA833896, AA833875, AA644090, AI818737, AL048466, | |
| | | | | | AW069227, AI460050, R81017, AA613624, D44639, AA603530, AA307598, AW270385, | |
| | | | | | AA634786, AI682665, AA468022, AL047349, AI687343, AI753113, AA528390, AW302017, | |
| | | | | | AA707849, AA984187, AI925579, AA526724, AI084348, AI278972, AL040054, AI791150, | |
| | | | | | AI867058, AA580808, AA633920, AW188742, AI634187, AI537458, AI004591, AA847499, | |
| | | | | | AA639946, AA574442, AI591375, AA643770, H63092, AW305371, AA651632, AA837035, | |
| | | | | | AA558560, AA862179, AI216990, AW270256, AA846959, AA581247, AI908093, AA626040, | |
| | | | | | AA084609, AI469577, AI049955, AI720195, AW131043, AA314891, AA714011, AA456924, | |
| | | | | | AA481887, AI732869, N23913, AA191418, AI635279, AW068316, AA452887, H15652, | |
| | | | | | AI283312, AA176605, AA846944, AA904275, AA704393, N64587, AA834777, AA515728, | |
| | | | | | AA601356, AI457313, AW440545, AI521525, N40092, F30158, AA493226, AA364453, | |
| | | | | | AA583394, AI537020, AA229975, AA521323, AI244127, AA837671, W01985, AI962030, | |
| | | | | | AI580707, AW265138, AA521399, AA086318, AI344948, AA362349, AI302994, AI524360, | |
| | | | | | AA806796, AA721645, AC000025, AC004796, AC005736, AC005081, AC005899, L78810, | |
| | | | | | AB026906, AC005581, AC004382, AL133448, AC006241, AC004000, U96629, AL096703, | |
| | | | | | Z98884, AL133245, AL035685, AC006077, AC005844, AC004098, AC007227, AC004876, | |
| | | | | | AC005746, AC004686, AL078604, AL033517, AL023807, AF196969, Z99755, AC005180, | |
| | | | | | AC005800, AC016025, AL022313, AL132777, AC004253, Z97181, AC004881, Z82172, | |
| | | | | | AC004973, AC004890, AC002110, AL079305, AC003663, AL132985, AC005632, AC006047, | |
| | | | | | AC004019, AL031846, AC007327, Z84482, AP000313, AC002104, AC004913, AP000299, | |
| | | | | | AC005102, AC004447, AC005725, AC000120, AC007666, AP000066, AC006014, Z71183, | |
| | | | | | AC004476, AP000193, Z99716, U62293, Z93023, AC005619, AC000052, AL034429, | |
| | | | | | AC005089, AC006441, AL031311, AC005783, AL080243, AC010170, AP000050, AF053356, | |
| | | | | | AL024507, AF134726, AL035494, AC005768, AL031662, Z83844, AC005231, U47924, | |
| | | | | | U41193, AC005740, AF111169, Z81364, AP000117, AP000269, AC005920, AC006197, | |
| | | | | | AP000689, AL020993, AL133445, AC004895, AC008085, AP000503, AF165926, AC002350, | |
| | | | | | AL049538, AC004854, AC004859, AC007308, L81690, AC005488, AP000509, AC002470, | |
| | | | | | AL121769, AL031587, AP000I03, AC005943, AC004882, AF129078, U52112, AC006276, | |
| | | | | | AB003151, AC005940, AL035697, AL117338, AC005972, AC000004, AC007878, AC005664, | |
| | | | | | AC005690, AP000113,AC006285, AC006515, AC003101, AL022323, AF030453, AL117258, | |
| | | | | | AP000045, AD000092, AL008710, Z98200, AL035458, AL109627, AC006368, AC005529, | |
| | | | | | AC004383, AC005015, AC007766, AF129756, AL035691, AC005088, AC004797, AC000028, | |
| | | | | | AC002492, AC003006, AC006509, AC005610, AC002303, AC008123, AL034420, L44140, | |
| | | | | | S54074, AC005839, AC006059, AL049829, AL117355, AC008082, AL096701, AC006040, | |
| | | | | | AC004887, AC006111, AL022163, AC006254, AC007868, AC003080, AC005527, AC005881, | |
| | | | | | AL035405, AC003684, AL080316, AL008582, AC007842, Z82179, AL121603, AL023575, | |
| | | | | | D84394, AL035587, AC007546, AL023879, U91319, AC005695, Z85986, AC005618, | |
| | | | | | AL023584, AC005790, AC000134, AC005200, AC004752, AC007664, AC005288, D87675, | |
| | | | | | AC005327, AC006064, AC008273, AC005029, AF207550, Z94801, AC002404, AC007686, | |
| | | | | | AL031595, AC008127, AC018633, Z70280, AC007421, AC006547, Z47046, Z83820, | |
| | | | | | AC020663, Z85987, AC003041, AC002054, AL031575, AC005229, AC005829, Y18000, | |
| | | | | | AC005519, AL022328, AC007563, Z93930, AC007201, AC006468, AC005342, AL050306, | |
| | | | | | AC009516, Y14768, AL133399, AP000501, AC004386, Z83826, AC005952, AC004517, | |
| | | | | | AC002551, AC006539, AF157623, AL031668, AL035423, AP000122, AC005597, AC006115, | |
| | | | | | and AL078587. | |
| HPMHD71 | 870 | 760426 | 1-147 | 15-161 | | |
| HPMJC01 | 871 | 914759 | 1-254 | 15-268 | AC005484. | |
| HPMJC05 | 872 | 930844 | 1-356 | 15-370 | AC006977. | |
| HPMJD88 | 873 | 930806 | 1-637 | 15-651 | | |
| HPMJE84 | 874 | 867587 | 1-411 | 15-425 | AL035091. | |
| HPMJF76 | 875 | 965642 | 1-346 | 15-360 | AC005946, AL049740, AL022157, Z82211, U95626, Z83843, AC003029, and AL133162. | |
| HPMJI81 | 876 | 930873 | 1-310 | 15-324 | AA745410, AI469172, AA341228, AW167267, AA605274, AI471543, AW173651, AJ672135, | |
| | | | | | AA370185, AW236342, AI284640, F37169, AI908628, AA630362, AW265393, W07122, | |
| | | | | | AI281881, AI287651, AF150152, AI299050, AI648558, AA515435, AW008317, AW440976, | |
| | | | | | AA100372, AA441788, C16409, AW270270, AI653905, AW162489, AI148277, AI279165, | |
| | | | | | T06828, AI133164, AL120687, AA654771, AA348311, AA626404, AI802526, AA614069, | |
| | | | | | F36273, AI471481, AW080120, AA204655, AI291124, AW419262, AA350859, AI291268, | |
| | | | | | AI537030, AI499094, AT610159, F32894, AA747472, AA338522, AA827981, AI493217, | |
| | | | | | AI446464, F18638, F03097, AW148792, AW151727, AL138265, T07324, AA515905, | |
| | | | | | AA318822, AL041368, AA558015, AA381147, AA578481, H88666, T09071, AA284179, | |
| | | | | | AL038474, AA604897, AI312149, AW021583, AW303876, AA346454, AI889923, AI168185, | |
| | | | | | AI623898, T17016, AA569468, AI583594, AA071144, AA309841, AW410400, AI971377, | |
| | | | | | AI871722, AA434484, AI679706, T07287, AA601876, AW072923, AI358812, AI205084, | |
| | | | | | AA071393, AI679132, AA528516, AA569187, AI754658, AI754336, AC004603, AC005392, | |
| | | | | | AC005947, AC005337, AC005204, AC005772, AF111170, M87919, AC006965, AC008079, | |
| | | | | | AL021332, AC002395, AF001549, U80017, AC003007, AC007684, AC008124, AC002528, | |
| | | | | | AC005874, AF134471, AC005212, AC008055, AL121655, Z95124, AJ246003, AP000120, | |
| | | | | | AP000167, AP000052, AL035079, AC007298, AJ010770, AC002565, AL109985, Z86064, | |
| | | | | | AC004990, AC005829, AC008372, AC004013, AP000477, AC004542, AC007792, AC002045, | |
| | | | | | AL096701, AC006019, AL031675, AP000065, AL033397, AL078593, AC006026, AL049851, | |
| | | | | | AC005211, AL008636, AC005695, AC005356, AC006076, AC004633, AC003982, Z98200, | |
| | | | | | AL008735, AC005251, AC007376, AC004690, AC004668, D84394, AC005037, AC012599, | |
| | | | | | AF217403, AL079306, AC003663, AC005993, A0004986, AC007462, AC005821, AF152365, | |
| | | | | | Z97054, AC007076, AC005915, AL133246, AC005341, AL109758, AL033544, AC003689, | |
| | | | | | AL031053, AC006312, AC007676, U14702, AL133312, AF077058, AC005041, AC002310, | |
| | | | | | AL049836, AC005541, AL049760, AC005226, U11309, AL022302, AL121654, AL080241, | |
| | | | | | AL049745, AC004381, AL031391, AC004605, AL022238, AC007690, U63721, AC002543, | |
| | | | | | AC007225, AC006406, AC006048, AL023284, AC006030, AL109842, AC002375, Z97635, | |
| | | | | | X54175, AC005548, AC006961, AL121658, AC016027, AL136504, AC016830, AF165147, | |
| | | | | | AC010206, AL035090, Z99129, AC005786, AP000244, AC004217, AC005229, AC004534, | |
| | | | | | AL122003, AL133245, AC005486, AC006254, AL035073, X75335, AL049699, AC004263, | |
| | | | | | S70694, AC002426, AF008191, AC008989, AL031296, AL031734, AC006270, AC005754, | |
| | | | | | AC004988, AC007221, AF111168, Z84490, AC005763, AL023880, AC005255, AC005747, | |
| | | | | | AL031662, U92032, Z84489, AC007285, AC002472, AC007664, AL034417, AL133244, | |
| | | | | | AC005696, AC008498, AC008040, AC005385, AL031283, AL049736, AC002457, AC002049, | |
| | | | | | AC005151, AP000123, AP0G0055, AP000170, AC004070, AC006387, Z82216, AL008720, | |
| | | | | | AL132641, Z97198, Z95326, AF178030, AC007312, AF172277, AC006484, AC004810, | |
| | | | | | Z84488, AL031542, AF119358, AC006044, AL117330, AL022320, AC005565, AC003119, | |
| | | | | | AL031388, AC007666, AC006255, AL031678, AL035249, AC007632, AL121767, AL031176, | |
| | | | | | Z68870, AC004754, Z99496, AC005912, AC009263, AC005744, AC008282, AC011718, | |
| | | | | | Z69666, AL022726, AC005740, AC005602, AC006362, AC002429, AB023052, AC004099, | |
| | | | | | AC003664, AC007514, AF134726, AC000070, AC000086, AC005789, AP000509, and | |
| | | | | | AC005231. | |
| HPMIN59 | 877 | 946876 | 1-547 | 15-561 | AA278625, AL043338, AA417787, AI917735, AW303607, AI819365, W23045, AI243857, | |
| | | | | | AA157110, and AA278626. | |
| HPMJ046 | 878 | 922649 | 1-293 | 15-307 | | |
| HPMJR02 | 879 | 917419 | 1-505 | 15-519 | AC005406. | |
| HPMJV08 | 880 | 958001 | 1-430 | 15-444 | | |
| HPMJY55 | 881 | 922657 | 1-423 | 15-437 | AC006443. | |
| HPMKB19 | 882 | 969478 | 1-837 | 15-851 | H66737, AA610385, AI825101, and AC006453. | |
| HPMKI53 | 883 | 957997 | 1-200 | 15-214 | | |
| HPMKM81 | 884 | 894416 | 1-880 | 15-894 | AW130066, AI826186, AW150146, AA129308, AW392049, AA129351, AA453884, AI278397, | |
| | | | | | N24006, AA453799, AI796331, AA336728, N74882, AW380924, AA369050, AI868063, | |
| | | | | | AW131507, AC004774, D31734, AF033011, U67840, L24443, AF022075, AF022077, | |
| | | | | | AF022076, U25274, AF096161, L09729, U03876, Z63754, and Z63755. | |
| HPMKN43 | 885 | 867573 | 1-626 | 15-640 | AA457012, and AC002310. | |
| HPMLE04 | 886 | 867533 | 1-562 | 15-576 | N89001. | |
| HPMLK02 | 887 | 918123 | 1-497 | 15-511 | AA848128, and Z93244. | |
| HPMLK76 | 888 | 922621 | 1-477 | 15-491 | | |
| HPMLL74 | 889 | 953069 | 1-493 | 15-507 | R66945, and AI090443. | |
| HPMLW10 | 890 | 963037 | 1-330 | 15-344 | Z71183. | |
| HPM5F86 | 891 | 509490 | 1-323 | 15-337 | | |
| HPRAE13 | 892 | 971652 | 1-461 | 15-475 | AI097067, AI383144, AA370038, and AC005746. | |
| HPRAN84 | 893 | 585489 | 1-315 | 15-329 | AA370352, AA370860, AA024451, AL118518, AC007016, AF064859, AC004707, Z84718, and | |
| | | | | | AP000351. | |
| HPRAU45 | 894 | 536630 | 1-214 | 15-228 | AA370859, AA370351, AC002536, and AL034371. | |
| HPRAZ10 | 895 | 968692 | 1-452 | 15-466 | AA398734, AA393413, and AA371065. | |
| HPRBA65 | 896 | 655537 | 1-228 | 15-242 | AA371132, AA371091, AW270853, AI978920, AI468384, AI971306, AA361429, and | |
| | | | | | AC005156. | |
| HPRBE36 | 897 | 655587 | 1-318 | 15-332 | AA371242, AA757085, and AI018367. | |
| HPRBL91 | 898 | 655693 | 1-286 | 15-300 | AA370885, and AC002366. | |
| HPRCB11 | 899 | 960316 | 1-338 | 15-352 | | |
| HPRCB21 | 900 | 655725 | 1-306 | 15-320 | AC007198. | |
| HPRCC08 | 901 | 939490 | 1-284 | 15-298 | AA298484. | |
| HPRCC61 | 902 | 964909 | 1-321 | 15-335 | AA370278. | |
| HPRCN41 | 903 | 655554 | 1-343 | 15-357 | | |
| HPRCU13 | 904 | 968521 | 1-265 | 15-279 | AC002352. | |
| HPR5B16 | 905 | 666295 | 1-258 | 15-272 | | |
| HPRTL26 | 906 | 849081 | 1-405 | 15-419 | AA370571, and AI905054. | |
| HPRTP73 | 907 | 708761 | 1-292 | 15-306 | AA369901. | |
| HPVAB11 | 908 | 967944 | 1-567 | 15-581 | AI925663, AA458636, AA193435, AA252059, W94787, AI470629, AW016321, and | |
| | | | | | AA193532. | |
| HPVAF49 | 909 | 655578 | 1-412 | 15-426 | | |
| HPVAF69 | 910 | 753744 | 1-415 | 15-429 | AI584019, and R79760. | |
| HPVAH36 | 911 | 525537 | 1-479 | 15-493 | AA296794. | |
| HPWAF85 | 912 | 655691 | 1-606 | 15-620 | U18010, AI699466, and L77587. | |
| HPWAH48 | 913 | 655527 | 1-143 | 15-157 | | |
| HPWA577 | 914 | 908450 | 1-725 | 15-739 | AW139964, W81697, AW088477, AI887846, AA447817, AA447667, AA677404, R93353, | |
| | | | | | AA831618, AA574189, AI124782, AA584550, AA055366, F13631, AA765804, AW268271, | |
| | | | | | AA993918, AA679335, AC008173, AC004074, AF146367, AF124523, AF118808, AL096775, | |
| | | | | | AL109954, Z83841, AC002464, AC005820, AC006048, AP000509, D84394, AC007359, | |
| | | | | | AC008175, AC006499, AL136130, AL096801, and W81696. | |
| HPWBA33 | 915 | 655733 | 1-213 | 15-227 | | |
| HPWB084 | 916 | 867289 | 1-330 | 15-344 | T65635, AI354862, AA017323, H48816, AI187056, AA829490, AA507745, T47324, | |
| | | | | | AA548692, H91844, AA565232, AA640022, T05163, N22395, AA524604, AA524829, | |
| | | | | | AA373304, AI818505, Z83844, AL031255, AC012384, AC004408, AC006449, AC002996, | |
| | | | | | AC004149, M89651, AC005529, AC004491, AL031228, AC002357, AC002425, AC004531, | |
| | | | | | AC004947, AC005837, AC004051, AL049779, U52112, AL132774, AC004690, AC005225, | |
| | | | | | AC006162, AC007686, Z69303, AC006006, AC004231, AC005323, AL136295, AC002511, | |
| | | | | | AF107045, AC006077, AC004596, AL050317, AL022324, AC006275, AL080245, AL035427, | |
| | | | | | AL031053, AL049776, AL024507, AC005399, AC004682, AP000688, AC002375, AL078476, | |
| | | | | | AL121825, AC004552, AC005839, AC007052, AC005527, AL049829, AC007055, AC003049, | |
| | | | | | AP000555, and AF124730. | |
| HPWCA53 | 917 | 657484 | 1-354 | 15-368 | AI075673, and AC008015. | |
| HPWCJ27 | 918 | 655614 | 1-344 | 15-358 | | |
| HPWCJ67 | 919 | 655560 | 1-367 | 15-381 | | |
| HPWCJ82 | 920 | 655577 | 1-472 | 15-486 | T20053. | |
| HPWDA73 | 921 | 514113 | 1-643 | 15-657 | AW338702. | |
| HPWDA86 | 922 | 961529 | 1-240 | 15-254 | AW080827, AI535841, AC002038, AC002041, and AC006352. | |
| HPWDD72 | 923 | 537333 | 1-528 | 15-542 | H68009, AA532955, and AC005189. | |
| HPWSB35 | 924 | 655713 | 1-329 | 15-343 | | |
| HPZAB38 | 925 | 655591 | 1-241 | 15-255 | | |
| HSWAC73 | 926 | 710354 | 1-396 | 15-410 | AA300733, AW070249, and AC000089, | |
| HSWAD39 | 927 | 705322 | 1-785 | 15-799 | AW264269, AW028491, AA424983, AA418896, AA418895, AA460211, AI800304, AI685341, | |
| | | | | | AI188340, AI160534, N26011, AW057810, and AI917673. | |
| HSWBD86 | 928 | 785439 | 1-138 15-152 | R59356, F10756, AA480322, AI768068, T15624, AI760446, AI870727, AA534696, AA679825, | | |
| | | | | | AI868057, AI274320, AA716748, AI922465, and AA907744. | |
| HSWBJ40 | 929 | 711066 | 1-613 | 15-627 | AI610767, AA128537, AA045673, H26372, AI564965, C00296, H27484, AA045672, and | |
| | | | | | AF153882. | |
| HSWB034 | 930 | 868007 | 1-839 | 15-853 | AI264314, AI656489, AA608739, AL040264, C15165, AI922383, AA644468, AI391663, | |
| | | | | | AI285883, AI538754, AI696671, AA578673, AI587042, AA843485, R27828, AI927062, | |
| | | | | | AA888452, AI379567, AI093793, AA502801, H95376, AI696130, AA032171, AI697448, | |
| | | | | | AA032170, N66388, AI948739, AI499520, and D60629. | |
| HTEAA54 | 693 | 923070 | 1-694 | 15-708 | AA382253, AI806382, and AI478870. | |
| HTEAB52 | 932 | 537136 | 1-582 | 15-596 | AA382333, AA382331, H52860, and AL040167, | |
| HTEAD32 | 933 | 504353 | 1-362 | 15-376 | AA382382, AA382236, and AC006305. | |
| HTEAD95 | 934 | 961232 | 1-451 | 15-465 | AA382376, AA382242, AA860376, and AC006445. | |
| HTEAF07 | 935 | 835805 | 1-312 | 15-326 | AA382453. | |
| HTEAF26 | 936 | 537271 | 1-301 | 15-315 | H53354, AA758164, AA448168, AI025042, AI829657, AA382854, AA382293, AA400727, | |
| | | | | | AA442764, and AA812451. | |
| HTEAG50 | 937 | 787500 | 1-297 | 15-311 | AA382498. | |
| HTEAK57 | 938 | 536769 | 1-411 | 15-425 | H09661, AW196402, AA760720, AA432259, AI539284, AI805310, AA781214, AW268890, | |
| | | | | | AI797250, AW235912, AA993321, AI017538, AW274549, AA884002, AI017535, AI217337, | |
| | | | | | AW014623, AA868679, AI808721, AI769073, N62418, AI364253, AA909554, AA382799, | |
| | | | | | AI917688, AA485055, AL080136, and AF079363. | |
| HTEAL28 | 939 | 963538 | 1-666 | 15-680 | AA429726, AA398189, H53400, AA382855, AA382294, AA383397, AA382295, AA382880, | |
| | | | | | and Z58143. | |
| HTEAP91 | 940 | 966113 | 1-746 | 15-760 | AA411883, AW444833, AA382955, AA889519, AI217183, and AA781849. | |
| HTEAR84 | 941 | 783328 | 1-237 | 15-251 | AA382996, AA180840, AI929073, AL133353, AF132966, and X66366. | |
| HTEAV43 | 942 | 927010 | 1-583 | 15-597 | AA770016, AW195558, AA757200, AW340425, AW182241, AA383009, and AI191751. | |
| HTEAY67 | 943 | 679390 | 1-433 | 15-447 | AA383288, AL044302, AA398247, AI916926, AI970265, AA399313, AI806241, AI208574, | |
| | | | | | AA994365, AA382290, and AL137385. | |
| HTEAZ54 | 944 | 793441 | 1-499 | 15-513 | AA383257, AA812455, and AL137538. | |
| HTEBC74 | 945 | 887782 | 1-308 | 15-322 | AA383466. | |
| HTEBD35 | 946 | 967959 | 1-303 | 15-317 | AA383417, and AA383322. | |
| HTEBD40 | 947 | 779134 | 1-457 | 15-471 | AA383323, AI950478, and AL121757. | |
| HTEBJ78 | 948 | 779265 | 1-1003 | 15-1017 | AA383746, AF012361, AI918814, AI638690, and AF088868. | |
| HTEBP39 | 949 | 742218 | 1-577 | 15-591 | AL040588, and AW386895. | |
| HTEB530 | 950 | 693377 | 1-326 | 15-340 | | |
| HTEB577 | 951 | 953904 | 1-592 | 15-606 | AA102609, AA903522, AA810166, AI887877, AA928872, AI912645, AI628759, AI652056, | |
| | | | | | AA372813, AA326308, AA313595, AA252658, AA491058, AA205648, AW375850, AA252657, | |
| | | | | | and AA082983. | |
| HTEBS80 | 952 | 854052 | 1-381 | 15-395 | AA399558. | |
| HTEBX62 | 953 | 508150 | 1-404 | 15-418 | AL133028, and AB033037. | |
| HTEBY08 | 954 | 960427 | 1-344 | 15-358 | M78063, AI560292, H50301, AA340759, AA340760, H45375, U09355, and AF096153. | |
| HTEBY15 | 955 | 526281 | 1-252 | 15-266 | | |
| HTEBY28 | 956 | 923026 | 1-609 | 15-623 | AB033083. | |
| HTEBY41 | 957 | 711523 | 1-230 | 15-244 | | |
| HTEBY61 | 958 | 967340 | 1-421 | 15-435 | AA725713, AL040570, R48431, and AC020663. | |
| HTEBZ21 | 959 | 958381 | 1-340 | 15-354 | AF193806. | |
| HTECA13 | 960 | 507053 | 1-393 | 15-407 | AA382976. | |
| HTECA16 | 961 | 764416 | 1-482 | 15-496 | AI017997. | |
| HTECA21 | 962 | 911369 | 1-688 | 15-702 | R20356, H09898, and R13239. | |
| HTECA32 | 963 | 947605 | 1-779 | 15-793 | | |
| HTECA51 | 964 | 708860 | 1-414 | 15-428 | AI479803, R89200, AA382300, AA700729, and AL035450. | |
| HTECA83 | 965 | 870692 | 1-446 | 15-460 | | |
| HTECB21 | 966 | 921070 | 1-359 | 15-373 | | |
| HTECC13 | 967 | 971673 | 1-301 | 15-315 | | |
| HTECC20 | 968 | 963353 | 1-993 | 15-1007 | AI521186, AI287890, AW006015, AI739342, AI536021, AI915154, D59412, AI382968, | |
| | | | | | AA723799, C14160, and R58305. | |
| HTECC37 | 969 | 508143 | 1-317 | 15-331 | | |
| HTECC38 | 970 | 844558 | 1-553 | 15-567 | AL042436, AI125824, AA437087, AI028669, AI024321, AW241753, AA400083, AA953011, | |
| | | | | | AA972296, AJ674705, and AL042437. | |
| HTECC66 | 971 | 790937 | 1-409 | 15-423 | AW375961, H12646, N46186, A1114644, AA133382, AA314626, T92864, AA482645, | |
| | | | | | AA203566, W20194, AA878228, W80608, AA699466, AA482495, Z25122, AA490161, | |
| | | | | | AA939181, AI635552, and AF113691. | |
| HTBCC80 | 972 | 796820 | 1-446 | 15-460 | AL079435, AW070333, AA868621, AI024608, AI208541, AA644440, AA992264, AI219709, | |
| | | | | | and AL078621. | |
| HTECC85 | 973 | 508138 | 1-337 | 15-351 | AA219332, and AW274715. | |
| HTECC96 | 974 | 959874 | 1-547 | 15-561 | AL039822. | |
| HTECD17 | 975 | 508108 | 1-397 | 15-411 | Z68165. | |
| HTECD18 | 976 | 973163 | 1-614 | 15-628 | T36107, T19204, AF012359, and T36109. | |
| HTBCD36 | 977 | 518124 | 1-421 | 15-435 | AL079683, T69495, AA377984, AA411067, W19966, AL135463, AA152011, AI080369, | |
| | | | | | AI928496, AI969686, AW150086, AW162108, AW245409, AW245596, AW087350, AI660688, | |
| | | | | | AW025370, AI986318, AA417624, AW073180, R65681, AA609692, AI568566, AF015913, and | |
| | | | | | AF167572. | |
| HTECD62 | 978 | 527207 | 1-242 | 15-256 | AI018016, AA927826, AA781742, AI206323, and AI699610. | |
| HTECD75 | 979 | 727422 | 1-410 | 15-424 | AA770236. | |
| HTECE09 | 980 | 620494 | 1-363 | 15-377 | AA074745, AA311579, AW369123, AW377808, AW369199, AA305128, AA279742, | |
| | | | | | AA382491, AA457232, AA350374, and AF119664. | |
| HTECE44 | 981 | 764830 | 1-349 | 15-363 | AI016755, AA626104, AI215071, AI968379, AA506126, AI340264, AI214879, AI653073, | |
| | | | | | AI208052, AW235456, and AA609852. | |
| HTECE45 | 982 | 790894 | 1-349 | 15-363 | AA702149, AI760177, W87526, AL042666, AA721639, AA721643, and R55626. | |
| HTECE69 | 983 | 522983 | 1-340 | 15-354 | AA209512, and AF084521. | |
| HTECE91 | 984 | 522984 | 1-283 | 15-297 | | |
| HTEDF13 | 985 | 522964 | 1-370 | 15-384 | | |
| HTEDF23 | 986 | 522966 | 1-319 | 15-333 | | |
| HTEDF57 | 987 | 964734 | 1-467 | 15-481 | AA206531, AA205273, AF134584, AF133655, R57172, AA370673, AL049834, AF144487, and | |
| | | | | | AF144488. | |
| HTEDF76 | 988 | 522973 | 1-371 | 15-385 | | |
| HTEDG16 | 989 | 925527 | 1-1246 | 15-1260 | AI341284, AA954970, AA971333, AI656306, AI341232, AI962769, AI970130, AI015246, | |
| | | | | | AI149570, AW236864, AI187784, AI824998, AI699532, AW087767, AA776716, AA758202, | |
| | | | | | H75549, AI282907, and AC003691. | |
| HTEDG34 | 990 | 761752 | 1-601 | 15-615 | A65985. | |
| HTEDH21 | 991 | 522764 | 1-307 | 15-321 | AW237166, and AI806759. | |
| HTEDH22 | 992 | 522765 | 1-412 | 15-426 | AA884595, AI004070, AI652358, AI933335, and AC006012. | |
| HTEDH54 | 993 | 957762 | 1-398 | 15-412 | AI142272, AW303480, and AL117355. | |
| HTEDI02 | 994 | 921243 | 1-693 | 15-707 | AW166305. | |
| HTEDI16 | 995 | 932292 | 1-830 | 15-844 | AI200759, N35603, and AI806635. | |
| HTEDI82 | 996 | 536477 | 1-536 | 15-550 | | |
| HTEDJ04 | 997 | 519940 | 1-151 | 15-165 | | |
| HTEDJ30 | 998 | 771404 | 1-576 | 15-590 | AA938733, AI830416, H99099, AI768985, AA410878, AA969071, AI220012, AI568973, | |
| | | | | | AI354321, AW130634, AI219538, AI280159, AI751123, AI693274, and Z61810. | |
| HTEDM08 | 999 | 960303 | 1-243 | 15-257 | AA383292, and AA010475. | |
| HTED031 | 1000 | 870711 | 1-279 | 15-293 | | |
| HTED051 | 1001 | 530592 | 1-336 | 15-350 | | |
| HTED059 | 1002 | 964379 | 1-277 | 15-291 | AL050310. | |
| HTEDP15 | 1003 | 870675 | 1-309 | 15-323 | AC008119. | |
| HTEDP31 | 1004 | 870548 | 1-526 | 15-540 | AC004674. | |
| HTEDP32 | 1005 | 839532 | 1-412 | 15-426 | | |
| HTEDP83 | 1006 | 536821 | 1-391 | 15-405 | AA382559. | |
| HTEDQ30 | 1007 | 530589 | 1-192 | 15-206 | AA470110. | |
| HTEDQ72 | 1008 | 795332 | 1-463 | 15-477 | AA424209. | |
| HTEDQ83 | 1009 | 530586 | 1-493 | 15-507 | | |
| HTEDR71 | 1010 | 761585 | 1-303 | 15-317 | AI003479, AJ003512, AJ003478, AJ239328, and AP000219. | |
| HTEDR91 | 1011 | 530451 | 1-363 | 15-377 | AA778548. | |
| HTEDU45 | 1012 | 870708 | 1-1168 | 15-1182 | AA401417, AI654822, AA131789, AA401393, AA040136, AA030057, AA040089, AW002428, | |
| | | | | | AA131796, AI809387, AI208853, AI798677, AI808134, AA028977, AA131846, and AI468240. | |
| HTEDU48 | 1013 | 932315 | 1-718 | 15-732 | | |
| HTEDV02 | 1014 | 921114 | 1-152 | 15-166 | | |
| HTEDX22 | 1015 | 523959 | 1-552 | 15-566 | T64832, Z45475, and F12119. | |
| HTEDX55 | 1016 | 530452 | 1-345 | 15-359 | AL035450. | |
| HTEDY38 | 1017 | 771505 | 1-128 | 15-142 | | |
| HTEDY54 | 1018 | 922964 | 1-845 | 15-859 | AI141062, AA779725, AA451707, AA453324, and AA954529. | |
| HTEDY57 | 1019 | 530580 | 1-314 | 15-328 | | |
| HTEEA03 | 1020 | 925399 | 1-227 | 15-241 | | |
| HTEEB18 | 1021 | 523962 | 1-537 | 15-551 | AA995142, AC005661, and Z65242. | |
| HTEEB33 | 1022 | 924818 | 1-601 | 15-615 | AL049780, and AC007055. | |
| HTEEC10 | 1023 | 963517 | 1-353 | 15-367 | | |
| HTEEE65 | 1024 | 530157 | 1-372 | 15-386 | AI243357, AI126440, AI693753, and AA783013. | |
| HTEEF31 | 1025 | 924840 | 1-333 | 15-347 | | |
| HTEEH31 | 1026 | 507814 | 1-279 | 15-293 | | |
| HTEEU23 | 1027 | 524059 | 1-314 | 15-328 | AL040261, AI525252, and AI025700. | |
| HTEEU52 | 1028 | 530199 | 1-331 | 15-345 | | |
| HTEEU88 | 1029 | 698315 | 1-355 | 15-369 | AA383576, T04917, T35202, AI422683, AI694269, AW341450, AW172298, AI253197, | |
| | | | | | AI392973, AI817020, AI675030, AW149563, AI830691, AI288333, AI420397, AI768573, | |
| | | | | | AW300444, AW271819, AI862664, AW165982, AI761400, AI826256, AI368689, AI697857, | |
| | | | | | AI889625, AI972408, AI357436, AI421517, AI651095, AI283759, AI634398, AI523543 | |
| | | | | | AI948511, AW196914, AI992087, AI417903, AI827278, AI927043, AW237591, AI831948, | |
| | | | | | AI831197, AI830712, AW085599, AI375540, AI300150, AI936396, AI082343, AI190058, | |
| | | | | | AI369782, AA937125, AI926819, AA872799, AI831516, AA502373, AI823952, AI262912, and | |
| | | | | | AL035461. | |
| HTEEU92 | 1030 | 960127 | 1-471 | 15-485 | AI005426. | |
| HTEEV53 | 1031 | 523957 | 1-298 | 15-312 | | |
| HTEEW73 | 1032 | 917206 | 1-862 | 15-876 | AI125404, AI247364, AI208217, AA910021, AI915307, and T11495. | |
| HTEEZ95 | 1033 | 530095 | 1-134 | 15-148 | | |
| HTEFJ53 | 1034 | 935982 | 1-210 | 15-224 | | |
| HTEFM31 | 1035 | 771355 | 1-449 | 15-463 | AL137385. | |
| HTEFN15 | 1036 | 959854 | 1-480 | 15-494 | | |
| HTEFO32 | 1037 | 529272 | 1-137 | 15-151 | | |
| HTEFO76 | 1038 | 770270 | 1-404 | 15-418 | | |
| HTEFP14 | 1039 | 659369 | 1-289 | 15-303 | AL080239, and AL030997. | |
| HTEFP50 | 1040 | 507219 | 1-398 | 15-412 | AI733211, AA977235, and AI793144. | |
| HTBFP61 | 1041 | 711399 | 1-339 | 15-353 | | |
| HTEF560 | 1042 | 836010 | 1-308 | 15-322 | Z84469. | |
| HTEFU46 | 1043 | 920604 | 1-182 | 15-196 | | |
| HTEFW55 | 1044 | 787550 | 1-720 | 15-734 | Z20330. | |
| HTEFW56 | 1045 | 528019 | 1-344 | 15-358 | | |
| HTEFW78 | 1046 | 961061 | 1-327 | 15-341 | AA416708. | |
| HTEFX53 | 1047 | 842047 | 1-301 | 15-315 | | |
| HTEGA13 | 1048 | 656077 | 1-260 | 15-274 | AA304950, and AC005237. | |
| HTEGA17 | 1049 | 964198 | 1-1718 | 15-1732 | AA861754, AI041049, AA974148, AI025824, AI015271, AA973722, AI262750, AF012394, | |
| | | | | | H44966, H45019, H65081, H65127, H65128, H65081, N30790, N32825, N41565, AA021000, | |
| | | | | | AA037708, AA158991, AA158990, AA552704, AA581540, AA583387, AA594383, AA568601, | |
| | | | | | AA639650, AA962753, AI076864, C01177, C17452, AA610069, AA677739, AA678002, | |
| | | | | | Z17891, Z17844, Z17858, D29489, D31204, D31401, D31430, AI147272, AI348141, AI434148, | |
| | | | | | AI446782, AI401705, AI473505, AI475244, AI560742, AJ565331, AI479120, AI567547, | |
| | | | | | AI569204, AI570723, AI571642, AI521092, AI587097, AI619824, AI619826, AI683822, | |
| | | | | | AI745345, AI700348, AI862997, AI891040, AI805378, AI805561, AI814808, AI917522, | |
| | | | | | AI924990, AI925791, AI925824, AI926709, AI932677, AW008971, AW025107, AW028354, | |
| | | | | | AW028895, and AW044371. | |
| HTEGA43 | 1050 | 715583 | 1-293 | 15-307 | | |
| HTEGA47 | 1051 | 503300 | 1-305 | 15-319 | AA469976, and AA382993. | |
| HTEGD11 | 1052 | 967698 | 1-454 | 15-468 | AI739081. | |
| HTEGE44 | 1053 | 528017 | 1-460 | 15-474 | | |
| HTBGF78 | 1054 | 614242 | 1-394 | 15-408 | AA320491, AA461257, T96959, AA620998, AI803092, AI598264, AI802911, AA613500, | |
| | | | | | AI701066, AA873354, AA976002, AI337726, AI401363, AA889162, AW449691, AA460950, | |
| | | | | | AI435494, T91835, N47591, T08650, AI672896, AI015106, AL122076, AF082179, AF173643, | |
| | | | | | and AF088884. | |
| HTEGF95 | 1055 | 796660 | 1-264 | 15-278 | AI809182, and AI014526. | |
| HTEGG07 | 1056 | 954115 | 1-450 | 15-464 | | |
| HTEGG61 | 1057 | 528007 | 1-203 | 15-217 | | |
| HTEGK51 | 1058 | 520046 | 1-137 | 15-151 | | |
| HTEGM38 | 1059 | 675087 | 1-350 | 15-364 | AA496105, AL038451, AA020916, AA214222, AL038833, AW239553, AL038903, AL036026, | |
| | | | | | W94506, H11258, H19187, T09424, AW163336, AA084982, AA853848, AA852612, | |
| | | | | | AA134785, T30709, T31235, R13838, T30596, T31277, T32509, F08351, T30996, R61645, | |
| | | | | | AI002404, AA281162, N33973, W63690, AA056138, AA400554, AA224046, AW160678, | |
| | | | | | AA252722, AA308905, H37946, AA159207, AA337592, H15180, N36548, T78050, AI214139, | |
| | | | | | H45908, AL036764, AL038918, AA486190, N99529, AA176166, T29922, AA173378, | |
| | | | | | AI929392, AA993699, T32147, W92551, AA314753, W20343, AI028519, W52361, R12459, | |
| | | | | | R17656, D30841, D56168, AA018894, AW375983, AA318870, R57052, AA083038, AA018506, | |
| | | | | | AA401854, W94711, H82178, AB014888, AB015799, AF075601, AF060703, AB015798, | |
| | | | | | AF080569, AB028854, and AF035962. | |
| HTEGN63 | 1060 | 520037 | 1-196 | 15-210 | AB007131, AP001052, and AP001051. | |
| HTEGO05 | 1061 | 932583 | 1-1086 | 15-1100 | AA059465, AA059211, AA731209, AA236961, T86500, T87461, AL024498, and M35862. | |
| HTEGQ21 | 1062 | 923059 | 1-419 | 15-433 | AA382826,AA382492,AI917341, AI967930, AI990328, AI041198, AW135194, AI936466, | |
| | | | | | AI990195, AI336861, AI825657, AA609860, AI652939, AI950262, and AI968690. | |
| HTEGQ74 | 1063 | 573865 | 1-358 | 15-372 | | |
| HTEGR56 | 1064 | 959871 | 1-186 | 15-200 | | |
| HTEGR88 | 1065 | 871611 | 1-405 | 15-419 | AL133660. | |
| HTEG516 | 1066 | 527914 | 1-340 | 15-354 | | |
| HTEG534 | 1067 | 458520 | 1-391 | 15-405 | D80168, D59627, C14298, D51079, D59695, D52291, D80949, AW360780, D59503, D51213, | |
| | | | | | C14227, D80290, C14389, AW377669, AW352172, T11417, D80258, D80064, D58246, | |
| | | | | | D59889, D52059, D45273, D80014, D80391, AW377661, D59787, D80196, D57483, T03048, | |
| | | | | | C16955, AI557751, D59484, AI535686, Z33452, C06015, AI557774, T02974, C04682, | |
| | | | | | AA514184, H67854, H67866, AI525216, AI525228, D51053, AI535961, D80251, N66429, | |
| | | | | | AI525969, AI525238, AI525222, AI525227, AB010386, AR016808, U37689, I81198, X64588, | |
| | | | | | I82446, AB019242, and A47134, | |
| HTEGS93 | 1068 | 506653 | 1-395 | 15-409 | | |
| HTEGT29 | 1069 | 870638 | 1-463 | 15-477 | AA610046, AA725767, AA609763, AA694482, AI674115, and AI222344. | |
| HTEGT33 | 1070 | 716783 | 1-505 | 15-519 | AA459933, and AA460208. | |
| HTEGU13 | 1071 | 520041 | 1-380 | 15-394 | AA725598, AA437008, AA758847, and AA383617. | |
| HTEGU32 | 1072 | 524053 | 1-492 | 15-506 | AI208922, AF012358, AC000359, AF176024, and AC000357, | |
| HTEGU62 | 1073 | 573885 | 1-307 | 15-321 | | |
| HTEGU93 | 1074 | 764831 | 1-721 | 15-735 | AL037365, AI968379, AA397716, AI016755, AI340264, AA626104, AA435927, AA506126, | |
| | | | | | and AL133624. | |
| HTEGV08 | 1075 | 959888 | 1-425 | 15-439 | AP000275, AP000105, AP000037, and AC002452. | |
| HTEGV60 | 1076 | 822954 | 1-484 | 15-498 | AA210913. | |
| HTEGV84 | 1077 | 870240 | 1-759 | 15-773 | AI809518, AA725632, AA400546, AW303510, AA621301, AA400438, AI184200, AI016652, | |
| | | | | | AI698674, AA758091, AA757258, AA725799, and AA705799. | |
| HTEGW41 | 1078 | 573880 | 1-406 | 15-420 | AF169385, and AF149310. | |
| HTEGW94 | 1079 | 794350 | 1-526 | 15-540 | | |
| HTEGX74 | 1080 | 783829 | 1-544 | 15-558 | AA789286, AI339366, AI656082, AA861573, AA416690, AI808240, AA889130, and | |
| | | | | | AI216654. | |
| HTEGY01 | 1081 | 917214 | 1-438 | 15-452 | | |
| HTEGY85 | 1082 | 573849 | 1-300 | 15-314 | AL080197, AP000346, and AL022324. | |
| HTEHB07 | 1083 | 870707 | 1-336 | 15-350 | AA383326, and AI672505, | |
| HTEHC20 | 1084 | 526704 | 1-313 | 15-327 | Z98752. | |
| HTEHC47 | 1085 | 973071 | 1-723 | 15-737 | AA436088, AI149899, AI002083, AA411806, AA470059, AA781801, AA416972, AA435988, | |
| | | | | | AA758635, and AA707529. | |
| HTEHC60 | 1086 | 965998 | 1-610 | 15-624 | | |
| HTEHC78 | 1087 | 573882 | 1-332 | 15-346 | | |
| HTEHE60 | 1088 | 795264 | 1-551 | 15-565 | AI018790, AA885492, AI377750, AW340453, and AC007114. | |
| HTEHE67 | 1089 | 784926 | 1-677 | 15-691 | AA421403, AA411967, AA412565, AI825585, AW136990, AI962705, AI825455, and | |
| | | | | | AA889516. | |
| HTEHE78 | 1090 | 932312 | 1-357 | 15-371 | AA642104, AA664126, N66948, AI753334, N70325, AA601713, AA320178, H53040, | |
| | | | | | AA577770, H53039, AA515742, AI222360, AA837716, AL109628, AC006064, AL022721, | |
| | | | | | AP001052, AC004694, AL109801, AL117258, AL109759, AC004884, AC005476, Z95116, | |
| | | | | | AL022159, AC005015, AC003101, AL035086, Z99943, U91323, U91318, AC007773, | |
| | | | | | AC005261, AC002350, AL031289, AC005081, AC005529, U73640, AC005552, AC007040, | |
| | | | | | AL133244, AC006163, AC007285, AC007057, AL121655, AC006324, AR036572, AP000092, | |
| | | | | | AC005829, AL132777, AP000512, AC000025, AF107257, AC005520, AF107258, AP000236, | |
| | | | | | AC004814, AC006581, AC010168, AC005790, AL049759, AC005519, AL022316, AC004100, | |
| | | | | | AL031427, AC007688, AL031584, AC009516, AC006449, AC006441, AC005387, AP000501, | |
| | | | | | AL121652, AP000510, AL049539, U91321, AC003071, AC004908, AC005921, AD001527, | |
| | | | | | AC005800, Z92542, AL034548, AF196969, AC004552, AC009181, AC005971, AC004966, | |
| | | | | | AC004815, AL031681, AC007617, AF196779, AC004707, AB023050, Z83844, AC002312, | |
| | | | | | Z82190, AC007172, AC004990, AC002565, AC007386, AF134726, AL034549, Z82208, | |
| | | | | | Z95329, AC005037, AC007637, AC005162, AL031680, AL022165, AF026069, Z97184, | |
| | | | | | AC006966, and AC003086. | |
| HTEHE91 | 1091 | 790342 | 1-520 | 15-534 | AI653740, AI223017, AA393574, AP000346, AL022324, and AL080197 | |
| HTEHF13 | 1092 | 667224 | 1-319 | 15-333 | | |
| HTEHF66 | 1093 | 836999 | 1-424 | 15-438 | AL137678, and AL109657. | |
| HTEHG44 | 1094 | 933624 | 1-682 | 15-696 | AA446074, AJ224924, and AA868166. | |
| HTEHJ06 | 1095 | 935984 | 1-817 | 15-831 | AA394226, AA398139, AA025620, AA451812, AA454022, and AC012599. | |
| HTEHI14 | 1096 | 526687 | 1-444 | 15-458 | | |
| HTEHJ54 | 1097 | 533960 | 1-338 | 15-352 | R19058, Z44007, F06961, and F05366. | |
| HTEHJ62 | 1098 | 922559 | 1-390 | 15-404 | AI202243, AA687318, and AI184808. | |
| HTEHI93 | 1099 | 870629 | 1-317 | 15-331 | | |
| HTEHJ64 | 1100 | 530749 | 1-235 | 15-249 | | |
| HTEHK40 | 1101 | 660875 | 1-317 | 15-331 | | |
| HTEHK70 | 1102 | 771432 | 1-430 | 15-444 | | |
| HTEHK81 | 1103 | 573866 | 1-414 | 15-428 | | |
| HTEHL96 | 1104 | 573859 | 1-390 | 15-404 | AA926746. | |
| HTEHO56 | 1105 | 787521 | 1-664 | 15-678 | AL042716, AI634081, AI656008, AI383457, AA298264, AW274940, AW183456, AI824911, | |
| | | | | | H48934, and AI015007. | |
| HTEHP02 | 1106 | 920625 | 1-429 | 15-443 | | |
| HTEHP20 | 1107 | 967443 | 1-379 | 15-393 | AA393345, AI018421, AI018412, and AI621296. | |
| HTEHP50 | 1108 | 531505 | 1-219 | 15-233 | | |
| HTEHP60 | 1109 | 573853 | 1-439 | 15-453 | | |
| HTEHP67 | 1110 | 751866 | 1-425 | 15-439 | AA429653, and AL137385. | |
| HTEHP80 | 1111 | 573830 | 1-354 | 15-368 | AL042482. | |
| HTEHR83 | 1112 | 573841 | 1-260 | 15-274 | AW117582, and AW275130, | |
| HTEH519 | 1113 | 529280 | 1-324 | 15-338 | | |
| HTEHU20 | 1114 | 573813 | 1-345 | 15-359 | AA625735, and AI205755. | |
| HTEHU68 | 1115 | 786378 | 1-362 | 15-376 | AI808748, and AA868749. | |
| HTEHU73 | 1116 | 870083 | 1-377 | 15-391 | | |
| HTEHV72 | 1117 | 920610 | 1-356 | 15-370 | AA449587, Z62660, and Z62661. | |
| HTEHV86 | 1118 | 785652 | 1-454 | 15-468 | AB007926. | |
| HTEHW03 | 1119 | 924832 | 1-439 | 15-453 | | |
| HTEHW21 | 1120 | 760552 | 1-286 | 15-300 | H99838, AL037447, H98172, R99332, and N73909. | |
| HTEHX03 | 1121 | 924826 | 1-502 | 15-516 | AI198906, AI743542, AI807563, AI392615, AI813744, AI150517, and AI150519. | |
| HTEHX32 | 1122 | 772643 | 1-440 | 15-454 | AI699984, AA470157, AI018717, AI917728, AA398746, AA393334, AI216704, AA868127, | |
| | | | | | and AL049742. | |
| HTEHX51 | 1123 | 668553 | 1-200 | 15-214 | AC004148. | |
| HTEHX92 | 1124 | 527167 | 1-477 | 15-491 | | |
| HTEIA60 | 1125 | 859130 | 1-442 | 15-456 | AA594897, Z46029, AA316462, T27008, AA306099, F12789, R05542, AA635902, T75086, | |
| | | | | | T35592, AW378962, R28411, AA740171, T52620, AL021707, and AJ236698. | |
| HTEIA80 | 1126 | 721831 | 1-265 | 15-279 | | |
| HTEIB14 | 1127 | 963099 | 1-700 | 15-714 | AI126171, AW172978, AI802445, AI811298, AI807074, AI635206, W96514, AI624106, | |
| | | | | | AI190433, AI810701, AL043767, H43143, AI271523, AI911113, AA644026, AI803788, | |
| | | | | | AI566934, AI187824, AA043579, AI869010, AI015017, and R55050. | |
| HTEIF40 | 1128 | 958355 | 1-578 | 15-592 | AI806847, AA431560, AI219847, AA913948, AI633873, AI638029, AW003193, AI990760, | |
| | | | | | AA861291, AI190550, and AI187284. | |
| HTEIF68 | 1129 | 573828 | 1-263 | 15-277 | | |
| HTEJG32 | 1130 | 699470 | 1-313 | 15-327 | AA383150. | |
| HTEIH70 | 1131 | 573826 | 1-186 | 15-200 | | |
| HTEJJ17 | 1132 | 520113 | 1-425 | 15-439 | AF088868. | |
| HTEIJ41 | 1133 | 712520 | 1-347 | 15-361 | AA037622, AA151557, AA884833, and AI027960. | |
| HTEIJ73 | 1134 | 958241 | 1-322 | 15-336 | | |
| HTEJJ77 | 1135 | 772402 | 1-55 | 15-69 | | |
| HTEIK11 | 1136 | 967431 | 1-465 | 15-479 | AA370836. | |
| HTEIK70 | 1137 | 530454 | 1-107 | 15-121 | | |
| HTEIK90 | 1138 | 789121 | 1-383 | 15-397 | AL133625, and AL050310. | |
| HTEIL07 | 1139 | 953803 | 1-445 | 15-459 | H55431, and AL031843. | |
| HTEIL48 | 1140 | 523681 | 1-302 | 15-316 | | |
| HTEIL70 | 1141 | 520045 | 1-515 | 15-529 | AA383469, and AW340027. | |
| HTEIL71 | 1142 | 760551 | 1-418 | 15-432 | AW374031, AI376865, AA610337, AL031277, AC004159, AL035073, Z83838, AC011422, and | |
| | | | | | AL031286. | |
| HTEIN68 | 1143 | 753210 | 1-333 | 15-347 | | |
| HTEIN95 | 1144 | 839884 | 1-602 | 15-616 | AI638483. | |
| HTEIO02 | 1145 | 920622 | 1-365 | 15-379 | AW188204, and AL078587. | |
| HTEJO12 | 1146 | 653244 | 1-322 | 15-336 | | |
| HTEIO28 | 1147 | 573803 | 1-344 | 15-358 | | |
| HTEIP88 | 1148 | 941155 | 1-253 | 15-267 | | |
| HTEIP92 | 1149 | 523892 | 1-356 | 15-370 | | |
| HTEIQ74 | 1150 | 765794 | 1-576 | 15-590 | AA905565. | |
| HTEIR33 | 1151 | 928058 | 1-504 | 15-518 | AI041198, AW135194, AI336861, AI917341, AI825657, AI936466, AI967930, AI990195, | |
| | | | | | AI990328, AA609860, AI652939, AI950262, AI968690, AW043968, AI695938, AI918858, | |
| | | | | | AI207159, AI961172, AI635425, AA382492, AA382826, and Z54930. | |
| HTEIS65 | 1152 | 573775 | 1-444 | 15-458 | | |
| HTEIU75 | 1153 | 779163 | 1-535 | 15-549 | | |
| HTEIU92 | 1154 | 870652 | 1-390 | 15-404 | | |
| HTEIV54 | 1155 | 922027 | 1-859 | 15-873 | AA608560, AW119083, AI805320, AW241508, AA478132, AI935179, AA478131, AW241453, | |
| | | | | | AI148017, AA496125, AI159761, AI290727, AA757496, AI039534, AA410246, AW015244, | |
| | | | | | AA991785, AI299213, AI191790, F32781, H53433, AA708313, AA757725, AA987362, | |
| | | | | | AI018579, AI824880, AI989666, AI950419, H53434, AI703120, AA436358, AA410593, | |
| | | | | | AA410594, AI205656, AA404329, AA404331, AI147261, AA935676, AA708988, and | |
| | | | | | AF163095. | |
| HTBIV86 | 1156 | 784657 | 1-476 | 15-490 | AA884237, and Z66028. | |
| HTEIW27 | 1157 | 829698 | 1-790 | 15-804 | AL040266, AA045127, H71355, AA070703, AA036715, AA325559, AA043642, AA196645, | |
| | | | | | H94227, AA305440, AA383234, H61672, H06121, R60099, AL042836, AI016643, AW410572, | |
| | | | | | AL042837, and AJ018804. | |
| HTEJW37 | 1158 | 573891 | 1-340 | 15-354 | | |
| HTEJX28 | 1159 | 836011 | 1-725 | 15-739 | AA878363, AL040461, AI806762, AL040944, N48708, AA961620, AI015474, AI122718, | |
| | | | | | AI674958, AI925550, AA316256, AA846418, AI270517, AA383573, AW087494, Z40157, | |
| | | | | | AA915976, AA927218, AA912892, AI216366, D20536, AL109748, and AL078614. | |
| HTEJX85 | 1160 | 864251 | 1-364 | 15-378 | AI143096, AA476476, AF112968, and AF133914. | |
| HTEIY52 | 1161 | 963536 | 1-365 | 15-379 | | |
| HTEJY69 | 1162 | 577783 | 1-342 | 15-356 | AA860220, AA373213, AA095300,AA294896, AA056395, AW369291, AA081316, AA081068, | |
| | | | | | AA258633, AA491648, T78543, AI565548, T68394, D81309, AA303509, C02623, AA552624, | |
| | | | | | C15625, W65448, and H56519. | |
| HTETY80 | 1163 | 955242 | 1-640 | 15-654 | AI206714, AI962380, AW139167, AI341507, AW197295, AF146793, and AC004673. | |
| HTEIZ76 | 1164 | 523764 | 1-373 | 15-387 | | |
| HTEJB20 | 1165 | 528015 | 1-336 | 15-350 | AW119138, AA508616, and AC000386. | |
| HTEJB25 | 1166 | 530590 | 1-364 | 15-378 | AI804160, AI287878, AA400787, AI003207, AF176315, AF042089, AC007040, AC000385, | |
| | | | | | and AC004967. | |
| HTEJB81 | 1167 | 870644 | 1-326 | 15-340 | AC005230, andAL031230. | |
| HTEJC28 | 1168 | 573774 | 1-292 | 15-306 | | |
| HTEJC95 | 1169 | 772989 | 1-412 | 15-426 | | |
| HTEJE15 | 1170 | 908360 | 1-577 | 15-591 | AI217144, AA399611, AA398976, AI025074, AA758412, AW449170, AI953070, AI337133, | |
| | | | | | AI654417, AA608877, AI969018, AA400066, AA401568, AL137462, and 575275. | |
| HTEJE50 | 1171 | 520049 | 1-410 | 15-424 | AA383469. | |
| HTEJF45 | 1172 | 942476 | 1-704 | 15-718 | AA927155, AI989936, AI870479, AW196902, and AW137017. | |
| HTEJG24 | 1173 | 526278 | 1-432 | 15-446 | | |
| HTEJJ43 | 1174 | 774243 | 1-505 | 15-519 | | |
| HTEJL21 | 1175 | 573742 | 1-460 | 15-474 | AA913820, AW138390, W37338, AI139797, AW135343, AA776708, AA621016, AW274952, | |
| | | | | | AI623224, AI125250, AA778537, AI208106, AI637631, AW341652, AA776715, AI204215, | |
| | | | | | AA609761, AI671266, AI023591, AI950399, AA758819, AW104292, AI188024, AW058598, | |
| | | | | | AA460183, AI969065, W37337, and AA824405, | |
| HTEJM56 | 1176 | 952255 | 1-392 | 15-406 | AL042395, AA504349, AI693474, AI125391, AL041671, AW168041, AA838043, AI990015, | |
| | | | | | AI864457, AI149664, AI738586, AL041569, AW294188, AI805280, AA579771, AW273185, | |
| | | | | | AI653680, AW197733, AI138789, AI699335, AI475427, AA883961, AI203057, AI968077, | |
| | | | | | AA383594, AA976749, AI648684, AI952360, AI680162, AI590021, AW076093, AW264516, | |
| | | | | | AI073952, AI568870, AI564719, AI623828, AA808060, AI683684, AI866457, AI628292, | |
| | | | | | AW196868, AW075413, AI590686, AI867042, AI922365, AW081255, AI285586, AI249375, | |
| | | | | | AI610293, AW103878, AI915576, AW403717, AI475455, AI811860, AI282903, AI539808, | |
| | | | | | AI873644, AI174394, AI469811, AI831140, AI872910, AI690585, AI539829, AI863191, | |
| | | | | | AI613270, AI625464, AI281660, AI870187, AI886022, AI269862, AI624293, AI920833, | |
| | | | | | AI680498, AI934259, AI610114, AW193026, AL121270, AI289337, AW075657, AI364788, | |
| | | | | | AI383919, AW168723, AI922901, AI636719, AW073697, AI863321, AI270055, AI633073, | |
| | | | | | AI624543, AI610645, AI702433, AI611743, AI690312, AL039276, AI689420, AL045500, | |
| | | | | | AW080992, AI687065, AI432040, AL048656, AI819326, AW238730, AI445976, AI744256, | |
| | | | | | AA572758, AL045163, AI627880, AI866741, AI805385, AI612721, AL119791, AW079159, | |
| | | | | | AI343059, AI619716, AI828731, AI612759, AW089179, AW151729, AI696819, AI870192, | |
| | | | | | AI567351, AI349933, AI934011, AI280661, AI699011, AI537617, AI919345, AI251830, | |
| | | | | | AW088899, AI366549, AI539153, AW088144, AL036214, AI866608, AI859464, AI866585, | |
| | | | | | AI499986, AW149236, AW083804, AI862144, AW170734, AI696626, AL040241, AI554821, | |
| | | | | | AI589993, AW059713, AI921082, AL038445, AW168425, AI345111, AI446373, AI358701, | |
| | | | | | AL036638, AI537677, AI621179, AI433157, AL041150, AI537837, AI159837, AI874351, | |
| | | | | | AL038882, AI520785, AI609059, AI344817, AI539771, AI798258, AI922577, AI471361, | |
| | | | | | AI500659, AI288285, AI889168, AI344935, AI866573, AW068845, AW103228, AL045620, | |
| | | | | | AI476109, AI815232, AI801325, AI500523, AI573060, AW302965, AA640779, AI345608, | |
| | | | | | AI582932, AI284517, AA613907, AI500706, AI445237, AI491776, AI758613, AW151138, | |
| | | | | | AL042628, AI521560, AI889189, AI500662, AI284509, AI439452, AI857724, AW148320, | |
| | | | | | AI633493, AW169653, AI434256, AI344785, AI249962, AL041772, AI609677, AI888661, | |
| | | | | | AI811344, AI284513, AI620284, AI888118, AI349614, AI872051, AI589273, AI866510, | |
| | | | | | AI569583, AW302992, AI801112, AW088903, AI440252, AI800152, AI963068, AI569632, | |
| | | | | | AI274769, AI348854, AL036664, AW023590, AI608676, AI345471, AW088134, AA579232, | |
| | | | | | AA494167, AW075084, AI468872, AA420722, AI537307, AL120853, AL040243, AI251205, | |
| | | | | | AI924971, AI287489, AI698401, AI524607, AI683714, AL043632, AL043326, AI538342, | |
| | | | | | N71180, AI433976, AC003688, AF096834, AF073955, AF073954, AL117585, S68736, A08916, | |
| | | | | | A08910, AR000496, U39656, A08909, I48978, I89947, A08913, U72620, I89931, I49625, | |
| | | | | | AL049382, AF090896, AL050060, I26207, AL137556, AL137283, AF113676, AL137538, | |
| | | | | | AF104032, AB019565, A93350, X93495, AF158248, AL122093, AL137527, AL050393, | |
| | | | | | AL122121, I48979, AF119337, U35846, AL122123, AL137557, I33392, AJ242859, X84990, | |
| | | | | | E07108, AL050138, AF113689, I03321, AF118070, U00763, AR059958, AF026124, AF090903, | |
| | | | | | AL133568, AL080124, A08912, AL117583, E15569, AL050116, AL050146, AL117435, | |
| | | | | | Y14314, AL049452, U67958, AL122098, AF185576, AL080137, AJ012755, A93016, | |
| | | | | | AF078844, E03348, Y11587, I42402, AL110221, AF125949, AF113013, AL137463, AF081195, | |
| | | | | | AL122110, I09360, AL133093, AL137648, AJ238278, AF017152, AL080127, AL133077, | |
| | | | | | AL050108, AI2297, AL133104, AF113690, AL049466, Y16645, AL050024, AL110196, | |
| | | | | | AJ000937, AL133080, AL122050, AL049430, X70685, AL049314, E02349, AL137550, | |
| | | | | | AL117457, AL133016, S78214, AF177401, AL117440, AL110225, AL117394, AL133606, | |
| | | | | | AF079765, X63574, X96540, AL133560, AF111112, AF113019, X82434, AF090934, | |
| | | | | | AF067728, A65341, A77033, A77035, AF087943, AF113699, AL137560, AL137271, Z82022, | |
| | | | | | AF183393, AF090901, AL133072, X65873, A03736, AL137521, U91329, AF106862, | |
| | | | | | AL050277, AL133067, AL122049, A90832, U96683, AF113691, AF017437, AF097996, | |
| | | | | | Y11254, AL080159, AL133640, AL133557, AL133075, AL050149, AF125948, AF146568, | |
| | | | | | U80742, AL133113, AL133565, AL049464, AR011880, A58524, A58523, AF113694, | |
| | | | | | AF113677, AF118064, AF111851, AL137459, AL096744, AF061943, AF026816, AF091084, | |
| | | | | | AF003737, AR038854, AL049300, AF118094, AF090943, Y10080, AL117460, Y09972, | |
| | | | | | L31396, AL133014, U42766, L31397, X72889, E07361, AL049938, AL049283, AL122111, | |
| | | | | | AF153205, AF090900, AL110280, X98834, E08263, E08264, AJ006417, I00734, AL110197, | |
| | | | | | AF132676, E00617, E00717, E00778, AF162270, S61953, AF061836, AL050172, AL137705, | |
| | | | | | U58996, M86826, X92070, A08908, L30117, A07647, E02221, AL080074, Z72491, AI8777, | |
| | | | | | AF106827, AL133098, E08631, AF008439, Y10655, AR038969, AF051325, AL137523, | |
| | | | | | M30514, AF079763, AF057300, AF057299, AL137476, AL137526, A45787, X62580, | |
| | | | | | AF210052, I17767, AF081197, AL137429, E05822, AL122045, AL133031, I96214, AR034830, | |
| | | | | | AL122118, I41145, AL080086, AR013797, AL137273, E04233, AF111849, U68387, U78525, | |
| | | | | | AL137480, S76508, X87582, Z37987, AL137533, and Y07905. | |
| HTEJN10 | 1177 | 958389 | 1-412 | 15-426 | AA397714, and AI688816. | |
| HTEJN49 | 1178 | 558383 | 1-244 | 15-258 | AL033527. | |
| HTEJN96 | 1179 | 573845 | 1-341 | 15-355 | | |
| HTEJP10 | 1180 | 914785 | 1-406 | 15-420 | AA173098, AA330453, N72370, AA382609, D82507, AA305139, AA376308, AA319043, | |
| | | | | | AA360655, AA204809, N47351, L48818, T97397, H74112, AA303102, N98390, T85235, | |
| | | | | | R92534, AI400282, W78773, AA226439, N77177, AA135383, AA089951, N28003, AA094694, | |
| | | | | | AA036797, and D82374. | |
| HTBJP66 | 1181 | 916481 | 1-697 | 15-711 | AW402599, AA402458, N28458, W04863, AA683291, C17218, AA452695, AA321934, | |
| | | | | | AA325890, AA148436, AA083939, W95796, AA203350, AA373216, H87410, R96313, N29206, | |
| | | | | | W60562, N55788, W32702, N40125, AA319796, T27329, AA360583, H49227, AA402577, | |
| | | | | | AA027923, AA115050, AA150348, AA496191, W05840, N35260, AA382795, AA210879, | |
| | | | | | AA346660, AI902181, AF172940, AF151885, and AC007298. | |
| HTEJP71 | 1182 | 767955 | 1-616 | 15-630 | H59767, AA252573, R52747, AW303359, AW151618, AA811707, AA939308, AI205601, and | |
| | | | | | X80437. | |
| HTEJT37 | 1183 | 530596 | 1-339 | 15-353 | AI092208. | |
| HTEJT74 | 1184 | 676254 | 1-438 | 15-452 | AA393248, AA393292, AI796754, AA293815, AA459841, AI075905, AW137492, AI652522, | |
| | | | | | AI217933, AI150346, AI694956, AA399502, AA398164, AI024099, AA719008, AA629029, | |
| | | | | | AA861041, AA402463, AA435622, R24468, R66361, AA688372, AF081250, and AF081249. | |
| HTEJU30 | 1185 | 573823 | 1-304 | 15-318 | AC000093. | |
| HTEJV62 | 1186 | 694525 | 1-325 | 15-339 | AA813665, AI025041, and AI215603, | |
| HTEJX78 | 1187 | 806395 | 1-411 | 15-425 | AA496111, AW138142, AA306268, AA417106, AA382596, AI027705, AA383788, AI824924, | |
| | | | | | AA382469, AA812546, AA382920, AI183592, AA383156, and AI828862. | |
| HTEJY21 | 1188 | 530156 | 1-426 | 15-440 | AI695191. | |
| HTEJY27 | 1189 | 685272 | 1-239 | 15-253 | AA853991, AA778707, AW182416, AA634398, and AA609856. | |
| HTEJZ26 | 1190 | 523818 | 1-262 | 15-276 | AW247046, AA401701, and AA398161. | |
| HTEKC07 | 1191 | 920925 | 1-389 | 15-403 | AW087802. | |
| HTEKC12 | 1192 | 815975 | 1-345 | 15-359 | AI539455, AI218279, AI348415, AW408773, AW340548, AI368160, AA894774, AA937067, | |
| | | | | | and AW364691. | |
| HTEKD04 | 1193 | 519938 | 1-418 | 15-432 | | |
| HTEKE41 | 1194 | 974044 | 1-735 | 15-749 | AI091681, AC009405, AC003683, AJ239321, AC007253, AL009173, AL030995, Z99572, and | |
| | | | | | AL109853. | |
| HTEKE46 | 1195 | 870084 | 1-1112 | 15-1126 | AI125483, W77994, AI161017, W73951, AI250771, AA777158, W94063, AA912611 | |
| | | | | | AA339877, AI265865, and AA339786. | |
| HTEKE80 | 1196 | 790381 | 1-523 | 15-537 | | |
| HTEKF04 | 1197 | 774260 | 1-732 | 15-746 | AA609512, AW074860, AW119172, AA626238, AA759162, AA609090, AA421396, | |
| | | | | | AW070485, AA421292, AW303549, and AC007999. | |
| HTEKF24 | 1198 | 573750 | 1-412 | 15-426 | AF001846. | |
| HTEKF35 | 1199 | 573749 | 1-253 | 15-267 | | |
| HTEKF68 | 1200 | 772997 | 1-567 | 15-581 | AW263561, AW183891, AI005584, AJ216442, AA983878, AA815385, AA868890, and | |
| | | | | | AJ004495. | |
| HTBKI01 | 1201 | 917176 | 1-416 | 15-430 | | |
| HTEKI70 | 1202 | 503039 | 1-686 | 15-700 | AI830436, AA187445, AA383192, H91927, AI640587, and AI989949. | |
| HTEKJ48 | 1203 | 530588 | 1-235 | 15-249 | | |
| HTEKM14 | 1204 | 745257 | 1-312 | 15-326 | | |
| HTEKO49 | 1205 | 723148 | 1-383 | 15-397 | AA699599, AI275162, N27054, R09201, and AC006211. | |
| HTEKQ26 | 1206 | 870627 | 1-314 | 15-328 | | |
| HTEKQ85 | 1207 | 784444 | 1-555 | 15-569 | | |
| HTEKR75 | 1208 | 870555 | 1-412 | 15-426 | | |
| HTEKS15 | 1209 | 529273 | 1-414 | 15-428 | | |
| HTEKS20 | 1210 | 846714 | 1-1063 | 15-1077 | AI936596, AA868353, AI797296, AA725553, AI221970, AA429551, AA428462, AA629305, | |
| | | | | | AA629047, AA431190, AI073397, AW235895, AI123443, AI808267, AA609412, AI914363, | |
| | | | | | AA953895, AI214385, AA431516, AA911681, AA781953, AI825106, AA298758, AI215028, | |
| | | | | | AA909534, AA723768, D10393, and S63991. | |
| HTEKS21 | 1211 | 506651 | 1-333 | 15-347 | | |
| HTEKS76 | 1212 | 767658 | 1-495 | 15-509 | AI990484, AI917746, AW182169, AI216456, AA723888, AI018419, and AA969884. | |
| HTEKX06 | 1213 | 935945 | 1-426 | 15-440 | | |
| HTEKX08 | 1214 | 959876 | 1-490 | 15-504 | AL042392, AI147451, AA758821, AW450252, AA399310, AI656343, AI636668, AI190733, | |
| | | | | | AA725709, AI025812, AA398244, AA723645, AA382463, AA709253, AI139837, AA401777, | |
| | | | | | and A57391. | |
| HTEKX28 | 1215 | 920927 | 1-286 | 15-300 | AA393705. | |
| HTEKX70 | 1216 | 573700 | 1-304 | 15-318 | | |
| HTEKZ50 | 1217 | 524054 | 1-304 | 15-318 | H89084, AA296876, AL023876, AC011422, AP000962, AL020989, AL049563, AL022575, | |
| | | | | | AL031183, AL009028, AL031391, and AC002487. | |
| HTELA50 | 1218 | 774268 | 1-497 | 15-511 | AI670826, AA058736, and Z99297. | |
| HTELD47 | 1219 | 934272 | 1-1005 | 15-1019 | AA229071, and AA229024. | |
| HTELD82 | 1220 | 779315 | 1-510 | 15-524 | AI377684, H03750, H84635, AA625639, and R22878. | |
| HTELE10 | 1221 | 963563 | 1-495 | 15-509 | | |
| HTELE41 | 1222 | 791743 | 1-601 | 15-615 | AI684943, AW117611, AI418517, and AI418516. | |
| HTELG47 | 1223 | 757740 | 1-442 | 15-456 | | |
| HTELG57 | 1224 | 870621 | 1-441 | 15-455 | | |
| HTELG80 | 1225 | 773018 | 1-251 | 15-265 | AW341441, AI651145, AI919149, AI247339, AA412289, AI218635, AI650567, AW340087, | |
| | | | | | AA709187, AW118140, and AW183314. | |
| HTELH44 | 1226 | 766462 | 1-658 | 15-672 | AI298565, H92427, AW452904, AI361759, AW449414, AA004711, R75764, F04362. | |
| HTELI03 | 1227 | 923071 | 1-575 | 15-589 | AC005157. | |
| HTELI51 | 1228 | 806403 | 1-654 | 15-668 | AI022339, and Z99127. | |
| HTELJ89 | 1229 | 966134 | 1-376 | 15-390 | AA397525, AA399055, AA758883, and AL022101. | |
| HTELK14 | 1230 | 794339 | 1-453 | 15-467 | Z99716. | |
| HTELK50 | 1231 | 870552 | 1-227 | 15-241 | AL078475. | |
| HTELK68 | 1232 | 923055 | 1-646 | 15-660 | | |
| HTELL48 | 1233 | 783824 | 1-515 | 15-529 | | |
| HTELL51 | 1234 | 952267 | 1-635 | 15-649 | | |
| HTELL90 | 1235 | 952269 | 1-940 | 15-954 | AA913156, AI221124, AA305153, and AF106564. | |
| HTELM89 | 1236 | 786268 | 1-288 | 15-302 | AI591200, AA102066, AI867662, AW088720, and D26018. | |
| HTELO20 | 1237 | 926910 | 1-420 | 15-434 | AL031597. | |
| HTELO51 | 1238 | 931120 | 1-378 | 15-392 | AI540890, AI557426, AI557082, AI541027, AI547225, and AI541056. | |
| HTELO73 | 1239 | 761806 | 1-514 | 15-528 | AL078613. | |
| HTELO93 | 1240 | 934344 | 1-249 | 15-263 | | |
| HTELP27 | 1241 | 921621 | 1-564 | 15-578 | R80089, X85707, and X85708. | |
| HTELQ41 | 1242 | 922634 | 1-449 | 15-463 | AA310475, AI536833, AA319470, AA278518, AA319408, W20004, AI611260, AA418173, | |
| | | | | | AI968286, AW182252, AA315267, AA491655, AW170378, and AI904985. | |
| HTELQ87 | 1243 | 761768 | 1-449 | 15-463 | AI125340, AI125684, AI377949, AA884214, AI126470, AI218351, AI243952, AA723933, | |
| | | | | | AI240603, AI143979, and AI187742. | |
| HIELR90 | 1244 | 826531 | 1-437 | 15-451 | AA652491, and AF152924. | |
| HTELT72 | 1245 | 761598 | 1-447 | 15-461 | AI827560, AI336053, AA873745, AA451732, AI436724, AA923591, AA055247, AW189536, | |
| | | | | | AA747873, and Z40977. | |
| HTBLT83 | 1246 | 780619 | 1-699 | 15-713 | AA746627, AA398848, AA435892, AI208905, AI024568, AA861337, AA861875, and | |
| | | | | | AA910621. | |
| HTELU01 | 1247 | 915339 | 1-367 | 15-381 | AL033517. | |
| HTELV06 | 1248 | 934302 | 1-457 | 15-471 | AI799028, AW263660, AA861674, and AA993711. | |
| HTELV10 | 1249 | 963576 | 1-256 | 15-270 | | |
| HTELV26 | 1250 | 796832 | 1-435 | 15-449 | AI198878, AI190586, AI018804, AL042837, AI208256, AA725583, AI016643, AA833661, | |
| | | | | | AA626323, AA993365, AI018351, AA718913, AA725636, AA992718, AI183840, AA403023, | |
| | | | | | AI911045, R60037, AA398422, AW410573, AA749431, AI128961, AI077415, AI198777, | |
| | | | | | AI439996, AI934676, AI199096, AA682387, H92998, AI200368, AA778651, AA045098, | |
| | | | | | AW157530, AW250790, AA587915, AW188549, AI819989, AI951978, AW007464, AI951992, | |
| | | | | | AI376410, AI677931, AA778720, AI364379, AA584288, AW162769, AI040155, AA150015, | |
| | | | | | AI187131, AA977318, AI373112, AI000432, AI038499, AI076148, AI278114, W94564, | |
| | | | | | AA513466, AA946608, AI279549, AI758476, AW103741, AA836837, AI700221, AI253749, | |
| | | | | | AI913907, AA057355, AI038357, AI758826, H71311, AW004637, AW273537, AA186980, | |
| | | | | | AI885648, AA824341, W70033, T35014, AI262733, AI693026, AA196549, AI868298, | |
| | | | | | AI090830, T16464, AL042836, AI887548, AW025276, AI139138, and AA150080. | |
| HTELV43 | 1251 | 870615 | 1-434 | 15-448 | AC007746. | |
| HTELV86 | 1252 | 910946 | 1-1086 | 15-1100 | AI272244, AA382531, AI809639, U35371, and X99043. | |
| HTELW29 | 1253 | 952241 | 1-768 | 15-782 | AW117507, AW105238, AW105158, AA969617, AI692859, AA934716, AA383047, and | |
| | | | | | AI917691. | |
| HTELW62 | 1254 | 870596 | 1-486 | 15-500 | AA393684, AA813816, and AI700752. | |
| HTELX52 | 1255 | 963506 | 1-345 | 15-359 | AI220445. | |
| HTELX72 | 1256 | 761599 | 1-216 | 15-230 | | |
| HTELY64 | 1257 | 764834 | 1-437 | 15-451 | | |
| HTELZ07 | 1258 | 952268 | 1-535 | 15-549 | | |
| HTELZ89 | 1259 | 786424 | 1-451 | 15-465 | | |
| HTEMA54 | 1260 | 911666 | 1-1484 | 15-1498 | AI954673, AI220421, AA813119, AA382989, AI024406, AF113526, AB023063, and | |
| HTEMB26 | 1261 | 827055 | 1-130 | 15-144 | AC004900. | |
| HTEMB28 | 1262 | 870614 | 1-402 | 15-416 | | |
| HTEMB34 | 1263 | 870589 | 1-533 | 15-547 | | |
| HTEMB72 | 1264 | 761602 | 1-294 | 15-308 | | |
| HTEMB83 | 1265 | 775593 | 1-370 | 15-384 | AA778498, AI337034, AA609166, AA625857, AI201263, AA437287, AI678062, AI961118, | |
| | | | | | AI203907, AI917789, AA626247, AA927799, AI187708, AA442366, AW294301, and | |
| | | | | | AL050341. | |
| HTEMC18 | 1266 | 924727 | 1-447 | 15-461 | AI813375. | |
| HTEMC75 | 1267 | 848193 | 1-296 | 15-310 | M78994, R86687, T08961, AW402241, R46318, AA349761, AA350295, AA354235, H15340, | |
| | | | | | AI909793, D31764, and AF037332. | |
| HTEMD10 | 1268 | 963546 | 1-673 | 15-687 | AA625914, AA416795, and AC005858. | |
| HTEMD73 | 1269 | 761783 | 1-430 | 15-444 | AI026681, AA609997, AA382092, AA789295, and T12649. | |
| HTEMF08 | 1270 | 958386 | 1-494 | 15-508 | | |
| HTEMJ34 | 1271 | 786377 | 1-550 | 15-564 | AI142370. | |
| HTEMJ54 | 1272 | 963531 | 1-558 | 15-572 | H59039. | |
| HTEMK03 | 1273 | 923066 | 1-347 | 15-361 | | |
| HTEMM80 | 1274 | 888686 | 1-869 | 15-883 | AA759198, and AA968427. | |
| HTEMN08 | 1275 | 958374 | 1-232 | 15-246 | | |
| HTEMN95 | 1276 | 789113 | 1-311 | 15-325 | | |
| HTEMO14 | 1277 | 880634 | 1-407 | 15-421 | | |
| HTEMO85 | 1278 | 771434 | 1-485 | 15-499 | AA804990. | |
| HTEMP48 | 1279 | 767863 | 1-348 | 15-362 | AL049761. | |
| HTEMP49 | 1280 | 932319 | 1-774 | 15-788 | AA933702, AL036538, AA928649, AA393559, AW104883, AA974777, AA587615, AA594505, | |
| | | | | | AI351083, AA406036, AI004273, AI217923, AA923027, AA435495, AI128197, AA496058, | |
| | | | | | AI187946, AI026847, AA865921, AA383556, AA927439, and AL117564. | |
| HTEMR65 | 1281 | 909280 | 1-1112 | 15-1126 | AW003084, AA574346, AW188065, AI657112, W37979, AW162204, W37760, AW172598, | |
| HTEMS10 | 1282 | 963527 | 1-386 | 15-400 | AW082687, AA774543, AW195592, AW274057, AA460327, AA382893, AI126206, AI198578, | |
| HTEMS48 | 1283 | 832506 | 1-341 | 15-355 | AA045732, AA412195, T70810, T85978, H26344, AA293873, AI343622, and AC004231. | |
| HTEMT06 | 1284 | 934338 | 1-636 | 15-650 | AI016782, AI149777, AA448011, AA448155, and AI285926. | |
| HTEMT89 | 1285 | 922999 | 1-630 | 15-644 | AW003548, AA757091, AW014801, AA813302, AA437209, AP000220, and AP000084. | |
| HTEMU17 | 1286 | 789623 | 1-335 | 15-349 | W90717, and W90708. | |
| HTEMU54 | 1287 | 870618 | 1-436 | 15-450 | AP000470. | |
| HTEMX92 | 1288 | 913795 | 1-525 | 15-539 | | |
| HTEMY30 | 1289 | 870662 | 1-219 | 15-233 | AL048534, AA403281, N78348, and AL031255. | |
| HTEMZ04 | 1290 | 927021 | 1-363 | 15-377 | | |
| HTENA22 | 1291 | 870601 | 1-720 | 15-734 | AL080132, AC011594, AC006238, R38805, R49132, R49132, H06801, N66174, N98697, | |
| | | | | | AA043641, AA146965, AA147010, AA259116, AA259155, AA534491, AA570283, AA687335, | |
| | | | | | AA766643, AA910635, AA948152, AA401719, AA609258, AA626320, AA644562, AA680291, | |
| | | | | | AA757030, AA758747, AA888971, AI023819, AI032507, AI088947, AI274536, AI345946, | |
| | | | | | AI431770, AI192387, AI214901, and AI217881. | |
| HTENB03 | 1292 | 923050 | 1-476 | 15-490 | | |
| HTENC22 | 1293 | 775544 | 1-560 | 15-574 | AW195712,D44825,AI124542, andAB032984. | |
| HTENF08 | 1294 | 958378 | 1-743 | 15-757 | | |
| HTENF95 | 1295 | 795316 | 1-333 | 15-347 | AI473748,AI798241,AA279454,AL138273, andAW149414. | |
| HTENG66 | 1296 | 840151 | 1-295 | 15-309 | | |
| HTENG93 | 1297 | 967432 | 1-91 | 15-105 | | |
| HTENH86 | 1298 | 784798 | 1-601 | 15-615 | AA393073, AI139819, AA860114, AA412161, and AA868102. | |
| HTENI58 | 1299 | 917213 | 1-636 | 15-650 | AI970129, AW237169, AI621267, AI653036, AI797400, AI797725, AW182923, AI961057, | |
| | | | | | AI970364, AI191623, AL036577, AW188292, AI341330, AI655836, AA918201, AI202983, | |
| | | | | | AI825213, AI824962, AI990770, AA890172, AI982569, AI918790, AI205504, AI611043, | |
| HTENJ28 | 1300 | 968135 | 1-1014 | 15-1028 | AI240133, and AF032967. | |
| HTENJ76 | 1301 | 767838 | 1-431 | 15-445 | AF012383, AI307797, AW270088, and U86074. | |
| HTENK06 | 1302 | 835851 | 1-552 | 15-566 | AB020719. | |
| HTENK69 | 1303 | 844557 | 1-899 | 15-913 | AL042436, AL042437, AI674705, AA400083, AW241753, AA401372, AI218464, AA953011, | |
| | | | | | AA972296, AA812520, AI125824, AA437087, AI028669, and AI024321. | |
| HTENO12 | 1304 | 917032 | 1-1454 | 15-1468 | | |
| HTENO50 | 1305 | 969213 | 1-635 | 15-649 | AA905347, AA371108, T20204, Z43158, and AA151400. | |
| HTENP54 | 1306 | 787535 | 1-494 | 15-508 | AA496169, and AC009411. | |
| HTENP80 | 1307 | 775387 | 1-482 | 15-496 | AL035453. | |
| HTENQ05 | 1308 | 928244 | 1-641 | 15-655 | AA393064. | |
| HTENR10 | 1309 | 963530 | 1-575 | 15-589 | | |
| HTENR74 | 1310 | 764828 | 1-444 | 15-458 | AI823791, and AF069682. | |
| HTENR93 | 1311 | 920834 | 1-875 | 15-889 | AI381463, AA634395, AA406053, AA405219, AA383176, and AF121781. | |
| HTENS22 | 1312 | 785996 | 1-532 | 15-546 | H83100, AL044519, and AL137391. | |
| HTENS43 | 1313 | 784936 | 1-1079 | 15-1093 | AI971582, H58143, AI499833, AI393537, and AA973074. | |
| HTEN591 | 1314 | 870515 | 1-720 | 15-734 | AA225153, AA629286, AA225136, AI272649, AA909816, AA070899, AI866377, AA229443, | |
| | | | | | R67086, AA084212, AW243884, H59093, AA158549, AC002086, AL133304, AC000004, | |
| | | | | | AL049830, AC006050, AC007270, AL031846, AC006125, D43727, AL031670, AC002470, | |
| | | | | | AL050318, AC007114, AF001549, AP000329, AL135959, AC003070, AL034420, AL031286, | |
| | | | | | AC007226, AL049694, AC004143, AL022476, Z93244, Z68284, AP000359, AC005015, | |
| | | | | | AL034429, AC000394, AC006120, AC003029, AL031589, AC004782, and AL035072. | |
| HTENV57 | 1315 | 944416 | 1-605 | 15-619 | | |
| HTENW53 | 1316 | 907717 | 1-806 | 15-820 | AA429691, AA429515, AC007114, Z61140, and AC004156. | |
| HTENX77 | 1317 | 771409 | 1-521 | 15-535 | AA781188, AA460513, AA860910, AA781845, AI027285, AI208471, AA889700, N73782, | |
| | | | | | H08088, R38703, F03385, AI830535, AI474644, R41444, AA459870, AI023552, and | |
| | | | | | AA421081. | |
| HTENY21 | 1318 | 870587 | 1-705 | 15-719 | AI743533, AI424822, AW082413, and AI915340. | |
| HTENY35 | 1319 | 884043 | 1-1011 | 15-1025 | AJ223811, X85630, T36006, AA382232, Z21393, AA383107, N78092, T36070, T36050, | |
| | | | | | Z21341, Z21392, AA459806, Z21315, AF012377, Z21111, AI827647, AW340665, AA280976, | |
| | | | | | Z21340, T85719, AL043525, AL043526, R82847, AC006208, and AL137671. | |
| HTENZ16 | 1320 | 917185 | 1-962 | 15-976 | AI018671, AI807205, AI468026, AI797263, AI025828, AW194247, AI889876, AA843455, | |
| | | | | | AI884356, AI198561, AI032059, AI126485, AI889886, AI239452, AA992969, AA780875, | |
| | | | | | AW303976, AI216470, AA683361, AI569512, AI472962, AI885458, AW055338, AW242149, | |
| | | | | | AI911290, AI222107, AI538002, AA912612, AW183126, H79395, AA884115, AI149911, | |
| | | | | | AW189703, AI220396, AI203939, AA936147, AI560168, AI219573, AW243836, AA906293, | |
| | | | | | AI252658, N26330, N26296, AI886564, AW085495, AA927058, and AL133596. | |
| HTENZ33 | 1321 | 870591 | 1-616 | 15-630 | AA383398. | |
| HTENZ72 | 1322 | 773024 | 1-564 | 15-578 | AI632084, AI221893, AA383392, AA759214, AW137663, AI269516, and AA923222. | |
| HTEOA90 | 1323 | 787516 | 1-489 | 15-503 | AA383437. | |
| HTEOD34 | 1324 | 812307 | 1-552 | 15-566 | AI990671, and AI990110. | |
| HTEOE61 | 1325 | 918635 | 1-548 | 15-562 | | |
| HTEOF31 | 1326 | 793202 | 1-619 | 15-633 | AL031283. | |
| HTEOF80 | 1327 | 847224 | 1-506 | 15-520 | AF186084, and AL117610. | |
| HTEOF85 | 1328 | 768583 | 1-494 | 15-508 | AI917508, AI810095, and AA973064. | |
| HTEOF91 | 1329 | 918571 | 1-237 | 15-251 | | |
| HTEOI36 | 1330 | 870575 | 1-516 | 15-530 | AA298760, AA298759, AA298601, and AL133073. | |
| HTEOI53 | 1331 | 810333 | 1-422 | 15-436 | AW206247, AI400618, AI671128, AW237084, AI811276, AI337166, AI341186, AI360596, | |
| | | | | | AW235137, AI183637, AI654814, AI654771, AI969744, AI954759, AA417208, AI969746, | |
| | | | | | AW087480, AA417104, AW182372, AA723770, AW241414, AW003345, AW241474, | |
| | | | | | AW183339, AA432142, and AA757062. | |
| HTEOK02 | 1332 | 918590 | 1-395 | 15-409 | | |
| HTEON29 | 1333 | 815852 | 1-978 | 15-992 | AW004028, AI968030, AW237673, AA432290, AW138422, AA112090, AA428635, AI143780, | |
| | | | | | AI143791, and AA861634. | |
| HTEON67 | 1334 | 954114 | 1-335 | 15-349 | AC004533. | |
| HTEOU45 | 1335 | 915138 | 1-639 | 15-653 | | |
| HTEOV90 | 1336 | 870532 | 1-425 | 15-439 | AW204420, AW058611, AI767863, AI433866, AI671711, AI802010, AI935766, AA280379, | |
| | | | | | AI808931, AA523871, AI193461, AA827208, AA418269, AI302010, AA280200, AA251664, | |
| | | | | | AI637584, AI932794, AI564719, AI677796, AI538716, AI633125, AI862139, AI433157, | |
| | | | | | AI702073, AI476046, AW050522, AI924971, AW151786, AW198090, AI569583, AI591420, | |
| | | | | | AI590227, AI619502, AW102785, AI826225, AI648663, AI863240, AI886753, AW075381, | |
| | | | | | AI480118, AI270183, AI097248, AI567351, AW152182, AI434468, AW104724, AI863321, | |
| | | | | | AI612759, AI679916, AI271796, AI922365, AI890833, AI926790, AI802542, AI799199, | |
| | | | | | AI636719, AI241819, AI280637, AI696612, AI828731, AI873644, AA833760, AI915291, | |
| | | | | | AI445992, AI874261, AI804983, AI923357, AI670009, AI560099, AI613017, AL036187, | |
| | | | | | AI572787, AI570807, AW026882, AI536638, AI620003, AI624548, AI537244, AA449768, | |
| | | | | | AI433023, AI934026, AW104827, AI537303, AI274508, AI273142, AI955906, AL041772, | |
| | | | | | AI811785, AI796743, AI446248, AA857306, AI863382, AI554427, AI445025, AI274013, | |
| | | | | | AI520702, AI446003, AI889376, AW051258, AW150453, AI699865, AI925156, AW151136, | |
| | | | | | AI923370, AW148320, AI619716, AI539808, AI869367, AI689248, AW075413, AI619607, | |
| | | | | | AI499285, AW029611, AI698391, AI249962, AI680498, AI567814, AI889189, AI554821, | |
| | | | | | AI539153, AI554218, AI784252, AW170635, AI608936, AI569945, AI635464, AI432040, | |
| | | | | | AI537273, AI817552, AI564723, AI612852, AI681985, AI432969, AI828367, AI559296, | |
| | | | | | AI702433, AW075667, AI432030, AI366900, AW148408, AI436644, AI633308, AW169527, | |
| | | | | | AW090550, AI569328, AI627909, AI800411, AI612920, AI919534, AI921176, AI280661, | |
| | | | | | AI499381, AI469112, AI580984, AI934259, AI539687, AI567128, AW193530, AW073270, | |
| | | | | | AI648502, AI783861, AI610690, AI889306, AW169653, AI648684, AW081036, AI491775, | |
| | | | | | AI801523, AW054964, AI469532, AI702068, AW148363, AI819976, AW080992, AW152469, | |
| | | | | | AI273839, AI687127, AW192652, AI249877, AW087207, AI655932, AI680377, AI453322, | |
| | | | | | AI439452, AI439762, AI648509, AI579901, AI818980, AI439717, AW235482, AW243820, | |
| | | | | | AI357316, AI285735, AI497733, AI696606, AW193236, AI687362, AI589273, AI921464, | |
| | | | | | AI623396, AW190042, AI280747, AI963216, AI284020, AI816010, AI628205, AI365256, | |
| | | | | | AI758512, AI619737, AI886206, AW087534, AI352497, AI625079, AI813919, AW129916, | |
| | | | | | AW129722, AI868204, AI587114, AW128841, AI610086, AI683173, AI560171, AW129230, | |
| | | | | | AW190194, AI590423, AI281762, AI859511, AI921248, AW149925, AI493567, AI521103, | |
| | | | | | AI569579, AI499393, AI370390, AI271786, AI887151, AI357940, AW149869, AI470648, | |
| | | | | | AW131294, AI628316, AI520931, AI682971, AI871697, AI571439, AW083175, AI866801, | |
| | | | | | AI824648, AI640379, AF113694, AL080060, I89947, A08910, A08909, I48978, A08913, | |
| | | | | | A08916, AF090934, AL049430, I48979, AL050393, AL137463, AL133560, AF177401, | |
| | | | | | AB019565, AF113690, AF118094, AF125948, I89931, I49625, AF090901, AF104032, | |
| | | | | | AF090896, I33392, AF090903, AF090900, AL137557, AF078844, AL122110, U67958, A77033, | |
| | | | | | A77035, AL137271, AJ012755, 578214, AL117457, AF079765, AL050024, AF087943, | |
| | | | | | AF113013, AL049314,AL110196,AL133640,Y14314, 568736,A03736,A65341,AL133080, | |
| | | | | | AL049382, Z82022, AL122121, Y16645, AJ000937, AL122050, A93350, E07108, AL050116, | |
| | | | | | AF125949, AL096744, AL080124, AL137527, AF091084, AF118064, AL137550, E02349, | |
| | | | | | X82434, U72620, AF067728, AF113699, AF113019, E03348, I26207, U35846, AL049283, | |
| | | | | | AL080159, AF183393, AL117460, AL122098, AL110221, AL050149, AL117394, AL122093, | |
| | | | | | AR011880, I03321, A93016, AF090943, AF097996, AL117583, AL050108, AL080137, | |
| | | | | | AL133113, AL133072, U42766, U00763, AL049466, A08912, AL049938, AL133016, | |
| | | | | | AL117435, X72889, I42402, AL137459, AF017152, U80742, AI2297, X65873, AL137521, | |
| | | | | | AF106862, AF113689, AF113677, Y11587, AF111851, AR059958, AJ238278, AL133093, | |
| | | | | | AF118070, Y11254, AJ242859, AL050277, AL133075, AL133606, X63574, AF061943, | |
| | | | | | AL049452, AL049464, AL122123, X84990, AL117585, X96540, A58524, A58523, AF017437, | |
| | | | | | E15569, AF113691, AL137523, L31396, AF146568, X93495, AL133565, L31397, AL049300, | |
| | | | | | I09360, X70685, AL137648, AL137538, AL133557, AL080127, AF113676, AF158248, | |
| | | | | | AL050146, AL110225, AL050138, U91329, E07361, AF185576, AL137283, AL137560, | |
| | | | | | AL133098, AF026816, AF119337, AL133104, AF111112, AL110280, AF153205, AL133665, | |
| | | | | | AL133568, AL110197, AF026124, X98834, I00734, A07647, AL137556, AR038854, AL050172, | |
| | | | | | AR000496, U39656, Y09972, AL137480, E08263, E08264, AL122049, AL133077, AL133014, | |
| | | | | | Y07905, AF106827, E00617, E00717, E00778, AF057300, AF057299, AF079763, AC006222, | |
| | | | | | X80340, AL137476, AF003737, U58996, AL023657, AL137533, X87582, A45787, AL050155, | |
| | | | | | S61953, AR013797, AL117440, AR038969, AL137526, A90832, I66342, AL080074, AF162270, | |
| | | | | | AL133067, E05822, AF111849, AL050092, AF061981, AF000145, E04233, Z72491, U78525, | |
| | | | | | AF106657, E06743, AF051325, M30514, U96683, AJ006417, AL137292, AF008439, AF177767, | |
| | | | | | U49908, L30117, AF061573, L19437, AL122118, AL137488, I96214, AF132676, AF061836, | |
| | | | | | AP000020, E08631, U68387, E02221, S79832, Z37987, AF210052, I17767, AL022147, and | |
| | | | | | AR020905. | |
| HTEOW02 | 1337 | 918475 | 1-596 | 15-610 | | |
| HTEOW39 | 1338 | 870566 | 1-488 | 15-502 | Z98304. | |
| HTEOW85 | 1339 | 969682 | 1-649 | 15-663 | AI684621. | |
| HTEPA08 | 1340 | 958391 | 1-1054 | 15-1068 | AI041556, AL042783, AA834968, AA789271, AI032390, AA400082, AA757197, AW206997, | |
| | | | | | AA416988, AW235392, AI028342, AI024253, AI015964, AL040413, and AA411964. | |
| HTEPA27 | 1341 | 872923 | 1-589 | 15-603 | AI765491, AI469067, AI870585, AI870612, AI652881, AA055971, AI763357, AA056000, | |
| | | | | | AA358708, AA889873, AI701794, N56631, AL042137, AI825129, AW297101, and AB018353. | |
| HTEPB66 | 1342 | 772949 | 1-610 | 15-624 | AW449288, AI147992, AI142275, AI654490, AI002885, AI743450, and AW103158. | |
| HTEPB84 | 1343 | 782248 | 1-580 | 15-594 | | |
| HTEPC76 | 1344 | 767824 | 1-526 | 15-540 | AI688792, AA504908, AL138425, AA908950, AI208672, and AF081466. | |
| HTEPC87 | 1345 | 883021 | 1-514 | 15-528 | | |
| HTEPD06 | 1346 | 933299 | 1-341 | 15-355 | N47565, N47576, C14331, D80227, D80269, D80378, C14429, D51799, C14389, AW118681, | |
| | | | | | D80391, D59787, D59467, D80196, D80038, D59927, D50995, D58283, D59859, D80022, | |
| | | | | | D80166, D80195, D51423, D59619, D80210, D80164, D59275, D80240, D80253, D80043, | |
| | | | | | D59502, D81030, D81026, D51022, D80212, AA305578, D80188, D59610, D80219, AA514186, | |
| | | | | | AA514188, C15076, D57483, D80024, D80366, AA305409, D50979, D59889, D80193, D80045, | |
| | | | | | C14407, D80133, AW360811, D80241, D80248, D80522, D51060, AW177440, C14014, | |
| | | | | | D80251, AW178893, AW375405, T03269, AW179328, C75259, AW366296, AW377671, | |
| | | | | | AW360844, AW375406, AW360817, AW378534, AW179332, AW377672, AW179023, | |
| | | | | | AW178905, D80268, AW378532, D80132, C05695, AW352171, AW177501, AW177511, | |
| | | | | | D80302, D80134, D80439, AW377676, AW352170, AW177731, AI557751, AW178907, | |
| | | | | | AW178762, D58253, AW179019, AW179024, AI535686, D80247, D51250, AW369651, | |
| | | | | | AW177505, AW178906, AW352174, AW179020, AW178775, AW360841, AW178909, | |
| | | | | | D59373, AW177456, AW179329, F13647, AW178980, AW177733, AW378528, AW178908, | |
| | | | | | AW178754, D52291, C14227, AW179018, AW352158, AW352117, AW176467, T11417, | |
| | | | | | AW179004, AW367967, AW179012, AW178914, AW378525, D51103, D80168, AA926689, | |
| | | | | | AA809122, AI910186, D80157, C14344, AW177728, C06015, AW179009, D51759, D58246, | |
| | | | | | D81111, AW178774, AW178911, AW378543, AW177722, AW352163, C14298, D80064, | |
| | | | | | AI905856, D59503, AW178983, AW178781, T48593, D58101, AW360834, Z21582, | |
| | | | | | AW177723, AW378540, AW352120, D59627, D59653, D80258, AI535850, AW378533, | |
| | | | | | D45260, D51097, C14975, Z33452, AW367950, D80014, AA285331, AW177508, H67854, | |
| | | | | | C03092, H67866, AI525920, AI525923, D51213, AW177497, D80228, AW178986, C14973, | |
| | | | | | D50981, D45273, N66429, T03116, AI525917, D59317, AW177734, D51221, D59474, D60010, | |
| | | | | | AA514184, D59551, C14957, D60214, T03048, AI525235, AI535961, AI525227, C14046, | |
| | | | | | AI557774, AI525242, AI525912, AW378542, AI525925, AW378539, AI525215, A62298, | |
| | | | | | A84916, A62300, AR018138, Y17188, A82595, AB028859, AJ132110, AF058696, AR008278, | |
| | | | | | Y17187, X82626, X67155, D26022, Y12724, A25909, A67220, D89785, A78862, D34614, | |
| | | | | | D88547, A94995, AR060385, AB002449, AR008443, A30438, I50126, I50132, I50128, I50133, | |
| | | | | | AR025207, AR066488, X64588, AR016514, X68127, AR060138, A45456, A26615, AR052274, | |
| | | | | | AR066490, Y09669, A43192, A43190, AR038669, I18367, AR066487, AR008277, AR008281, | |
| | | | | | U46128, I14842, AR054175, AR016691, AR016690, AR062872, AB012117, D50010, A63261, | |
| | | | | | AR008408, X93549, A85396, A70867, D88507, AR066482, A44171, U79457, A85477, I19525, | |
| | | | | | A86792, I79511, D13509, A64136, A68321, AR060133, AF123263, AR032065, and AR008382. | |
| HTEPE28 | 1347 | 932576 | 1-694 | 15-708 | AA205046, AA383391, AI184616, AA223825, AI825541, AI469846, and D42084. | |
| HTEPG15 | 1348 | 812303 | 1-533 | 15-547 | AI937640, T18881, R24582, AA412546, AI083751, AF079564, AF079565, AF106658, | |
| | | | | | AF106659, AF202454, AF202453, and Z63351. | |
| HTEPH01 | 1349 | 915301 | 1-618 | 15-632 | AA399486, T69681, and AC007537. | |
| HTEPJ09 | 1350 | 956200 | 1-1202 | 15-1216 | AA394192. | |
| HTEPJ19 | 1351 | 918599 | 1-453 | 15-467 | T18597, D59751, AI557262, AI525556, Z33559, AI540903, Z32887, D50992, AI557533, | |
| | | | | | AI536138, AI535660, AI541205, D59436, AI526078, AI535639, AI541321, AI541075, C14228, | |
| | | | | | AI557864, AI557238, AA058620, AI557808, AI525500, AI557082, H65400, AI525653, | |
| | | | | | AI535828, AI557809, AI541356, AI557602, AI541365, AI557731, AI525302, AI525316, | |
| | | | | | AI535813, AI546829, AI525757, AI540974, AI557312, AI557317, AI541154, R29657, | |
| | | | | | AI536150, AI541034, AI557852, AI525856, AI535994, AI541353, AI541027, AI541048, | |
| | | | | | AI557258, AI557543, AI525666, AI557041, AI557426, AI536070, AI557039, AI557810, | |
| | | | | | AI525656, AI547177, D30843, AI557408, AR050070, A62298, A82595, A82593, U94592, | |
| | | | | | Z30183, A62300, AF006072, and AR025466. | |
| HTEPJ79 | 1352 | 774212 | 1-359 | 15-373 | | |
| HTEPK40 | 1353 | 939675 | 1-619 | 15-633 | AI075905, AI796754, AW137492, AI652522, AA393248, AI217933, AA459841, AI150346, | |
| | | | | | AA293815, AI694956, AA435622, AA393292, AA719008, AA629029, AI024099, AA861041, | |
| | | | | | AA398164, AA402463, AA399502, R24468, R66361, AA688372, AF081250, and AF081249. | |
| HTEPM33 | 1354 | 870561 | 1-816 | 15-830 | AA824347, AA889787, AI425084, AA868962, AI190895, AL132776, and AF083394. | |
| HTEPM52 | 1355 | 806471 | 1-444 | 15-458 | | |
| HTEPN07 | 1356 | 952243 | 1-307 | 15-321 | Z99716, | |
| HTEPP23 | 1357 | 836572 | 1-327 | 15-341 | AI150152, AI216505, AW103179, and AC006017. | |
| HTEPP29 | 1358 | 917207 | 1-458 | 15-472 | | |
| HTEPP30 | 1359 | 947107 | 1-732 | 15-746 | AF191546. | |
| HTEPP32 | 1360 | 785803 | 1-963 | 15-977 | AA402763. | |
| HTEPP92 | 1361 | 790869 | 1-596 | 15-610 | | |
| HTEPR90 | 1362 | 787499 | 1-155 | 15-169 | | |
| HTEPT25 | 1363 | 870509 | 1-393 | 15-407 | | |
| HTEPT75 | 1364 | 870637 | 1-630 | 15-644 | AI283483, AI873282, and AI827738. | |
| HTEPU01 | 1365 | 915134 | 1-704 | 15-718 | | |
| HTEPV02 | 1366 | 917406 | 1-489 | 15-503 | | |
| HTEPX32 | 1367 | 870698 | 1-1349 | 15-1363 | AI217947, AW237109, AI918745, AI968403, AA934788, and X84693. | |
| HTEPZ10 | 1368 | 963433 | 1-529 | 15-543 | AI217204, AW183426, and AA759358. | |
| HTEPZ18 | 1369 | 888470 | 1-560 | 15-574 | AA397836, AI139919, AW162347, AI223276, AI879324, AI200822, AI150592, AI028601, | |
| | | | | | AI200868, AI879701, AI138943, AI652314, AI377443, AA868111, AW160551, and AF177398. | |
| HTEQB03 | 1370 | 922941 | 1-396 15-410 | AI624244, AL120897, AL121756, AC007099, Z99496, AC004584, AC002418, AP000248, | | |
| | | | | | AC004386, AL050305, AC002483, AL022315, AL034452, AC004638, AC005899, AC000353, | |
| | | | | | AC004623, Z84476, and U91323. | |
| HTEQD40 | 1371 | 915198 | 1-543 | 15-557 | AI623182, AA776747, AW082325, AW273819, AI539350, AI810085, AI125567, AI221672, | |
| | | | | | AI200770, AI204194, AW263528, AI240146, AA437189, AA758317, AI192035, AA709217, | |
| | | | | | AA992316, AA758401, AA961979, AI217262, and Z66485. | |
| HTEQD69 | 1372 | 918579 | 1-607 | 15-621 | | |
| HTEQE87 | 1373 | 958354 | 1-72915-743 | AA913948, AI633873, AI638029, AI990760, AI806847, AW003193, AI190550, AA431560, | | |
| | | | | | AI187284, AI915840, AI286045, AI243468, AA719044, AA448281, AI219847, AW135537, | |
| | | | | | AA861812, AA861291, AI969788, AA812901, AI187727, AI286137, and AI942348. | |
| HTEQG56 | 1374 | 881004 | 1-577 | 15-591 | | |
| HTEQJ54 | 1375 | 853971 | 1-603 | 15-617 | AW299627, AA917835, AA758010, AI989828, AW103119, and AW241908. | |
| HTEQJ14 | 1376 | 870525 | 1-496 | 15-510 | | |
| HTEQJ42 | 1377 | 806495 | 1-496 | 15-510 | AA383039. | |
| HTEQ081 | 1378 | 806504 | 1-375 | 15-389 | AA382997, and AA397859. | |
| HTEQP45 | 1379 | 966141 | 1-127 | 15-141 | | |
| HTEQQ82 | 1380 | 932301 | 1-590 | 15-604 | AA609033, AA293870, AA382673, AW263657, and U51244. | |
| HTEQR15 | 1381 | 939641 | 1-756 | 15-770 | AI979286, AA382595, and AF133424. | |
| HTEQR94 | 1382 | 966486 | 1-556 | 15-570 | AI990882, AA447560, AI201149, AI341615, AW002367, AI651854, AA437021, AI149956, | |
| | | | | | AI140621, AW292211, AA620811, AW196416, AA757082, AA993629, AA932499, N92273, | |
| | | | | | AA448543, AI458277, AA398159, AW004057, AI918824, AI635506, AA401699, AA994466, | |
| | | | | | and AI016246. | |
| HTEQT63 | 1383 | 924799 | 1-1298 | 15-1312 | AI142296, AA417385, and AI148005. | |
| HTLAB19 | 1384 | 530577 | 1-347 | 15-361 | | |
| HTLAB44 | 1385 | 530579 | 1-253 | 15-267 | AC006549, AC000097, and AC006547. | |
| HTLAB73 | 1386 | 575019 | 1-320 | 15-334 | AC000078. | |
| HTLAC81 | 1387 | 679414 | 1-192 | 15-206 | AF038406. | |
| HTLAC87 | 1388 | 546469 | 1-226 | 15-240 | | |
| HTLAD21 | 1389 | 761758 | 1-490 | 15-504 | AI217166, AI184534, AI150079, AI142754, AI697160, AI811701, AI214713, and AW188915. | |
| HTLAD38 | 1390 | 421550 | 1-517 | 15-531 | | |
| HTLAF84 | 1391 | 836390 | 1-558 | 15-572 | AA418228, AF045454, D63648, and E13935. | |
| HTLAV67 | 1392 | 530742 | 1-208 | 15-222 | AC005258. | |
| HTLBD12 | 1393 | 506739 | 1-319 | 15-333 | AL121757. | |
| HTLBE55 | 1394 | 967408 | 1-293 | 15-307 | AL036680, AA421020, AW151136, R66759, AL037558, AL045421, AA830821, AW149876, | |
| | | | | | AI571529, AI355008, AI567582, AW089006, AI471361, AW023338, AW020095, AL041150, | |
| | | | | | AW167924, AI829990, AI345224, AI079736, AL046463, AI311892, AW162194, AI697324, | |
| | | | | | T99953, AW243637, AI921167, AA291456, AI539771, AI873638, AI473451, AI805688, | |
| | | | | | AI888621, AI828574, AW022682, AW239367, AI540606, AI689420, AI336662, AL038575, | |
| | | | | | AA464646, AW020693, AI890887, AI590423, AI570966, AI307507, AI916419, AI611728, | |
| | | | | | AI470293, AI929108, AI538850, AI610667, AA572758, AI648567, AW088899, AI805638, | |
| | | | | | AI366549, AI799195, AI866082, AI636719, AI539153, AI620093, AI866608, AI636619, | |
| | | | | | AL120853, AI340603, AI537677, AI611743, AW083804, AI349598, AI582912, AW172723, | |
| | | | | | AI539800, AI696626, AI349256, AW075207, AI589993, AI866573, AI312152, AI365256, | |
| | | | | | AA579232, AA807088, AI343037, AI345735, AW085786, AW265004, AW075084, AI310925, | |
| | | | | | AL038564, AI472536, AI312399, AI677797, AW082600, AI349937, AI567944, AI345688, | |
| | | | | | AI334884, AI307543, AI494201, N71199, AI345251, AW071412, AI307210, AI307708, | |
| | | | | | N29277, AI312325, AW071395, AL036631, AI538885, AI249946, AI244380, AI340659, | |
| | | | | | AI589267, AW071377, AW129230, AI802240, AW161579, AI313320, AI955906, AI340644, | |
| | | | | | AI805769, AI434242, AI313352, AI335363, AI307503, AI539707, AI334930, AI309443, | |
| | | | | | AI623682, AL039086, AI307736, AW161402, AI307520, AI623736, AI446124, AW084097, | |
| | | | | | AI349266, AI349787, AI334452, AI340664, AI310592, AI344938, AI312146, AI866786, | |
| | | | | | AI309431, AI312339, AI340537, AW301300, AI345739, AW161202, AI345674, AI345258, | |
| | | | | | AI538764, AI312143, AI307459, AI349637, AA635382, AI273179, N74355, AI312428, | |
| | | | | | AI499974, AI310927, AL110306, AI311604, AI307578, AA420722, AW162189, AI436429, | |
| | | | | | AI349955, AW189933, AW075093, AI312432, AL120300, AA580663, AI349269, AI312357, | |
| | | | | | AI590943, AI358701, AW021588, AI310945, AL040241, AW088903, AW151714, AL036638, | |
| | | | | | AI636581, AI583445, AW059713, AI648408, AI312237, AI922901, AI446373, AW263716, | |
| | | | | | AI251830, AI343059, AI917963, AI573026, AI349933, AW193467, AW268261, AW082623, | |
| | | | | | AI249877, AL047422, AL133741, AA493923, AI345253, AW409775, AL119836, AI345677, | |
| | | | | | AW167918, AA494167, AW191003, AI633402, AL119791, AW071362, AW021373, AI345608, | |
| | | | | | N98606, AW191844, AI336513, AI357599, AI433968, AJ499581, AA848053, AI554821, | |
| | | | | | AW264719, AL046618, AI348895, AI345347, AW269097, AI866465, AI310575, AI589428, | |
| | | | | | AI349226, AL046595, AL040694, AA493647, AI537837, AW403717, AA974049, AL036718, | |
| | | | | | AL037454, AI824360, AW058233, AL046466, AI569328, AI434833, AL038605, AW163834, | |
| | | | | | AI886055, AF065135, I48978, Z72491, AF113690, AL035458, AL133104, AF158248, | |
| | | | | | AL050172, AF090934, Y16645, AI8777, S78214, AL049382, AF090886, AF113691, A08916, | |
| | | | | | AR000496, U39656, X70685, M86826, I89947, A08913, A08910, I26207, AL117585, I89931, | |
| | | | | | A08909, A08912, Y11587, I49625, AL122118, AF036941, AL080074, AR038854, AF132676, | |
| | | | | | AF061836, AF090900, A08908, AR011880, AL110171, AF090943, X84990, AL133016, | |
| | | | | | AL122110, AF097996, AF118070, AL122050, AL137538, AL117457, AL133568, AF102578, | |
| | | | | | AF028823, A65340, A07647, I48979, X53587, AL080060, AF114170, AF118064, AL133081, | |
| | | | | | AJ238278, AF017790, AL122098, U68233, I92592, AL137712, AL080137, AL117394, E01614, | |
| | | | | | E13364, A03736, M92439, AB016226, AF113677, I42402, AL050108, AL137705, AF067790, | |
| | | | | | I89934, AF087943, E02221, AB019565, A65341, X62580, AL122111, AF210052, AL137574, | |
| | | | | | AF125949, U68387, S68736, AE003737, I89944, AL133093, AL049466, Z37987, AL137658, | |
| | | | | | U58996, AL050092, X87582, AJ000937, AF069506, AF118090, AF192557, AL096744, U78525, | |
| | | | | | Y08769, X63574, A21103, 876508, AF113019, AL133558, AF215669, E02253, AL137560, | |
| | | | | | AL133640, X52128, AF177401, AL080148, AL133565, AF104032, AF113013, AL049465, | |
| | | | | | AL137300, I00734, S77771, I41145, AF012536, AL137429, AF113689, AL049300, E05822, | |
| | | | | | AL137478, AL133645, U95114, AF176651, AB007812, E06743, AL080158, AF017152, | |
| | | | | | AF026124, U96683, AL110221, S69510, AF113676, E00617, E00717, E00778, AL137656, | |
| | | | | | D16301, AL137527, Y07905, AL050393, AL117435, AL137548, AL122121, AL110280, | |
| | | | | | AL137463, AF111112, S61953, AL080086, AF078844, AL122049, E04233, X80340, AL117583, | |
| | | | | | AL133098, AL117460, X72387, AL133557, X92070, AF090903, AL050116, AL122045, | |
| | | | | | AJ003118, U49434, AL133014, U80742, AL133113, U91329, AJ005690, AL137479, U72620, | |
| | | | | | D83032, AF162270, AL133560, AF126247, I09360, AL049938, X79812, AL122106, AL133075, | |
| | | | | | AL122093, AL137294, U42766, AL117432, AF113694, AL137526, AL133080, AL117649, | |
| | | | | | AL080127, AL133077, AF061573, U00763, AC002467, AL080124, AR068751, Y10655, | |
| | | | | | S75997, AL049464, D89079, AL133067, AL137556, Y16258, Y16257, E02756, Y16256, | |
| | | | | | X06146, AL137557, AL050024, U67958, AL049314, E01314, E07108, M27260, AL050149, | |
| | | | | | A45787, AL133072, AL137273, AF106657, AF030513, AL050138, X93495, X65873, | |
| | | | | | AL137665, E15569, A58524, AI8788, A58523, E03348, AL050277, U92068, AL110196, | |
| | | | | | E03349, AR038969, L30117, AJ242859, AR059958, and Y09972. | |
| HTLBE82 | 1395 | 780116 | 1-467 | 15-481 | H03896, AA788921, AA985315, and AL133595. | |
| HTLBF14 | 1396 | 971661 | 1-728 | 15-742 | | |
| HTLBG83 | 1397 | 527942 | 1-187 | 15-201 | AA132777, AA809070, and AI799864. | |
| HTLCA95 | 1398 | 911655 | 1-1148 | 15-1162 | AI028227, AI798166, AI968058, and AI962770. | |
| HTLCG77 | 1399 | 772644 | 1-98 | 15-112 | | |
| HTLCX76 | 1400 | 767667 | 1-265 | 15-279 | AL045710, and AL096749. | |
| HTLCY27 | 1401 | 682208 | 1-288 | 15-302 | W92263, AA736600, AI962876, AI539379, AI672273, AL045130, AI656897, AW001387, and | |
| | | | | | AI806122. | |
| HTLCY54 | 1402 | 908832 | 1-1050 | 15-1064 | AA453366, AI188219, AI638044, AA983750, AI219830, AA453265, and AA912820. | |
| HTLCZ48 | 1403 | 572959 | 1-399 | 15-413 | | |
| HTLCZ96 | 1404 | 815897 | 1-459 | 15-473 | AW139921, AA725842, AI971598, AI651885, AA453466, AL110422, AI027229, AI026797, | |
| | | | | | AA778573, AI279962, AI073425, AI208767, H55405, and AL118498. | |
| HTLDA58 | 1405 | 828115 | 1-259 | 15-273 | AA948538. | |
| HTLDE53 | 1406 | 780842 | 1-610 | 15-624 | AA400498, AA400590, AA861265, AA398875, AI149809, AI198885, AA435582, AA460749, | |
| | | | | | AA460151, AA889548, AI015434, and AA815269. | |
| HTLDE64 | 1407 | 908613 | 1-838 | 15-852 | | |
| HTLDE95 | 1408 | 616724 | 1-285 | 15-299 | AA566051, AA552211, AA393552, AA418209, H05646, H06920, R34733, AA293017, Z42496, | |
| | | | | | AI743990, and AA280537. | |
| HTLDF33 | 1409 | 909254 | 1-616 | 15-630 | AI376558, AI208582, AI149687, AI028197, AA629337, AI027966, AI202003, AA694500, | |
| | | | | | AI701718, AW207552, AI336775, AI560530, AI215526, AW207059, and AI015601. | |
| HTLDG55 | 1410 | 911645 | 1-196 | 15-210 | | |
| HTLDH65 | 1411 | 839795 | 1-901 | 15-915 | N47989, AI675771, AI024189, AI651589, AI621081, AW003588, AW293606, AI026721, | |
| | | | | | AA954294, N51195, and AA983886. | |
| HTLDI90 | 1412 | 835850 | 1-458 | 15-472 | AB020719. | |
| HTLDO94 | 1413 | 915223 | 1-542 | 15-556 | AA860341, AA889689, AA730148, AA478113, AI024743, AA730132, AA082366, and | |
| | | | | | AA758028. | |
| HTLDP77 | 1414 | 920546 | 1-638 | 15-652 | AC002128. | |
| HTLDQ25 | 1415 | 870057 | 1-1220 | 15-1234 | AA399278, AA889597, AA758803, AW117336, AA398195, AA729781, AA889586, and | |
| | | | | | AA922590. | |
| HTLDS55 | 1416 | 891322 | 1-1302 | 15-1316 | AI890919, AI018797, AA913452, AI797580, AI809012, AI187382, AA448485, AI554914, | |
| | | | | | AW137847, AI393577, AA382830, AA432050, AA609003, and AC020663. | |
| HTLDT05 | 1417 | 909752 | 1-473 | 15-487 | R59447, R17647, T62170, and AI439348. | |
| HTLDT81 | 1418 | 952265 | 1-480 | 15-494 | AA398001, AA399683, AW177623, AA809773, and AL137531. | |
| HTLDU05 | 1419 | 911649 | 1-589 | 15-603 | AA437044, AF113527, AB023062, and AF113520. | |
| HTLDV31 | 1420 | 867748 | 1-297 | 15-311 | | |
| HTLDX88 | 1421 | 791684 | 1-686 | 15-700 | | |
| HTLDY85 | 1422 | 573746 | 1-481 | 15-495 | | |
| HTLDZ14 | 1423 | 573401 | 1-334 | 15-348 | | |
| HTLEB14 | 1424 | 573464 | 1-402 | 15-416 | | |
| HTLED72 | 1425 | 906989 | 1-273 | 15-287 | | |
| HTLEF94 | 1426 | 870258 | 1-309 | 15-323 | | |
| HTLBG65 | 1427 | 870154 | 1-1167 | 15-1181 | | |
| HTLEG91 | 1428 | 870257 | 1-99 | 15-113 | Z94160. | |
| HTLEH30 | 1429 | 934287 | 1-542 | 15-556 | | |
| HTLEI47 | 1430 | 573460 | 1-463 | 15-477 | | |
| HTLEJ11 | 1431 | 973302 | 1-956 | 15-970 | M62294. | |
| HTLEJ93 | 1432 | 960314 | 1-294 | 15-308 | AL044506. | |
| HTLEK64 | 1433 | 506747 | 1-318 | 15-332 | AA442457, AA601393, AC005625, and AC005789. | |
| HTLEL01 | 1434 | 917022 | 1-515 | 15-529 | AC003976, AC005702, AC005562, and AL117394. | |
| HTLEL03 | 1435 | 575080 | 1-93 | 15-107 | AF042793, AB011130, AF042792, AF040709, and Z84492. | |
| HTLEL07 | 1436 | 953712 | 1-581 | 15-595 | | |
| HTLEL31 | 1437 | 669950 | 1-131 | 15-145 | AA250913, W56681, R24109, H01291, AA161334, AW160808, and AF053356. | |
| HTLEM46 | 1438 | 719160 | 1-443 | 15-457 | AI760165, AI341569, AW241888, AW135684, AI624778, AA883817, AI494564, AA722107, | |
| | | | | | AA521079, and AA405142. | |
| HTLEO50 | 1439 | 506649 | 1-335 | 15-349 | Z68869. | |
| HTLEP16 | 1440 | 574942 | 1-567 | 15-581 | AA305510, AA099550, AI917501, AI631488, AI142135, AW391262, AA305581, N39659, | |
| | | | | | AI829757, and AF151810. | |
| HTLEQ07 | 1441 | 953706 | 1-592 | 15-606 | AL133071. | |
| HTLE543 | 1442 | 573403 | 1-203 | 15-217 | | |
| HTLE554 | 1443 | 574884 | 1-312 | 15-326 | AI207997, and AW172597. | |
| HTLET56 | 1444 | 911654 | 1-1096 | 15-1110 | AI968198, AI655275, AA397903, AL044119, AW003563, AL044118, and Z74696. | |
| HTLET78 | 1445 | 836820 | 1-812 | 15-826 | AL041695, AA454137, T19069, D31497, and AL133566. | |
| HTLET93 | 1446 | 573454 | 1-99 | 15-113 | | |
| HTLEV33 | 1447 | 527956 | 1-261 | 15-275 | AI808336, AW013835, AI624717, and AI650408. | |
| HTLEV95 | 1448 | 883332 | 1-574 | 15-588 | AA776758, AI808140, AA884694, AA909615, AA904970, AA909196, AW294544, AA723919, | |
| | | | | | and AI525608. | |
| HTLEW12 | 1449 | 870255 | 1-334 | 15-348 | R02814. | |
| HTLEW21 | 1450 | 573458 | 1-311 | 15-325 | AL122083. | |
| HTLEY11 | 1451 | 967309 | 1-336 | 15-350 | | |
| HTLEY91 | 1452 | 775310 | 1-212 | 15-226 | AC005343. | |
| HTLEZ14 | 1453 | 791662 | 1-322 | 15-336 | AC000097, AC006547, AP000344, and AC006549. | |
| HTLEZ15 | 1454 | 934288 | 1-368 | 15-382 | D51002, AI541205, AI541321, AI557082, AI535660, AI557238, AI557258, AI557602, | |
| | | | | | AI525500, Z33559, T18597, AI557533, AI557731, AI525556, AI557262, H65400, AI557234, | |
| | | | | | AI525757, C14322, D50992, AI525856, AI557241, AI541027, AI525852, AI535639, AA058620, | |
| | | | | | AI540903, AI541365, AI557084, AI541048, N71206, AI557312, AI526078, AI557474, | |
| | | | | | AI525302, Z33585, AI541075, AI541034, AI541346, AI541353, AI541154, AI557039, | |
| | | | | | AI557041, AI557222, AI557317, AI525656, AI546829, AI536070, AI535813, AI525666, | |
| | | | | | AI541056, AI535994, AF025310, Z30183, U45328, AR050070, U94592, A82595, A82593, | |
| | | | | | A63903, A62298, and A62300. | |
| HTLEZ32 | 1455 | 870261 | 1-512 | 15-526 | AC005899. | |
| HTLFA74 | 1456 | 934172 | 1-695 | 15-709 | AA398001, AA399683, AW177623, AA809773, and AL137531. | |
| HTLFC20 | 1457 | 917128 | 1-1029 | 15-1043 | AA356490, R05624, AA262044, and AL138430. | |
| HTLFE01 | 1458 | 917033 | 1-591 | 15-605 | | |
| HTLFE05 | 1459 | 954984 | 1-1305 | 15-1319 | AW275845, AI830267, AI572906, AI439086, AA766499, AA723111, AA836614, AA453028, | |
| | | | | | AA747738, AA483838, AA077798, AA077483, AW302599, AA215573, AA077013, AA009576, | |
| | | | | | AA078283, AA323484, AA077510, AJ007798, and AC005071. | |
| HTLFE20 | 1460 | 934278 | 1-463 | 15-477 | AC006237. | |
| HTLFI28 | 1461 | 775392 | 1-423 | 15-437 | AC003963. | |
| HTLFJ39 | 1462 | 953730 | 1-616 | 15-630 | AF053356, and AF174604. | |
| HTLFI83 | 1463 | 781303 | 1-501 | 15-515 | AL117491, AB007913, AL137693, and AL110281. | |
| HTLFJ39 | 1464 | 573462 | 1-329 | 15-343 | AI001797, and AI910520. | |
| HTLGD25 | 1465 | 870136 | 1-1477 | 15-1491 | AA608970, and AA758832. | |
| HTLGD69 | 1466 | 835493 | 1-1010 | 15-1024 | AA403179, AA398239, AW339857, and AA952990. | |
| HTLGG36 | 1467 | 789656 | 1-561 | 15-575 | AW269804, AA781852, AW104592, AI239999, AI698249, and AC005821. | |
| HTLGK55 | 1468 | 868309 | 1-470 | 15-484 | AW393087, R16949, R75708, H44330, AA186786, AA259086, R55419, AA329264, AA335735, | |
| | | | | | AA329538, AA393356, AA354448, W93021, AA136776, T35806, T10451, R46300, R54656, | |
| | | | | | R10335, AA076725, W51754, AL137358, and AL050110. | |
| HTLGM02 | 1469 | 964878 | 1-752 | 15-766 | C02944, C03248, AI807681, AA095819, AI797565, AI333238, AI863457, H53759, AW138808, | |
| | | | | | AW451889, AW138004, AW207397, AW184023, and AC005216. | |
| HTLGM07 | 1470 | 952254 | 1-1194 | 15-1208 | AI693474, AL042395, AL041671, AW168041, AI738586, AA504349, AI125391, AI990015, | |
| | | | | | AA838043, AI149664, AL041569, AI864457, AA579771, AW273185, AW294188, AW197733, | |
| | | | | | AI805280, AA383594, AI699335, AI138789, AI653680, AI738485, AA383400, AI475427, | |
| | | | | | AA976749, AI203057, AA883961, AI968077, AF096834, AF073954, AF073955, AC003688, | |
| | | | | | and L07578. | |
| HTLGT62 | 1471 | 918606 | 1-533 | 15-547 | AL040693. | |
| HTLGW17 | 1472 | 958208 | 1-794 | 15-808 | | |
| HTLGX90 | 1473 | 870528 | 1-1358 | 15-1372 | AA399144, AI982647, AA394141, AA234366, AA405404, AA034080, AA644012, AA234434, | |
| | | | | | T86343, AI344623, R02436, T86344, AA707052, R02333, and Z98257. | |
| HTLHC14 | 1474 | 908428 | 1-752 | 15-766 | AI738485, AI738586, AF096834, AC003688, AF073955, and AF073954. | |
| HTLHE72 | 1475 | 963471 | 1-494 | 15-508 | AL078621, Z63130, and Z63232. | |
| HTLHL52 | 1476 | 958334 | 1-1159 15-1173 | AA459835, AI286187, AA742548, AI187289, AI392611, AA922025, AI138515, AA884337 | | |
| | | | | | and AI936608. | |
| HTLHO94 | 1477 | 968685 | 1-460 | 15-474 | AI632413, AA026276, AA382241, AA936327, AI026815, AA382375, AA026275, AA860376, | |
| | | | | | and AC006445. | |
| HTLHP32 | 1478 | 933335 | 1-615 | 15-629 | AW405738, AA116025, AA102802, AA211814, D63260, AA306027, H97316, T78952, X93817, | |
| | | | | | AW136521, AI659011, AW382734, AW374638, AL022316, Z93241, and AF151854. | |
| HTLHP52 | 1479 | 926980 | 1-569 | 15-583 | | |
| HTLHP80 | 1480 | 870156 | 1-590 | 15-604 | AA483387, AA065093, AA126035, AA126051, AI871722, AA164944, AA199708, AL044904, | |
| | | | | | Z69651, AP000337, and AC002425. | |
| HTLHT15 | 1481 | 946586 | 1-560 | 15-574 | T85616. | |
| HTLHT24 | 1482 | 870254 | 1-1191 | 15-1205 | AA402128. | |
| HTLHU04 | 1483 | 926950 | 1-998 | 15-1012 | AI869974, AA405686, AI199718, AI969027, AW086198, AL045468, AW082694, AA399273, | |
| | | | | | AW136449, AI933024, AA412383, AA300675, AA405951, AA412243, AL045467, AI150480, | |
| | | | | | AA889135, and AI217882. | |
| HTLHV67 | 1484 | 936139 | 1-735 | 15-749 | H44302, R50303, AA341701, AA179217, T60490, AA478857, R47809, AA234882, AA302994, | |
| | | | | | AI797287, F12041, T66192, H81762, AW403784, AA171826, AI417037, AI906347, AI436806, | |
| | | | | | AA298718, AI906396, and AF005038. | |
| HTLHZ08 | 1485 | 958321 | 1-663 | 15-677 | | |
| HTLHZ10 | 1486 | 963475 | 1-677 | 15-691 | AC005971. | |
| HTLIA92 | 1487 | 784817 | 1-723 | 15-737 | AA382329, and T27180. | |
| HTLID36 | 1488 | 945891 | 1-521 | 15-535 | AC003662. | |
| HTLIK11 | 1489 | 966043 | 1-471 | 15-485 | | |
| HTLIP19 | 1490 | 958351 | 1-941 | 15-955 | AA431834, AA412657, AA399262, AI970493, AI026627, AA412489, AA431430, AA383405, | |
| | | | | | AL042749, and AI696044. | |
| HTLIQ09 | 1491 | 931046 | 1-630 | 15-644 | | |
| HTLIR30 | 1492 | 870115 | 1-709 | 15-723 | | |
| HTLIU76 | 1493 | 946300 | 1-829 | 15-843 | AA393092, AA453482, AF012388, and AF002992. | |
| HTLIV78 | 1494 | 947234 | 1-685 | 15-699 | AA846864, AI125243, AA446154, AW003474, AI200764, AW137061, AA992083, AI139618, | |
| | | | | | AA429664, AA991813, AA923010, AI150169, AI825677, AI917106, AA429514, AW029457, | |
| | | | | | AW264822, AI800160, AW085654, AI445992, AI660211, AA761545, AW084368, AI633009, | |
| | | | | | AA113768, AI863191, AL048875, AW117746, AI874189, AI583982, AI634707, AW149869, | |
| | | | | | AI537989, AI140134, AI680138, AL035460, and AF185576. | |
| HTLIY52 | 1495 | 942161 | 1-1354 | 15-1368 | AI827749, AI819667, AI580407, AI025487, AI223109, AI150036, AW087713, AI024234, | |
| | | | | | T18864, AI479322, AA883975, AW341589, AA860213, AI831802, AA913074, AA608857, | |
| | | | | | AI050685, AA860223, AA948538, and AI075930. | |
| HTLJA23 | 1496 | 953729 | 1-943 | 15-957 | AF053356, AF174604, and AF083655. | |
| HTLJA24 | 1497 | 934279 | 1-560 | 15-574 | AC006237. | |
| HTLJC71 | 1498 | 922923 | 1-1738 | 15-1752 | AL039539, AL045443, AI336919, AA406128, AA405229, AL042307, AA431504, AA311249, | |
| | | | | | AW086440, AA813520, AI240644, AA897733, AW268487, AA782009, AW172455, AI301209, | |
| | | | | | AI014598, AA969918, AL041043, AA431178, AL039540, AA973051, AI221826, AL133030, | |
| | | | | | AC009516, AP000552, AP000556, AP000557, and AL117509. | |
| HTLJD35 | 1499 | 967336 | 1-518 | 15-532 | | |
| HTLJD88 | 1500 | 953714 | 1-865 | 15-879 | AL041339, AF025310, and AF200923. | |
| HTLJJ75 | 1501 | 924755 | 1-1137 | 15-1151 | AA889705, AA224167, AW263624, AI627392, AA907369, AA224175, H41231, AI392654, | |
| | | | | | AI223199, AI208705, AI825010, AL033527, and Z66397. | |
| HTLJL23 | 1502 | 922994 | 1-1787 | 15-1801 | W02882, AI017323, AW118900, AA912672, AI208003, AA909041, AI765407, AI765419, | |
| | | | | | AA609441, Z33510, AI016233, AI657083, AI339208, AI991437, AA781685, AA860425, | |
| | | | | | AA382780, Z21333, AA357733, Z21332, AA256011, N74515, AL031587, and AF006501. | |
| HTTAD55 | 1503 | 835652 | 1-246 | 15-260 | AA301270, AA301379, and AA301366. | |
| HTTAE49 | 1504 | 723331 | 1-269 | 15-283 | AA301335, AA301157, W27731, AA525760, AA449997, AW088581, F07155, AW337237, | |
| | | | | | AI536857, AI524371, AA737106, AA056569, AA491298, AA953587, AI857836, AA515753, | |
| | | | | | AW080777, AA491681, AI766408, AI278972, T39494, R97104, N55508, AI376747, | |
| | | | | | AW081296, AI311647, AT923333, AI207465, F08230, AA531412, AI183976, AA601355, | |
| | | | | | AA953228, AA165505, N73610, AA598927, N72717, AI620992, H72530, AA9709674 | AI809745, AI923052, AI674840, AI34 1654, AA648942, T07769, H84675, AA602727, |
| | | | | | AI950671, H70076, AI270675, R49657, AI908093, AL021939, AL022238, AC004526, | |
| | | | | | AC007546, AL121748, Z98051, AC005368, Z83846, AC004000, L78810, AL021368, | |
| | | | | | AC004447, AL031667, AL049552, AF059650, AL008707, AC004833, AL049745, AC006344, | |
| | | | | | AC006387, AL034419, Z98884, AC004805, AC004996, AL022326, AL035046, AP000080, | |
| | | | | | M31061, M33764, X16277, M81740, U73636, AL031668, AL121658, AC006271, AL133382, | |
| | | | | | AC009286, AC003041, AC007461, AL031587, Z98742, AC005953, AP000557, D87009, | |
| | | | | | AL031311, AC002312, AP000023, AC002350, AL137100, AL022721, AC007051, U07562, | |
| | | | | | AC010209, AC006160, AC007919, AL118510, AC007559, M97911, AC007564, AC004799, | |
| | | | | | AC005067, AC002369, AC005227, AC008122, AL096763, Z95116, AC004947, AC004841, | |
| | | | | | AC003049, AC004655, AC004838, Z85986, AP001053, AC005962, AC008015, AL035086, | |
| | | | | | AC004098, AC005384, AC006115, AC009405, AC006239, AC003684, AP000171, AP000056, | |
| | | | | | AC004477, AC007934, AC003669, AL035078, Z75888, AL049589, AP000967, AC004757, | |
| | | | | | AF106564, U47924, AL078472, AC003038, AC004686, AC004966, AL050318, AC005803, | |
| | | | | | AC005726, AC004228, AC006449, AC004492, AC003091, AC005179, AC004905, AC006552, | |
| | | | | | AF200465, AL049835, AL080242, AL035682, AC005230, AC005484, Z92547, AL031283, | |
| | | | | | AL049759, AL009181, AC004938, AC004008, AF030453, Z98946, AC005088, AC007014, | |
| | | | | | U91318, Z98304, AL133245, AP000556, AB020871, AL031845, AL023575, AC005212, | |
| | | | | | AC005857, AL035530, AP000467, AL031864, AL034417, AP000563, AP000211, AP000133, | |
| | | | | | AL022330, AC003093, AL035417, AC005043, AC004032, AL049646, AC005180, Z75887, | |
| | | | | | AC005251, AC004895, AL049554, AC006130, AL031056, AP000330, AC006270, AC006101, | |
| | | | | | AC005884, Z83856, AP000257, and AP000256. | |
| HTTAH87 | 1505 | 509574 | 1-304 | 15-318 | AA301200. | |
| HTTAJ35 | 1506 | 707750 | 1-560 | 15-574 | AA460110, AA279729, AA291197, AA301139, T06789, AW295422, AI700465, AA845564, | |
| | | | | | and AI291478. | |
| HTTAJ50 | 1507 | 509657 | 1-249 | 15-263 | AA300966, and AA301128. | |
| HTTAN57 | 1508 | 509453 | 1-292 | 15-306 | AA300600, and AA301000. | |
| HTTA596 | 1509 | 961057 | 1-247 | 15-261 | AA300802, AA300767, and AC004559. | |
| HTTAU82 | 1510 | 797726 | 1-296 | 15-310 | AA300687, AA286758, AL139165, and Z70227. | |
| HTTBE25 | 1511 | 509128 | 1-256 | 15-270 | AA300493, AA300591, AF059569, and AL049778. | |
| HTTBH34 | 1512 | 530565 | 1-313 | 15-327 | Z42096. | |
| HTTBH41 | 1513 | 530562 | 1-252 | 15-266 | | |
| HTTBH54 | 1514 | 530563 | 1-302 | 15-316 | | |
| HTTBJ94 | 1515 | 530564 | 1-311 | 15-325 | AL046237, and AL045777. | |
| HTTBN67 | 1516 | 578085 | 1-163 | 15-177 | | |
| HTTCAI5 | 1517 | 869705 | 1-413 | 15-427 | AC005833. | |
| HTTCD03 | 1518 | 925390 | 1-378 | 15-392 | | |
| HTTCD71 | 1519 | 530393 | 1-112 | 15-126 | AL049844. | |
| HTTCL35 | 1520 | 529672 | 1-239 | 15-253 | AA505142. | |
| HTTCT34 | 1521 | 973210 | 1-1295 | 15-1309 | AW192348, AA081773, H06122, C75208, W38676, AA302953, AI907561, AA311414, | |
| | | | | | AA151050, AW411262, AA226372, AA297279, T50005, AA938031, AI276055, AI433141, | |
| | | | | | AI814125, AA689289, AI264581, AI650824, AW235148, AI273243, AA340545, T50069, | |
| | | | | | AW340759, AW088730, AI093394, W44759, W73928, AI242558, AI800707, AA421100, | |
| | | | | | AA243847, AW265034, AA226593, AW294446, AI097360, AI302409, AI298574, AA770396, | |
| | | | | | AI418623, AA122285, AI150958, R31691, AI969750, AI168830, AW236726, AI459694, | |
| | | | | | AA936951, AA422134, AA150960, AA029400, AW305179, AA046886, AA226401, AI935787, | |
| | | | | | AW118839, R24074, AI803011, AI564140, AI797634, AI671022, AA084054, AA031539, | |
| | | | | | AI831233, AA046979, H79028, H05830, AA033515, AW296225, N70304, R31733, AW296783, | |
| | | | | | H28027, AA334000, F32723, H54170, AA031538, AI826552, AA421099, AA766234, D60652, | |
| | | | | | AI696661, AA913310, AW383613, AI077484, AW383609, AW236130, AA652326, AI191597, | |
| | | | | | H77423, AI435580, AI302073, AI675809, H54014, AI973084, AW383535, AW239479, | |
| | | | | | AA496314, AI971370, AA233111, and AA629153. | |
| HTTDF50 | 1522 | 526385 | 1-293 | 15-307 | AA301144. | |
| HTTDF90 | 1523 | 917155 | 1-427 | 15-441 | AW052029. | |
| HTTDG36 | 1524 | 968131 | 1-347 | 15-361 | | |
| HTTDI21 | 1525 | 869686 | 1-341 | 15-355 | | |
| HTTDJ65 | 1526 | 973307 | 1-406 | 15-420 | AC006030, AP000513, AB023052, and AC006140. | |
| HTTDL38 | 1527 | 573641 | 1-289 | 15-303 | | |
| HTTDL45 | 1528 | 523452 | 1-291 | 15-305 | AW292800, and AC007390. | |
| HTTDL89 | 1529 | 959837 | 1-328 | 15-342 | W22023, AC004765, and AB002342. | |
| HTTDN40 | 1530 | 734318 | 1-373 | 15-387 | AA182963, W39759, AA132990, H69405, R94355, T66121, H68623, H68650, N36314, R14722, | |
| | | | | | AA166770, R70624, AA923755, AW385783, R69735, AA190899, R19750, T10743, H07954, | |
| | | | | | H93885, AA164319, and AC005876. | |
| HTTDN85 | 1531 | 783444 | 1-435 | 15-449 | AL137653. | |
| HTTDO19 | 1532 | 908937 | 1-320 | 15-334 | | |
| HTTDO37 | 1533 | 573685 | 1-431 | 15-445 | | |
| HTTDR91 | 1534 | 790336 | 1-549 | 15-563 | AA252780, T84947, and AC005740. | |
| HTTDR92 | 1535 | 573666 | 1-326 | 15-340 | AC003046, AC002366, and AC003685. | |
| HTTD502 | 1536 | 920589 | 1-418 | 15-432 | | |
| HTTDX84 | 1537 | 921100 | 1-668 | 15-682 | AA432195, AA435548, and AA431175. | |
| HTTDZ54 | 1538 | 692608 | 1-286 | 15-300 | AW163244, H89834, W06845, N42782, N42829, N31946, and AI190785. | |
| HTTDZ91 | 1539 | 523206 | 1-300 | 15-314 | AI762137, AW242639, AA044752, AA884207, AA235512, AI870472, D80100, D59403, | |
| | | | | | W88874, AA481286, N92013, D31111, D31113, AI167596, R10048, AA906542, AW087683, | |
| | | | | | R49500, AI361492, AF155112, and AL137478. | |
| HTTEB33 | 1540 | 573719 | 1-336 | 15-350 | | |
| HTTEH58 | 1541 | 747943 | 1-307 | 15-321 | | |
| HTTEL50 | 1542 | 745985 | 1-196 | 15-210 | | |
| HTTEU68 | 1543 | 967819 | 1-1207 | 15-1221 | AA134604, AA187575, T75572, AA083163, W42892, AI092672, T97891, Z44468, R34642, | |
| | | | | | R14267, AI078644, AA354837, R48102, AA362636, R55924, AA497072, AW044159, | |
| | | | | | AW377397, R17450, T78498, AA625142, R56338, AA258076, and R99732. | |
| HTTEV62 | 1544 | 573614 | 1-272 | 15-286 | AI828837, AI015418, and AA953392. | |
| HTTEY64 | 1545 | 974107 | 1-450 | 15-464 | | |
| HTTEY67 | 1546 | 917903 | 1-1523 | 15-1537 | AI869330, AW295435, AI208233, AA447451, AA844516, AA664002, N40294, W04890, | |
| | | | | | AI925298, AA903925, AA447450, AW243978, H14692, H14587, AA360639, and AA732693. | |
| HTTEZ34 | 1547 | 771602 | 1-498 | 15-512 | | |
| HTTFA16 | 1548 | 870198 | 1-394 | 15-408 | AA160412, and D78751. | |
| HTTFB60 | 1549 | 869666 | 1-208 | 15-222 | AW298813. | |
| HTTFG35 | 1550 | 778426 | 1-254 | 15-268 | AA581033. | |
| HTTFG83 | 1551 | 974284 | 1-698 | 15-712 | AA063114. | |
| HTTFH70 | 1552 | 757358 | 1-342 | 15-356 | H64973, AA659316, AA649530, AI636734, AA047057, AA664924, AA157876, AA046906, | |
| | | | | | AI940546, AW028376, H57802, AA420703, AI306717, AA019793, AA385652, AA359194, | |
| | | | | | AA713538, AA713930, AA639056, AA837006, AI679759, AA135988, AA084148, AW019964, | |
| | | | | | AA908682, W27084, AA602458, AA083850, AI679486, C75332, H62123, AA338238, | |
| | | | | | AA055647, W85818, AI634466, AI890283, AC003973, AC006263, AF196971, AC007793, | |
| | | | | | AF039907, U80017, AL049779, AC006530, AL022238, Z83820, AP000221, AL136295, | |
| | | | | | AF011889, AP000084, AL049709, AC006142, AF109907, AL022721, AC004617, AL049780, | |
| | | | | | AL049831, AL020997, AC004462, AC006211, AL049761, Z83826, AL031255, AL024498, | |
| | | | | | AL133216, AC005529, AC006030, AC000134, AC004999, AC004934, AC007390, AL139054, | |
| | | | | | AF111167, AC002314, U85195, AL109758, I59642, L77570, AC005346, AC002492, Z83822, | |
| | | | | | AC006261, AE000658, L39891, AC007993, AC006064, AC005969, AC006950, U91327, | |
| | | | | | AC007664, AL049759, Z97180, Z98949, AC007462, AC005484, AF045555, AC005821, | |
| | | | | | AC006581, AC004659, AC002039, AP000355, AL035684, AC007157, AP000552, AC012099, | |
| | | | | | AF001549, AL022316, AC006162, Z98044, AC005874, AF134471, AC005179, AC005527, | |
| | | | | | AC007688, AC003086, AL049697, AL109984, AL078584, AP000550, AL049760, AC006023, | |
| | | | | | AC004996, AP000692, AC001231, AC007022, AC002040, AC009288, AC007066, AC004876, | |
| | | | | | AC005730, AC008018, AC005320, AL022394, Z82198, AC004148, Z75890, AL023281, | |
| | | | | | AC005037, AC008039, AC006273, AC005516, AC009248, AP000299, AL079342, AC007684, | |
| | | | | | AB023049, AC005031, AC004686, AC002366, AL022398, AC004019, AC006960, AC006417, | |
| | | | | | AC003048, AL031577, AF038458, AC006079, Z81364, D87675, AC002310, AC005740, | |
| | | | | | AC004913, AL096701, AC003071, AC000003, AC004491, AC005744, AL035587, AC004253, | |
| | | | | | AL050307, AC005180, AC001478, AL117351, AC004890, AL031848, AC006241, Z98051, | |
| | | | | | AC003982, AP000114, AC005722, Z97056, AL031432, AL050318, AC006538, AC005089, | |
| | | | | | AC004750, AL049713, AC002070, AL096761, AP000353, and AL133163. | |
| HTTFK90 | 1553 | 787599 | 1-551 | 15-565 | AI637920, AI657055, AA772352, AW316972, AI676064, AA904483, T11417, D59503, D81111, | |
| | | | | | D80014, D58283, D58246, D80258, D80043, C14227, D80064, D80247, AA809122, D80251, | |
| | | | | | C06015, AI535686, D80253, D58101, D59502, AA514184, C03092, C14407, D80366, | |
| | | | | | AI557751, D80522, D80022, C14331, H67866, C14389, D50995, D59610, D51423, H67854, | |
| | | | | | D80157, D80439, AA305578, D59859, D80166, C14014, F13647, D80195, D59467, D59619, | |
| | | | | | D51022, D80210, D51799, D80391, D80164, D59275, D80240, D80038, D59787, D80227, | |
| | | | | | AA305409, D80188, C14344, D81030, D45260, D80248, D50979, D81026, D80269, | |
| | | | | | AW178893, D80212, D80268, D80196, D80219, D51759, D80241, D59927, D80024, C15076, | |
| | | | | | AI557774, D51060, D57483, D59889, D80193, D80133, D80045, D80168, AA514186, | |
| | | | | | AA514188, D60010, D80302, D51103, D80378, C14429, D59317, AW177440, C14298, C14973, | |
| | | | | | C14957, D59627, D59653, AW360834, T03116, D51213, D51221, D59474, AI525917, C14046, | |
| | | | | | C16955, AW360817, AI525920, AW377671, AW375405, AW360811, AI525235, D60214, | |
| | | | | | C05695, C75259, D59551, D52291, AW178907, AI525227, AW178908, D59373, AW178906, | |
| | | | | | AW378533, D45273, AI535959, AW360844, AI525923, AA285331, T03269, AW179328, | |
| | | | | | D51079, D59695, D80949, T48593, AW375406, AW378534, AW179332, AW360841, | |
| | | | | | AW377672, AW179023, AW178905, AW366296, AW177731, AI525912, AI525215, | |
| | | | | | AW378528, AW178762, AW179019, AI525242, AW352170, AW378532, Z33452, T02974, | |
| | | | | | AW352120, AW352117, AI525925, T03048, AW178914, AW378539, AW378542, Z21582, | |
| | | | | | AW367950, AW360855, AW176467, C05763, AW378525, D80228, AW179020, AW378540, | |
| | | | | | AW377676, AW352171, AW178774, AW177733, AW179024, AW179018, AW378543, | |
| | | | | | AI525237, AW177505, AW178781, H67858, D51250, AW352163, D51053, C04682, | |
| | | | | | AW177456, C13958, AW178911, C14077, AI525222, AW178775, T02868, AW178909, F13796, | |
| | | | | | AW179004, AW179329, AW178980, AW177728, AW178986, AW178754, AW369651, | |
| | | | | | AW352158, Z30160, AI535961, D31458, AW177734, AA305720, AI910186, N66429, | |
| | | | | | AW177508, T11191, AW179009, AW179012, AW177497, AW177722, AI525928, AI525216, | |
| | | | | | AI525228, D80654, AB028859, AJ132110, AF058696, A62300, AR018138, AR008278, A84916, | |
| | | | | | A62298, A82595, AR060385, AR054175, I14842, AB002449, I50126, I50132, I50128, I50133, | |
| | | | | | A70867, AR008277, AR008281, AR062872, AR016808, AR016514, X64588, X67155, Y17187, | |
| | | | | | AR060138, A45456, Y17188, A94995, D26022, A26615, AR052274, A43192, Y12724, A63261, | |
| | | | | | A43190, AR038669, A25909, A64136, A68321, AR066488, Y09669, AR066487, A67220, | |
| | | | | | D89785, A78862, D34614, A30438, I79511, AR008443, X68127, AF123263, AR016691, | |
| | | | | | AR016690, U46128, D88547, AR032065, D50010, AR008408, and AR060133. | |
| HTTFL89 | 1554 | 974346 | 1-405 | 15-419 | AC005551. | |
| HTTFM17 | 1555 | 750942 | 1-430 | 15-444 | AI457366, and AI023804. | |
| HTTFM66 | 1556 | 950051 | 1-1145 | 15-1159 | AA085574, AA490803, AA147472, AI239866, and AL049745. | |
| HTTF559 | 1557 | 825922 | 1-842 | 15-856 | AA228367, AA176965, AA228376, AA004521, AA251249, R00504, AA303183, AW136898, | |
| | | | | | AA448887, R00605, AA229970, H50956, AA345572, AA040486, AA004604, AA177117, | |
| | | | | | AW247896, T74926, AA566080, and AF045584. | |
| HTTFT08 | 1558 | 934460 | 1-441 | 15-455 | | |
| HTTFV93 | 1559 | 925544 | 1-393 | 15-407 | AA301328, and H78684. | |
| HTTFW03 | 1560 | 923105 | 1-459 | 15-473 | AC006566. | |
| HTTFX21 | 1561 | 924775 | 1-580 | 15-594 | AI632236, AI279533, AI339379, AI806232, AA401419, AI356680, AW051296, AI096764, | |
| | | | | | AA401395, AW008336, AI419077, AI423753, AI276550, AI435531, AW205745, AW104726, | |
| | | | | | R60187, AI081767, AA830892, AI917002, AI806411, W03327, AW134602, H72137, H71911, | |
| | | | | | H66942, H79399, AA507360, H66943, H81492, AA847135, H71435, H71434, AI824610, | |
| | | | | | AI652697, AA829202, H72050, N32176, H71912, AA507323, H79288, R83711, AA886536, | |
| | | | | | and AI652883. | |
| HTTFZ70 | 1562 | 974066 | 1-357 | 15-371 | | |
| HTTHH05 | 1563 | 931004 | 1-592 | 15-606 | AC004067. | |
| HTTHU43 | 1564 | 953479 | 1-1053 | 15-1067 | AI278633, AA423847, AI276946, AI291687, AA262654, H22961, and AA255728. | |
| HTTIG04 | 1565 | 926752 | 1-390 | 15-404 | | |
| HTIIH23 | 1566 | 869636 | 1-472 | 15-486 | AW401826, AW408670, AA488824, and AB020677. | |
| HTTIH80 | 1567 | 869635 | 1-328 | 15-342 | AC006443. | |
| HTTIL06 | 1568 | 934089 | 1-765 | 15-779 | Z25007, AI758350, D80247, D50979, AA305578, C14389, D59275, D52291, D80195, D59502, | |
| | | | | | D80164, D80193, D80439, D59467, D58283, AI525903, D80227, D81026, D80269, D59859, | |
| | | | | | C15076, D80022, D51799, C14331, D80166, D80248, D80253, D81030, D59695, D51423, | |
| | | | | | D59619, D80043, D80210, D80391, D80240, D80366, D80038, D59787, AA305409, C14014, | |
| | | | | | D80212, D80188, D80196, D51022, D80045, D80522, D57483, D80219, D59627, D59927, | |
| | | | | | H67858, D50995, D59610, AI525922, D51060, AA514188, D59889, D80024, D80302, D80268, | |
| | | | | | D80133, D80378, D80251, D80168, D59474, D51103, C14298, AA514186, D80241, Z21582, | |
| | | | | | D59317, D51213, D80157, T03116, D80258, AA809122, C75259, D80064, D31458, D59503, | |
| | | | | | D45273, D59551, D59373, C06015, AI525914, F13647, H67854, C05695, C16955, T02974, | |
| | | | | | C14077, T11417, T03048, H67866, D58246, AI525912, C03092, D80014, C14407, C14973, | |
| | | | | | Z33452, C14227, T02868, AI535686, C14344, D52317, C13958, D51221, D81111, AI525907, | |
| | | | | | C14957, Z30160, C14046, D51759, D59653, D45260, D58101, AI525242, AJ557774, D60010, | |
| | | | | | AI557751, AI525227, D51053, AI525235, AI525920, AI525917, N66429, AI525923, AA514184, | |
| | | | | | AI525215, AI525216, AI525228, AI525238, AI525925, AI525237, AI525222, AI525969, | |
| | | | | | AI535961, AR016808, AB028859, A84916, AJ132110, A62298, A62300, A82595, AR060385, | |
| | | | | | AR008278, AR018138, AF058696, AB002449, X64588, I82448, I79511, I14842, AR054175, | |
| | | | | | AR008277, AR008281, and AR060382. | |
| HTTIN23 | 1569 | 869634 | 1-539 | 15-553 | AC002549. | |
| HTTIU05 | 1570 | 931015 | 1-573 | 15-587 | | |
| HTTIW81 | 1571 | 922817 | 1-434 | 15-448 | | |
| HTTIZ05 | 1572 | 930994 | 1-418 | 15-432 | | |
| HTTJA11 | 1573 | 839725 | 1-406 | 15-420 | AI522185, and AI889003. | |
| HTTJA47 | 1574 | 869618 | 1-417 | 15-431 | | |
| HTTJH13 | 1575 | 869615 | 1-297 | 15-311 | AC004859. | |
| HTTJM01 | 1576 | 913799 | 1-271 | 15-285 | | |
| HTTJQ06 | 1577 | 934130 | 1-397 | 15-411 | AL046690, AL046714, AA301225, AW405562, AC005027, AL132774, AC005050, AC004409, | |
| | | | | | AC006059, AC007785, AC004673, Z99496, AL033397, and AC002488. | |
| HTTJX68 | 1578 | 974063 | 1-375 | 15-389 | | |
| HTTJY08 | 1579 | 958170 | 1-430 | 15-444 | AL023584. | |
| HTTKD44 | 1580 | 948750 | 1-434 | 15-448 | AA300492, R69716, AA377913, AA096018, and AC003688. | |
| HTTKF89 | 1581 | 960928 | 1-411 | 15-425 | AA301180, AA300961, and AL035425. | |
| HTTKG34 | 1582 | 915033 | 1-378 | 15-392 | | |
| HTTKK06 | 1583 | 974311 | 1-584 | 15-598 | | |
| HTTKL80 | 1584 | 974316 | 1-464 | 15-478 | | |
| HTTKN21 | 1585 | 974310 | 1-504 | 15-518 | | |
| HTTKN30 | 1586 | 920893 | 1-487 | 15-501 | N24270, AA355038, W16809, W76580, AA442492, AA394009, AI061614, AA306378, | |
| | | | | | AW327292, N39773, AA431265, AA022944, W16892, H69650, W16816, N95146, AA437055, | |
| | | | | | AA333960, N42264, AA471293, N39663, AA429690, AA287514, N28024, AA336844, | |
| | | | | | AA337096, AA442618, AW298810, T81379, W20041, N25823, AA282421, AA181314, | |
| | | | | | AI038286, AA902825, AI093178, AI128035, AA092603, AI290898, D62144, N26891, | |
| | | | | | AA846456, AA838697, AA640163, N40080, AA758626, W16976, AA939313, AW151976, | |
| | | | | | N56324, AA927961, AI582147, AI223403, AA659796, AI348195, N26593, AA806403, | |
| | | | | | AW118695, AA435600, AI187055, H60112, H98703, and AA022924. | |
| HTTKP07 | 1587 | 911390 | 1-562 | 15-576 | AI640500, AA035703, AF130247, and AF165138. | |
| HTTK513 | 1588 | 926795 | 1-470 | 15-484 | | |
| HTTKV17 | 1589 | 830008 | 1-416 | 15-430 | AC005027, | |
| HUDAM29 | 1590 | 529157 | 1-214 | 15-228 | | |
| HUDBZ78 | 1591 | 739638 | 1-366 | 15-380 | AI799013, AW173341, AW072440, AI910986, AA620943, AA977595, AA913759, AI208578, | |
| | | | | | and H56769. | |
| HUKAA62 | 1592 | 503626 | 1-294 | 15-308 | AA303037. | |
| HUKAB80 | 1593 | 503445 | 1-335 | 15-349 | AA300169, AA776941, and AC005841. | |
| HUKAC72 | 1594 | 966804 | 1-296 | 15-310 | AA300183, AW419202, H38334, AI124650, AA324325, H38499, AA299557, AA299817, | |
| | | | | | AA663855, and M27444. | |
| HUKAM82 | 1595 | 954420 | 1-309 | 15-323 | AA299772, AA299548, and AA299549. | |
| HUKAX07 | 1596 | 954359 | 1-258 | 15-272 | AA299237, and AA299353. | |
| HUKCC86 | 1597 | 529727 | 1-212 | 15-226 | | |
| HUKDH25 | 1598 | 531165 | 1-371 | 15-385 | AC006055. | |
| HUKDH50 | 1599 | 531163 | 1-315 | 15-329 | AF064478, AB015355, AL034351, AC007529, AC005723, AC007684, AL020989, AC004448, | |
| | | | | | AL008639, and AC002525. | |
| HUKEH36 | 1600 | 531110 | 1-334 | 15-348 | | |
| HUKEH50 | 1601 | 531108 | 1-240 | 15-254 | AI743421, AI807422, AI684708, AW104143, AA973066, AA843771, AA846889, AW135078, | |
| | | | | | AI686018, and Z63492. | |
| HUKEK55 | 1602 | 522213 | 1-546 | 15-560 | AI085258, AA594171, AA731743, AA252492, AI866553, AW163561, AI028019, AA908826, | |
| | | | | | AI479934, AI292039, AI701571, T32954, AI563944, AA987496, N91123, AA913053, | |
| | | | | | AA748877, AA897110, T03349, AA903350, AA300185, AI268110, AA910894, AI199050, | |
| | | | | | AI702521, T30992, D56255, R56442, Z45121, AA889837, W19847, AI559757, AW245526, | |
| | | | | | AA905779, AA243398, AI871013, AL136295, and AF006264. | |
| HUKEO55 | 1603 | 714187 | 1-340 | 15-354 | AI249880, AI312131, AI377805, AL080243, U63630, AC005722, AL023653, AL109865, | |
| | | | | | AC004805, AC006146, AL022162, AC004675, AF088219, AC001226, AC007216, AC002472, | |
| | | | | | AB001523, AC005568, AL049872, AL022324, AL034420, U95742, AL034548, AF053356, | |
| | | | | | AC006084, AL049779, AC005231, AL121825, AC005939, and AC004955. | |
| HUKES11 | 1604 | 967604 | 1-168 | 15-182 | | |
| HUKFL69 | 1605 | 526819 | 1-352 | 15-366 | | |
| HUKFV41 | 1606 | 537530 | 1-289 | 15-303 | AI830434. | |
| HUKFX63 | 1607 | 946931 | 1-98 | 15-112 | | |
| HUNAD94 | 1608 | 575299 | 1-310 | 15-324 | AA297031, AA298863, AA371410, AA837771, D51877, AI885465, AA077619, AA385775, | |
| | | | | | AA297006, AW243808, F35684, T03928, H47368, AA599080, H79586, AA678472, AA632720, | |
| | | | | | R83068, R92640, H85808, AW275432, AI223626, D51809, AI751191, AW028179, AA653291, | |
| | | | | | AA187760, AI190648, H71738, AI525789, AI193417, AA584594, AI251034, AI254770, | |
| | | | | | AI284543, AI054090, W39287, AI246061, H47736, AA445951, AI753365, R83708, H86399, | |
| | | | | | AI510801, AI251284, AI251203, AI249853, AA788592, AI250552, AI985795, AW381198, | |
| | | | | | AW381196, AL133238, AC008012, AC007363, U91325, AC004890, AL022394, AC002395, | |
| | | | | | Z69733, AC004025, AL133249, AC005969, AC004865, Z99128, AC006197, AC008041, | |
| | | | | | AC007666, AL118497, Z98880, AP000152, AC008033, AF049895, AC000052, AC007919, | |
| | | | | | AP000567, AC004019, AL035454, AC000062, AL079342, AC002457, AC005740, Z82194, | |
| | | | | | AC008123, AC002994, AL031311, U80460, AL122023, AL031114, AC007388, AF146191, | |
| | | | | | AL035089, AC004081, AL049633, AF196969, AC006120, AL049843, AC009411, AL009175, | |
| | | | | | AL135960, AJ131016, AL032821, AC007022, Z97832, AL109653, AL033403, AL022726, | |
| | | | | | AL022151, AL117339, AC007551, AC004979, AC005722, AC005828, U96409, AL022319, | |
| | | | | | AB001523, AC007312, AC007023, AL121825, AL031663, AC008009, AC000353, AC006928, | |
| | | | | | AC002429, AC005509, AL022578, AC004802, AL020997, AL022718, AC006515, AC004020, | |
| | | | | | AC005908, AL133244, AC006317, AC006039, AL049830, U85195, AC004746, Z93930, | |
| | | | | | AL133312, AC007372, and AE000658. | |
| HUVBB90 | 1609 | 503042 | 1-330 | 15-344 | AA296418, AA296426, AA302599, AI223784, AI792577, AC005280, AC002287, AC004517, | |
| | | | | | AL031592, AC000353, AL109847, AL034419, AC004993, AC004882, AL079342, AC005529, | |
| | | | | | and Y15000. | |
| HUVBB93 | 1610 | 502903 | 1-266 | 15-280 | AA296425, and AL121603. | |
| HUVBC12 | 1611 | 933023 | 1-353 | 15-367 | AA296246, AA296176, and AA296416. | |
| HUVCQ07 | 1612 | 928053 | 1-358 | 15-372 | | |
| HUVCQ55 | 1613 | 868795 | 1-372 | 15-386 | AA296238. | |
| HUVCS14 | 1614 | 914768 | 1-317 | 15-331 | T84347. | |
| HUVCU71 | 1615 | 968663 | 1-266 | 15-280 | AC005410. | |
| HUVCW62 | 1616 | 535361 | 1-386 | 15-400 | AA296264. | |
| HUVDB28 | 1617 | 535006 | 1-265 | 15-279 | AA714267, and AL078634. | |
| HUVDB53 | 1618 | 509119 | 1-339 | 15-353 | AA296198. | |
| HUVDC15 | 1619 | 921088 | 1-490 | 15-504 | AL031281. | |
| HUVDD09 | 1620 | 707061 | 1-178 | 15-192 | AW378735. | |
| HUVDF13 | 1621 | 961020 | 1-297 | 15-311 | | |
| HUVDF84 | 1622 | 526248 | 1-339 | 15-353 | AC005319. | |
| HUVDF88 | 1623 | 522823 | 1-340 | 15-354 | AB002339. | |
| HUVDJ28 | 1624 | 530558 | 1-463 | 15-477 | H29210. | |
| HUVDI76 | 1625 | 719332 | 1-286 | 15-300 | | |
| HUVDL30 | 1626 | 530387 | 1-96 | 15-110 | AW367572, AW376975, AW376867, AW367596, AI248747, AW449393, and AI367533. | |
| HUVD025 | 1627 | 679477 | 1-439 | 15-453 | N80985, and AC004134. | |
| HUVDP95 | 1628 | 530386 | 1-150 | 15-164 | | |
| HUVD526 | 1629 | 958027 | 1-590 | 15-604 | AA435842, AA398811, and AC004111, | |
| HUVDU51 | 1630 | 868660 | 1-279 | 15-293 | AL009183. | |
| HUVBD35 | 1631 | 430750 | 1-732 | 15-746 | AA166861, N56640, D59356, AB008681, and AP000500. | |
| HUVED54 | 1632 | 534783 | 1-376 | 15-390 | AL035405. | |
| HUVED65 | 1633 | 527937 | 1-151 | 15-165 | | |
| HUVEN50 | 1634 | 530094 | 1-96 | 15-110 | AF118069. | |
| HUVEA55 | 1635 | 868779 | 1-515 | 15-529 | AI460185, and AW270646. | |
| HUVFB48 | 1636 | 967815 | 1-330 | 15-344 | AA161447, AI583468, AA715433, AA630672, AW341978, AW021951, AI865278, R65651, | |
| | | | | | AA640053, H63170, AA743445, AI500453, AI253987, AA094320, AA482273, AL046777, | |
| | | | | | AC006121, AP000513, AC002477, AC007308, AL022323, AL022237, AL049760, AF124523, | |
| | | | | | AC005480, AC006480, AC004686, AC007227, AC005015, AC006080, AP000030, AC002375, | |
| | | | | | AC002550, AL021808, AP000023, AP001052, AL133163, AC006530, AL049780, AL035422, | |
| | | | | | AL035252, AC007637, AC007226, AL023284, Z93017, AL031311, AC004217, AL031276, | |
| | | | | | AC002470, AC006511, AC002425, Z85987, AC005280, AF165926, AF001549, AC004098, | |
| | | | | | AC008033, AL031055, AF030453, U95740, AC007066, AL109984, AL137191, AL031295, | |
| | | | | | AC005088, AC005736, AF001552, AC005701, AC004491, AL049871, AF109907, AC006312, | |
| | | | | | AC004890, AJ009610, AC004019, Z84487, AC016027, AC004526, AL133246, AC006115, | |
| | | | | | AP001060, AP000031, AC006057, AC006316, AC006023, AL079304, U95743, AF196970, | |
| | | | | | AC005071, AC007999, AC004887, AC005057, AL031281, AC005484, AC003969, AC005839, | |
| | | | | | AC003101, AC006013, AL021937, AL133448, AC007738, AC004983, AC002531, U82828, | |
| | | | | | AC004782, AC006014, AC002525, AC002073, AC005189, AC006160, AC004859, AC007421, | |
| | | | | | Z83838, AC004998, AP000510, AC002352, AC007277, AC008044, AL031985, AC006501, | |
| | | | | | AC007207, AC004878, AC006111, AC005488, AC002553, AC007384, AC004821, AL024509, | |
| | | | | | AL031053, AC005082, AL079342, AC006130, AC004253, AC004386, AL080243, AC006509, | |
| | | | | | AC007298, AC006450, AC005874, AF134471, AC007225, Z99291, AC006597, AC003029, | |
| | | | | | AC005046, AF001550, AC004675, AC005859, AC005972, AL031427, AC005667, U78027, | |
| | | | | | AC005921, AC010209, AC004000, AF205588, U52111, AC002511, AC005901, AL078581, | |
| | | | | | AL022165, AP000501, AC002558, AL020997, AC004216, AC005006, AC004960, AC005529, | |
| | | | | | AC006040, AC012384, AF088219, AC007444, AP000212, AP000134, AL031431, AP000042, | |
| | | | | | AC004817, AC005823, AE000658, AL121754, AC009501, AL050343, AC005412, Z96811, | |
| | | | | | AC019014, AL109628, AC005619, AC005740, AC004967, AC016830, AC006449, AL133245, | |
| | | | | | AC005696, AC007216, AC006512, AL050318, AC003010, AF129756, AC008149, AL121652, | |
| | | | | | U80017, AC005829, AC008041, AL049830, AF050154, AF107885, AL021707, AF001548, | |
| | | | | | AL135744, AC002302, D87675, and AC005261. | |
| HUVFB69 | 1637 | 868782 | 1-558 | 15-572 | AA077619, AI620756, AW068786, AA547979, AI613285, AA613225, AL039761, H57324, | |
| | | | | | AI018726, F33126, AW007980, AA804334, AI732789, AI821355, AA721572, AL037777, | |
| | | | | | AI383965, AI364836, T63368, AW406046, AA558488, N77307, AL038005, AA515733, | |
| | | | | | AA663063, AW029515, H47719, AI557422, R19998, AI376406, AW008161, AI963183, | |
| | | | | | AI624421, AW243945, R97239, AA831638, AI017733, AA017334, AI240919, AI682310, | |
| | | | | | AA862014, AI308598, AA584207, AA032020, AA297789, AA086257, AA493497, AI672931, | |
| | | | | | AA523695, AI053784, AI926656, AW068580, AA599532, R14787, AI694784, AA662905, | |
| | | | | | H22767, R99944, AA565319, R85174, AI816058, AA301899, AA364150, AI472782, | |
| | | | | | AA588353, AA935380, AW029251, AA573051, AA487152, AA225548, AL047645, AA526413, | |
| | | | | | AI581277, AA773042, AI336771, AC003982, AC005412, AC005535, AF042484, AP000045, | |
| | | | | | AL121652, AC005006, AL035413, AP000356, AC005899, AL031984, AC003070, U91321, | |
| | | | | | AL121603, Z84496, AC005730, AC004832, AC006316, AC007637, AJ239325, AL078459, | |
| | | | | | AF196969, AF196972, AC005057, AC007676, L81772, AC002107, AC002106, AC004042, | |
| | | | | | AL050307, AC009247, AC006515, AC004983, Z83838, AC001643, AC002319, AL049743, | |
| | | | | | AL022320, AL035659, AL096791, AL049856, AL049692, AC003037, AL049849, AC002351, | |
| | | | | | AC005225, AC008064, AC002365, X82877, AC006463, AL034417, AF029308, AC007792, | |
| | | | | | AP000333, AL031602, AP000173, AL121655, AC005549, AC004774, AC002299, AC004125, | |
| | | | | | AC002072, AP000066, AC006536, Z82179, AC005519, AC009516, Z99716, AF024534, | |
| | | | | | AC005379, AC004084, AC006006, AC003685, AL034379, AC004671, AC005751, AC007686, | |
| | | | | | AC005071, AL109798, AL031593, AC005625, AC006163, AC003030, AJ239318, AC002126, | |
| | | | | | AF038458, AC005841, AP000114, AP000510, AC004079, AC004263, AL049911, AC005393, | |
| | | | | | AC004841, AL021578, AC007226, AC005828, AC006948, AC005874, AF134471, AC008041, | |
| | | | | | AC007773, AC005500, AC004025, AC002394, U72787, AF015416, Z93023, AL034395, | |
| | | | | | AC002404, AC004933, AC004595, AL030996, AC007790, AC005755, AR003505, AC004019, | |
| | | | | | AC005030, AC004151, Z82217, AC004656, AL021453, Z93930, AC004797, AC004706, | |
| | | | | | AL049759, AC004844, AC005940, AC005924, D87675, AL035455, AB023049, AC004560, | |
| | | | | | AL021397, AC005182, AP000504, AC002558, AL049570, AC007285, AC007671, AF129756, | |
| | | | | | AC004685, AC007546, AC000379, AC001531, AC004765, AC005624, AL050312, AL023582, | |
| | | | | | AC005067, AL078581, Z86090, AC006965, AC006501, AC005666, AL031584, AC005291, | |
| | | | | | AC007748, AC004033, AL050012, and AF001550. | |
| HUVFC07 | 1638 | 952080 | 1-474 | 15-488 | AI338539. | |
| HUVFH03 | 1639 | 922064 | 1-350 | 15-364 | | |
| HUVFH32 | 1640 | 934003 | 1-316 | 15-330 | | |
| HUVFI03 | 1641 | 868776 | 1-162 | 15-176 | | |
| HUVFK11 | 1642 | 965765 | 1-425 | 15-439 | AA449997, AI653493, AA654979, AI828405, AI275183, AW242031, AI754037, AA297496, | |
| | | | | | AA557982, AI471691, H90844, AA501554, AI291124, AI146750, AI821881, AI821918, | |
| | | | | | AA640430, AC004797, AL050318, AC007283, AC005274, AC004150, AC006449, AL031295, | |
| | | | | | AC005412, AP000692, AC006509, AL031427, AC004148, AC005233, AC004098, AL050348, | |
| | | | | | AC006111, AC005015, AC000025, Z93023, AL109627, AC000041, AC007191, AF053356, | |
| | | | | | AC002563, AL031729, AL009181, AC004645, AL049539, AL035458, AC005969, AC007225, | |
| | | | | | AC005907, AL008718, AC004531, AC004675, AL133448, AF181897, AC004966, AC003026, | |
| | | | | | AL117352, AL096701, AC005940, AL121653, AL022476, AP001053, AL008630, AC006241, | |
| | | | | | AP000052, AC005736, AC004647, Z83826, AL049697, Z85986, AC006023, AC007536, | |
| | | | | | U91323, AC005527, AC007688, AL020993, AC005578, AF207550, AC005175, Z95115, | |
| | | | | | AC004821, AC005972, AC005632, AC007731, AC006285, AF205588, AL049759, AC007386, | |
| | | | | | AC00550G, AP000344, U63721, AL139054, AP000114, AL049829, AC002059, AL049843, | |
| | | | | | AC002470, AC007308, AC009516, AL117344, AL034400, AC007541, Z99495, AL035249, | |
| | | | | | AC004134, AC004408, AL096791, AC016025, AC002045, AL117337, AJ003147, AC002369, | |
| | | | | | AP001054, AL133396, AC008040, U95740, AC006480, AC006965, AC004073, AL049766, | |
| | | | | | AL031587, AC007395, AC006057, AL049569, AC005519, AC005004, AC002477, AP000689, | |
| | | | | | AC004854, AC007160, AC005529, U47924, AC004913, AL035072, AC004099, AL049650, | |
| | | | | | AC000118, AL031984, AC004895, AC005057, AC005409, AC004814, AL049712, AC007919, | |
| | | | | | L78833, U91326, AC006275, AC004752, AC002350, AC005411, AL049839, Z83844, | |
| | | | | | AF111167, AC008372, AF001552, AC006441, AC007787, AL110502, AC003093, AC006960, | |
| | | | | | AC016830, AC004583, AC006064, AL133485, AL008719, AC004874, U82828, AP001052, | |
| | | | | | AC007193, AC005037, AF200465, AC009509, AC007686, AC004686, AL024498, AB016897, | |
| | | | | | AC002310, AC005031, AL031733, AC003104, AC004791, AC020663, Z95116, AC005261, | |
| | | | | | AF196972, AL117339, AC005377, AC005954, AC007011, AC004491, AL035587, AL022316, | |
| | | | | | AL122020, AL034420, U91321, Z93020, AC002073, AP000167, AC006930, AC006071, | |
| | | | | | AC005288, AC004526, AP000359, AP000967, AL109628, AC004882, AC005772, AC002549, | |
| | | | | | AC007878, AC004084, Z99128, AC005324, AC002418, AC003982, AC007314, AL117694, | |
| | | | | | U91318, AC005237, AC002312, Z68226, AC007421, AC008072, AC005041, AC004876, | |
| | | | | | AL031258, AC005740, AC004922, AF001549, AC005763, AL035460, AP000356, AC016027, | |
| | | | | | AL080243, Z69709, AL121655, U80017, AJ246003, AC006130, AP000131, AC002126, | |
| | | | | | AC004813, Z85987, AC005962, and AP000696. | |
| HUVFK58 | 1643 | 868784 | 1-772 | 15-786 | AI797913, AA699643, AI583734, and AA010369. | |
| HUVFL71 | 1644 | 958059 | 1-523 | 15-537 | | |
| HUVFQ03 | 1645 | 922727 | 1-457 | 15-471 | | |
| HUVFR02 | 1646 | 918233 | 1-564 | 15-578 | AA076812, F12628, R10205, AA331552, AI752258, R86677, and T74459. | |
| HUVFT28 | 1647 | 870617 | 1-829 | 15-843 | R06515, and AC008116. | |
| HUVFT50 | 1648 | 868769 | 1-357 | 15-371 | AW303494, and AB032978. | |
| HUVFZ06 | 1649 | 933942 | 1-408 | 15-422 | | |
| HUVGZ77 | 1650 | 909169 | 1-370 | 15-384 | AI942325, AI672318, AI672319, and AB011665. | |
| HUVHB35 | 1651 | 868751 | 1-342 | 15-356 | AC005683, and AF172277. | |
| HUVHB59 | 1652 | 963129 | 1-388 | 15-402 | H98236, and AC005940. | |
| HUVHC93 | 1653 | 908555 | 1-404 | 15-418 | AA412491, AA412659, AA669386, T93130, T91516, and AB023189, | |
| HUVHD88 | 1654 | 868697 | 1-145 | 15-159 | AA658406, AA584733, AL038606, AW189113, AI524360, AI589230, AC006512, AC002994, | |
| | | | | | AC003663, AC006312, AP000104, AC005907, AL109956, AP000272, AC007242, AC006050, | |
| | | | | | AC005632, AC004675, AP000359, AF088219, U91322, AC003051, and AC005952. | |
| HUVHG80 | 1655 | 968507 | 1-375 | 15-389 | AC002076. | |
| HUVHI07 | 1656 | 952090 | 1-508 | 15-522 | AA551131. | |
| HUVHO40 | 1657 | 924621 | 1-473 | 15-487 | AA120795, AJ003560, AA358990, AW373532, AB014585, AL096767, AC004527, and | |
| | | | | | AC006557. | |
| HUVHU74 | 1658 | 868649 | 1-348 | 15-362 | Z98036. | |
| HVCAZ38 | 1659 | 969208 | 1-1151 | 15-1165 | AA477501, AA479873, AI003611, AW270619, AI755214, AI754567, AA584489, AI754105, | |
| | | | | | AI783911, AI962030, AA904275, AI620585, AI570943, AA779783, AA262752, AA013168, | |
| | | | | | AW277253, AW438856, AL079734, AA582554, AA535216, AA019973, AI491765, AI872216, | |
| | | | | | AW439703, D26361, AP000493, AC007938, AC004019, AC006210, AC003957, U47924, | |
| | | | | | AF106564, AC005529, AC006077, AL031311, AF038458, AC006312, AC005578, AC000052, | |
| | | | | | AL031680, AC004150, AF196779, AC005694, AC007666, AC005295, AC004895, AC005368, | |
| | | | | | Z93023, AC005755, AC006006, AF053356, AC005682, AC005972, AC005306, Z82172, | |
| | | | | | AC005231, AC005081, AC007435, AC004972, U62293, Z83844, AC004973, Y18000, | |
| | | | | | AF207550, AL035361, AL050306, AC004263, AL121655, AC004686, AC004999, AC004812, | |
| | | | | | AL049766, AL078587, AP000152, AP000502, AC010206, AB015355, Z99755, AP000501, | |
| | | | | | AL121603, AC003006, AL034402, AF111169, AC005225, AC005399, AL034429, AP001053, | |
| | | | | | AC002996, AC007461, AC005224, AC005632, AL049780, Z69917, AC005535, U91321, | |
| | | | | | AF109907, AC007536, Z97183, Z86090, AC004408, AL031602, AC004887, AC004253, | |
| | | | | | AL049697, L44140, AC005520, AL023575, AF134726, AL109657, AP000365, AC007546, | |
| | | | | | AL049776, AC003035, AC004531, AC005264, AB023051, AD000092, U85195, AC006449, | |
| | | | | | AC003663, AC007055, U95090, AC005620, AC005971, AC002126, AC002395, AC006960, | |
| | | | | | AL031121, AC004890, AE000658, AC004707, AC004472, AC004859, AC005619, Y14768, | |
| | | | | | AL022322, AP000512, Z83826, AC004000, AL133448, AL021878, AJ003147, AL009181, | |
| | | | | | AC005089, AC009516, AC007283, AC002404, AC006512, AP000350, AC004131, AC005914, | |
| | | | | | AC005102, AC007308, AC003029, AC020663, AL023803, AC007327, AC002350, AC005245, | |
| | | | | | Z82206, AC006101, AC006111, AL049745, AC004797, AC005701, Z71183, AC005722, | |
| | | | | | AC006509, AC003010, AC006468, AC007690, AC008085, AC006166, AL049643, AC004858, | |
| | | | | | AC000134, Z94801, AC002365, AC005790, AL049539, AC005064, AC007263, AC006120, | |
| | | | | | AP000359, Z85986, AC004966, Z98745, AC009247, AL022345, AC006251, AC005919, | |
| | | | | | AC007707, AL035422, AC004821, AC004974, AC004881, Z99570, AC004929, U80017, | |
| | | | | | AC000159, AC004448, AF027390, AC016025, AC005037, AP000505, AL034421, AL021918, | |
| | | | | | AL136504, AL034420, AC006511, AL031584, AC004905, AL035086, AP000557, AF196972, | |
| | | | | | AC008123, and AC005736. | |
| HVCBV04 | 1660 | 925844 | 1-618 | 15-632 | | |
| HVCCC81 | 1661 | 933449 | 1-49 | 15-63 | | |
| HVCCK04 | 1662 | 925796 | 1-903 | 15-917 | AA130954, AI826639, AA149522, AI625572, AI452441, AI653591, AI305234, AI433556, | |
| | | | | | AI366037, AI076932, W60508, AI298406, AW249838, AA693895, AA932571, AI248312, | |
| | | | | | AW136383, AI420053, AW250502, AI216563, AA678309, AA426066, AA937788, F31582, | |
| | | | | | AA340275, AA204645, R11867, AI570112, AI692968, R60411, AI000109, AA130824, | |
| | | | | | AA207010, W56198, AW382487, AW382451, AW392670, AW372827, AW363220, | |
| | | | | | AW384394, AL119443, Z99396, AL119391, AL119497, U46351, U46349, AL119483, | |
| | | | | | AL119319, U46347, AL119484, AL119363, AL119457, U46346, U46350, AL119324, | |
| | | | | | AL042965, AL119444, AL119355, AL119396, AL119439, U46341, AL119341, AL119335, | |
| | | | | | AL119522, AL119418, AL119464, AR066494, A81671, AR069079, AR060234, AR054110, and | |
| | | | | | AB026436. | |
| HVVAC41 | 1663 | 949141 | 1-259 | 15-273 | | |
| HVVAJ01 | 1664 | 914354 | 1-479 | 15-493 | | |
| HVVAJ06 | 1665 | 933675 | 1-375 | 15-389 | | |
| HVVBG19 | 1666 | 968967 | 1-541 | 15-555 | | |
| HVVBK45 | 1667 | 964102 | 1-1441 | 15-1455 | AI751508, AW439242, AI858347, AA954665, AW173684, AA639199, AI633169, AW304822, | |
| | | | | | AI828611, AI088904, AI923258, AI635118, AI952782, AI683485, AI635010, AI963627, | |
| | | | | | AI278264, AW129973, AI860650, AI373090, AA642700, AI860395, AI982534, AI637577, | |
| | | | | | AI561081, AW304817, AI167846, AW130866, AA747281, AI984745, AW379208, AI683773, | |
| | | | | | AA587659, AW058417, AI267698, AI986135, AA488133, AI744496, AI684490, AI559255, | |
| | | | | | AA488134, AI887129, AA282616, AI274756, AA730687, AI472334, AI492872, AW150281, | |
| | | | | | AW169998, AA970450, AW055340, AW193022, AI288077, AI955042, AI858187, AA978256, | |
| | | | | | AI189233, AI888974, H01983, AA130169, AA644170, H01972, AI273008, AI273026, F09244, | |
| | | | | | R70971, AW391166, AI873591, AI399762, AI565023, AW189754, AI824564, AI634443, | |
| | | | | | AI275201, AA907212, T96248, T93742, Z39255, AI873453, R70923, F11589, AA918265, | |
| | | | | | AI284207, AI567328, H91570, AI868395, R12808, AA354807, R59470, AI624071, AI611218, | |
| | | | | | R59469, AI636153, AA337310, AI954448, H13229, R32680, AI886562, AI961717, AA255886, | |
| | | | | | AA694475, AA854659, AA256684, D60252, R41517, R28489, AI347373, AI889488, AI309793, | |
| | | | | | AI478725, AA287318, AI691017, AI768787, AI418367, AI819921, H24906, AA634601, | |
| | | | | | H26324, T24624, AI870106, C02323, AI479533, AI983094, AI566584, Z43173, AA629599, | |
| | | | | | Z98172, Z84466, and AC005225. | |
| HVVBK72 | 1668 | 933167 | 1-967 | 15-981 | AW367808, AI016826, and AL135700. | |
| HVVBV44 | 1669 | 917559 | 1-228 | 15-242 | | |
| HVVCO01 | 1670 | 913996 | 1-659 | 15-673 | | |
| HWLHJ68 | 1671 | 957834 | 1-1601 | 15-1615 | AW364014, AW364012, AW364015, AW364019, AI760785, AI384093, AI224905, AA282933, | |
| | | | | | AI267509, AA513728, AA729606, R80458, N76465, N59362, AA334630, AA300682, R69849, | |
| | | | | | R80659, AA573139, H86676, AA427982, AI499874, R31977, AJ351352, D61921, AI091339, | |
| | | | | | AA310325, AI051323, AA830587, N67319, AA449856, AA621436, N93060, AW134482, | |
| | | | | | AI694673, AI161320, AI623166, AI582177, AW241458, AA648966, AA724337, and | |
| | | | | | AB033047. | |
| HVVDT04 | 1672 | 925793 | 1-286 | 15-300 | AA811233. | |
| HVVBY08 | 1673 | 957658 | 1-608 | 15-622 | AA481033, AI352156, AA845263, AA918987, AA534490, AW089740, AI718613, AA845628, | |
| | | | | | AA609823, AI369407, AA631989, AI669939, AI310130, AW007165, AA609822, AI620598, | |
| | | | | | AI310317, AI718649, AI693036, AI168639, AI004446, AI253744, AW081227, AW005641, | |
| | | | | | AI097314, AW235502, AA738077, AI440490, AA481085, AI198174, AA121509, AI018313, | |
| | | | | | AI167316, AA601606, AI092025, AA989671, AA705106, AA402875, AA532756, AA872342, | |
| | | | | | AW081239, AW081228, AA953907, AA215299, AA588197, AW262214, AA975943, | |
| | | | | | AA580166, AW405706, AI915786, AI762484, AI081256, AA927941, AI698971, AA927751, | |
| | | | | | AW009088, AA524140, AI695474, AI364551, AA214505, AA722938, AA923824, AI240069, | |
| | | | | | AA631636, AI468059, AA358257, AA743585, AA382416, AA233136, AA729480, AA595320, | |
| | | | | | AL119399, AL119511, AL119457, AL042544, AL119324, AL042382, AL043152, AL079794, | |
| | | | | | AL043168, AL134524, AL037081, AA865126, AL042866, AL120853, AW051212, AI637584, | |
| | | | | | AI433157, AI702073, AL079741, AI591420, AI493567, AW051088, AW168828, AI590575, | |
| | | | | | AW169132, AI673363, AI610690, AI352497, AI698391, AI889189, AI633125, AI915291, | |
| | | | | | AW152182, AI431323, AI862139, AW078729, AI002285, AI932794, AW173633, AW198090, | |
| | | | | | AW192652, AL121007, AI679672, AL046052, AI697207, AI538564, AL046931, AW090550, | |
| | | | | | AI560679, AI884318, AW268964, AI670009, AW264019, AW075936, AI819326, AW006302, | |
| | | | | | AW051258, AI818683, AI783792, AI612852, AI358213, AW129230, AI610671, AI630877, | |
| | | | | | AI921464, AW080746, AI312542, AI890838, AI040725, AL119791, AI473536, AA748343, | |
| | | | | | AI912356, AW168788, AI571439, AI802542, AI922561, AI815855, AI471429, AI570807, | |
| | | | | | AL037582, AL046595, AI866469, AL037602, AI288050, AI635287, AW026882, AW168031, | |
| | | | | | AI684234, AI559619, AI499963, AI564719, AI951868, AI095119, AI669639, AI890223, | |
| | | | | | AW004886, AI589428, AW169604, AI590021, AI432969, AW078710, AI688858, AW239367, | |
| | | | | | AW079572, AI270183, AI687362, AI499285, AI653979, AI6200 15, AI522052, AI624693, | |
| | | | | | AI470674, AI677796, AL040207, AI619502, AI978703, AA740450, AI923 124, AI682971, | |
| | | | | | AI887396, AW087445, AI284084, AW118417, AI564259, AW148363, AI801+766, AW075669, | |
| | | | | | AW074172, AW088628, AW081298, AI469532, AI872423, AI909661, AI640729, AI283760, | |
| | | | | | AI866770, AW190194, AI679550, AI812015, AI923370, W74529, AI690748, AI613038, | |
| | | | | | AW192687, AI648684, AI539771, AI446809, AI870192, AI538850, AI871697, AI580190, | |
| | | | | | AW129659, AI249877, AI432030, AW083778, AI348914, AI452560, AI926790, AA641818, | |
| | | | | | AI499890, AI890833, AI677646, AI815232, AW081343, AW193020, AI679098, AI241923, | |
| | | | | | AI587606, AW131294, AW167021, AI954183, AW148408, AI799183, AI357940, AA835966, | |
| | | | | | AC005258, AF182293, Z63483, U77594, Y11587, X65873, X60786, L13297, I89947, | |
| | | | | | AL137271, AF177401, L10353, AF061981, AF113694, U00763, AL080159, X52128, A08910, | |
| | | | | | A08909, I48978, AR038854, I30339, I30334, AL137480, AF111851, AF153205, Z82022, | |
| | | | | | AL137459, AL050149, AL050277, AF139986, A77033, A77035, AL137523, A08908, | |
| | | | | | AF031147, Y09972, I46765, A08916, A08913, U35846, AF067790, AE126247, AL049347, | |
| | | | | | AF111112, AR060234, AF031903, AL049430, AF182215, AL137281, I09499, E05822, | |
| | | | | | AL050110, AL117583, AF090886, AL137533, AL050366, 563521, AL137478, U42766, | |
| | | | | | M92439, AI8788, AF000167, A76335, AF183393, E06743, AL137479, X70685, AF151109, | |
| | | | | | AF085809, AR053103, A65341, AL133557, AF026816, AL137463, AL133093, AF001215, | |
| | | | | | AF111849, AL122100, AF090900, AL080148, A08912, AL137539, X98066, I89931, AL049283, | |
| | | | | | AJ000937, AL133075, AL133568, AF104032, I49625, X82434, A18777, AF097996, AL117416, | |
| | | | | | A45787, AF180525, AL133665, S77771, I00734, AL133560, I48979, A57389, AL137526, | |
| | | | | | Y16645, Z37987, U66274, E00617, E00717, E00778, AL133113, AR020905, AF113019, | |
| | | | | | AF113699, AL110221, M27260, U88966, AR066494, AL110158, AJ003118, AF158248, | |
| | | | | | AL110225, AF004162, AL137550, AL137488, AF114168, AF100931, U90884, X84990, | |
| | | | | | AF017790, AL137529, Y14314, AL080156, AF090901, AF030513, AL050138, AL137476, | |
| | | | | | L04849, AL133637, AF067728, AL133558, Y10936, I33392, AF090903, AL096744, U01145, | |
| | | | | | AL117440, AL096751, AL117435, AL133565, AF032666, Z97214, AF081197, AF081195, | |
| | | | | | X76228, AF087943, AF132676, AF069506, AF061836, AL137538, X59414, A93350, | |
| | | | | | AL080129, AF106862, AL110280, E01573, E02319, I22272, A21103, A08907, AL133080, | |
| | | | | | AL117626, AF079763, AL122098, AF185576, AL133606, AF000145, AF162270, A08911, | |
| | | | | | X81464,AF028823, X80340, E02349, AL122111, M96857, S68736, AL050393, U91329, | |
| | | | | | AL137267, AL110218, AF113691, U49434, U67958, AF159615, AF142672, AF017152, | |
| | | | | | U87620, X99717, U80742, AL133031, AJ005690, S76508, S78214, E12747, I89934, AL080124, | |
| | | | | | AL137429, AF113677, X87582, AF118090, AL117460, AF026124, U96683, AL023657, | |
| | | | | | AJ010277, AL122118, AB026128, Y08769, A58524, A58523, AF078844, AL117648, | |
| | | | | | AL122110, AL050170, AR013797, AF076464, AF090934, AF114170, L19437, U92068, | |
| | | | | | X99257, AL133640, Z72491, L30117, AF109155, AL117457, AF036268, X57961, AF057300, | |
| | | | | | AF057299, X83508, AF113690, E03348, AF113689, X66862, AF022813, AR000496, | |
| | | | | | AL137560, AL049382, and U39656. | |
| HVVBM06 | 1674 | 933528 | 1-466 | 15-480 | AI685069, AI378607, AI126015, AI129820, AA912338, AI367538, AW192295, AA495868, and | |
| | | | | | AI738723. | |
| HUVHL82 | 1675 | 912011 | 1-567 | 15-581 | AI761350, AF039240, AI352375, AI206857, T25311, AW291067, AI090441, T25310, W39573, | |
| | | | | | and AC004596. | |
| HUVHI06 | 1676 | 952479 | 1-2268 | 15-2282 | AW188421, AI810011, AW241649,N51726, AA449707, AI275102, N66707, AI299870, | |
| | | | | | AI805173, AA448561, D82294, AW002169, AA523264, AW450305, N33880, AI929539, | |
| | | | | | AI888456, AA912441, N25245, AA909431, H13878, AI362098, H17359, AW020771, | |
| | | | | | AA858024, AA954574, AA012893, H17330, H08372, H08373, N51811, H08249, H40727, | |
| | | | | | AA828659, H08148, Z45445, AA447120, AA828725, AA354903, AA736863, Z41152, | |
| | | | | | AA172308, AA247943, AA581242, AA019451, H13835, AA336350, AA171992, T16753, | |
| | | | | | AA337210, AI160120, AA854342, AA935605, AW086477, AI242421, T49472, AI471813, | |
| | | | | | AI803581, AI301683, AI287719, AI803133, AI752956, AA996171, AI983147, AA136130, | |
| | | | | | AA906744, AW136726, AA482550, AI363029, AA926759, AA448845, AA287077, AA910010, | |
| | | | | | AA885946, AA906319, AA429360, AA969237, AI005339, AL037854, AW246747, AA808249, | |
| | | | | | AI282196, AI276053, AA737505, AW015432, AI872692, AA166813, AW250179, AA773516, | |
| | | | | | AI253632, AA670020, AI368453, AW275936, AA608627, AI263811, AI985149, AA833795, | |
| | | | | | AA879424, AI886945, AL037427, AW026473, N25721, AW183174, AW082723, AL037853, | |
| | | | | | AA553414, AI809312, AI186804, AI005449, AI986314, AI673381, AI017892, N48321, | |
| | | | | | AI919513, AI468411, AA887602, W60356, AA169201, AI445179, AA554323, AA705759, | |
| | | | | | AI686271, AI651379, AI742846, AA533769, AA702089, W45427, AA724285, AI391610, | |
| | | | | | AA824443, AI352069, AI869500, AI420348, AA599184, AA744761, AL037220, AW079854, | |
| | | | | | AA417981, AW337696, AI453528, AA372237, AI095475, AA127848, AI445148, AA581188, | |
| | | | | | D82430, AI363934, AI860112, AA847002, AI743438, AI919040, AI469498, AA577316, | |
| | | | | | H56183, AA640332, T03741, AA897496, T60053, AI827644, AI916823, AA715407, | |
| | | | | | AA833676, AC006238, AF044670, and AF157497. | |
| HUVGP05 | 1677 | 930892 | 1-384 | 15-398 | AW293310, AI761633, AA721086, AA488897, H86783, AW296923, AA648257, AA906315, | |
| | | | | | H84926, and AF091457. | |
| HUVFP71 | 1678 | 950681 | 1-431 | 15-445 | H15460. | |
| HUVFI01 | 1679 | 945834 | 1-1366 | 15-1380 | AA368455, AA861915, AA367693, AI000735, D31762, and AL049611. | |
| HUVFE03 | 1680 | 922889 | 1-692 | 15-706 | AA235432. | |
| HUVDO18 | 1681 | 868783 | 1-299 | 15-313 | AI003772, AW304257, AI624133, AW149036, W45510, AW328027, AW069137, AA375087, | |
| | | | | | and D84488. | |
| HUVDO11 | 1682 | 967813 | 1-263 | 15-277 | | |
| HUVDO07 | 1683 | 954224 | 1-301 | 15-315 | | |
| HUVDM27 | 1684 | 521938 | 1-342 | 15-356 | AC004954, and AC004084. | |
| HUVDH61 | 1685 | 526590 | 1-331 | 15-345 | AA664604, AA568204, AA570740, AA483606, AI446623, AA315361, AL042373, AI569510, | |
| | | | | | H91062, AA449669, W03333, AI801505, N55515, AA603413, AI889579, AI431513, R51582, | |
| | | | | | AI300054, AI253376, AI278089, AW236163, AI356440, AA916177, AA757426, AA130647, | |
| | | | | | AI754170, AI536834, AA513846, AW069412, AA326824, AI627614, T73016, AI284595, | |
| | | | | | AA745470, AA084609, AW406659, AI583106, AI635609, AA401963, AC006129, AJ236701, | |
| | | | | | M87914, S42653, AC006251, AC005368, U62317, AL035587, U96629, AF095725, AC005261, | |
| | | | | | AL080242, AC006468, AC005747, AC005520, AC007283, U80017, AC005585, AL021977, | |
| | | | | | AC007193, AC006449, AC005940, AL022336, AL031283, AC006312, AL031602, AC004999, | |
| | | | | | AC002544, AC002400, AP000240, Z98941, Z94802, AL035458, AC004491, AC006276, | |
| | | | | | Z98051, AL022165, AC005722, AL031311, AJ011930, AC006064, AC003688, AC005484, | |
| | | | | | AC004814, AC006111, AC004757, AC003080, AP000555, AL031848, U62293, AC000353, | |
| | | | | | AC004815, AC004890, AL135744, AC006071, AC005839, U91318, AC002310, AC005531, | |
| | | | | | AC007510, AC005086, AC004922, AC004797, AJ246003, AC006285, AC006126, AL022311, | |
| | | | | | AC006088, U91325, AL031228, AC002996, AC004593, AC000354, AC005412, Z82248, | |
| | | | | | AC002044, Z84466, AC002418, AL121658, Z98742, AC000086, AL049779, AP000065, | |
| | | | | | Z96811, AC005971, Z98304, AC004832, AC005057, AC004386, AF023268, AC002472, | |
| | | | | | U95742, AC002347, AL035659, Z99943, AC005746, AL121653, U50871, AC005702, | |
| | | | | | AP000156, AC005212, AC004659, AC002316, AP001053, AC007292, AL034555, AP000096, | |
| | | | | | AC005519, AC007225, Z84480, AC003109, AL031775, AC007216, AC004881, AJ003147, | |
| | | | | | AF121781, AC002286, AL021453, AL022320, AC007421, AB022537, AC007707, AF064861, | |
| | | | | | S79349, AL079340, AC002366, AP000014, AC006501, AF124523, AC002115, AC002059, | |
| | | | | | U52112, AL031591, AP000696, Z95115, AP000053, AP000121, AC003966, AC006130, | |
| | | | | | AC006343, AC000026, AC005823, U33956, AC004106, AL109827, AC005280, AL080243, | |
| | | | | | AP000251, AC004821, U91326, AP000355, AC009247, AC005031, AC006020, AL022316, | |
| | | | | | AC005480, AL021579, AC005529, AF196972, AC005763, AC007363, AC002314, AC002430, | |
| | | | | | Z97630, AC010582, AL050318, AP000695, AP000553, AC009516, AL035086, AC006039, | |
| | | | | | AC004656, AF045555, AC005190, AC005081, AL020997, AC004983, AC002094, Z97181, | |
| | | | | | Z98749, AC007384, AC004912, AC004963, AC002511, AL049761, AC000378, AF031078, | |
| | | | | | AL031681, Z83826, AC004644, AC004448, AP000353, AL021707, AL049843, AC004531, | |
| | | | | | AC005666, AC007842, U95739, AC000025, Z68128, AF030876, AC002350, AC007263, | |
| | | | | | AL024507, AC004760, AC002073, AP000030, AC005696, AP000501, AC006001, AC016027, | |
| | | | | | AL050321, AC005527, AP000362, Z99716, AC003963, AC003007, AC005014, U07561, | |
| | | | | | AP000356, AL031597, AC004883, AC004699, AP000168, AC005512, AC005089, AL049569, | |
| | | | | | AP000326, AB001523, AC005015, AC005391, and AC006388. | |
| HUVCU26 | 1686 | 974232 | 1-688 | 15-702 | AC005342. | |
| HUVCM76 | 1687 | 522660 | 1-133 | 15-147 | | |
| HUVBC21 | 1688 | 671479 | 1-702 | 15-716 | AI629014, AI015875, AA020867, AA020818, W15455, AI392776, W39642, AI248691, | |
| | | | | | AI022556, AA296410, AA017442, R02316, and AF088026. | |
| HUVAA46 | 1689 | 667943 | 1-603 | 15-617 | AA302686, AA302685, AA704009, AA568204, AA570740, AA483606, AI870453, AI720968, | |
| | | | | | AW078909, AA550850, R55078, AA829036, AA719073, AW089322, AA484892, AA488746, | |
| | | | | | AA935409, AI340151, AA676592, AI174456, AA320149, AL035400, AC007221, AC007425, | |
| | | | | | AL020995, AC0050I5, AC007731, AC005500, AC004650, AC007308, AC005274, AC002470, | |
| | | | | | L77570, AC002477, AL133500, AC005696, AC005280, AC012384, AJ251973, AC007055, | |
| | | | | | AL096701, AC005722, AC004067, AC004000, AL109963, AC005088, AL117330, AL133353, | |
| | | | | | AC005740, AC005081, AC002287, AC002070, AP000128, AP000206, U85195, L78810, | |
| | | | | | AL132777, AL022323, AC006160, AC010170, AC005921, U91321, AC004913, AC004382, | |
| | | | | | AP000245, AL132987, AC003108, AE000658, Z93020, U91323, AC004832, AC005919, | |
| | | | | | AL117344, U91322, AB023048, AL031276, AL030996, AC004966, AL050318, AC007676, | |
| | | | | | AC005484, AC006480, U95740, AL121653, AC005529, AC007052, AC004876, AL050332, | |
| | | | | | AC005844, AC005874, AF134471, AC003029, AL031281, AC002302, Z83844, AP000049, | |
| | | | | | AP000116, AF001548, AC002299, AP000553, AC005971, U91326, AL133245, AL121603, | |
| | | | | | AC006344, AC007172, AL021391, AC005527, AL021807, AC005005, AP000311, AL020997, | |
| | | | | | AC002059, AC006538, AL031588, AC002369, AC006511, AL035079, AC006057, AC005071, | |
| | | | | | AC005200, Z95116, AF045555, AC002544, AC006277, AC007637, Z93930, AC002350, | |
| | | | | | AC007546, AC004967, AC004878, AL031594, Z93023, AC006023, AL049569, AL133448, | |
| | | | | | AC004491, U80017, AC005011, AC0050I5, AL033527, AL049761, AL049760, AF190465, | |
| | | | | | AC007011, AB023049, AP000008, AC007934, AL035422, AC005102, AC005821, AC007371, | |
| | | | | | AL109802, Z98051, AP000704, AC005225, AC006208, Z85986, AL035683, AL031289, | |
| | | | | | AC007041, AC005920, AC000052, U62293, AC004531, AP000692, AF196969, AP000121, | |
| | | | | | AC006312, AL034429, AC006254, AF111169, AC007030, AC005906, AF109907, AC005324, | |
| | | | | | AL133382, Z86090, AL049776, AC008018, AL008716, AL022316, AC003663, AP000552, | |
| | | | | | AC004477, AC004883, AC004841, AC002326, AL096706, AL031432, AC005796, AC000353, | |
| | | | | | AC000378, AF053356, AC004953, AL139054, AL117337, AC005399, AL050348, AC005606, | |
| | | | | | AC005231, AC004019, AC005562, AC005335, AC005332, AF047825, AC002559, AC006468, | |
| | | | | | AL122003, AL031279, AP000115, AC006449, AP000031, AC007057, AL031602, AL035405, | |
| | | | | | AL021154, AP001053, AC007225, AC004998, AC005664, AC009516, AC005881, and | |
| | | | | | AC005184. | |
| HUNAK12 | 1690 | 839574 | 1-421 | 15-435 | AA757367, AA296644, and AC006327. | |
| HUNAG41 | 1691 | 711543 | 1-473 | 15-487 | R19731, H08375, H06407, R54527, AI654477, AA298292, and AI683415. | |
| HUNAF22 | 1692 | 800452 | 1-422 | 15-436 | AA298987, and AC006222. | |
| HUNAF20 | 1693 | 961527 | 1-467 | 15-481 | AA528216, AI347038, AI308941, AA583432, AA412292, AI147693, AA632915, AA836857, | |
| | | | | | AA018749, AA135185, AA516435, AA916348, AA514541, N62509, AA470014, AI350971, | |
| | | | | | R42401, 1117978, AA299011, AI207239, AA349833, AA494556, F12523, AA290708, and | |
| | | | | | AF184971. | |
| HUNAE95 | 1694 | 796691 | 1-411 | 15-425 | R68794, T89302, R64326, R78900, AA299021, AW021631, R26617, and AI820562. | |
| HUNAE76 | 1695 | 524239 | 1-308 | 15-322 | AA298749, AW078909, AA742815, AA557686, AC004132, AC008372, AL022238, AC006430, | |
| | | | | | AC005011, AC005899, AC002351, AF001549, AC004821, AL035420, AC006441, M89651, | |
| | | | | | AC005746, AJ003147, AL031276, AC005969, AL009031, AC002326, U91318, AC004837, | |
| | | | | | AC000387, AL034423, Z15025, AC003101, AC005037, AC005184, AC004526, AC018633, | |
| | | | | | AP000215, AL031295, AL008718, and AP000502. | |
| HUNAE02 | 1696 | 921132 | 1-429 | 15-443 | AA502008, AA298860, N59191, AI559794, AI218041, AI805928, N59181, AW188364, | |
| | | | | | AA470022, H29622, AI216757, AI015520, AI202594, AA458483, AA565254, AA883777, | |
| | | | | | N89710, AW340697, AI288448, AA588588, AI344556, AI248194, AI469895, AI954555, | |
| | | | | | R89606, AI149444, AA505427, AW118040, AA886990, N30779, AW206450, AI800674, | |
| | | | | | AA343608, AI761704, AA514300, AA581058, and AF151848. | |
| HUNAD10 | 1697 | 968590 | 1-479 | 15-493 | AA258009, AA299129, C02926, N85987, AA630672, AI499588, AW023990, AI636730, | |
| | | | | | AW196064, AA380354, AA588001, AI818231, AI745151, AL045808, AL046156, AW341978, | |
| | | | | | AA903253, AA515457, AA308716, AA575911, AA532700, AI494539, AI537772, AL046266, | |
| | | | | | C15060, AA715201, N53062, AA370455, AI524360, AA487621, AI754544, N94065, | |
| | | | | | AA488746, AI355556, N23504, AA480574, R73754, AW081194, AA531580, AL138182, | |
| | | | | | AA618452, W47183, AA580808, AA345064, H69765, F00440, AI684097, AI817516, | |
| | | | | | AA559241, AI908575, AL119724, R43288, AA833896, AA833875, H12383, AA402129, | |
| | | | | | AA502991, AI306232, R65651, AA806762, AA604840, AW089322, AI174891, AI002744, | |
| | | | | | AA463590, AA476397, AA719073, AI623423, H78032, AW085718, AC012627, AL020993, | |
| | | | | | Z93017, AF052041, U78308, AF095725, AL121655, AL049631, Z99128, AL035415, | |
| | | | | | AL035652, AC005377, AF111169, AF003529, AL096766, AJ246003, Z95152, AL009179, | |
| | | | | | AC006353, AL117355, AL121653, AC004655, AC005037, AC006059, AL031279, AL031289 | |
| | | | | | AC004593, AL031282, AC003682, AC005920, AF015720, AL078638, AB019440, AL117351, | |
| | | | | | AC005210, AC002558, AL078581, AC002036, AL022329, AP000269, Z93023, AL034549, | |
| | | | | | AC004383, Z99716, D86992, D88270, AL023096, AC007225, Z98048, AP000103, AC007686, | |
| | | | | | AB017602, AC005587, AC005695, M33132, AF111163, AC007253, Z15025, Z93016, | |
| | | | | | AF118808, AC000377, Z84469, AL022336, AJ229041, AF002223, AC003080, AC003982, | |
| | | | | | AC002403, AR036572, U91328, AC004787, AL031319, AL031311, L47334, AC004752, | |
| | | | | | AL031230, AP000141, AF129756, AC005066, AL023494, AB029885, AC005180, AC005681, | |
| | | | | | U95739, AL133404, Z54146, AC004859, U63630, AC005773, Z97630, AC004769, AC002395, | |
| | | | | | AC002504, D87675, AC007238, AC002299, AC006042, AC006597, AC005412, A0007486, | |
| | | | | | AC005919, AC004616, AL121591, Z93244, AL109829, AC005220, AL031670, L14752, | |
| | | | | | AC007227, AB000931, AC004134, Z86090, AJ006345, AD000813, AP000281, AP000039, | |
| | | | | | AC002996, AC006254, AC004590, AC004595, AC007371, Z68324, AL109627, AC002468, | |
| | | | | | AF111170, U29185, AL096755, AC005872, AF184110, AL109801, Z75889, AL035468, | |
| | | | | | AC003969, AC005004, AC004019, AC006262, AC007314, AL031432, AC006064, AC004242, | |
| | | | | | U78027, AC004097, M26434, AC007684, AC004662, AC004985, AC005031, AC004771, | |
| | | | | | AL022165, AC005081, AL109980, AC0G0115, Z97632, AC006023, AL009183, Y14768, | |
| | | | | | AC002404, AL035422, AC004967, AC005922, AC011718, AC005065, AP000116, AC000111, | |
| | | | | | AL031283, AC006208, AL034402, AC002347, AC005231, AC004910, AL049780, AL022320, | |
| | | | | | AC005484, AC007055, AF045555, AC002480, AC005375, AC004025, AL049713, Z97183, | |
| | | | | | AP001039, AP000505, AF165926, AC005765, AC009516, AC006972, L81583, AC005756, | |
| | | | | | Z82189, AC004753, AC005566, AC004760, AC004039, AL009177, AP000493, AL022318, | |
| | | | | | AC005736, AF190465, AC004699, AC005783, AF107258, AB023053, AC004620, AC004998, | |
| | | | | | AC008275, AC004605, AC006948, AC002525, AC007052, L44140, AL133396, AP000108, | |
| | | | | | AC005379, AC003104, AL021154, AC005209, AL096767, and AL034376. | |
| HUNAC68 | 1698 | 753817 | 1-190 | 15-204 | AA299084, AW058660, R79123, and AI955484. | |
| HUNAB76 | 1699 | 968754 | 1-457 | 15-471 | T78720, T85868, and AA299178. | |
| HUNAB42 | 1700 | 714264 | 1-278 | 15-292 | AA299202, AW382627, and W69280. | |
| HUKFS69 | 1701 | 754186 | 1-276 | 15-290 | N98250, and AL021068. | |
| HUKFL89 | 1702 | 574525 | 1-457 | 15-471 | AI027884, N90218, W56483, and W38946. | |
| HUKFL71 | 1703 | 760581 | 1-227 | 15-241 | AA348602, AW188860, T17332, AI634716, AA586433, AI049701, AI559282, AW238212, | |
| | | | | | AA728938, AA806804, AI564301, AI002762, AI623364, AW068580, AI872000, AA531596, | |
| | | | | | AW194077, AA758131, AW003612, AI365625, AI620266, AA720582, AA363003, AA628740, | |
| | | | | | R61195, AA713705, AA626840, AA713714, T30418, AA827383, AI798242, AA179663, | |
| | | | | | R49266, AW190484, AI075249, AI819262, N40092, AI188049, AA351808, AI475870, | |
| | | | | | AA683091, AC006485, AL035422, AC005323, AJ003147, AL121754, AL035634, AL133371, | |
| | | | | | AC007686, AC005150, AC002551, U07563, AL021578, AP000514, Z93241, AC005386, | |
| | | | | | Z99943, AC006960, AC004383, Z97876, AC006120, AC002504, AL022326, AL035420, | |
| | | | | | Z85996, AL031228, AC005231, AC005537, AF111168, AC002529, AL008634, AC004832, | |
| | | | | | AP000502, AL021940, AB022537, AL109798, AL078460, Z98941, Z98742, AC005094, | |
| | | | | | AC005484, AC006450, AL049569, AC005527, AC004921, AC000088, AC000082, AC000071, | |
| | | | | | AF099810, AL022316, AF095901, AF001550, AC003007, AP000555, Z95114, AC006079, | |
| | | | | | AC006441, AC005325, AL031846, AC006597, AC004796, AL121658, AC005529, AC007773, | |
| | | | | | AF053356, AC005146, AC006449, AL035588, AC005632, AC005409, U73634, AC007325, | |
| | | | | | AC007263, AC006455, AC004895, Z98044, AL022312, AC005058, AF111167, AL031984, | |
| | | | | | AL049760, AC004887, AL035495, AF196969, Z98051, AL078638, AC007919, AL049709, | |
| | | | | | AC005295, AC007151, AC000085, AC007917, AL035455, Z95113, AL079304, AC004084, | |
| | | | | | AC004552, AC008009, AL049734, AL031733, Z84487, AC002400, AL133312, AC002381, | |
| | | | | | U47924, AL049611, AC006023, AL135960, AJ131016, AC007666, AC005160, AL024498, | |
| | | | | | AC004865, AC002492, AL031311, AF146367, AC002375, AL035413, L78810, Z75887, | |
| | | | | | AC004900, AC004526, AL049777, AC004148, AC005678, AC000052, AC006480, Z97054, | |
| | | | | | AC005531, AC004491, AC005535, AL034417, and AC005051. | |
| HUKFL52 | 1704 | 574523 | 1-482 | 15-496 | AW303688, AC002302, and AL117325. | |
| HUKFK53 | 1705 | 577349 | 1-436 | 15-450 | | |
| HUKFE56 | 1706 | 574381 | 1-213 | 15-227 | W30961, and AA284307. | |
| HUKFD95 | 1707 | 796014 | 1-446 | 15-460 | AA259075, AA251698, and Z56473. | |
| HUKEY01 | 1708 | 921504 | 1-333 | 15-347 | AA913741, AI052134, AA838729, AA418342, AI368697, AA156454, AI275854, AI554346, | |
| | | | | | AW193440, AA564981, AI274286, AA969728, AI920804, AI435811, AA410342, AI360949, | |
| | | | | | W04701, N25790, AA115096, N23736, AA193407, N58849, AI858171, AA630452, AA649290, | |
| | | | | | Z24907, AA757161, AA630461, AA780577, W15321, AI245223, AA363098, AI038657, | |
| | | | | | AA860500, AA993680, AA435925, AI439836, AA651840, AA279471, AW338576, AA342107, | |
| | | | | | AA676504, AA854457, N48087, AI539628, AI089644, AI095714, AI373864, AA639258, | |
| | | | | | AI567507, AA432267, AA194632, AI280712, AA890333, AA890563, W72009, AI745574, | |
| | | | | | N91475, N75263, C00067, AA302403, and AA431256. | |
| HUKER62 | 1709 | 772501 | 1-547 | 15-561 | R51351, AA534218, AA580300, AI284322, H78278, AI610392, D52671, AA115034, AI299062, | |
| | | | | | AA778315, W73534, AA393903, AI290762, AI521482, AA115506, AI439629, AI475831, | |
| | | | | | AI688331, AA764845, AI285054, AA027198, AI344564, AA830343, AW103497, AA435644, | |
| | | | | | AW152418, AI814349, AI953851, T87095, AA865531, AI937550, AI992099, AI492575, | |
| | | | | | AI968561, AI990835, W46791, AI336624, W46919, AI380956, W73259, AI675500, AI685131, | |
| | | | | | AA634802, AA482973, AI669123, AI973010, AI201952, AW262269, AI352386, AI470518, | |
| | | | | | AI337432, AW274833, AI783962, AA987852, AI470225, AW083650, D61500, T33520, | |
| | | | | | AI885985, T03350, AW150047, AA350468, Z38276, N26529, AI864257, N21584, R32096, | |
| | | | | | AI372555, AI372554, H78277, AA045465, AW440715, AI620909, AA384495, AA046535, | |
| | | | | | AW015422, AI336885, Z69667, and AC004754. | |
| HUKEP18 | 1710 | 957456 | 1-838 | 15-852 | AA203189, AI057441, AW139922, AA719156, AI653844, AW104223, AI208345, AI535660, | |
| | | | | | AI536138, T18597, D80045, AI535639, D59751, AI557262, C15076, D80164, AI557084, | |
| | | | | | D59467, R29657, C14331, D80193, AI526078, AI525856, D81026, C14429, AI541365, D59787, | |
| | | | | | AA585439, C14389, AI525556, AW366296, D80195, D80227, D59502, AI557533, AI525316, | |
| | | | | | D50979, D81030, D59275, R45895, D80269, AI541205, D59927, D80022, D80188, D58283, | |
| | | | | | C15406, D80166, D51799, D59859, D59619, AI525500, D80210, D80391, D80240, D51423, | |
| | | | | | D80253, D80043, AI557864, D59610, AA305409, D80212, D80038, D80196, D80219, D57483, | |
| | | | | | AI905856, D80366, D80378, D59889, D50995, AA585098, D52291, D80241, D80251, D80024, | |
| | | | | | Z32887, AW177440, AI541356, AI557731, Z33559, D51022, AI557602, AA305578, | |
| | | | | | AW375405, C14407, AW378532, R28735, R29445, D51060, D80522, R28967, D53161, | |
| | | | | | D57491, T03269, AW178893, C14014, R28892, AA585378, AA585325, C75259, AA514188, | |
| | | | | | AW179328, R28965, AI557155, AA585101, T11417, R29218, Z32822, D80248, D54897, | |
| | | | | | D51250, AW369651, AI557751, AI541535, AA514186, AI541346, AI535686, D80134, | |
| | | | | | AW352158, AI540903, D58253, AI557809, AI540974, AW375406, AW178762, AW178775, | |
| | | | | | AW177501, AW177511, D80133, AA969188, D80258, AW176467, AW360811, D80268, | |
| | | | | | C05695, D61185, AI557082, AA585356, D60765, F13647, D60844, C14077, AW352117, | |
| | | | | | AI546829, AW377671, AI557408, AI910186, D80132, AW378540, D80302, AI526184, | |
| | | | | | AW360844, AW360817, AW378534, AI541034, AW179332, AW377672, AW179023, | |
| | | | | | AW178905, C06015, AI541517, C16294, T48593, AI546875, AI546999, AI557241, D80439, | |
| | | | | | AW352171, Z21582, D59373, AW377676, AW178906, AW352170, AW179018, AI541321, | |
| | | | | | AW179024, AW177731, AI557734, AI557317, D80247, AW178907, AW179019, D51213, | |
| | | | | | D81111, AI557787, AW177505, AI546971, AW179020, AW360841, AW178909, D59627, | |
| | | | | | AW177456, AW179329, D51103, AI557727, AW178980, AI557852, AW177733, AW378528, | |
| | | | | | AW178908, AW178754, AI541374, AI526194, AW360834, AW352174, AI536070, AI546945, | |
| | | | | | D80014, AW179004, AW179012, AF100707, A62298, A62300, A82595, A84916, AR018138, | |
| | | | | | AR038855, Y17188, U87250, AR016808, AR062871, AJ132110, I19525, Y17187, AF058696, | |
| | | | | | A25909, X67155, D26022, AR008278, AB028859, A67220, D89785, A78862, D34614, X82626, | |
| | | | | | A94995, AR031365, D88547, I82448, Y12724, AB002449, AR025207, AF006072, U94592, | |
| | | | | | AR016514, AR060385, A43190, A44171, AR031358, A30438, Z30183, X68127, AR008443, | |
| | | | | | A82593, AB012117, AR050070, AR062872, AR038669, I50126, I50132, I50128, I50133, | |
| | | | | | A85396, AR066482, AR066488, A85477, AR060138, A45456, A26615, AR052274, A86792, | |
| | | | | | X93549, D50010, Y09669, A43192, AR025466, I14842, D13509, AR066490, AR066487, | |
| | | | | | I18367, AB023656, D88507, AR054175, X76012, AR016691, AR016690, U46128, AR008277, | |
| | | | | | AR008281, A63261, AR008408, A70867, AR017826, X82834, I79511, U79457, A64136, | |
| | | | | | A68321, AR060133, AF135125, AF213384, AF123263, AB033111, AR032065, AR060382, | |
| | | | | | X93535, and AR008382. | |
| HUKDY02 | 1711 | 920815 | 1-480 | 15-494 | R54146, and W72450. | |
| HUKDU47 | 1712 | 719465 | 1-367 | 15-381 | H56528, and W27624. | |
| HUKDG10 | 1713 | 968333 | 1-393 | 15-407 | Z21273, and Z21324. | |
| HUKCP30 | 1714 | 690933 | 1-296 | 15-310 | R93336, AI364837, and AI871934. | |
| HUKCO11 | 1715 | 967742 | 1-436 | 15-450 | AW188043, AA743890, AA641852, AA654170, AA494552, and AA824490. | |
| HUKCL85 | 1716 | 529718 | 1-336 | 15-350 | | |
| HUKCC25 | 1717 | 529723 | 1-246 | 15-260 | | |
| HUKCC15 | 1718 | 518537 | 1-112 | 15-126 | | |
| HUKAT59 | 1719 | 628540 | 1-385 | 15-399 | AA299333, AA299334, AA488225, AI761274, W39643, AA436997, H26851, R69372, | |
| | | | | | AA442825, AA133785, R48022, N78459, AL046919, AI659107, AA922133, W15236, F02924, | |
| | | | | | AA135871, AW242187, R45109, AI355457, AI937442, AI270750, AI869489, T16709, H04785, | |
| | | | | | F02239, R36219, AA938012, AI540377, T30366, AA491517, AA897754, AA972881, | |
| | | | | | AA902408, H19244, Z39481, AI627407, AA133786, AI720129, R56889, AI911499, AI334362, | |
| | | | | | H16569, AI285897, AI362708, AI148478, AI890959, AI961584, AI625445, AA099547, | |
| | | | | | AI864641, AA947105, AW295635, AW304383, AW183032, AA580304, AI338026, AA725780, | |
| | | | | | AA701287, AI815089, AA910649, AA059396, H10768, R47916, AI613048, AI827547, | |
| | | | | | AA488171, AI362313, R60948, AI351348, AI268730, R69373, AA932084, H17326, H75830, | |
| | | | | | D56341, Z43600, and AA099546. | |
| HUKAQ76 | 1720 | 502711 | 1-337 | 15-351 | R02387, and AA299632. | |
| HUKAO47 | 1721 | 502911 | 1-367 | 15-381 | R08548, AI360159, AI445049, AA299487, and AA831602. | |
| HUKAM19 | 1722 | 672076 | 1-315 | 15-329 | AA299796, and AA299795. | |
| HUKAM15 | 1723 | 502912 | 1-636 | 15-650 | AA166965, AI143571, AI187051, AI633250, AW135626, AI468530, AI916114, AA299797, and | |
| | | | | | AA299798. | |
| HUKAL44 | 1724 | 716927 | 1-390 | 15-404 | AA083174, AI344586, AA299808, and AI275232. | |
| HUKAJ91 | 1725 | 790487 | 1-146 | 15-160 | N89673, AA877587, N89666, AW275503, AA548632, AI433318, AI800226, AI913521, | |
| | | | | | AW235557, AI033607, AI741530, AA299661, AW003738, AI431440, D59328, AF108205, | |
| | | | | | AF106698, and U67321. | |
| HUKAJ83 | 1726 | 524257 | 1-316 | 15-330 | AA299762, AA299761, AA535406, AA063173, AA534010, M86120, AW069510, AA947547, | |
| | | | | | AI281697, AA310158, F17891, AA584201, AI358431, AA552843, AI367975, AI754955, | |
| | | | | | D51681, AA846952, N27763, AA367986, AA516226, AA866015, AA488746, D52044, | |
| | | | | | AI653905, AA362349, R89904, AC004142, AL031846, AL031255, U78027, AL031577, | |
| | | | | | AC005237, AC007308, AC004019, AC005578, AC000052, AC005971, AC007216, AC005703, | |
| | | | | | AP000692, U95742, AL109984, AC005288, AF111168, AC005081, AP000115, AC004234, | |
| | | | | | AL022313, AL020997, AP000553, AC006064, AC004876, AC004895, AL121653, AC005523, | |
| | | | | | AC003695, AC009516, AF030453, AC005071, AL139054, AC006071, AC007536, AC005778, | |
| | | | | | AC007276, AC004883, AC006441, AC002565, AC004477, AC005088, AC004814, AC005839, | |
| | | | | | D87675, AC007227, AC003101, AC010175, AP000355, AC006254, AL031283, AC002350, | |
| | | | | | AL022322, L78833, AC008101, AC016027, AL008582, AL049830, AC002996, AC005089, | |
| | | | | | AC004921, AC006965, AP000047, AC006026, AL080242, AL035079, AL023575, AC006512, | |
| | | | | | AC005888, AB016897, AC005387, AL079340, AC004884, AL096791, AP000359, AC007030, | |
| | | | | | AL049757, AC005280, AC005755, AC005765, Z98036, AF045555, AP000113, AP000045, | |
| | | | | | AJ003147, Z81364, AL022318, AC004526, AF134726, AC006312, Z95152, AC007421, | |
| | | | | | AP000304, AF109907, AC006509, AP000350, AC006001, AF053356, AP000141, AC002316, | |
| | | | | | AL035448, AL022323, AC006050, AB023050, AC016830, AC006449, AC007546, AC000085, | |
| | | | | | AL033525, AL034549, Z86090, AC005940, AL132987, AC002470, AL049692, AC005846, | |
| | | | | | AL021394, AC005323, AC004531, AC004825, AL023803, AL109798, AL021393, AC002492, | |
| | | | | | AL049759, Z82244, AL031667, AP000555, AC005500, AC005527, AL035587, AL049709, | |
| | | | | | AC004000, AC004778, AC006285, AC005212, AP000349, AC005412, AC004796, AL096712, | |
| | | | | | AL096774, AL132777, Z95114, AC006130, AC007637, AC005488, AL096703, AC005330, | |
| | | | | | AC002395, AL080243, AL078581, AL109628, AC005620, AC000025, AF205588, AC006014, | |
| | | | | | Z97053, AC005231, AL031276, AL133485, AF165926, AC006538, AF141308, AP000959, | |
| | | | | | AL021937, AC004859, AC004675, AL008718, AC006450, AC004263, AC005037, AL117258, | |
| | | | | | U91326, AC006430, AC005246, AL022316, AP000501, AC006120, and AL021939. | |
| HUKAD77 | 1727 | 772734 | 1-409 | 15-423 | H96061, AA300129, AI147406, AI189973, AA431411, and AI078297. | |
| HUKAB63 | 1728 | 625273 | 1-195 | 15-209 | AI079608, AI807065, AI952291, AI590123, AI090727, AI016788, AA456134, N20016, | |
| | | | | | AA977594, AI970077, AW029554, AA635175, AI680564, AI474417, AW339144, AI933942, | |
| | | | | | AW152328, AA149927, AA303069, AI864866, H98815, AW170581, AA699755, AI391578, | |
| | | | | | AW009047, AI982927, AA576948, AA485634, AA428599, AI016186, AA824314, AA991678, | |
| | | | | | AA910276, AA576748, AA479608, AA829399, AA398673, AA933886, AA922521, AA868264, | |
| | | | | | AA620744, AA303070, AA662449, AA568243, AA211758, AA913101, AI161248, AI797204, | |
| | | | | | AA644052, C06116, AI693943, AA476960, AI799459, AA160700, AI673693, AI890207, | |
| | | | | | AA642505, AA526838, W86624, AI241307, AI969413, W57802, AA602638, AA922005, | |
| | | | | | AA954133, AA514739, AA838009, AI890528, AA909312, AA620353, AI423401, AA884139, | |
| | | | | | AA192820, AI918960, AW236180, AA463209, AA621214, AA574061, N29954, F33718, | |
| | | | | | AA913537, AA777231, AA864549, AA432235, AA703595, AI148263, AA868797, AA788644, | |
| | | | | | AI084525, AI024640, AA299468, and AL137631. | |
| HUKAB25 | 1729 | 677470 | 1-461 | 15-475 | AA303079, AA127017, AA702731, AA659016, AA316535, AA365415, AA304577, AA411655, | |
| | | | | | AW170716, AI969252, AI264137, AI907629, AA603883, AW193546, AL120502, AW162022, | |
| | | | | | AA016286, AA663086, AA661948, AA665330, AA663115, AI985942, AA640204, AI255015, | |
| | | | | | AI255004, R10260, T89571, AA128969, AI053977, AI054418, AI343078, AW268322, W85860, | |
| | | | | | AA976584, AA826177, AI708663, AI671052, AI719434, AA504355, AA443426, AI189872, | |
| | | | | | AW419126, H21137, AA634238, AA218645, T62975, AI686563, F17700, AL045709, | |
| | | | | | AA879430, AL031682, AC004963, AL008721, AL020995, AC005527, AC005529, AL049780, | |
| | | | | | AP001052, AC004460, AC005274, AL031846, AC005245, AC007461, AC005730, AL109984, | |
| | | | | | AF024533, AC005030, AL035071, AC004805, AC006596, AC005694, AL022316, Z82246, | |
| | | | | | AL121825, AC002369, AJ229043, AL021920, AC005233, AC005874, AF134471, AC002456, | |
| | | | | | AC004765, AB022430, AC005320, AC007055, AC006515, AC004645, AL022326, AC002565, | |
| | | | | | AB020863, AC006065, AC004775, Z98946, AC006057, AC006142, AC005088, Z69648, | |
| | | | | | AC005284, AC005837, AL079340, AC007666, and U89337. | |
| HUKAA54 | 1730 | 503630 | 1-441 | 15-455 | AA303097, AL022325, and AL031588. | |
| HUKAA39 | 1731 | 503627 | 1-318 | 15-332 | R58995, AW444583, AI139054, AA303128, AI422562, AW452316, AW136820, AI355998, | |
| | | | | | AI871425, AI499766, and AC005789. | |
| HUDBZ01 | 1732 | 869026 | 1-519 | 15-533 | AC000070. | |
| HUDBK39 | 1733 | 886368 | 1-474 | 15-488 | N88782, N88601, AA247964, N84855, H58760, N83168, AA095359, N89520, N83991, | |
| | | | | | AA096046, AA247827, N83992, N55698, N84048, AA095641, AA096066, N88518, N84718, | |
| | | | | | N86694, N83993, N84712, AA471338, N84830, N87989, N84829, S78798, U48696, AF103726, | |
| | | | | | AR066487, AF039698, AF045432, AF102850, AF032922, AJ243486, and U39066. | |
| HUDBE95 | 1734 | 795796 | 1-316 | 15-330 | | |
| HUDBE64 | 1735 | 746508 | 1-348 | 15-362 | | |
| HUDBE48 | 1736 | 869034 | 1-423 | 15-437 | AI651392, AI912649, AI690582, AA101690, H02616, AI139898, AA731894, AW269260, | |
| | | | | | AW248051, C04885, AW137058, AI597917, R41929, AI401381, AI125561, AA394302, | |
| | | | | | AI884475, AI913287, AI915152, AI753690, AA295249, AW088536, AI380436, AI632150, and | |
| | | | | | AU020861. | |
| HUDBE28 | 1737 | 686520 | 1-360 | 15-374 | AI697533, AW204092, and AI963731. | |
| HUDBE02 | 1738 | 917361 | 1-123 | 15-137 | AA585476, T18597, R28735, R29445, R45895, R28967, AA170832, R29218, AA585325, | |
| | | | | | N86592, R28895, AA283326, R28965, R28892, R29179, AA585098, R29657, R29177, C16293, | |
| | | | | | AA585101, D61254, C16315, Z28355, AI546875, AI557734, AI557864, AI525306, D53472, | |
| | | | | | C16300, D57491, D60844, R29262, R29172, Z32822, D60765, AI526140, AI546971, AI541365, | |
| | | | | | AI557763, D59751, AI546999, AI547250, AA585439, AI557262, C15406, D53447, D54897, | |
| | | | | | C15120, D53161, D52835, AI541383, AI541374, AI541356, D59436, D61185, C16292, | |
| | | | | | AI557740, AA585155, D55233, Z32887, AI526184, AI546945, AI525500, AI525431, AI546921, | |
| | | | | | C16305, C15069, D57186, AI541517, AI547006, C16294, C15762, AI540967, AA092643, | |
| | | | | | C16290, T19407, AI526194, AI541205, AI541535, Z30131, AI526078, AI525316, AI541013, | |
| | | | | | C15737, AI557731, AI526073, D60730, AI541523, AI557787, AA585356, AI546996, AI547039, | |
| | | | | | AI526191, AI541307, AI525556, AI557758, C16296, AI557727, AI546891, T41289, C14208, | |
| | | | | | AI526016, AI541346, AA174170, AI541527, AI525320, AA514191, AI557807, AI525339, | |
| | | | | | C14723, C14322, C14391, T41329, AI547202, AI557264, AI557155, AI547196, AI557084, | |
| | | | | | AA585117, AI525286, AI557799, AI557408, AI547137, AI526113, AI557718, AI540920, | |
| | | | | | AI541034, AI557809, AI526180, AI536138, AI526158, AI535639, AI526109, AI526024, | |
| | | | | | AA585430, AI556967, AI557602, AI524890, AI541514, AI535660, AI540974, AA585453, | |
| | | | | | AI557808, AI540903, AI546828, AI541390, AI541321, AI541506, AI541415, AI546829, | |
| | | | | | Z33559, N87188, AI557279, AI526112, AI525332, AI541508, D54850, AI540882, AI546954, | |
| | | | | | AI547189, AI526195, AI557796, AI541345, AI557039, N88113, AI657485, AI541422, | |
| | | | | | AI546831, N88337, AI524904, D59458, AI557533, AI541515, AI541017, AI526117, AI546901, | |
| | | | | | AI525656, N85682, AI557786, AI557802, N88532, AI557852, AI541027, AI557238, AI547071, | |
| | | | | | AI540944, AI557285, AA585434, AI541410, AI525114, AI046024, D61060, AI547026, | |
| | | | | | AI541492, AI048523, AI557041, AI557082, AI525168, AI557317, AI557810, AI525076, | |
| | | | | | AJ243486, D50010, D13509, AR062872, AR062873, AR038855, AR062871, A25909, A20702, | |
| | | | | | A20700, AF082186, Y09813, AJ244005, Y16359, AR054723, Z32836, AR038762, AJ244004, | |
| | | | | | X81969, D78345, A43189, A43188, AR017907, AJ244003, X55486, AR018815, AC005913, | |
| | | | | | A98420, A98423, A98432, A98436, A98417, A98427, AF045432, X82786, A98767, A93963, | |
| | | | | | A93964, I63120, AJ244006, X76012, U39066, AR003381, U48697, and U48696. | |
| HUDAK54 | 1739 | 899753 | 1-822 | 15-836 | AA247964, N88601, N89520, N88782, N84718, H58760, N84855, N83992, N83168, N83991, | |
| | | | | | AA095359, AA247827, N84048, AA093224, AA096046, AA095641, AA096066, N83993, | |
| | | | | | N86694, N84712, AA471338, N55698, N84830, N88518, N84829, AF154415, AF164678, | |
| | | | | | AF165161, S78798, AF045432, AF103726, U48696, AF102850, AF039698, AR066487, | |
| | | | | | AF032922, AJ243486, and U39066. | |
| HUDAK19 | 1740 | 671974 | 1-444 | 15-458 | H16933, AA149496, and AA531296. | |
| HTTKG12 | 1741 | 969547 | 1-461 | 15-475 | AA172361, AI537800, AI791659, AW272815, AI355103, F23338, F34506, AI934307, | |
| | | | | | AI246996, AI242614, AW407220, AL045476, H51835, AI869797, AA503258, AW238341, | |
| | | | | | AI805261, F23327, AI587583, AI587565, AI720141, AI471455, AA808725, AI865980, | |
| | | | | | AW151761, AA342238, AI246192, AA524800, AI927275, AW265688, AI281474, AL046416, | |
| | | | | | AI687343, AW270619, AW023111, AW372037, R34070, AI310464, AI521525, C14014, | |
| | | | | | AI539024, AA743811, AW069227, AA657835, AI801563, AA484892, AA947369, AA992877, | |
| | | | | | AI249688, T71936, AA468923, AW020150, AI537368, N71619, H79308, AI280266, AA364082, | |
| | | | | | AA218684, AA533463, AI251436, AA084320, AW302017, AA351840, AA610433, AA936718, | |
| | | | | | AI858165, AA350644, AA904275, AA714011, AA298365, AW272389, AI445216, H59856, | |
| | | | | | AW275719, AA719433, AA720582, AW104163, T07451, AL118980, AI880889, AA583386, | |
| | | | | | AA550959, AA292254, AA018923, AI935827, AW419389, AA846923, R73744, AA128592, | |
| | | | | | AL134441, AA714110, R56485, AA809104, AI821945, AI587349, AW439703, AI536625, | |
| | | | | | AA533054, AI223968, AI568659, AA992126, F32248, AW274078, T39390, AI205181, | |
| | | | | | AA630122, AI367473, T48723, AI024339, AA774794, AA632765, AC006511, AC005740, | |
| | | | | | AC002059, U47924, AC002985, AL031985, AC006538, AC005102, AF196779, AL031281, | |
| | | | | | AP000065, AC004797, I34294, Z84469, AL022721, AL022322, AC004611, AJ006216, | |
| | | | | | AC005914, AL009174, AC005189, AC004941, Z84487, AC004955, AC007450, Y15994, | |
| | | | | | AF001552, AC002115, AL034549, AC004675, U95739, AL080243, AF088219, AC005378, | |
| | | | | | Z93023, AC005520, AC005089, AC005015, AC005324, AC005212, AC004087, Z98257, | |
| | | | | | AC004913, AL049709, AB023050, AC006512, AB001523, AC005632, AP000014, AC004491, | |
| | | | | | Z97054, AP000514, AC006211, AC007225, AC004531, AC006958, AP000355, AL136295, | |
| | | | | | AL008718, AC004024, AP000240, AL050318, AC004905, AL122020, AC004134, AC002546, | |
| | | | | | Z85987, AL035400, AC005566, Z99128, AC002549, AL109984, AC006515, AL049569, | |
| | | | | | Z97184, U85195, AC005529, AL035587, AC002347, AC005386, AL121655, AC000025, | |
| | | | | | AC005591, AC004791, AL034418, AC006544, AB014540, AC005899, AC004659, AC005519, | |
| | | | | | AL049643, Z82195, AE000658, AC007551, AC006371, AC007546, Z83844, Z98047, | |
| | | | | | AC006285, AC006115, AC003043, AC005531, AC007032, AC005342, AC005264, AC006271, | |
| | | | | | AC005670, AC005379, AL031291, AC005237, AF053356, AL035249, AC002536, Z84481, | |
| | | | | | AC006197, AC009516, AC005730, AC008039, AC003962, AL034553, AL023575, AC009247, | |
| | | | | | AL035683, Z96074, AC004216, AC020663, AC004655, L48038, AC003003, AC004158, | |
| | | | | | AC005516, AC005280, AC004929, AC007541, Z93017, AL009179, AC005940, Z86090, | |
| | | | | | Z93020, AC007731, AL021453, AC007055, AC003007, AF001548, AJ229043, AL049766, | |
| | | | | | AL031602, AC004417, AL049699, AC004079, AL031005, AP000348, AC005082, AC007686, | |
| | | | | | AL109798, AC004150, AC007842, AC000026, AC007387, AL117354, Z93024, AC005358, | |
| | | | | | AC007371, AP001053, AC004896, AC005996, AC007226, AC005332, AL031594, AP000359, | |
| | | | | | AL031431, AC004671, AC005274, AC005844, AC003101, AL117258, AL109628, Y18000, | |
| | | | | | AC005017, AC007435, AC006530, AL049636, AC004912, AL035455, AL032821, AC007444, | |
| | | | | | AL009181, AL031729, AC004139, AL121652, AL009051, AC007676, AC006124, AL031737, | |
| | | | | | AC004167, AC005500, AF222686, AC006088, AC007283, AC005233, AR036572, U91328, | |
| | | | | | AL049712, AL035460, AC006213, AC004890, AL035086, AL022302, AL035457, AC005746, | |
| | | | | | U52112, AC005778, AL033527, AL031588, AF060568, AC007707, AC015853, AC009263, | |
| | | | | | AC005043, U91323, AC006057, AC005913, AC005690, AC006270, AC005003, AC005071, | |
| | | | | | U91321, AC007538, AF134726, AJ003147, AC007690, AL133238, AC004253, AL133445, | |
| | | | | | AL121578, AC004834, M37551, and U02047. | |
| HTTKC85 | 1742 | 956206 | 1-436 | 15-450 | AJ224604, AA279200, AA258999, and W37285. | |
| HTTJV79 | 1743 | 869602 | 1-434 | 15-448 | AA825972. | |
| HTTTN26 | 1744 | 869612 | 1-891 | 15-905 | AI356567, N90525, AA232991, AI148171, AI022165, AA233101, AA573721, AA448133, | |
| | | | | | AI306380, AA447991, AA127550, AA127551, AW016855, AA243852, AI473237, AI005068, | |
| | | | | | AA554071, AA570256, AA906902, AW014761, and AI359627. | |
| HTTJK06 | 1745 | 934094 | 1-564 | 15-578 | AA853292, AL117470, and AB023143. | |
| HTTIX05 | 1746 | 931024 | 1-520 | 15-534 | AI493098, AW024745, AA921917, W90789, and AI915946. | |
| HTTIR33 | 1747 | 974323 | 1-341 | 15-355 | AC004491, AL050307, AP000023, AC004884, AL078472, AL008715, AC007227, AC005150, | |
| | | | | | and Z98304. | |
| HTTIR04 | 1748 | 926772 | 1-557 | 15-571 | AA083298, AA829975, and AB014535. | |
| HTTIN11 | 1749 | 965920 | 1-801 | 15-815 | AL133824, H86873, and H86809. | |
| HTTJE08 | 1750 | 958169 | 1-427 | 15-441 | AW052126, and AA101833. | |
| HTTIB12 | 1751 | 969568 | 1-336 | 15-350 | R92571. | |
| HTTHJ56 | 1752 | 944914 | 1-258 | 15-272 | D81882, AA193637, AA234876, T83136, H11688, AA258658, AA306506, and AA252212. | |
| HTTFG12 | 1753 | 751809 | 1-359 | 15-373 | AA169457, AA172190, and AI636076. | |
| HTTEZ61 | 1754 | 742004 | 1-539 | 15-553 | R13891, AI150008, and AI198021. | |
| HTTBQ59 | 1755 | 739445 | 1-550 | 15-564 | AA237056, AA491051, H78425, and R92491. | |
| HTTBQ01 | 1756 | 917156 | 1-458 | 15-472 | AI827837, AI142441, AI086379, AA813388, AA253028, H17296, AA613757, AI474835, and | |
| | | | | | Z83845. | |
| HTTEO59 | 1757 | 900662 | 1-148 | 15-162 | | |
| HTTEO53 | 1758 | 728344 | 1-763 | 15-777 | W74401, Z45510, H79976, D81436, D53762, and D61200. | |
| HTTEJ56 | 1759 | 573669 | 1-492 | 15-506 | R54109, AI884701, Z39259, R41821, and AW075808. | |
| HTTEB05 | 1760 | 932294 | 1-373 | 15-387 | C74999, T90424, AB023197, and AL031672. | |
| HTTDO59 | 1761 | 744438 | 1-734 | 15-748 | R82651, R82700, AA372368, N79122, AA033606, AI546974, AL133016, AL122061, | |
| | | | | | AB021868, AF034080, and AF032872. | |
| HTTDM42 | 1762 | 460948 | 1-389 | 15-403 | R95162, and H91087. | |
| HTTDL81 | 1763 | 694222 | 1-392 | 15-406 | AA485538, H74053, N43924, N43932, AA280231, AA613434, and AL022328. | |
| HTTDL75 | 1764 | 766551 | 1-356 | 15-370 | AA199666, AL120288, and H18766. | |
| HTTDA85 | 1765 | 784537 | 1-408 | 15-422 | N46977. | |
| HTTCQ95 | 1766 | 796674 | 1-310 | 15-324 | N57049, and AW078548, | |
| HTTCJ39 | 1767 | 709581 | 1-469 | 15-483 | AA012877, AA021074, AC007450, AC009533, and AC008013. | |
| HTTCD06 | 1768 | 960599 | 1-483 | 15-497 | R22892, R30952, AA767622, D80460, D60956, AI800613, D60394, AI750009, AI453046, | |
| | | | | | C15178, R81201, and D59944. | |
| HTTCB87 | 1769 | 524841 | 1-224 | 15-238 | H80337, AA769820, R16729, AI091785, and AW273500. | |
| HTTBR42 | 1770 | 714220 | 1-329 | 15-343 | AA164855. | |
| HTTBP62 | 1771 | 932997 | 1-601 | 15-615 | AA341024, and AA249649. | |
| HTTBO82 | 1772 | 780164 | 1-422 | 15-436 | N59547. | |
| HTTBM03 | 1773 | 925409 | 1-193 | 15-207 | R96101, and AL050318. | |
| HTTBI80 | 1774 | 781590 | 1-229 | 15-243 | AA256038, and AA768241. | |
| HTTBH95 | 1775 | 530559 | 1-244 | 15-258 | | |
| HTTBH75 | 1776 | 767520 | 1-422 | 15-436 | R21404, AC006987, and AF146191. | |
| HTTBH36 | 1777 | 530567 | 1-299 | 15-313 | | |
| HTTAQ60 | 1778 | 742377 | 1-615 | 15-629 | H73605, R92625, AA300822, and T77356. | |
| HTTAP45 | 1779 | 717736 | 1-384 | 15-398 | AA300727. | |
| HTTAP21 | 1780 | 671488 | 1-802 | 15-816 | W94307, W79130, AA300911, AL023803, and AF086439. | |
| HTTAP09 | 1781 | 826343 | 1-427 | 15-441 | AA189122, and AA300969. | |
| HTTAN34 | 1782 | 509454 | 1-455 | 15-469 | AA252276, AA227154, AI656990, AA301077, AA301076, AL042627, AC004593, AL023574, | |
| | | | | | and AC007536. | |
| HTTAJ93 | 1783 | 791413 | 1-406 | 15-420 | R01464, AA300985, T87497, and Z75742. | |
| HTTAH03 | 1784 | 965134 | 1-282 | 15-296 | AI198425, AI480040, AW054766, AI564875, AI359129, AI359233, AI422375, AI651642, | |
| | | | | | AI056060, AA301255, T82079, T84917, T85537, T86503, AI954689, AI962153, T92050, | |
| | | | | | AI742287, AA421072, AI244008, AA379174, AW135598, H84990, AA045378, H86604, | |
| | | | | | AI580336, AA731146, R99375, H86921, AA007586, AA128609, AA062583, T85467, | |
| | | | | | AA453722, H55168, AI200967, AA383353, T10083, and AA919169. | |
| HTTAC77 | 1785 | 772735 | 1-764 | 15-778 | AI694695, AA913353, AW236100, AA846529, AW301152, N62629, AI366198, AA449338, | |
| | | | | | AA694442, AI620459, W39523, AI521787, AA977228, AA600876, AA724335, AW078557, | |
| | | | | | AA995242, AA860876, AW235851, W15410, AA456019, AA301436, AL122078, and | |
| | | | | | AF198358. | |
| HTTAA94 | 1786 | 793001 | 1-555 | 15-569 | AA191546, W91892, AA486427, AA694339, AA416561, AI140707, AA417297, H77647, | |
| | | | | | H77648, W95110, AA303182, T19870, H26488, and AL031255. | |
| HTTAA39 | 1787 | 710355 | 1-284 | 15-298 | AI800489, AW105035, AI480088, AW299975, AA303221, AI670831, and AA135748. | |
| HTLIP06 | 1788 | 934207 | 1-330 | 15-344 | AI820928, AA405805, AI821678, AA813084, AA410617, AI821566, AA235536, AW302988, | |
| | | | | | AI344933, AI344928, AW161579, AW268220, AI610756, AI537677, AA225339, AL036361, | |
| | | | | | AI251221, AW103371, AI498579, AI683340, AI610645, AL041772, AW150578, AL038445, | |
| | | | | | AI860537, AL036736, AI554245, AL119791, AL036403, AI815855, AA572758, AI627988, | |
| | | | | | AI336592, AL039086, AI340603, AI866002, AL079963, AI950664, AI349004, AW074869, | |
| | | | | | AI633419, AI312428, AI859464, AI521012, AI251205, AI308032, AI344785, AI783504, | |
| | | | | | AI284517, AI434281, AW081255, AI922901, AI888944, AI308035, AW023590, AI345347, | |
| | | | | | AW129106, AL119748, AL038605, AW117882, AA427700, AL036274, AL040241, AI349933, | |
| | | | | | AI800453, AI800433, AW059837, AW238730, AI433976, AI636719, AW169653, AW268251, | |
| | | | | | AL042628, AI923768, AL121365, AI491852, AI572418, AI252023, AL119863, AI923989, | |
| | | | | | AL042551, AI318280, AA508692, AI828731, AI564719, AW190042, AI281772, AI889376, | |
| | | | | | AI681985, AI524671, AI345608, AW268768, AW051258, AW117746, AI921248, AI611738, | |
| | | | | | AI590120, AI829327, AI619502, AI677796, AI306613, AI632408, AI802542, AL043981, | |
| | | | | | AI497733, AA658033, AI499285, AW088134, AI886753, AI174394, AI933589, AW026882, | |
| | | | | | AI539153, AI269696, AL045266, AI620284, AI340582, AW002342, AI468872, AA640779, | |
| | | | | | AI868831, AI539028, AW020693, AI334450, AA613907, AI335209, AI698401, AI445165, | |
| | | | | | AI670009, AI862144, AI433157, AI702073, AL036802, AI873644, AW068845, AI648684, | |
| | | | | | AI539771, AW403717, AI567351, AI340519, AI874166, AW071417, AI284509, AI633125, | |
| | | | | | AL119049, AW103893, AI561299, AI476109, AI608676, AI446373, AI446003, AI922676, | |
| | | | | | AI648663, AL036396, AW074993, AI349614, AI866608, AI888953, AI886124, AI250663, | |
| | | | | | AL120853, AI224992, AI554218, AL042627, AI963216, AW301409, AW082594, AI571909, | |
| | | | | | AI521560, AW149227, AI282326, AI343059, AW079159, AL036631, AI619716, AI284131, | |
| | | | | | AL042544, AI312152, AI687065, AI612759, AW268072, AW089179, AI554425, AI926790, | |
| | | | | | AI801325, AI500523, AI867042, AI696819, AA493647, AW075084, AI932794, AI280661, | |
| | | | | | AI349937, AI699011, AW300889, AI349645, AI680498, AI537617, AI919345, AW088903, | |
| | | | | | AI364788, AI500706, AI348897, AI307708, AI500662, AI251830, AI569583, AI866573, | |
| | | | | | AI269862, AI366549, AL048871, AW118512, AI340627, AI916419, AL044207, AW073994, | |
| | | | | | AI952217, AI569616, AI133559, AI611743, AI335449, AW151138, AI680162, AW083804, | |
| | | | | | AW302973, AI696626, AI349967, AW268060, AW148716, AW005858, AI589993, AI250369, | |
| | | | | | AL045997, AA494167, AW163464, AW022808, AW162071, AI608936, AI702406, AI689420, | |
| | | | | | AI805603, AL049085, AL040456, AI289937, AI525669, AI436644, AW022682, AI869367, | |
| | | | | | AW081797, AW080402, AL049314, I48978, I48979, AF113694, A08916, I89947, A08913, | |
| | | | | | A08910, AL122121, AL122110, AJ242859, AL122098, U80742, AL050108, X65873, A08909, | |
| | | | | | I89931, I49625, AL110197, AF113676, AL122093, 578214, AB019565, U72620, AF125948, | |
| | | | | | AF146568, AL137550, U42766, Y16645, A65341, AL049283, Z82022, U00763, AR059958, | |
| | | | | | X84990, AL133560, AF177401, AF106862, AR011880, AF118064, AL137557, AL122050, | |
| | | | | | AL133557, AL110225, AF090896, AL117394, AI2297, AF125949, AF158248, AF104032, | |
| | | | | | AF113019, AF113689, Y11587, AF118070, S68736, X63574, AL080060, U67958, AL133080, | |
| | | | | | A77033, A77035, AL050277, AL117460, AL137463, AF090901, AL050393, AL133565, | |
| | | | | | X98834, AL122123, AL049466, E03348, AJ000937, AF113699, AF017152, AF113690, | |
| | | | | | AL050146, AL049452, AF090934, Y11254, AL049382, AF111851, AF113013, AF113691, | |
| | | | | | E07108, AL117457, AL137527, AF078844, X82434, AL110196, I33392, X70685, AL137271, | |
| | | | | | E02349, AL117583, AL137459, AF183393, AL110221, AL133075, AF090903, AL050149, | |
| | | | | | AL133016, AL080124, AL117435, U35846, A58524, A58523, AF113677, AL133093, | |
| | | | | | AL133640, AL050116, AL080137, AF079765, A03736, A93016, AL137648, AL117585, | |
| | | | | | AL133606, AF090943, AL050024, AL049430, AL137538, AL080127, AL133113, X72889, | |
| | | | | | AF097996, AF090900, AL050138, AF091084, I03321, AF017437, AF118094, AF087943, | |
| | | | | | A08912, AL049464, AJ238278, L31396, AL096744, L31397, X96540, AL049300, AL049938, | |
| | | | | | X93495, U91329, E07361, AL080159, I42402, AL137521, I09360, AL133072, AL137283, | |
| | | | | | I26207, AF061943, I00734, E00617, E00717, E00778, AL133568, E15569, AF067728, M30514, | |
| | | | | | AF119337, AL133077, AL050172, AJ012755, AR038969, AL133104, A93350, AL122049, | |
| | | | | | AL137560, AF111112, AF003737, AR000496, U39656, AL133014, AF026124, A07647, | |
| | | | | | S61953, AL137556, AL137526, E08263, E08264, U96683, I09499, AF026816, Y14314, | |
| | | | | | AL137476, U58996, AL110280, Y09972, AF185576, AF057300, AF057299, AL137523, | |
| | | | | | AF111849, Z72491, AF153205, E08631, U49908, AF162270, I17767, E02221, AL133098, | |
| | | | | | AJ006417, A45787, AL117440, AF106827, AF079763, AR038854, AR013797, AL133067, | |
| | | | | | L30117, Y07905, AL137429, X87582, X62580, AL133081, AL122111, X53587, AF132676, | |
| | | | | | AF061836, AL080074, E05822, A90832, AF210052, AL137533, U68387, E04233, AL122118, | |
| | | | | | AL110222, AL137480, AL137292, AC006371, AF051197, U62317, X92070, AF008439, | |
| | | | | | AL137478, M86826, Z37987, E12747, AL080086, U78525, AL137294, AF067790, Y10655, | |
| | | | | | L19437, A08911, U68233, I92592, and AL023657. | |
| HTLID06 | 1789 | 974047 | 1-648 | 15-662 | AW238325, AA513916, AW169687, AI344844, AA371311, AI357551, D53046, AI880168, | |
| | | | | | AW270284, AA554293, AA526514, AA371410, AI884861, D55004, D51877, AA317144, | |
| | | | | | AI298977, D54301, D51997, D55588, AA384911, D51927, D56450, AI885465, R81453, | |
| | | | | | AA365548, AW438916, AA364488, P13749, AI345654, AL135643, AI751162, AW162288, | |
| | | | | | AI696793, AI565581, AA714140, R66997, AW128881, AI590404, AA586433, AW102955, | |
| | | | | | AI914558, AA304790, H38817, AA295893, AA295899, AL040462, T06292, H41462, | |
| | | | | | AA493829, AI214510, R48980, AW327597, AI359368, AI869786, AA572967, AW090629, | |
| | | | | | AW327555, AL137946, AL137954, AW175641, AA583978, H21488, AI907629, AA373861, | |
| | | | | | AW151727, AA658235, AA247731, N43757, AI630283, AI557323, AA435854, AA745560, | |
| | | | | | AI761471, AA745431, AI053672, AA450199, AI801600, AA665293, AI345522, AA655002, | |
| | | | | | R63239, AI921649, AI334443, AI859742, AW081359, AI376100, AI345459, AI336660, | |
| | | | | | AA192740, AA178953, AI340453, AL043756, AW074059, AI064952, AI356904, AI922654, | |
| | | | | | AI564284, Z96530, Z98884, AC004814, AC000114, AL135960, AJ131016, AC007450, | |
| | | | | | AC004382, AC007878, AC005034, AC006398, AE000658, AL031643, AL008627, AC006210, | |
| | | | | | AC005370, AL031430, AC005386, AL021808, AC006965, AC006952, AC005822, AC004671, | |
| | | | | | AC008134, AC004593, Z99570, Z84487, AC007970, AL034370, AC004074, AC000027, | |
| | | | | | AC006548, AC004659, D87014, AC004552, AC003101, AC006213, AF011889, AC004616, | |
| | | | | | AL132777, AC012331, AC006030, AL078593, AL008708, AJ011930, AL133353, AL079305, | |
| | | | | | AP000959, AL078476, AC004222, AC006544, and AL049829. | |
| HTLHV59 | 1790 | 965808 | 1-530 | 15-544 | AA036821, AA877774, AA845452, AA902976, AW027037, AW245073, AI857490, AA948226, | |
| | | | | | AA977183, AI819768, AW085596, AA363071, AA528041, AI804187, AW376089, AI763409, | |
| | | | | | AI524117, AA622713, AW090272, AA973857, AI361156, AA515276, AI686841, AA971889, | |
| | | | | | AI953946, AA595152, AI209096, AI474502, AA918802, AA581475, AI888756, AI129507, | |
| | | | | | AA371872, AW304826, AA632326, AI274834, AI799750, AI206384, AI290279, AI590567, | |
| | | | | | AI340981, AI683971, AI802753, AA352552, AI739258, AA524697, AA417825, AI147766, | |
| | | | | | AA018444, R49435, AW167804, AI281446, AW008926, AI570321, AI143414, AA648251, | |
| | | | | | AA768690, AI468510, T91019, and T34395. | |
| HTLHU81 | 1791 | 870150 | 1-863 | 15-877 | AA488434, N76166, AA085536, AW390492, AA488573, AA375937, N39974, AA401426, | |
| | | | | | AA307647, W05791, N64758, AI148945, C17327, C16676, C17892, AI200786, AI148951, | |
| | | | | | T11417, D80258, C14227, D59503, D81111, D58246, AI535686, C06015, D80014, D80064, | |
| | | | | | D80247, AA809122, C14389, D58101, D80195, AA514184, D80043, D59467, D80391, D59787, | |
| | | | | | D80164, D59502, D58283, D51423, D80022, D81026, C14407, D80196, AI557774, C03092, | |
| | | | | | D80168, D80227, C14014, AA305578, D57483, D59275, D80038, D80251, D80188, D50979, | |
| | | | | | D80157, C15076, D80253, D80269, D80439, F13647, D80302, AI557751, D80166, D51103, | |
| | | | | | D80193, D59619, D80210, D80240, D80045, D59859, C14331, AA305409, D80133, D51799, | |
| | | | | | D50995, D80366, D81030, D60214, D80024, D59627, D59889, D80522, D80212, D80219, | |
| | | | | | AW178893, D59610, D80268, AA400102, D51060, D51022, D80248, AA514188, H67866, | |
| | | | | | D59927, H67854, AA514186, D51759, D80378, C14344, T03116, D59317, C14298, D45260, | |
| | | | | | D80241, AW177440, D59653, D59551, D51221, AW360834, C14973, AI525242, AI525227, | |
| | | | | | D59474, C14429, AI525917, AW360817, C14957, D60010, D59695, AI525923, D51213, | |
| | | | | | AI525920, AW377671, AW375405, D45273, D52291, AW360811, C05695, C75259, T03048, | |
| | | | | | Z21582, AW178907, D59373, AW178908, D51079, AI525235, AW352117, Z33452, C14046, | |
| | | | | | C16955, AI525925, D80949, AI525237, AI525215, AW178906, AW360844, AA285331, | |
| | | | | | AI535959, T03269, AW179328, T48593, AW375406, AW378534, AW179332, AW360841, | |
| | | | | | AW377672, AW179023, AW178905, AW366296, AW177731, AW378528, AW178762, | |
| | | | | | AW179019, AW378533, AW378532, AI525912, AW377676, AW352120, AW378539, | |
| | | | | | AW178914, D80228, AW378542, AW367950, AW360855, AW176467, C05763, T02974, | |
| | | | | | AW178909, AW179020, AW177505, AW352171, AW352170, AW178774, AW177733, | |
| | | | | | AW179024, C13958, AW179018, T02868, AW178781, D51053, D51250, AW378543, | |
| | | | | | AW378525, AW352163, C04682, AW177456, AW178911, AW378540, AW177734, AI525222, | |
| | | | | | AW178775, AW179004, AW179329, AW178980, D31458, AW177728, AW178986, AI525228, | |
| | | | | | AW178754, AW369651, Z30160, AW352158, C14077, N66429, H67858, AI910186, AI525928, | |
| | | | | | AW177508, AR018138, AB002449, A82595, AR060385, AB028859, AJ132110, A84916, | |
| | | | | | I14842, A62300, A62298, AR008278, AF058696, AR054175, I50126, I50132, I50128, I50133, | |
| | | | | | AR008277, AR008281, AR016808, AR062872, X64588, AR016514, X67155, Y17187, A70867, | |
| | | | | | AR060138, A45456, Y17188, A94995, D26022, A26615, AR052274, A43192, Y12724, A63261, | |
| | | | | | A43190, AR038669, A25909, I79511, AF123263, A64136, A68321, AR066488, Y09669, | |
| | | | | | AR066487, A67220, D89785, A78862, D34614, A30438, AR008443, X68127, I82448, | |
| | | | | | AR016691, AR016690, U46128, AR032065, D50010, D88547, X72378, A63887, AR008408, | |
| | | | | | Z82022, and AR060133. | |
| HTLHU63 | 1792 | 870147 | 1-515 | 15-529 | R51662, H17203, R13772, R17328, and AF176701. | |
| HTLHS69 | 1793 | 870152 | 1-659 | 15-673 | AW166505, AI085633, AI830616, AI948664, AI817701, AW183365, AW082276, AI471025, | |
| | | | | | AA843215, W31421, AW439937, AA843291, AI476729, AA781027, and W04559. | |
| HTLHS05 | 1794 | 933720 | 1-712 | 15-726 | AI348086, AI928156, AI074858, AW136076, AW243178, AI262696, AA627913, AI810972, | |
| | | | | | AA595104, AI858055, AW043820, AI582191, AW001777, AI804955, AI798900, AI242330, | |
| | | | | | AI887909, AW001248, AI813670, AW028151, AI336325, AW243042, AI299745, AI805058, | |
| | | | | | AI923922, AI949719, AI741492, AI304384, M62028, AI276119, AI269740, AI684429, | |
| | | | | | AI183994, AI401041, AI580934, AI097473, AA321296, AA480684, AI200633, AI719036, | |
| | | | | | N42455, AA480650, W68465, AI348656, AA365138, AA335996, AW263563, T48387, | |
| | | | | | AI648474, N66329, AA527274, AA863058, AA642939, AI277482, AI971175, AA884197, | |
| | | | | | AI347141, AI863828, AA367149, AI474817, W68353, W25028, AI262960, AI054319, | |
| | | | | | AI700621, H27099, AW205513, AA987972, AI015046, Z39325, W46985, R60687, T66319, | |
| | | | | | F04561, AI656572, AI026748, F09789, F01927, F04682, AI521950, AI498629, H12192, | |
| | | | | | AI214318, AI580497, H11935, AA136297, T15701, AI161214, AI890045, AI948515, AI866509, | |
| | | | | | AI423812, T07980, and AB021226. | |
| HTLHK57 | 1795 | 894863 | 1-1127 | 15-1141 | AA504779, AA491394, AA699349, AA004906, AA778225, AA005001, and AA806914. | |
| HTLHJ51 | 1796 | 865399 | 1-1017 | 15-1031 | AA418490, AA418620, AI922829, AI264627, AW002386, AI080674, R61294, AI424861, | |
| | | | | | AI610381, AI263843, AA004548, AW075751, AW080659, AI275462, AA570113, AW271292, | |
| | | | | | W60463, AA453156, AA599740, H09296, H23133, AI473729, AA454079, AA054336, T35266, | |
| | | | | | T35000, AI554231, AW078913, AA502766, AW151599, Z45311, Z38523, N84063, T66912, | |
| | | | | | T31030, R44925, AA363400, R49157, AI521799, AI348847, AI344931, AL038456, AI628833, | |
| | | | | | AW196097, AI345114, AI307494, AI345677, AI340627, AI349622, AI310606, AI345370, | |
| | | | | | AI307446, AI828705, AI312271, AI824648, AI349814, AW081242, AI561087, AI862144, | |
| | | | | | AI312261, AI345224, AI340644, AI311892, AI345026, AI952217, AI582871, AW082033, | |
| | | | | | AW268261, AI553669, AW074869, AI491904, AI241678, AI307210, AI336513, AI336662, | |
| | | | | | AI307569, AI345253, AI344935, AI348895, AI345736, AI313320, AI343091, AI310575, | |
| | | | | | AI336495, AI310920, AI313352, AI307503, AI307736, AI335235, AW029349, AI336585, | |
| | | | | | AI349266, AI334452, AI349787, AI340533, AI344938, AL036215, AI312146, AI590423, | |
| | | | | | AI309431, AI312339, AI340537, AI345258, AI348854, AW148590, AI345471, AI307459, | |
| | | | | | AI334895, AI636595, AI307507, AI348879, AI349245, AI311604, AI349805, AI343131, | |
| | | | | | AI310930, AI349269, AI312333, AW168503, AI310945, AI312431, AI439089, AL038775, | |
| | | | | | AW071380, AI573085, AW020381, AI335363, AI742068, AI311159, AI620093, AI348897, | |
| | | | | | AI345397, AW054972, AI334930, AI307520, AI887775, AI340664, AI307542, AW132104, | |
| | | | | | AA848053, AI349637, AI866465, AI334902, N75771, AW150804, AI336488, AI336565, | |
| | | | | | AI311440, AI345737, AI345396, AI874109, AI922756, AI860694, AI349971, AW268253, | |
| | | | | | AL047422, AI348969, N71180, AI567971, AI366959, AI358042, AI343140, AI366992, | |
| | | | | | AW059828, AI349276, AI539690, AI345315, AA468418, AW274192, AI349645, AI345735, | |
| | | | | | AI349246, AI242736, AI307708, AI865116, AI335476, F31233, F36033, AI345745, AI340659, | |
| | | | | | AW071377, AI050666, AI345005, AI633061, AA427700, AI309443, AI343030, AI619754, | |
| | | | | | AI690930, AW058233, AW021373, AL040694, AI271234, AI623736, AI349186, AI349279, | |
| | | | | | AI310592, AI312325, AW071395, AI345739, AI345674, AI312143, AI340511, AI334920, | |
| | | | | | AI446405, AI345014, AI345251, AI923357, AI310927, AI307578, AI436429, AI345608, | |
| | | | | | AI349955, AI307456, AW075093, AI312432, AI635690, AI811840, AI581048, AF104032, | |
| | | | | | AL035067, AI8777, S77771, X98834, E12580, A08910, A08907, A08909, M19658, AR068466, | |
| | | | | | A08908, I09360, A08912, AR038969, AL133016, A08911, L13297, AF085809, AL137547, | |
| | | | | | X63574, S76508, I89931, A08913, AR000496, U39656, AR053103, I89934, I89944, X69026, | |
| | | | | | I49625, AL133606, AR034830, I96214, AL110225, A21101, AR038854, AP000130, AP000208, | |
| | | | | | AL050024, AL050108, AL117394, AL137648, AL133098, AC002471, AC005374, AF177767, | |
| | | | | | E12579, AJ242859, AF159615, AI2297, AF118090, AF143957, AF185614, AL080057, | |
| | | | | | AJ006417, I77092, AC009501, E01573, E02319, E02152, E15582, Y13653, AL049465, | |
| | | | | | AL136884, AF031903, AF141315, E05822, M30514, AL133557, AL137471, Y09972, U62966, | |
| | | | | | AL133112, A08916, AB022159, AC006313, I48978, AL080086, AR054987, AF118064, | |
| | | | | | AF013249, AL122111, I36502, AL049460, AL080127, U87620, AF090896, AL137527, | |
| | | | | | AF182215, U51587, A17115, A18079, AC002382, E08516, U67813, AL050143, AL137526, | |
| | | | | | AL133054, AL049300, AE118070, E03671, AF132676, AL137523, AF061836, AF125949, | |
| | | | | | U68387, AL137656, AJ012582, AL096751, AL137555, AL133072, B01963, AF061573, X83508, | |
| | | | | | U88966, A57389, U36585, AL133093, U92068, U02475, AL137640, X62580, U91329, I18355, | |
| | | | | | U57715, AF106827, AB025103, E01812, I17767, AL080158, I34392, Y10080, S68736, | |
| | | | | | AL110222, X62773, X96540, I89947, AL080118, A70386, AF022813, AL137461, M96857, | |
| | | | | | AR060156, Z37987, AL050116, S69407, Y08616, AF180525, AB030279, AF019298, Z82206, | |
| | | | | | AC006197, AC006112, AC007869, AF172930, AF100781, AF076464, A20553, AF090923, | |
| | | | | | X99257, X70685, AL117583, AF017790, AL133075, X99717, AL096720, AF114168, D16301, | |
| | | | | | I08319, AL049276, I29004, X66417, I41145, AL080060, AL137429, AL122049, AF175903, | |
| | | | | | AL137557, Y11587, U67958, AL133080, A76335, AF210052, X89102, AL137554, X84990, | |
| | | | | | I61429, AL117649, A91160, E07108, AL137712, AL117443, AL110224, AF139986, AL137659, | |
| | | | | | A91162, AF081197, AF081195, AL110218, AF126372, L19437, AL133085, U00763, X57961, | |
| | | | | | X72387, AF106945, S61953, D89079, AF114818, AF036941, X55446, AL117585, X92070, | |
| | | | | | AF017152, AL137281, E08631, AF205861, AL122045, AL133077, AL050146, U49434, | |
| | | | | | AL133014, A27171, AF146568, AL137705, AL050393, AF079765, AF098162, I68732, X59414, | |
| | | | | | A90832, AL117629, U77594, AL137300, AL110159, M84133, AF111112, AB019565, A92311, | |
| | | | | | AF012536, AL133104, AL137556, Y16258, and AF114170. | |
| HTLHB93 | 1797 | 945862 | 1-361 | 15-375 | AI828062, AI028564, AW173227, AW102657, and AL035460, | |
| HTLHA63 | 1798 | 870172 | 1-554 | 15-568 | AI218545. | |
| HTLGS10 | 1799 | 963458 | 1-470 | 15-484 | AI560769, AI857497, AW151454, AW298056, AW007781, AW166326, and AW339468. | |
| HTLGR32 | 1800 | 928245 | 1-943 | 15-957 | AI126041, AA812952, AA770544, N26185, AI222967, AA813689, AA815395, AW119183, and | |
| | | | | | AA912724. | |
| HTLGP84 | 1801 | 782194 | 1-534 | 15-548 | AA709009, AI570570, AA708887, AA062549, AI871015, AA757855, R41916, H80820, | |
| | | | | | AA719341, AA701030, H30641, AA063144, AA757876, AA063046, R87769, H79988, | |
| | | | | | AI003643, AW138067, R12796, and AA758374. | |
| HTLGK08 | 1802 | 958304 | 1-463 | 15-477 | AA813640, AI766152, and AW403165. | |
| HTLGC43 | 1803 | 870228 | 1-484 | 15-498 | AI653373, AI917476, AI650958, AI684722, AI632004, AI962304, AI341785, AW195932, | |
| | | | | | AI653363, AI672453, AA778499, AA613494, AW197798, AI968944, AW001758, AA813413, | |
| | | | | | and AA279933. | |
| HTLEQ92 | 1804 | 932882 | 1-296 | 15-310 | AI962454, AI432386, AI087321, T08978, T77035, R12108, AI093960, R51395, AW196322, | |
| | | | | | and AL117444. | |
| HTLEP21 | 1805 | 671151 | 1-402 | 15-416 | AA737807, AW296355, AI694694, AI950417, AA448944, AI341643, AW083848, AA316241, | |
| | | | | | AW076055, AI341859, AI950236, AW452665, AI796355, AI338467, AI367080, AF081280, | |
| | | | | | AF079325, and U67172. | |
| HTLEN77 | 1806 | 772363 | 1-410 | 15-424 | T89583. | |
| HTLEM92 | 1807 | 573400 | 1-419 | 15-433 | AC005695, AR049867, and U75586. | |
| HTLEL16 | 1808 | 384492 | 1-425 | 15-439 | R21318. | |
| HTLEG67 | 1809 | 751842 | 1-305 | 15-319 | AI149770, AI809937, AA644408, AI808767, AI913293, R06443, and R06497. | |
| HTLDZ81 | 1810 | 778180 | 1-351 | 15-365 | | |
| HTLDW27 | 1811 | 961353 | 1-587 | 15-601 | AI479021, AW339781, AW276999, AI369304, AW392460, AI391729, AW392463, AW392466, | |
| | | | | | AW392459, AW392461, AW392468, AW392462, AW372446, AI903603, AB028990, | |
| | | | | | AF014461, and AF032667. | |
| HTLDO01 | 1812 | 913669 | 1-703 | 15-717 | AI198827, AA397596, AA435832, AC002056, and AC000036. | |
| HTLDG43 | 1813 | 715439 | 1-123 | 15-137 | | |
| HTLDB18 | 1814 | 868533 | 1-436 | 15-450 | R18251, and C06467. | |
| HTLCZ79 | 1815 | 572853 | 1-273 | 15-287 | | |
| HTLCX66 | 1816 | 578921 | 1-318 | 15-332 | | |
| HTLCO02 | 1817 | 921045 | 1-429 | 15-443 | AI360679, and AI217856. | |
| HTLCG65 | 1818 | 413333 | 1-129 | 15-143 | AA420979, and AC006060. | |
| HTLCG59 | 1819 | 530039 | 1-205 | 15-219 | AB007918, and AF202893. | |
| HTLCA03 | 1820 | 870290 | 1-236 | 15-250 | | |
| HTLBH67 | 1821 | 751985 | 1-432 | 15-446 | W19592, and AC005368. | |
| HTLBC07 | 1822 | 954111 | 1-662 | 15-676 | AA626715, AA403001, and AW003923. | |
| HTLBB72 | 1823 | 766270 | 1-711 | 15-725 | AW401867, H88137, W19173, AW390017, AI088172, AI970225, AW134697, AW390006, | |
| | | | | | AI971802, AA991241, AA906307, AI808864, AA781530, AI918830, AA742991, AA936350, | |
| | | | | | AI478204, AI523622, AA808091, and AA923464. | |
| HTLAI30 | 1824 | 690936 | 1-562 | 15-576 | R40037, R60927, AW005925, Z41798, and F01644. | |
| HTLAF33 | 1825 | 870300 | 1-432 | 15-446 | | |
| HTLAC61 | 1826 | 683247 | 1-153 | 15-167 | T27009, Y18503, and Y18504. | |
| HTLAC39 | 1827 | 575343 | 1-214 | 15-228 | AA323644, T94592, AA298192, N55287, AW162762, AA525407, AA167549, AI459879, | |
| | | | | | N99245, AA522864, AA579082, F00937, W69639, AA132445, F04838, AL133906, AL133902, | |
| | | | | | AA745302, AA297698, AI253376, AA457230, AL046416, N22837, AA568390, N35492, | |
| | | | | | AI207476, AA657910, AI354233, AA523833, AA584756, T73021, AA155817, AA365056, | |
| | | | | | AA363890, AL047480, H87756, AA831997, AA368329, R99076, AI636734, AA338216, | |
| | | | | | AA847427, AW028179, AA357979, AI653783, AW057873, AA809179, AL138091, N34258, | |
| | | | | | AW245354, AI073735, AA847508, AA553830, W52705, AA653291, AA629852, AA632765, | |
| | | | | | F34605, R93224, AI471467, AA668711, AA302763, AA467740, AA654293, AI471455, | |
| | | | | | AA468135, AI734119, AA352521, AI732720, H43183, AI475294, AI687343, AA368201, | |
| | | | | | AW392414, AA133013, AI733856, AC005914, AP000501, AC002111, AC004862, AL132987, | |
| | | | | | AC005547, Z74617, AP000359, Z92845, AL031985, AC005332, AC011456, AC006992, | |
| | | | | | AC007225, AC005412, AL009174, AC005399, AC002375, AC002299, AC000070, AC006197, | |
| | | | | | U52111, AL050337, AC009946, AL022721, AB023049, U24498, AC005300, AL031283, | |
| | | | | | U95740, L39891, AL022163, AL035541, Z86090, AC004531, Z99716, AC004673, AL035534, | |
| | | | | | AC006512, AL035089, U47924, AL078581, AP000141, AL035413, AP000088, AL035405, | |
| | | | | | AC002470, D87675, AC002565, AP000344, AL034420, Z98044, AF111168, AC005821, | |
| | | | | | AL031293, AC005235, AC005670, AC002425, AC006130, AC005796, AC009516, AC005058, | |
| | | | | | AP000556, AP000557, AL049692, AL033504, AC005379, AL133382, AC002077, AL031295, | |
| | | | | | AC004587, AP000495, AC002483, AC005702, AC006101, AC007388, AL133371, AC007151, | |
| | | | | | AC005057, AC000035, AC007731, AL022313, Z98941, X64467, Z83838, AC004148, | |
| | | | | | AL022238, AL049869, AL035072, AC005998, AL022326, AL121748, AC002302, AL035587, | |
| | | | | | AP000065, AL049814, AC002472, AC003043, AC006023, AL136295, AD000092, D63861, | |
| | | | | | AL030996, AL033381, AC006116, AC004098, AC005014, AP000343, AL022322, AP000114, | |
| | | | | | AP000046, AC004242, Z97053, AC005899, AL049569, AC004893, AC006146, AL022316, | |
| | | | | | AC003086, AL109801, AC004816, AL049553, AC004383, AC004813, U72790, AC000025, | |
| | | | | | AC005089, AL050319, AL031662, AC006543, AL031587, AC007387, AC006544, AC000085, | |
| | | | | | AC002326, AC005527, AC004079, AC005500, AL109963, AP000493, AC004882, AC007216, | |
| | | | | | AC004858, AC003687, AL122023, AC004491, AF109907, AC004883, AL137549, AF020662, | |
| | | | | | AC004790, AC005265, AL049653, Z98750, AL023575, AC007868, AC006141, AC004466, | |
| | | | | | Z81365, AC008115, AC006210, AC005669, AL049570, AP000513, AP000353, AC009263, | |
| | | | | | AP000550, AC002314, AL133163, AC006080, AC004985, AC004841, AC006486, AR036572, | |
| | | | | | U91328, AL021878, AC002511, AC005272, AL034344, AC005826, AC006379, AC005800, | |
| | | | | | AC008018, AL031007, AP000352, AC004849, AC006449, AL080243, Z93244, U80017, | |
| | | | | | AC006538, AC006011, AC004106, AC005529, AC005160, AC007565, AC003972, AC004792, | |
| | | | | | AC007546, AC005182, AC007746, AL031984, AC005005, AC009247, AF196779, AC008078, | |
| | | | | | AC006312, AC009731, U82828, Z83836, AC005324, AL031729, Z99129, AC003108, Z93017, | |
| | | | | | AF047825, U07000, AC005066, and AC005839. | |
| HTLAB55 | 1828 | 732480 | 1-451 | 15-465 | T65363, and F11993. | |
| HTLAB29 | 1829 | 879168 | 1-432 | 15-446 | AA023022, H51019, AI309636, AI569285, AI431902, R90861, AI740858, and R23430. | |
| HTFBE02 | 1830 | 920507 | 1-571 | 15-585 | R92414, AA197116, P00607, AI923217, AI814569, AI804663, AI762903, AI804682, AI143304, | |
| | | | | | AI082030, AI139520, AI911904, AW274978, AW450838, AI216343, AI183410, AA680119, | |
| | | | | | W93273, R92413, W93272, AI918971, T51116, AI823928, C15320, R42713, T51024, T96094, | |
| | | | | | AI422647, AI216344, T96093, AI936703, AI869077, F00114, AI741425, C00216, Z66165, and | |
| | | | | | Z56024. | |
| HTEQS95 | 1831 | 972746 | 1-654 | 15-668 | | |
| HTEQS90 | 1832 | 973426 | 1-667 | 15-681 | | |
| HTEQP03 | 1833 | 870516 | 1-584 | 15-598 | AI652668, AW196588, AI611041, and AI696211. | |
| HTEQN83 | 1834 | 908528 | 1-331 | 15-345 | AA442506, AA436703, AA080897, AA219287, AA214213, AA332559, AA356572, AW197626, | |
| | | | | | W86428, AA083980, AW239273, AL042822, AW137277, AW197400, AW197285, AA772083, | |
| | | | | | AW206752, AA854258, AI934409, AL096747, AB021642, AB021644, and AB033024. | |
| HTEQB08 | 1835 | 958291 | 1-711 | 15-725 | AI144505, T83402, AW439340, and T81586. | |
| HTEPY28 | 1836 | 870559 | 1-682 | 15-696 | AA412612, AA412499, AA719038, and AI149873. | |
| HTEPV63 | 1837 | 870549 | 1-917 | 15-931 | AI217359, AA229749, AI990822, T80962, AI393339, AA935552, AC005844, and AC006205. | |
| HTEPE35 | 1838 | 948475 | 1-825 | 15-839 | AI935040, AA861064, AA933697, AA707583, AA872105, AA398866, AA609626, AA620685, | |
| | | | | | AA435866, AA812556, AA781805, AA993718, AF012362, AI217888, and AA824315. | |
| HTE0Y82 | 1839 | 948845 | 1-489 | 15-503 | AA724785, AW341727, AI990635, AW138616, and AJ010949. | |
| HTE0083 | 1840 | 836721 | 1-720 | 15-734 | AA885943, AI807908, AI214900, AI810745, AA725810, F31353, and H91431. | |
| HTE0E28 | 1841 | 870581 | 1-846 | 15-860 | AI222323, AW274395, AW104230, and AA917623. | |
| HTENY44 | 1842 | 870588 | 1-320 | 15-334 | AA860344, AW449340, AI188119, AW241563, AI218844, AA725683, AA860397, H48932, | |
| | | | | | AA398488, AA416572, AI654971, AA719259, AI797656, AI337070, AA416676, H52862, | |
| | | | | | AA402604, and AL137366. | |
| HTENV06 | 1843 | 933294 | 1-479 | 15-493 | N41901. | |
| HTEN574 | 1844 | 773925 | 1-544 | 15-558 | N41653, AI879320, AI879319, AW249274, AI928959, N33827, AA701980, AA156930, | |
| | | | | | AA777363, AL047958, AL048281, H95107, W68434, AI015217, AA364327, W68552, | |
| | | | | | AA909383, W32502, AI188322, AA906240, AI741757, AA021053, AA329553, R16958, | |
| | | | | | AW401707, AA281392, H00750, AA032085, W25157, N88679, AA534002, AI142442, | |
| | | | | | AA552483, T85967, T75519, W88713, H94009, AI985732, AW248852, AI362972, AI240796, | |
| | | | | | AI929211, AI129518, W84587, W84606, AI708380, AA156806, AA954310, AI369295, | |
| | | | | | AA745783, AW291743, AI096816, W88714, AA301938, AI167203, AA356672, P23466, | |
| | | | | | AA666297, W60290, AA922513, W37200, W02166, W60381, AA090596, AI040943, | |
| | | | | | AA535548, AA628365, AI937756, AA576306, AW206638, AA927434, AI565666, AW292178, | |
| | | | | | AI266717, AA181912, AI078402, AA429252, N24950, AA430649, AI189422, AI348358, | |
| | | | | | AI690429, R55029, AL047959, AI811153, AA430402, AI741768, AA774634, AI567256, | |
| | | | | | AI400297, AI004611, AA488479, N93305, AW406490, AA582428, AI554548, AL048282, | |
| | | | | | AW193651, T79324, H54744, AA321085, AI866522, AA037421, W79170, AI239605, | |
| | | | | | AA352112, AI439069, W74366, AA096370, F37003, F33844, AA649533, AI300497, | |
| | | | | | AA995088, F13662, AA632491, AA886406, N83253, AW272778, AA721011, AA744603, and | |
| | | | | | AC004148. | |
| HTENR26 | 1845 | 870595 | 1-292 | 15-306 | AW374010, AI360575, AI018337, AW188121, and AC005879. | |
| HTENQ92 | 1846 | 790908 | 1-639 | 15-653 | AW188190, AI026684, AA861425, AI656213, AI656331, AI148424, AI597882, AA978263, | |
| | | | | | AI806072, AI560944, AA609392, AW103266, W19795, AW341673, AA135775, AA131502, | |
| | | | | | AI274049, AI559891, AA131402, AI797927, and AA135731. | |
| HTENP08 | 1847 | 958382 | 1-433 | 15-447 | AW293376, AW002918, AI206147, AW235254, and AI968897. | |
| HTENL95 | 1848 | 795314 | 1-652 | 15-666 | R95033, H98000, H15506, H54108, Z43087, and F07410. | |
| HTENL73 | 1849 | 974363 | 1-705 | 15-719 | AW368483, AC004671, AB015617, and AB029004. | |
| HTENA08 | 1850 | 958380 | 1-193 | 15-207 | AW118931, and AI205921. | |
| HTEMY05 | 1851 | 880592 | 1-349 | 15-363 | AA074939, X85715, and AA193675. | |
| HTEMV66 | 1852 | 813038 | 1-456 | 15-470 | AA430250. | |
| HTEMU66 | 1853 | 944419 | 1-1078 | 15-1092 | AL039924, AL045794, AW013814, AL036630, T02921, AL044412, T24119, AL044364, | |
| | | | | | T24112, AW450335, AL039476, D51250, D80253, D80043, AL040992, AL039109, AL038531, | |
| | | | | | AL037726, AL039629, AL039625, AL039648, AL038837, AL039074, AL039678, AL039108, | |
| | | | | | AL039538, AL039564, AL039156, AL039659, AL039566, AL039509, AL039521, H00069, | |
| | | | | | AL039128, AL044407, AL036973, AL045337, AL037051, AL045353, AL039386, AL039423, | |
| | | | | | AL045341, AL042909, AL039410, D59787, AL039150, AL044530, AL038821, AL038025, | |
| | | | | | D80219, AL036725, AL043422, D59275, AL043445, AL039459, AI535983, D80227, | |
| | | | | | AL043586, AL043423, D80240, AL043441, D80210, D51423, T23947, AL036650, D80134, | |
| | | | | | AL036196, D59619, D80391, AL037639, D80193, AW451070, AL037615, D80196, AL036767, | |
| | | | | | C14227, AL039085, AI535783, D80949, AL036117, D80366, D59927, AL037526, AL042334, | |
| | | | | | AW452756, D80168, R47228, AL036238, AL036679, AL037601, T11051, D81026, AL039504, | |
| | | | | | C14014, D50995, C75259, AL039842, AL036964, D80045, AL036733, AL036158, AL037027, | |
| | | | | | AL036924, AL037054, D59889, AL036765, T23659, AI557751, AL038851, T23658, AL037177, | |
| | | | | | AL036998, D80022, AL037047, AL044413, AW293068, AL037643, AL036227, AL036418, | |
| | | | | | AL036133, D80038, T11417, AL037082, AL036163, D58283, D80195, AL036207, AL037124, | |
| | | | | | D81030, D80188, AL037021, AL036191, AL036167, AL036132, AL037049, AL037679, | |
| | | | | | AL036190, AL037600, D51799, AL036139, D80378, F13647, D80522, T03269, AL036152, | |
| | | | | | T23656, C14429, T48598, D50979, D80212, AL036900, Z21582, AL037178, AA514190, | |
| | | | | | AL048425, AA285331, AW451416, D59502, AL043613, D58253, AL039555, AL043585, | |
| | | | | | D80166, D59859, AL037085, D80268, D80269, Z25782, AL037569, D80024, D52291, C14331, | |
| | | | | | AL036174, AL036808, AL036953, D57483, Z99396, D59610, AW450376, AL044178, D80241, | |
| | | | | | AL036150, D81111, AI910186, D80164, D59627, C14389, H00072, C15076, D59467, D51060, | |
| | | | | | AA305409, AL036268, AW178893, D51213, D51079, C14298, AL038043, N47620, D80251, | |
| | | | | | AW177440, D51022, C14407, AL044447, AW179328, D80014, AW178775, AL037077, | |
| | | | | | AW378532, AA305578, D80064, AW352158, D80248, D59695, AI905856, AW369651, | |
| | | | | | D51097, AL043840, AL037002, AW178762, AA514188, AW177501, AW177511, AA514186, | |
| | | | | | D80133, AW360834, AL039417, AW360811, C05695, Z25783, AI557774, AW135155, D80258, | |
| | | | | | T02974, AW352117, AW176467, AW375405, AW378540, AW377671, AA809122, AW366296, | |
| | | | | | A25909, A85396, A86792, A44171, A85477, X68127, AR062871, A84772, A84776, A84773, | |
| | | | | | A84775, A84774, AR037157, AR017907, AR062872, AR062873, AR067731, AR067732, | |
| | | | | | A58522, A91750, A20702, A43189, A43188, A20700, AR036905, A95051, AR038762, A95117, | |
| | | | | | A38214, A98767, AR031374, I56772, I95540, AR018924, A49700, A63067, A51047, A63064, | |
| | | | | | AR018923, A48774, A63072, A95052, A48775, AR068507, A18053, AR068506, A93963, | |
| | | | | | A93964, A23334, A75888, I70384, AR043602, AR015960, AR043603, AR043601, A58521, | |
| | | | | | AR000007, AR015961, A15050, A60111, A23633, AI0361, A23998, AR007512, AR020969, | |
| | | | | | I60241, I60242, I63120, AR054109, 103343, AR031375, AR022240, A58524, A58523, A81878, | |
| | | | | | A24783, A24782, E12615, AR035193, A92133, E14304, A27396, AR027100, I28266, A49045, | |
| | | | | | E16678, A82653, E16636, I06859, A93016, I25027, AR000006, I26929, E13740, I44515, | |
| | | | | | I26928, I26930, I26927, A58525, I49890, I44516, A58526, A91753, AJ244003, AR025207, | |
| | | | | | I18371, E06034, AF156296, AI3038, A29289, AR029417, AF156294, AR067733, AR029418, | |
| | | | | | AR067734, A64081, AR028669, AR028668, AR028667, AR028670, AR017908, A68112, | |
| | | | | | A68104, A98467, I62368, AR031488, I13521, I52048, I44531, A84746, AI7115, AR028672, | |
| | | | | | AI8079, AR038066, I50882, I15353, I66495, I66494, I66498, I66497, I66496, I66486, I66487, | |
| | | | | | A71440, A71435, A67220, I13349, A07699, E08322, I74623, A60109, AJ244004, U87250, | |
| | | | | | I00081, A70040, AR028564, A83643, A98420, A98423, A98432, A98436, A98417, A98427, | |
| | | | | | A83151, I01968, AI3388, E00974, A02228, E00954, E00952, E00953, E00955, I08049, I43960, | |
| | | | | | AR021440, E03165, E02221, E13364, AI0360, E02679, E02104, E02098, A92666, E02001, | |
| | | | | | B01718, E02003, E02102, E03550, A28163, E02100, E01997, A58998, E02291, E02292, | |
| | | | | | E02293, E01999, E02396, E02327, E01563, E02431, E01693, E01696, A92668, AR005163, | |
| | | | | | AR005154, AR005157, AR005160, I09250, AR005153, A92667, E01024, AR050583, | |
| | | | | | AR050584, E02430, E01148, E12527, E01503, AR005165, E12523, E02432, A49701, A62009, | |
| | | | | | E01216, I77211, A95096, I70974, I31847, I31848, AR060673, AR060676, A95106, A95105, | |
| | | | | | A80476, A91965, E01324, I08638, A80474, A94048, A94061, A80477, AR035224, A80475, | |
| | | | | | A94046, A94054, I63560, AR031529, A49428, I63561, I63563, and E16036. | |
| HTEMS01 | 1854 | 915308 | 1-576 | 15-590 | AW182380, AI016150, AA436052, AI016144, AA459652, AI110776, AC007227, AC004536, | |
| | | | | | and AL049761. | |
| HTEMO58 | 1855 | 964769 | 1-475 | 15-489 | AI026760, H54090, W90174, AI016127, and U22296. | |
| HTEMN80 | 1856 | 775543 | 1-301 | 15-315 | T80539, and AI719083. | |
| HTEMM91 | 1857 | 938396 | 1-378 | 15-392 | AI655972, AI809237, AI872211, AJ377032, AJ381901, AA523409, AI150552, AI248517, | |
| | | | | | AW328508, AA523391, AI241274, AA609120, W92335, AW194863, AA580479, AI912966, | |
| | | | | | AW243314, Z25384, AI217725, AA531424, AI142666, AW137703, W56565, W56787, | |
| | | | | | AI678791, F17380, R95131, AW057531, and AI825787. | |
| HIEMI51 | 1858 | 870613 | 1-583 | 15-597 | AI149866, and AA918162. | |
| HTEMB57 | 1859 | 849214 | 1-456 | 15-470 | AA398093. | |
| HTELY90 | 1860 | 787549 | 1-356 | 15-370 | AI022425, and T86122. | |
| HTELV29 | 1861 | 806421 | 1-627 | 15-641 | AA083981, AL043302, AL050276, AF194030, and AF185576. | |
| HTELP07 | 1862 | 952274 | 1-550 | 15-564 | AI005651, AA502325, and AI005304. | |
| HTELM71 | 1863 | 954982 | 1-509 | 15-523 | AA843728, AW303661, and AA813137. | |
| HTELA02 | 1864 | 918699 | 1-602 | 15-616 | AI651239, AW268856, AI024356, AJ016924, AI016923, AI698585, AA609414, AA620951, | |
| | | | | | AW072208, AI696034, and AI340253. | |
| HTEKU62 | 1865 | 754010 | 1-713 | 15-727 | R13043, AA402245, W03238, and AA293855. | |
| HTEKI62 | 1866 | 812862 | 1-472 | 15-486 | AA741257, W23913, AA769417, AI923864, AA099994, AA113016, AI633572, AI129921, | |
| | | | | | AI740509, AI087861, AI198728, AA451698, AA811514, AW328432, AI345992, AW135872, | |
| | | | | | AI865582, AA769447, AA716235, AA946657, AI818126, AA742292, AW025858, AI092084, | |
| | | | | | AI864067, AI992065, AW027054, AJ129952, AW105702, AA527064, AW166911, AI969997, | |
| | | | | | AW263370, T12481, AI571406, AW243885, AA192190, AW134596, AI143876, AI143870, | |
| | | | | | AW136628, AW009874, AI475650, AA063520, F21628, AA781441, F37014, AW074003, | |
| | | | | | AI928446, AA736768, N91862, AA774271, AI611242, AW363815, F33207, AW328431, | |
| | | | | | AI470616, H39778, W76151, W72588, AW444846, AW368798, AI479056, AI861919, | |
| | | | | | AI223368, AI760686, AA973718, AA991724, AA804626, AW449436, AI217528, AI246328, | |
| | | | | | AI391628, AA977169, AI222649, AI453599, AI825699, AI968087, AA910938, AW294100, | |
| | | | | | N74597, AI587076, AI738417, AI818572, AI347378, and C00207. | |
| HTEKH17 | 1867 | 942526 | 1-643 | 15-657 | | |
| HTEKD77 | 1868 | 772397 | 1-414 | 15-428 | N47372, AA029276, AW173125, T51928, AW197647, AA436376, N56847, AI142573, | |
| | | | | | AA885319, W26719, AI961121, R52187, AI032543, AW009278, T51718, AA992217, W37315, | |
| | | | | | AI370687, AA495856, AJ073556, AL041264, AF147339, and AP000533. | |
| HTEJV94 | 1869 | 793039 | 1-381 | 15-395 | AI628611, AA416585, AA420969, AW271467, AJ831883, AI928360, AA421125, AW001638, | |
| | | | | | AA397955, AI656005, AW016672, AW003460, AL110224, and AC003669. | |
| HTEJO46 | 1870 | 717850 | 1-388 | 15-402 | R72953. | |
| HTEJN12 | 1871 | 653252 | 1-443 | 15-457 | AA223373, AL096763, and Y18004. | |
| HTEJL30 | 1872 | 696784 | 1-386 | 15-400 | R92318, R97141, D61526, W58524, R13204, AA333107, AW163212, R55599, H23092, | |
| | | | | | D52777, AI929587, C05240, R19781, D61319, AA150352, Z46053, AA355121, AA296708, | |
| | | | | | AA323111, D53669, R26633, H08329, AA317832, AA322876, W01316, AA973604, AA374431, | |
| | | | | | R49663, AA296782, H23093, H85812, AA149563, AA318184, AI368381, AW088920, | |
| | | | | | AI253781, R40292, AI928933, AI857794, AI452755, AI160425, AA975568, AA961868, | |
| | | | | | AI718865, AA776210, AA025635, AA337795, AI191849, W73632, N79435, AA679726, | |
| | | | | | AA865487, W78161, AW339133, AI582690, W58412, AI744177, AA902205, H97698, | |
| | | | | | AI338657, AI338667, AW452422, AI187166, AA330474, AA333363, AA976009, AA126618, | |
| | | | | | AJ239435, AI572582, AA085720, R55362, AA360533, AW166355, AI879369, AW163740, | |
| | | | | | AI752339, AI302066, AI954021, AA355733, T57729, T60002, AA332269, AW160676, | |
| | | | | | AW403792, AA111927, D61306, N31004, AA064830, W79204, D53612, AA961222, | |
| | | | | | AA845309, AA186387, W07796, W73680, N58648, AA642523, AA151815, AI805801, T30103, | |
| | | | | | D54012, T36033, AA393418, AF092135, and AL109701. | |
| HTEJC70 | 1873 | 490772 | 1-587 | 15-601 | R94482, and AJ004651. | |
| HTEJB07 | 1874 | 953801 | 1-451 | 15-465 | AA993947, AW134645, AA884829, AI004532, AI150514, and AI239661. | |
| HTEIS34 | 1875 | 887112 | 1-371 | 15-385 | AI002739. | |
| HTEJS25 | 1876 | 870660 | 1-390 | 15-404 | AI208897, AI187424, AA682756, and AI187850. | |
| HTEJN26 | 1877 | 684711 | 1-403 | 15-417 | R72964, W76526, R64535, and U82396. | |
| HTEJL36 | 1878 | 708304 | 1-425 | 15-439 | AA417003, AA835058, AI424995, AI220270, AA694436, AW182313, R20520, AI382131, | |
| | | | | | AI004786, AA418740, AA418795, AI190974, Z39070, AA742556, and AI809322. | |
| HTEIJ58 | 1879 | 491030 | 1-528 | 15-542 | N71729, N71226, AP000041, AP000109, and AP000285. | |
| HTEID15 | 1880 | 395868 | 1-247 | 15-261 | | |
| HTEIB38 | 1881 | 839966 | 1-318 | 15-332 | AA724539, and AA960890. | |
| HTEIB37 | 1882 | 870671 | 1-336 | 15-350 | | |
| HTEIB03 | 1883 | 921926 | 1-223 | 15-237 | | |
| HTEJA57 | 1884 | 734983 | 1-489 | 15-503 | N38963, and R92356. | |
| HTEHX57 | 1885 | 734976 | 1-442 | 15-456 | AW451115, AI863336, AW104507, AI692981, AI652017, AI827145, AI017283, AI955549, | |
| | | | | | N33485, R76560, AW409808, AI207003, AI202422, and AI927281. | |
| HTBHV11 | 1886 | 967439 | 1-561 | 15-575 | AA916546, AI204535, and AL021331. | |
| HTEHS17 | 1887 | 664436 | 1-391 | 15-405 | AA424196, AA846387, AI797455, AA778547, AW340809, AI217364, AI188208, AI150580, | |
| | | | | | AI123441, AI027637, AA770175, AI150190, AF012356, AA909271, AF012355, and | |
| | | | | | AA442327. | |
| HTEHJ11 | 1888 | 964956 | 1-242 | 15-256 | C04728, AA381098, N45678, AA480568, W69682, AA397755, AA476511, AA476550, | |
| | | | | | AI860245, AW024421, AW382036, AW382039, AA838817, AW382042, AW382037, | |
| | | | | | AW381999, AW382041, AW381961, AW382000, AW381997, AA934010, AI363359, W69923, | |
| | | | | | AW190584, N36268, W44317, AA181315, AI864889, AA130883, AI745226, AI934734, | |
| | | | | | AA187057, W38774, AW382054, N26942, AI469219, AI380284, AI380273, W45689, | |
| | | | | | AI057575, AA725447, AI360479, N48961, and AI057565. | |
| HTEGW02 | 1889 | 920628 | 1-1006 | 15-1020 | AI288698, AI914273, AI203577, AI696478, AA913934, AA812691, AI573252, AI936975, | |
| | | | | | AI015501, AI280024, AW054753, AA975903, AI371833, AI160502, AA844728, AA687959, | |
| | | | | | AA393300, F34643, AA813782, T53463, AI091343, AA435624, AA595143, T53462, AI364294, | |
| | | | | | and AI217827. | |
| HTBGU55 | 1890 | 931017 | 1-376 | 15-390 | R61288, R05576, AA778664, AA280073, AB014581, and Z98752. | |
| HTEGS24 | 1891 | 932987 | 1-598 | 15-612 | AA256743, AI374955, AI123527, AA251700, AA455406, AA429834, AA618437, Z28611, | |
| | | | | | AI433315, AA331686, AI498096, AW203957, AI377211, AA770064, AA808245, AA828466, | |
| | | | | | AA098810, AA331825, AA814045, AA101241, AI078061, AA625885, H53435, AA357747, | |
| | | | | | and D42054. | |
| HTEGJ74 1892 | 765901 | 1-474 | 15-488 | R13795, and R14717. | | |
| HTEGJ56 1893 | 732630 | 1-607 | 15-621 | N32789, AA992305, AI829630, AI453589, AI037906, AA490671, N47354, AF106857, and | | |
| | | | | | AF026169. | |
| HTEGJ38 | 1894 | 709420 | 1-356 | 15-370 | W87922, and AA694342. | |
| HTEGH60 | 1895 | 545137 | 1-207 | 15-221 | AI125270, AI025275, AI017509, AA724721, AA970833, AA904629, and AC002128. | |
| HTEGC30 | 1896 | 690998 | 1-463 | 15-477 | N51343, AI341075, AI967945, AL035252, Z79996, AL031775, AL021978, AC002384, and | |
| | | | | | AC002455. | |
| HTEFX90 | 1897 | 887616 | 1-568 | 15-582 | N41791, AI734225, W21309, AF026169, and AF106857. | |
| HTEFU18 | 1898 | 666920 | 1-623 | 15-637 | AA011636, AW136535, AA641738, AI242200, AA972854, AI357112, AI252660, AI919234, | |
| | | | | | AI732405, and AW379801. | |
| HTEFO46 | 1899 | 719280 | 1-537 | 15-551 | AA188885, AA189066, AA834951, AA971947, AW389450, AA856992, and AA189065. | |
| HTEFO28 | 1900 | 685383 | 1-470 | 15-484 | N78395, and H45135. | |
| HTBEU78 | 1901 | 530196 | 1-327 | 15-341 | AL044999. | |
| HTEEU35 | 1902 | 707717 | 1-102 | 15-116 | AC004259, and AC004600. | |
| HTEEU27 | 1903 | 575476 | 1-275 | 15-289 | | |
| HTEEU18 | 1904 | 530203 | 1-348 | 15-362 | AA442512, AA002017, N68854, AF122013, AF064102, AF000367, and AF064103. | |
| HTEEU17 | 1905 | 530200 | 1-371 | 15-385 | | |
| HTEET22 | 1906 | 675071 | 1-395 | 15-409 | N55308, AI201311, and AA709195. | |
| HTEEF25 | 1907 | 677513 | 1-329 | 15-343 | AA461517, AL040379, AI825108, AL040378, AC007981, AC011718, AC008103, AC012330, | |
| | | | | | AC007708, AC007324, AC009288, AC008079, AP000550, AC007325, AP000552, AC008018, | |
| | | | | | and AC008132. | |
| HTEEB82 | 1908 | 780161 | 1-326 | 15-340 | H53320, R97852, AI032585, H53321, R97802, AL033531, and AL034424. | |
| HTEDX39 | 1909 | 530201 | 1-246 | 15-260 | AC005726. | |
| HTEDX04 | 1910 | 927850 | 1-330 | 15-344 | AF111169. | |
| HTEDX03 | 1911 | 925353 | 1-190 | 15-204 | AW002847, AC005300, and AC006946. | |
| HTEDW96 | 1912 | 881958 | 1-539 | 15-553 | AA101046, AA860334, AI240068, AI381744, AA064659, M79124, AB006626, AF132607, and | |
| | | | | | A86973. | |
| HTEDW59 | 1913 | 530448 | 1-201 | 15-215 | AI139615, and AL117627. | |
| HTEDV86 | 1914 | 785818 | 1-497 | 15-511 | W87362. | |
| HTEDU53 | 1915 | 727362 | 1-443 | 15-457 | N75217, AI827641, and AI313263. | |
| HTEDS40 | 1916 | 934047 | 1-496 | 15-510 | N64316, and AA418089. | |
| HTEDS06 | 1917 | 960645 | 1-839 | 15-853 | AA557354, AA004230, AA702179, AI671185, AI924143, AI609113, AI056239, AI638795, | |
| | | | | | AI337375, AA634413, AW250803, AA417152, AL135398, AA478510, AA195614, AA190630, | |
| | | | | | AI814763, AA827285, AI091408, AI638180, AI080126, AA632206, AI379107, AI288872, | |
| | | | | | AI263619, AA626405, AI679151, AI754325, AI769841, AI559213, AI679722, AA417030, | |
| | | | | | AA552345, W93249, AA007263, AI969543, AA766364, AA534494, AI038181, AA960978, | |
| | | | | | AA449336, AA573241, AW043937, AA725439, AI291838, N73539, AA189108, AI699813, | |
| | | | | | N73585, AW104716, AW166044, D19671, AW192890, AA454518, AA621586, H73339, | |
| | | | | | N54283, AA910989, H14801, H05505, N56013, H75580, AI038699, AA248270, AA149737, | |
| | | | | | H70079, AA808510, AI806228, AI806407, AI628327, AL079833, W93248, AA478509, and | |
| | | | | | AF044588. | |
| HTEDO75 | 1918 | 767024 | 1-184 | 15-198 | | |
| HTEDK72 | 1919 | 766343 | 1-339 | 15-353 | AI693509, and H95965. | |
| HTEDJ92 | 1920 | 522827 | 1-294 | 15-308 | | |
| HTEDJ63 | 1921 | 508086 | 1-310 | 15-324 | Z98257. | |
| HTEDI09 | 1922 | 522969 | 1-397 | 15-411 | AI797509. | |
| HTEDI01 | 1923 | 961028 | 1-230 | 15-244 | AC006960, AC005015, AL035249, and AL049569. | |
| HTEDH90 | 1924 | 909165 | 1-403 | 15-417 | R79137, AA314329, AA323430, U69560, AC007731, and AC005500. | |
| HTEDH76 | 1925 | 522940 | 1-208 | 15-222 | AC004945. | |
| HTEDH42 | 1926 | 615250 | 1-459 | 15-473 | C03196, C03292, F00515, AA361228, AW003009, AA626353, AW403239, W67213, | |
| | | | | | AA314421, W05346, W63719, AI346486, W24987, D12319, D11537, AA423922, N45183, | |
| | | | | | AR053393, and AF092130. | |
| HTEDH30 | 1927 | 522936 | 1-237 | 15-251 | AL049697. | |
| HTEDH17 | 1928 | 522938 | 1-371 | 15-385 | | |
| HTEDH06 | 1929 | 869427 | 1-392 | 15-406 | AC006251. | |
| HTEDG75 | 1930 | 890715 | 1-358 | 15-372 | | |
| HTEDG26 | 1931 | 519947 | 1-384 | 15-398 | AW246994, AA421090, AA421091, AA397662, AA375279, R83399, AI638717, AA306667, | |
| | | | | | AA747622, and AC000378. | |
| HTEDF96 | 1932 | 614726 | 1-323 | 15-337 | AA242852, AA252186, AI129391, AA743400, AI934605, AA531278, AA705950, AA418351, | |
| | | | | | AA834128, and AC006942. | |
| HTEDF70 | 1933 | 522977 | 1-294 | 15-308 | AC004983. | |
| HTEDF60 | 1934 | 742368 | 1-356 | 15-370 | AI656191,Z21349, andZ21348. | |
| HTEDF22 | 1935 | 908406 | 1-291 | 15-305 | AC002418,Z83843, andAC004386. | |
| HTECE66 | 1936 | 522997 | 1-403 | 15-417 | | |
| HTECE62 | 1937 | 523002 | 1-407 | 15-421 | AW241925, and AC005232. | |
| HTECE61 | 1938 | 789732 | 1-543 | 15-557 | N80927, AA400153, AI027600, W58447, AA813400, AA746206, AI139801, AA828177, | |
| | | | | | AW375643, AI279610, AI359755, AA444123, AA443944, AA569017, AA451805, AI089230, | |
| | | | | | AI632987, AI338403, AI262825, AA767495, AI005034, AA453635, AA454013, AI560993, | |
| | | | | | AW250814, T30813, AW149100, AW327945, AW207031, AA629893, AI342923, AA922333, | |
| | | | | | F37015, AI745194, AA676942, AI086189, AI276499, AW058509, AI682025, AW004973, | |
| | | | | | AW009042, AI367703, AI445623, AI241535, AA441932, N73089, AW295548, AI188497, | |
| | | | | | F04870, F10561, W58482, Z41848, T35208, AA548624, AI094343, AA923598, AW440500, | |
| | | | | | W76342, AW080667, AI720047, T17396, R37034, F22096, R39180, AA833987, AA197182, | |
| | | | | | AA426126, AW363378, AI797280, AA196359, T19458, AI743371, AA090309, R34367, | |
| | | | | | AA446271, T61317, AW407104, N71508, AA075086, AA383602, C21530, AI371957, | |
| | | | | | AA192312, N22129, N91820, AA374751, AA213591, AA813578, H43284, H97310, C00318, | |
| | | | | | T10425, T98391, AA832076, AI049609, AA740854, AA349688, AA369853, and AL035405. | |
| HTECE51 | 1939 | 870723 | 1-301 | 15-315 | | |
| HTECE39 | 1940 | 650885 | 1-389 | 15-403 | | |
| HTECE31 | 1941 | 508104 | 1-284 | 15-298 | | |
| HTECE08 | 1942 | 960428 | 1-421 | 15-435 | | |
| HTECD94 | 1943 | 527210 | 1-318 | 15-332 | AI025190, AL137266, AC005071, AC005488, AC004878, and AC006014. | |
| HTECD88 | 1944 | 527214 | 1-342 | 15-356 | AA804334, and AW007980. | |
| HTECD70 | 1945 | 527203 | 1-324 | 15-338 | | |
| HTECD65 | 1946 | 533795 | 1-328 | 15-342 | | |
| HTECD56 | 1947 | 527209 | 1-178 | 15-192 | | |
| HTECD15 | 1948 | 523029 | 1-402 | 15-416 | | |
| HTECC71 | 1949 | 508142 | 1-370 | 15-384 | | |
| HTECC45 | 1950 | 508124 | 1-317 | 15-331 | AA406427, H66890, H64867, H66639, H69191, AA693972, AA410436, AA931060, N38830, | |
| | | | | | H48140, AI247909, AA251684, N23377, N76083, AA887276, T61107, AW328038, AI681235, | |
| | | | | | AW328039, AA608986, H72100, N71448, AA188574, C02442, H70867, R94076, AA394213, | |
| | | | | | AA487534, T68446, AC005185, AL121877, AC006039, AL121578, AC006458, AC005544, | |
| | | | | | AC005014, Z84481, AP000261, AP000100, AP000035, AC004696, AC002094, AC008040, | |
| | | | | | AC005774, AC006157, AC005284, AL049834, AL080250, AC006150, AF048727, AL022393, | |
| | | | | | AC004448, AC007001, AF129077, AF165147, AC008009, AC004202, AP000518, AC002383, | |
| | | | | | AB023054, AP000692, AC003119, U91325, AC006355, AL031542, AC005853, Z69722, | |
| | | | | | AL031315, AL035461, AF011889, Z83826, AC004975, AC008085, AL022318, AC004664, | |
| | | | | | AC005862, Z76735, AC004746, AC007286, AP001101, U80460, U91324, AL133162, | |
| | | | | | AP000075, Z97180, AC002531, AC002511, AC003034, AL135922, and U95738. | |
| HTECC26 | 1951 | 508144 | 1-403 | 15-417 | AA393147, and AA398551. | |
| HTECC09 | 1952 | 678659 | 1-353 | 15-367 | AA306529, AA306591, AA826008, AI089960, AA887528, AI333816, AA513786, AA524465, | |
| | | | | | AI125407, AA541685, AA446158, AA315157, AI185832, AA603451, AI660483, AI871796, | |
| | | | | | AI138696, AI563976, AI141745, AI479416, AI304867, AA938482, AI342761, AA281870, | |
| | | | | | AA102814, AA586819, AA526476, AW157657, AI878833, C14084, AI515670, AI879393, | |
| | | | | | C15292, AA931242, AA125855, W19566, AI081138, AA248470, AA070996, D59838, | |
| | | | | | AW138570, AI660905, AA442677, D60576, AA776763, AI038860, AA527168, AI879973, | |
| | | | | | H72163, AI096871, AA887522, AA535032, N29179, AA437187, C15125, AW163651, | |
| | | | | | AA100697, AA070617, AA126067, AA682431, W21262, R58065, AI217985, W95562, H64391, | |
| | | | | | H91983, AA352582, N53018, AA125841, AI356704, AA927737, AI336049, AA889266, | |
| | | | | | AW272440, AA502617, AA431548, AI184304, AA833674, F35247, AA369535, W39436, | |
| | | | | | AA281586, AA575968, W95435, AI056604, AI350076, C14543, AA878900, AA947125, | |
| | | | | | W15344, AI537988, C15570, AI085201, AA732059, AI184964, AI569557, AI301035, | |
| | | | | | AA429855, AI889555, AA513631, AI000301, AA592946, AA317358, AI797215, AA722721, | |
| | | | | | AA758447, AA721039, AI339315, AA947500, AI149920, W37085, AA682224, AA962818, | |
| | | | | | AA552223, C15228, AI073583, AI051738, AA737832, AA303269, AA548883, AA991817, | |
| | | | | | AI869608, AA923511, AW297214, W07566, AI222563, AA991676, AI301328, AI376085, | |
| | | | | | AI080573, AA364733, AI031902, W04779, AA878574, AA600861, AA779628, AA091291, | |
| | | | | | AA322774, D81321, AI039006, D60527, AA782434, AI202852, H89937, AW192683, N80835, | |
| | | | | | AA356010, AA301770, AA304243, AA129809, H91874, AI198092, D60707, T93983, N20273, | |
| | | | | | AI271711, W24482, D60706, and AA369534. | |
| HTECC08 | 1953 | 960439 | 1-341 | 15-355 | | |
| HTECA44 | 1954 | 508135 | 1-427 | 15-441 | AW086066. | |
| HTECA39 | 1955 | 508132 | 1-408 | 15-422 | | |
| HTBBP54 | 1956 | 728811 | 1-736 | 15-750 | R62332, H17378, and R25901. | |
| HTEBO43 | 1957 | 715704 | 1-304 | 15-318 | AI928432, AI291335, AI803224, AI298002, AI985197, AI924618, AA489696, AA489695, | |
| | | | | | AI806154, AW138014, AI241232, AW291969, N36798, AA436451, AA765512, AA743624, | |
| | | | | | AA020798, AA848065, AA436498, AI221817, AI768422, and AA015614. | |
| HTEBM87 | 1958 | 503275 | 1-278 | 15-292 | AA383834, AA383833, AW117332, and AW268492. | |
| HTEBL53 | 1959 | 578544 | 1-355 | 15-369 | AA383796. | |
| HTEBJ02 | 1960 | 921321 | 1-408 | 15-422 | H73473, and AA383702. | |
| HTEBH09 | 1961 | 870732 | 1-560 | 15-574 | AI204211, AW274576, AI285857, AA383617, AI394396, AA442838, AI218526, AI214386, | |
| | | | | | AA781925, AA725598, AA758847, AI671527, and AI125254. | |
| HTEAX06 | 1962 | 960792 | 1-413 | 15-427 | AW300891, AW182267, AI002121, AI393590, AW268430, AA812869, AI363725, AI937132, | |
| | | | | | AI370331, AA431750, AA383228, C20655, and AI537879. | |
| HTEAV22 | 1963 | 679394 | 1-449 | 15-463 | H16258, AI362696, AA159083, AI337351, AI049674, H05276, AI963664, AA612853, | |
| | | | | | AA421018, R50945, AA398617, AI276451, AA868365, and AA383003. | |
| HTEAU39 | 1964 | 503295 | 1-428 | 15-442 | R45446, AA994896, AI285099, AI419926, AI219508, AI650680, R41613, AA383142, | |
| | | | | | AI264406, AI942371, and AC005752. | |
| HTEAT17 | 1965 | 667184 | 1-298 | 15-312 | AA416657, AA394107, AA629341, AA382909, AI075928, AI150321, AI204602, AW022487, | |
| | | | | | AA397912, AA862555, AI066604, and AA442269. | |
| HTEAS02 | 1966 | 921323 | 1-527 | 15-541 | AI203924, AA383061, AI215017, and AA861908. | |
| HTEAR93 | 1967 | 503298 | 1-361 | 15-375 | AA383056, and AA383057. | |
| HTEAQ55 | 1968 | 732562 | 1-1106 | 15-1120 | AI979276, AW117497, AW269774, AA701653, W46209, AA778787, AW269767, AI218590, | |
| | | | | | N20493, W28100, AA039403, AA781351, AI025502, AI696076, W26315, AI281715, | |
| | | | | | AA088596, N25525, AI220590, AW136955, AA758981, AA406069, AA972182, AI634149, | |
| | | | | | AA628118, AI819755, AI215556, AA039283, N33500, AI218587, W46210, AA382922, | |
| | | | | | AI476428, AI766748, AA724549, AA723963, R84858, R85787, AW087598, AW275213, | |
| | | | | | C20812, and AC004805. | |
| HTEAJ96 | 1969 | 503533 | 1-421 | 15-435 | AA382756, and AA382755. | |
| HTEAH75 | 1970 | 503546 | 1-324 | 15-338 | AA382618, and AA382617. | |
| HTEAG47 | 1971 | 503623 | 1-411 | 15-425 | AA707221, H91075, AA677780, H90565, AA382495, AA382494, and AI825267. | |
| HTEAG08 | 1972 | 960469 | 1-322 | 15-336 | AW298466, AA382538, AA504454, and AA382537. | |
| HIBAB50 | 1973 | 724751 | 1-310 | 15-324 | AA459803, AA382330, AW084476, AW118229, AA770485, AI393130, and AA894604. | |
| HTEAA04 | 1974 | 925522 | 1-533 | 15-547 | AA431127, AA432144, and AA382138. | |
| HSWBY36 | 1975 | 708291 | 1-413 | 15-427 | AA993042, and N22565. | |
| HSWBT69 | 1976 | 867537 | 1-366 | 15-380 | W25339, AA046193, AA449279, and U36384, | |
| HSWBE29 | 1977 | 412991 | 1-394 | 15-408 | AI034154, AI075224, AI273184, AA912285, AI950513, AI885608, AI335673, AI887898, | |
| | | | | | AI080389, AW243126, AA912258, AI656815, AI869093, AA743734, and N62780. | |
| HSWAS65 | 1978 | 953051 | 1-391 | 15-405 | AI149166, AW134820, W74519, AI126334, AI458127, AI702779, AW241716, W74520, | |
| | | | | | AI313414, AA325604, AI085318, AA028905, AI809343, AA927327, AA621660, H18963, | |
| | | | | | W79859, and U87223. | |
| HSWAS18 | 1979 | 666302 | 1-481 | 15-495 | AI341837, H29745, AI744756, R86286, H27353, and C02105. | |
| HSWAR63 | 1980 | 471236 | 1-343 | 15-357 | AI368388, AI375597, AI333175, AI096336, AI143097, AI371774, AI863007, AI143646, | |
| | | | | | AI401020, AI264622, AI955198, AI830291, AI871932, AI089379, AI361917, AI669393, | |
| | | | | | AI083964, AI130018, AI284009, AI763092, AI313424, AI860304, AI761302, AI802694, | |
| | | | | | AI689622, AI807536, AI889890, AI283822, AI984147, AI436614, AI831700, AI401294, | |
| | | | | | AW166231, AI373088, AW440862, AI283398, AI628021, AI076054, AI160352, AI356262, | |
| | | | | | AW303797, AW027683, AI076901, AI750565, AW138762, AW205241, AW131274, | |
| | | | | | AW182727, AI633329, AW027104, AI826608, AI131379, AI082361, AW051864, AW007685, | |
| | | | | | AW148788, AW015247, AI309293, AI761146, AW152138, AI917165, AI094866, AI991300, | |
| | | | | | AW055285, AW189932, AW167782, AI819815, AI660514, AW152227, AI192788, AW138854, | |
| | | | | | AW026436, AI625376, AI493229, AI435865, AI141874, AI140238, AI559315, AW205065, | |
| | | | | | AW139124, AW205019, AW089459, AI147674, AI142533, AI283228, AI524717, AI985076, | |
| | | | | | AI418837, AI452497, AI084650, AA761057, AI352600, AI365199, AI359053, AW134846, | |
| | | | | | AI281009, AI189810, AI927109, AI475646, AW008134, AI347476, AI127254, AI798042, | |
| | | | | | AI245694, AI084053, AI472105, AI858658, AI346716, AI805265, AI056708, AI168084, | |
| | | | | | AW168327, AI335542, AW016943, AI763091, AW080734, AI344496, AW001416, AW134801, | |
| | | | | | AW138795, AW139783, AW134778, AI083683, AI436570, AI356539, AI913071, AW291502, | |
| | | | | | AW205777, AI364682, AW135748, AI805245, AW118495, AI378537, AI751342, AI017678, | |
| | | | | | AA731725, AA743409, AI284044, AI367653, AI244522, AW129260, AI274414, AI336615, | |
| | | | | | AI521300, AW206154, AI817686, AA768889, AA687148, AW204642, AW067873, AA748715, | |
| | | | | | AW206063, AI344202, AW204658, AW134471, AW134992, AI498998, AW272093, AI751403, | |
| | | | | | AI184103, AI365388, AI868143, AW029417, AI096546, AI193953, AI274606, AW068441, | |
| | | | | | AW149182, AI475878, AI884460, AJ056487, AI242557, AW075326, AW058138, AI956107, | |
| | | | | | AA934582, AW087680, AW277100, AI937167, AW086079, AI992000, AI040279, AI440481, | |
| | | | | | AI290523, AW103911, AI266204, AI383396, AI636832, AI872349, AI092810, AI382023, | |
| | | | | | AI471042, AI745657, AW082335, AW207085, AW079700, AI991258, AI934795, AW150946, | |
| | | | | | AI359264, AI797905, AI244599, AI205545, AI985061, AI952709, AI250781, AW170789, | |
| | | | | | AI916414, AW150829, AI290207, AI208838, AI824627, AW137667, AI916148, AW169534, | |
| | | | | | AI439477, AI126922, AW138184, AW139537, AI369691, AI018609, AW028207, AI858490, | |
| | | | | | AI282372, AW014680, AI500554, AA775869, AW014451, AI123239, AI553795, AI554710, | |
| | | | | | AI350901, AI241918, AI865208, AI274094, AI366682, AI379191, AI144370, AI417103, | |
| | | | | | AI990960, AI871260, AI264233, AA533302, AA654830, AI284364, AW205575, AW207168, | |
| | | | | | AW089185, AW137590, AI873120, M11167, M11120, M27830, U13369, X59734, AJ270046, | |
| | | | | | M29181, X02995, X59733, X82564, X00525, V01270, AF061798, AF061799, U17964, U17965, | |
| | | | | | U17962, U17963, J04633, AF074093, S48220, U34339, U34337, U34341, U34342, U34340, | |
| | | | | | U34336, AF061800, U34338, L15286, AF132045, U67616, AF086136, D86039, AF061797, | |
| | | | | | AR016103, A85605, A85520, A86292, A65652, E08821, A71562, AF059516, X59474, S78388, | |
| | | | | | A22946, and L20636. | |
| HSWAQ31 | 1981 | 697856 | 1-405 | 15-419 | AI621111. | |
| HPWTA06 | 1982 | 936026 | 1-611 | 15-625 | AA197067. | |
| HPWSA52 | 1983 | 727294 | 1-336 | 15-350 | H87580, and AL035699. | |
| HPWDK45 | 1984 | 839559 | 1-521 | 15-535 | R05355. | |
| HPWDF03 | 1985 | 924978 | 1-701 | 15-715 | W87370, AI168586, AA678331, T96677, W87371, and T96792. | |
| HPWDE86 | 1986 | 785710 | 1-362 | 15-376 | R34114, and R62645. | |
| HPWCJ90 | 1987 | 789170 | 1-385 | 15-399 | AA036882, AW073808, AW006251, AI992106, AI089385, AI095532, AI143143, AI979301, | |
| | | | | | AI750308, AW001022, AI147683, AA046259, AI598152, AI201784, AW235719, AI696115, | |
| | | | | | and AA011669. | |
| HPWCG85 | 1988 | 638155 | 1-1025 | 15-1039 | AW172969, AA601278, AA469230, AI376239, AJ609972, AA847704, AI431434, AI249365, | |
| | | | | | AA601680, AA829065, AI053934, AL042539, AA857812, AI281818, AW089016, AI620992, | |
| | | | | | AA169245, AW089322, AI282629, AA480486, AA704101, AI446623, AA609834, AI859438, | |
| | | | | | AI340151, AA130647, AA622479, AI912401, W60522, AA904211, AA491767, AI783911, | |
| | | | | | AA563770, AA487142, AA992562, AI961983, AI417469, AW264901, AA828047, AA828867, | |
| | | | | | AI133083, AA911590, AA484892, AI224583, AA573062, AW408767, AI279417, AI061313, | |
| | | | | | AA704393, AL041970, AW407632, AL046519, AI445224, AA197019, T47138, AA578832, | |
| | | | | | AI445934, AI053597, AI054418, AW303872, AI417464, AA587826, AA487645, AI500552, | |
| | | | | | H38769, AA176605, AI355559, AA701105, AI636734, AI277373, AI613465, AA362349, | |
| | | | | | AI989408, AA598605, AI355246, AI733856, W63553, AI598060, AI049931, AI243793, | |
| | | | | | AW341955, AA985201, AA468956, AI762528, AA632765, AI189682, AA683279, F23338, | |
| | | | | | AW105729, AI598056, AW157616, R91827, AA515631, AI362552, H95769, AI206841, | |
| | | | | | AW410409, H71678, AC005740, U80017, U95090, AC006312, AC005696, AC005412, | |
| | | | | | AC002565, AP000044, AP000692, AC005529, AP000113, AL035587, AL079304, AC004819, | |
| | | | | | AF111169, AP000045, AL121603, AL035249, AL031311, AL031670, AL139054, AC005051, | |
| | | | | | AL021546, AC005288, AC005071, AC005730, AL021878, AC004492, AP000555, AC004983, | |
| | | | | | AP000112, AL035086, AC005952, AC006211, AP000330, AL021391, AL031657, AC005620, | |
| | | | | | AP000557, AB023049, AC002094, AC004491, AC002115, AC005971, AC007792, AC006111, | |
| | | | | | AC007057, AL024498, AC004765, AC002316, AC007707, AF196969, AC005225, AC005940, | |
| | | | | | AC007226, AC000353, AL022238, AF053356, AC002350, AD000092, AC005837, AC005839, | |
| | | | | | AB003151, AC004796, AL096701, AC004596, AC005037, AF165926, AC020663, AP000501, | |
| | | | | | AC002312, AP000959, AP000140, AC005231, AC005067, AC004991, AR036572, U91328, | |
| | | | | | AL078581, AP000031, AC005031, U78027, Z98946, AF001550, AL022318, AF045555, | |
| | | | | | AC005776, AC005480, AL080243, AC005874, AF134471, AF001549, AF134726, AC006241, | |
| | | | | | AL050307, AC005409, Z84469, AP000212, AP000134, AC005914, AC004953, AC004910, | |
| | | | | | AP000350, AC006088, AL035457, AL049759, AC007363, AL109627, D84394, AF111168, | |
| | | | | | AC004531, AL031846, AC007216, AL034420, AC005803, AC004662, AC005049, AC007686, | |
| | | | | | AC006049, AC005180, AC003007, AL133445, AL034429, AC006130, AL031281, U47924, | |
| | | | | | AC005625, AC007298, AL031431, AP000553, AL035659, AC007666, AC006965, AL022326, | |
| | | | | | Z93930, AL049795, AC006011, AC005695, AC002126, AC002302, AC005911, AC005324, | |
| | | | | | AC004019, AF207550, AL035422, AJ003147, AC004185, AL049709, AC005666, Z83840, | |
| | | | | | AC006285, AL031255, AF064861, AC006543, Z82244, AP000228, Z83845, AC006120, | |
| | | | | | AC004854, AC005200, L44140, AC002477, U52112, AP000058, AL079295, AD000812, | |
| | | | | | AL109801, AC006449, AL031284, AC005520, AL022320, AC004167, AC004253, AC005057, | |
| | | | | | AC003029, U95739, AL021154, AL049692, U85195, AC005829, X87344, AP000248, | |
| | | | | | AL050341, AL132712, AC009516, AF088219, AC005102, AC006360, AC005082, AC007283, | |
| | | | | | AC007308, AL008718, AC000052, AC004832, Z83826, U91326, AL096791, AC006480, | |
| | | | | | AL020997, AC004929, AC005089, AF030453, AL034548, Z95114, AP000558, Z81369, | |
| | | | | | AC002425, AL034423, AF196779, AC007450, AC004448, AF196971, AC002404, AC006581, | |
| | | | | | AC004000, AL031584, AC006544, AC005800, AE000658, AC005484, AC002470, Z93244, | |
| | | | | | AL117337, AC005527, AC005358, AL109798, AC002091, Z86090, AL022302, U91318, | |
| | | | | | U96629, AL022721, AC005280, AC004158, AP000695, Z82203, Z85987, AC007421, | |
| | | | | | AC006254, M89651, AC006538, AC003963, AC007277, AC006255, AC005632, AC007227, | |
| | | | | | AC005722, AC006501, AC002551, and AP000513. | |
| HPWBF35 | 1989 | 707514 | 1-219 | 15-233 | AA136312. | |
| HPWBE47 | 1990 | 720563 | 1-532 | 15-546 | T61306. | |
| HPWAT23 | 1991 | 676323 | 1-277 | 15-291 | W31570, and AF136745. | |
| HPWAJ85 | 1992 | 535157 | 1-326 | 15-340 | AI681684, AI458401, AI936264, AW055212, AI200740, AI635739, AI973110, AW044010, | |
| | | | | | R60842, AI690626, AA281860, AI823929, AI142509, AA781250, and Z95115. | |
| HPWAJ39 | 1993 | 575271 | 1-202 | 15-216 | | |
| HPWAJ05 | 1994 | 932627 | 1-551 | 15-565 | N76233, and R18040. | |
| HPWAH19 | 1995 | 468246 | 1-483 | 15-497 | AI671077, AA506744, AI859744, AF047825, AL049757, AC005529, AL022721, AC004491, | |
| | | | | | AC005823, AC005081, AC005527, AL132712, AL022316, AF001549, AC002312, AC002477, | |
| | | | | | AC005015, U95742, AP000952, AC005488, AL035587, AP000501, AL021155, AC003982, | |
| | | | | | AC006511, AF111168, AF109907, AC007216, AC000353, AC000003, AC005484, AC005037, | |
| | | | | | AC008372, AC005837, Z93023, AL035450, AF088219, AC004675, AC004253, AL049761, | |
| | | | | | AC006241, AC005911, AL139054, AL031848, AC009516, AC007227, AC005740, AC005694, | |
| | | | | | Z99127, AC005666, Z95114, AC007993, AC005736, AC002470, AC002549, AC006430, | |
| | | | | | AC005899, Z85987, AC002400, AC005225, U47924, AC002310, AC007686, AL080243, | |
| | | | | | Z93017, AC005940, AC005696, AJ246003, AC004125, AC002072, AF111169, AC006277, | |
| | | | | | AC004685, AC006254, AC006547, AC006312, AC005924, L78810, AC007225, AC003108, | |
| | | | | | AP000555, Z84466, AP000553, AC002365, U52112, AC004841, AC005412, AC005565, | |
| | | | | | Z84469, AC005291, AL109963, AL034420, AL021546, AP000694, AL121603, and AC006121. | |
| HPWAG31 | 1996 | 693618 | 1-271 | 15-285 | | |
| HPVAH71 | 1997 | 829301 | 1-378 | 15-392 | N59310, and W26272. | |
| HPVAH41 | 1998 | 848632 | 1-658 | 15-672 | AW084140, AI660275, AI159785, AA931541, R46761, AI017335, H69563, AI253649, | |
| | | | | | AL046863, AI718728, AI860915, AA421105, AA780157, AA622029, AA564314, T85269, | |
| | | | | | AI187002, H93474, AA862619, AA860857, N51712, AI092970, AI093731, AI288177, | |
| | | | | | AA725376, AA397987, AI632608, N95238, AI383237, AW273559, AW014246, AW025440, | |
| | | | | | N75603, AI089430, H84661, AI074224, AA877282, T96893, AA430388, AA994095, | |
| | | | | | AA577687, AI962794, AW071881, AI147145, AA627632, AA757265, AI348280, AA292692, | |
| | | | | | N62956, AI022266, AI039833, AI332399, N63622, H92137, AW452472, AA452012, W94925, | |
| | | | | | W95270, N80289, T67556, AI800953, AI524405, AA937741, AA946602, AL046862, AI202094, | |
| | | | | | AI471911, AW362569, and AF161509. | |
| HPVAC74 | 1999 | 773298 | 1-623 | 15-637 | AI803004, H82351, AI912547, AI684625, AI093039, AA043382, AI700890, AI016549, | |
| | | | | | AA043383, AA789239, AA868305, T03714, AW449266, and AI990568. | |
| HPVAB16 | 2000 | 526124 | 1-199 | 15-213 | AW183886, AW295375, H73304, and AA455018. | |
| HPVAB01 | 2001 | 961017 | 1-340 | 15-354 | AI123463, AI025472, AI827469, AA916957, H86257, AI457871, AA748446, AW295278, | |
| | | | | | AA058998, AA888811, AW293429, AA047229, AA012881, AI738469, Z65045, and Z65044. | |
| HPRTJ65 | 2002 | 753933 | 1-616 | 15-630 | AA193128, and W24151. | |
| HPRTI54 | 2003 | 728812 | 1-542 | 15-556 | H80993, T58115, and T58181. | |
| HPRTJ16 | 2004 | 667652 | 1-540 | 15-554 | AA454985, AA232735, AA454986, W25444, AW303344, and AI368936 | |
| HPRCV66 | 2005 | 320393 | 1-543 | 15-557 | AW450541, Z43026, T96106, and AC007377. | |
| HPRCT83 | 2006 | 780264 | 1-470 | 15-484 | AA032184, AA152299, and AC007182. | |
| HPRCN03 | 2007 | 925420 | 1-513 | 15-527 | AI074020, AI187913, and AC004056. | |
| HPRCM12 | 2008 | 973740 | 1-582 | 15-596 | Z81007. | |
| HPRCL72 | 2009 | 766311 | 1-234 | 15-248 | N53915. | |
| HPRCI73 | 2010 | 764710 | 1-325 | 15-339 | AA594588, and AI821697. | |
| HPRCG46 | 2011 | 719340 | 1-450 | 15-464 | H17732, AA195383, AI268825, and AA609857. | |
| HPRCD11 | 2012 | 967762 | 1-377 | 15-391 | H63477, AW386067, and AC003006. | |
| HPRCC22 | 2013 | 526623 | 1-258 | 15-272 | AL135490, AA460352, AI538075, AA635150, AA661590, AI926876, AI921744, AA557945, | |
| | | | | | AI040051, AI144125, AA600202, AI049999, AA578245, AA112646, AA720732, AI344906, | |
| | | | | | AI318548, AA640305, AI620666, AW341903, AW270258, AA469230, AA595661, AL135357, | |
| | | | | | F00564, AA846923, AA482682, AA555232, AI910608, AA847095, AA767660, AL044966, | |
| | | | | | AI749823, AA483606, AA570740, AA831714, AI568376, AA568204, AA430137, AW104161, | |
| | | | | | AI753904, AA857296, Z36862, AW419227, AA045734, AA584241, AI434653, AA846944, | |
| | | | | | AW021674, AA501410, AA086042, R95840, AW270385, AA505012, AI572680, AI079154, | |
| | | | | | N72170, AA229113, AI279693, AW021116, AA493546, AI523356, AI821608, AI803824, | |
| | | | | | AA191418, AW192419, AA828758, AL048275, N66775, AA367986, AW020094, AA164946, | |
| | | | | | AA828840, AA994578, AI357762, AA808875, T57562, T41235, N23913, AW404543, | |
| | | | | | AA862243, AI433952, AA872299, AA502532, AA804726, AA345665, AA573003, AA493245, | |
| | | | | | AA568433, AA653139, AI926104, AA523718, AA584148, AW021399, AA601376, AI003391, | |
| | | | | | AW057760, R99617, AA713946, AA714956, AI249683, AL120708, AW165963, AA826134, | |
| | | | | | AA828771, AA558402, AA558716, AA582554, AW272815, AI590404, AA631915, AA018207, | |
| | | | | | AA487053, AI754257, AA302661, AI984168, AI791426, H66812, AI732473, AA525112, | |
| | | | | | AA659360, AA749235, AA706291, AA182731, AL079553, AI356440, AA828802, AA828781, | |
| | | | | | AA653672, AL035587, AC005601, AC007014, AC004953, AC002310, AC003966, AC006057, | |
| | | | | | AC005488, U91326, AF198095, AC004531, AC003663, AF111169, AC001228, AL121754, | |
| | | | | | AC003042, AL133245, AC005815, AL031589, AC004099, AC003688, AC009247, AC005899, | |
| | | | | | AC007225, AL031595, AC005895, AC005913, AL008725, AC002425, AC008040, AC006312, | |
| | | | | | AC005305, AL109963, AF124523, AP000359, Z84469, AC005726, AL117258, AC008134, | |
| | | | | | AC002045, AC004765, AC005067, AL109628, AC005763, AC002036, AL022320, AL121657, | |
| | | | | | AF154836, AC006064, AC005971, AB023049, AC005082, AL020993, AC004659, AC006080, | |
| | | | | | AL050308, AL049776, AC004895, AC004448, AF217403, AC005519, AC005037, Z99289, | |
| | | | | | Z97054, AF109907, AC016025, AL109801, U62293, Z93023, AC000085, Z98950, AL121653, | |
| | | | | | AL117340, AC002470, AL049780, AC005081, AC004797, AC006449, AL135744, AC004858, | |
| | | | | | AC009516, AC004000, AC005089, AL109952, AC006285, AP000255, AC005231, AC004796, | |
| | | | | | AC005527, AC004150, AP000065, AC004771, AL132994, AC006511, AC003982, U63721, | |
| | | | | | AL031666, AC005005, AC002404, AC007363, AC005304, AC004408, AC002472, AL031588, | |
| | | | | | Z98750, AL133353, AP000213, AC005015, AP000345, AC005529, AC004832, AC007686, | |
| | | | | | AF165926, AP000135, AL034402, AC005274, AC004493, AL031230, Z97353, M87914, | |
| | | | | | AL022323, AC007066, AL021939, AL117330, AC007298, AC006958, AC004020, AL035420, | |
| | | | | | AC006017, AP000031, AL035659, AC004009, AF069291, AC002554, AC006557, AC004834, | |
| | | | | | AC004381, AL049766, AP000501, AL049843, AL022331, AC002544, AC005570, AL078581, | |
| | | | | | AC020663, AC000052, AC006160, AC008498, AC005339, AC005914, AC005257, AL022158, | |
| | | | | | AC005736, AC005911, AC005624, AC004019, AC005844, AC004673, Z95327, AC007664, | |
| | | | | | AC008055, AC007917, AF187320, AL034419, AC007041, AC004962, AL022237, Z98949, | |
| | | | | | AL022313, Z99716, AB022785, Z82190, AC004605, U43572, AC004458, Z82189, AB003151, | |
| | | | | | AL021940, AL109967, AC004927, AC005972, AC004687, AP000553, AL021391, AL096701, | |
| | | | | | AC004656, AP001053, Z93244, AC004905, Z84466, AC004887, AC012085, AC004703, | |
| | | | | | AL133448, AF207550, AC005531, AL136168, AC003109, AC004821, AC000079, AC004230, | |
| | | | | | AP000555, AL035405, AP000211, AP000133, AL031311, AC003098, AL109837, M84472, | |
| | | | | | AL109657, AC004598, AC005412, AC004801, AF001548, AL049830, AC002492, AC002558, | |
| | | | | | AL078602, AC002996, AC004841, AC006211, AL050338, AC004685, AL034421, AF196779, | |
| | | | | | AF196969, AC002565, AL049760, AL008582, AL080243, AC005618, AC006277, AC000134, | |
| | | | | | AC005280, AP000347, AC005829, AL022315, AC005969, AC002073, AC003101, AL096707, | |
| | | | | | AC004859, AL136295, AL133371, Z93017, AC007021, AP000356, Z93241, AL096677, and | |
| | | | | | Z98051. | |
| HPRCA02 | 2014 | 917289 | 1-376 | 15-390 | AA564925, AI904944, AA666295, AW151247, AA972523, AA102737, H62923, H86579, | |
| | | | | | AI624551, T05617, AA984920, AL044271, R77715, T94072, AA468974, T05684, AA230025, | |
| | | | | | AA468371, AA228979, AA229823, AA484892, AA228368, AA224889, AA468505, AA228269, | |
| | | | | | AA772704, AL137946, AA402113, AW243945, AA593828, AA467943, AI671077, AL041815, | |
| | | | | | AA614254, AA224815, AA720582, M85967, AA664248, AI801563, AW419126, AA181479, | |
| | | | | | AA888638, AL038533, H93152, AA550959, N27874, H81012, AA502110, AA714110, | |
| | | | | | AA558404, AI278211, AI560073, W24312, AA612578, AA298647, AA890060, AA377325, | |
| | | | | | AA745628, AI819391, T71936, H54252, R99076, AL118912, AW105463, AA581525, | |
| | | | | | AA780933, AI369076, AA322484, AL047467, AA747977, AA550989, AI668605, AI567391, | |
| | | | | | AI306717, AA548221, AA302978, H94979, AW242279, AI249688, T07878, AA329535, | |
| | | | | | AA773463, AA631729, AL041681, AA482792, AL041682, AA630854, AI500315, AF031078, | |
| | | | | | AF030876, AF031076, AC006344, X05151, AC005899, U07563, AL033539, AC001226, | |
| | | | | | AC004983, AC009946, AC003002, AL022336, AP000207, AP000129, AC004112, Z82215, | |
| | | | | | Z73913, AL049712, Z93023, AL035457, U52112, AC005207, AC000090, AC005157, | |
| | | | | | AC005186, AC005089, AC007312, AL133355, AC004961, AC005841, AF196971, Z93017, | |
| | | | | | AL024498, AL035661, AL122020, AC012627, AC006014, AC004593, AC005488, AL031282, | |
| | | | | | AL023575, AC007371, AF111168, AL031003, Z49237, AF124730, AB014077, AC000387, | |
| | | | | | AC004209, AP000514, AC000003, AC004686, AC004241, AC003963, AL035461, AL133247, | |
| | | | | | AC005212, AC005393, AC005484, AC003015, AL031587, X87344, AJ246003, AC004539, | |
| | | | | | AC006034, AL049758, AF064863, AC010200, Z68284, AC005856, AP000289, AP000042, | |
| | | | | | AP000110, AC002073, AL096791, AC004770, AC007436, U91321, AC007934, AL121658, | |
| | | | | | Z83844, AC006387, AL022330, AC004032, AC005751, AC004963, AL136504, Z82976, | |
| | | | | | AF001552, AC007666, AF109907, AL034347, AC007040, AC005372, AC002365, Z68276, | |
| | | | | | AP000261, AP000035, AP000100, AC005911, AC004022, AL022395, AC005343, AC004531, | |
| | | | | | AC005252, AL121782, U73479, AP000096, AC004223, AC005588, Z86090, AC007279, | |
| | | | | | AC006023, AC007565, Z86064, AP000503, AC005067, AP001058, AC005829, AC002369, | |
| | | | | | AC007639, AC004159, AC002538, Z98941, AC010205, AC005409, AC005874, AF134471, | |
| | | | | | AL135744, AC004953, AP000355, AC009542, U35114, Z85986, AL049795, AC005620, | |
| | | | | | AC004865, AL031657, AC005011, AC004673, AC004858, AL023553, AF048729, U62631, | |
| | | | | | AC006080, AF134726, AC005726, AL031295, AC003998, AF205588, AC005280, AP000691, | |
| | | | | | AL049569, AL031186, AD000092, AC004887, AC005045, AC004477, U91319, AL008734, | |
| | | | | | AC006445, Z70280, AC002468, AC006367, AL009031, AC002326, AC005412, AP000223, | |
| | | | | | M57678, U96629, AC003689, AC003043, AC006468, AC010170, AC000115, AL008721, | |
| | | | | | Z97632, AC002040, AL035414, AC005913, AC005919, AL121769, AC004805, AC004815, | |
| | | | | | AC005837, AL139054, AC003101, Z49258, AC005101, AP000303, AP000046, AP000114, | |
| | | | | | AC004585, AC005695, AC004388, AC006515, AF064866, AL031311, AP000502, AC005300, | |
| | | | | | AC002395, AC006965, AC007536, AL031885, AL021917, AC006076, AC005383, AL032821, | |
| | | | | | AC006211, AC005375, AC004035, AC005362, AC007205, AC004663, AC005884, AC004941, | |
| | | | | | AC002402, AC006270, AL133163, AL133500, AC009330, U85195, AC007406, AC005041, | |
| | | | | | AL022163, AC004890, AP000690, AL050341, AC006262, AC004460, AL031666, AP000689, | |
| | | | | | AC004886, AL035413, AP000553, AC009516, and AC004491. | |
| HPRBN23 | 2015 | 467480 | 1-442 | 15-456 | | |
| HPRBJ87 | 2016 | 695116 | 1-229 | 15-243 | AA148577, AA371499, AI190166, AW182200, AW450886, and AL080125. | |
| HPRBH80 | 2017 | 781636 | 1-395 | 15-409 | AA371425, R08248, W78735, AA002229, AI034386, and AC004582. | |
| HPRAV80 | 2018 | 781637 | 1-574 | 15-588 | AI796794, H16396, AW450892, H06067, AA885838, AA370953, R40187, Z38928, F01486, | |
| | | | | | F02763, and F04922. | |
| HPRAN56 | 2019 | 503140 | 1-455 | 15-469 | W55957, AI379296, AI191798, AA987330, AI688094, AA001362, AI655136, AI277583, | |
| | | | | | AW235235, AI080751, AI341857, AA936711, AA907791, AA001353, AW002519, R00840, | |
| | | | | | AA370556, AA897172, and R01496. | |
| HPRAN50 | 2020 | 724753 | 1-334 | 15-348 | AA370553, and AA370552. | |
| HPRAJ75 | 2021 | 766496 | 1-351 | 15-365 | AA370391. | |
| HPRAG73 | 2022 | 764757 | 1-734 | 15-748 | W94997, AA370226, and AF123462. | |
| HPRAG45 | 2023 | 484691 | 1-268 | 15-282 | AA370201, AL031295, AL096775, AL034548, AL022323, AL049757, AL117258, AL021707, | |
| | | | | | AP000031, AC003982, AC009516, AP000359, Z95115, AC002538, AC005031, AC005519, | |
| | | | | | AP000135, AP000557, Z83844, U80017, AC005406, AC005261, and AC004983. | |
| HPRAF86 | 2024 | 784594 | 1-219 | 15-233 | AA369988. | |
| HPOAB37 | 2025 | 789290 | 1-526 | 15-540 | AI670779, AA384366, AA687253, AA505096, AA732524, AI525876, AA461291, N50753, | |
| | | | | | AA461408, AI095123, AI393841, AI141520, and AA522490. | |
| HPM5H94 | 2026 | 796839 | 1-599 | 15-613 | AA214535. | |
| HPM5B35 | 2027 | 707476 | 1-245 | 15-259 | W05600, and U47671. | |
| HPMMK05 | 2028 | 928283 | 1-824 | 15-838 | AI312886, AA709064, R25113, R25114, AI271454, and AW131860. | |
| HPMMB08 | 2029 | 957945 | 1-679 | 15-693 | N57273, AA975894, AA078184, AW271847, AI720195, C13996, R67746, AI469577, | |
| | | | | | AA322542, AI580260, AI926706, AI338117, W60077, AA865083, AA663975, W01985, | |
| | | | | | AI039539, H72865, AA747234, W04464, F07235, AI253290, AA604201, AW270771, | |
| | | | | | AI277347, AA492527, AI039125, AI266359, T65747, AI581433, D44787, T78912, F02611, | |
| | | | | | H58207, AA577754, AA297195, AA630122, AI884861, AA160427, AA481811, AA721530, | |
| | | | | | AA363003, AI288033, AW243945, R51217, AA721523, AI678581, R56848, AA078137, | |
| | | | | | H01327, AA745351, F10272, AA161198, H67098, R67701, AA745383, H11450, AA484419, | |
| | | | | | AA484370, AA678616, AA664248, AW270429, F35684, T90962, AA668166, AW270351, | |
| | | | | | AA714073, AA491423, T05617, AA018895, AA478518, H01243, AA376358, AA780933, | |
| | | | | | AI366993, AI859906, AI278847, AI915081, H71449, AI869786, AI679221, AA167550, N63848, | |
| | | | | | T30418, AA457408, AW019964, AA309362, AA013366, T07903, AA345594, N77384, | |
| | | | | | AA679353, AA302520, AA665908, AA772873, N57674, AA457254, AI927261, AL134418, | |
| | | | | | AL031670, AF044083, AC005972, AC002395, AL136295, AF075066, AC005243, AF001550, | |
| | | | | | AC007684, AL133289, L16854, Z82189, U52683, AC006360, U89336, L35668, Z49236, | |
| | | | | | AF135187, AC007292, Z84489, AC007421, AL021579, AC005377, AC005383, AC007240, | |
| | | | | | Z99572, AC005612, AC005620, AL133246, AC007406, AC007283, AC004476, Z99130, | |
| | | | | | AL009183, AC000015, AL031115, AL008635, AL035587, AC004134, AC006000, AC006014, | |
| | | | | | Z82214, AC005099, AC000378, AL035653, AC004552, AL133396, AL020995, AL049646, | |
| | | | | | AL079304, AC005325, AC004887, AC006079, AC005488, AC005041, AC007207, AC003037, | |
| | | | | | AF003626, AL109662, AC004186, AC002451, AL049766, AC000045, AC004811, AL008725, | |
| | | | | | Z97630, AC002550, Z82244, AC005067, AC005231, AC006597, AL031291, Z98742, | |
| | | | | | AL022326, AC005875, AL049759, AC007130, AL035415, AC007314, AC006316, AC012331, | |
| | | | | | AC003665, AC004448, AL008723, AC005799, AL035091, AC005921, AC005747, AC007327, | |
| | | | | | AL031681, AL021937, AC008126, AC005261, AC009509, AL031733, AC004382, AC005348, | |
| | | | | | AP000517, AB023054, AC006251, U96629, L29766, AC004792, AC002984, AC004791, | |
| | | | | | AC002316, AL033523, AL022166, AL034379, AC007041, Z82182, X54486, X13922, | |
| | | | | | AL139054, AC006064, E12647, Z49155, AC004693, AC005759, AC002309, D87013, L48038, | |
| | | | | | Z82208, AC005778, AP000300, AP000563, AC002390, AC006958, AF042484, AC004814, | |
| | | | | | U07563, AC004938, AC004771, AP000113, AP000045, AP000133, AP000211, AC005800, | |
| | | | | | AL049610, AC004703, AL031622, AC004929, AC007128, AC004991, AC005060, AC006509, | |
| | | | | | AF030453, Z83822, AC002554, AC003106, AL132712, AL021154, AC003663, AL096773, | |
| | | | | | AC006044, AC002476, AC005969, AC006026, AC006011, AC005535, AC007395, AC005088, | |
| | | | | | AC004674, AL096701, AC004491, AL133238, AC005722, AC005042, AL049776, AC005291, | |
| | | | | | AC005516, AL133244, Z95114, AC005015, AC005406, AC000353, AC005914, AC005225, | |
| | | | | | AP000688, AC004650, AC004775, AL035420, AC005014, AC007349, AC007637, AC004623, | |
| | | | | | AC004961, D84394, AC002480, AC004796, AL133445, AC004983, AP000130, AP000208, | |
| | | | | | AC007955, AL049832, AP000247, D87009, AC006501, AC007792, U47924, AF037338, | |
| | | | | | AF091512, AC004453, AC005209, Z98304, AJ003147, AC007011, AC001231, AC005082, | |
| | | | | | AC002375, AL008734, AL021578, U95740, AC006013, AL033527, AC005412, AC005193, | |
| | | | | | AC007198, AL135746, Y17293, Z68756, AC002054, AC002472, AC007664, and AC008018. | |
| HPMKP06 | 2030 | 933895 | 1-328 | 15-342 | AA436495, AI801028, and AB002353. | |
| HPMKC05 | 2031 | 930874 | 1-501 | 15-515 | R97706, and Z73979. | |
| HPMJT12 | 2032 | 969483 | 1-663 | 15-677 | T84974, T91224, R00550, and R00654. | |
| HPMTN08 | 2033 | 958009 | 1-377 | 15-391 | R06344, AW452106, AA729350, AL031295, AL122023, Z99128, AC007637, AC007298, | |
| | | | | | AL022166, AC007917, AC004779, AL008635, AC007151, AC018633, AF109907, AL022721, | |
| | | | | | X55448, and L44140. | |
| HPMJK11 | 2034 | 965636 | 1-504 | 15-518 | H54909. | |
| HPMJK03 | 2035 | 867615 | 1-493 | 15-507 | AW193499, T41385, AA325521, AA417987, T05187, AW440956, AW439999, AA907133, | |
| | | | | | AI000677, AI537915, AI791144, AA844107, AA287035, AW298615, AW088364, AI537814, | |
| | | | | | AA715387, AA523882, AA687547, AI302974, AA121818, W46473, AI798234, AA906440, | |
| | | | | | AL120129, AW148336, AA484366, AI801031, AA308708, R55092, AI821120, AI688963, | |
| | | | | | AI821864, AA018440, AI660071, AA334287, AA069926, W27874, R96138, AI811076, | |
| | | | | | AA767864, AA227741, AC011594, AC006538, AC002126, Z68871, Z68281, AC004156, | |
| | | | | | AL133500, AL031230, L13972, AC004812, AL034423, AC002400, M61107, U62317, | |
| | | | | | AC005067, AC003663, AF111170, AF059321, AL049758, AC004104, AF155238, AC005803, | |
| | | | | | AP001065, AC004703, AC002365, AC007279, AC002394, AP000365, AL031686, AP000547, | |
| | | | | | AC002565, AC005049, AC007263, AL022721, AC006966, Z97630, AC006509, AL0503 18, | |
| | | | | | AC004887, AC003098, Z85997, AC007868, AL031295, AC004253, AC004890, AC004876, | |
| | | | | | AC002558, AC004916, AL009181, AC002116, AC002984, AC002070, AP000555, AC005578, | |
| | | | | | AC004674, AC005323, Z95331, Z93930, Z82206, AC009263, AL022476, AF196970, Z95115, | |
| | | | | | AC006125, AC002551, AF114156, AC006157, AP000104, AC003982, Z98044, AF121781, | |
| | | | | | AL031280, AC004985, AC005015, AP000344, AL049779, AL022336, AC004814, AL031681, | |
| | | | | | AC003013, AC004962, AF061032, AC000085, AC002425, AC005519, AC005880, AC007040, | |
| | | | | | AC002524, AL034400, AC004149, AP000510, AP000345, AC008042, AC005520, AB023048, | |
| | | | | | AC002036, Z73964, AC009533, AL132777, AC004991, AP000270, AJ011932, AC003684, | |
| | | | | | AP000032, Z82195, AC006360, AC005800, AL121852, AC000086, M63543, M63544, | |
| | | | | | AF181897, Z84487, AC005821, AL049569, AC006026, U95740, AC002464, AF050154, | |
| | | | | | AC007229, AF020802, AP000687, AL035414, AC004383, AL117694, AC004990, AC002312, | |
| | | | | | AC003950, AC002985, and AC004084. | |
| HPMJI11 | 2036 | 965627 | 1-487 | 15-501 | AI244898. | |
| HPMJE06 | 2037 | 939682 | 1-575 | 15-589 | AI022159, and AI240345. | |
| HPMJA11 | 2038 | 965628 | 1-446 | 15-460 | H85685, H82116, H85672, and H92336. | |
| HPMGX92 | 2039 | 491004 | 1-561 | 15-575 | AI733856, AI627614, AA587728, AA573722, AI133083, AI354333, AI270370, AI524193, | |
| | | | | | AA458452, AW194325, AA683069, AA491423, R67701, AI049999, AA614163, AA513851, | |
| | | | | | AC007055, AC005527, Z83844, AC005529, AC007792, AC006026, AC004832, AF196971, | |
| | | | | | AP000355, AF111168, AC007371, AL049757, AC002477, AC005488, AC005531, AC006441, | |
| | | | | | AC005015, AC006139, AC002565, AC005500, AC005837, AP000555, AL022721, AC007731, | |
| | | | | | AC005071, U47924, AL121603, AB026898, AC005902, Z82244, AC000025, AC007386, | |
| | | | | | AL117337, AC005049, AL033527, AC004895, AC005164, AC005011, U78027, AC005291, | |
| | | | | | L77570, AC005696, AC007546, AL109627, AC005180, AF130342, AL133404, AC008044, | |
| | | | | | AC006039, AL121658, AL049776, AC006064, AL079342, AC007541, AL096791, AC004448, | |
| | | | | | Y18000, AL035405, AP000014, AL049839, AL078638, AF029308, AC004890, AC005971, | |
| | | | | | AC004882, AC004991, AC004815, AC007842, AC004525, AL035681, AC005081, AC009247, | |
| | | | | | AL035659, AL049643, AL133448, AF139813, AL049872, AL049829, AC004966, AL132641, | |
| | | | | | AL024507, AL034420, Z94802, AL139054, AL049843, AC005484, AC007919, Z83822, | |
| | | | | | AC004973, Z84487, AL049576, AC005899, AL035420, AC005005, AL031680, AC002347, | |
| | | | | | U85195, AC005225, AL022320, AP000307, AD000092, AL050307, U80017, AE000658, | |
| | | | | | AL135746, AC002073, AF205588, AL122020, AC006013, Z92542, Z84484, AC011311, | |
| | | | | | AC003101, AC005066, AL135744, AC005519, AF067844, AF064861, AL035587, Z93241, | |
| | | | | | Z81357, AC007051, AL121653, Z84480, U91318, 798750, AC004531, AL031685, AC005037, | |
| | | | | | AL021578, AL031846, AC003025, AC007349, AC000026, AC004985, AL133445, AC005859, | |
| | | | | | AC002470, AF038458, AC004583, AC005295, AJ251973, AC007878, AC002059, AP000113, | |
| | | | | | AC007201, AC005932, AC005378, AL023807, AC002115, AL021937, AF134726, AL008730, | |
| | | | | | AC005702, L44140, AL109758, AF019413, AC005215, AC007283, AC004019, AC002299, | |
| | | | | | AL117694, AC005581, AC007216, AP000502, AC002558, AC005231, AC008101, Z97055, | |
| | | | | | AL022237, AL022238, AL133245, AL049748, AC007666, Z75407, AC005057, AC005736, | |
| | | | | | AC004686, AP000503, AC007686, AC005255, AL035462, AL008719, Z98048, AC005523, | |
| | | | | | Z95118, AC007993, AC004167, Z82188, AL031283, AC007030, AC007227, AJ246003, | |
| | | | | | AC003084, AP000115, AP000694, 793020, Z85987, AC004217, AC006040, U73169, | |
| | | | | | AC007011, AF165926, AC004821, AL035071, AC004382, AC004228, AC005632, U82828, | |
| | | | | | AC005368, AC007688, AC005740, AC006974, AC007845, Z94056, AC000066, AC004653, | |
| | | | | | L78810, AC007384, U52427, AC004876, AL021154, AC006071, AC006059, AC004526, | |
| | | | | | AC002996, AC006455, and AC005920. | |
| HPMGR15 | 2040 | 660374 | 1-429 | 15-443 | N95527. | |
| HPMGO88 | 2041 | 463906 | 1-460 | 15-474 | N66134. | |
| HPMGM39 | 2042 | 705460 | 1-1424 | 15-1438 | AW027268, AW299861, AI057303, W01903, N80342, N91193, AA010796, N68397, N64546, | |
| | | | | | AA011135, AW194796, AA133637, N71008, AA393085, AI284257, AA133638, AI017033, | |
| | | | | | H12527, AA412114, R27162, AA365161, W01706, N58095, and AI288082. | |
| HPMGJ16 | 2043 | 662021 | 1-214 | 15-228 | AA297666, AI219169, AA228459, AA503119,AA829576, T07039, AI732869, AI821987, | |
| | | | | | AA707849, AW250905, AI799327, AA489571, AA516047, AA626823, AI610376, AA381750, | |
| | | | | | AI500453, AA424438, AI244157, AW179306, AC005015, AC006271, AC007637, AC002310, | |
| | | | | | AC005484, AF207550, Z99943, AP000066, Z93016, AC006120, Z97053, AC007237, | |
| | | | | | AC005666, AC005280, AP000466, AC007308, M89651, U50908, AL133485, Z93017, | |
| | | | | | AC003043, AL035461, AC005088, AL109801, AP000353, AC004477, AC004223, Z75887, | |
| | | | | | AL008718, AC005067, AL022312, AC007938, AL133448, AC006141, AL022163, AL109984, | |
| | | | | | AC002470, AC006511, AC005091, AC005899, Z98749, AC007285, AC003684, AC004962, | |
| | | | | | L81691, AL009183, AL121653, AL049869, Z94056, AC002996, AC012384, AP000030, | |
| | | | | | AC006441, AL109865, AC003007, AC004491, AL031427, AC002365, U85195, Z86090, | |
| | | | | | AC002544, Z93241, AL034429, AE000658, AL031311, AC006480, AL049748, AC007055, | |
| | | | | | AC002527, AL049635, AL022336, AC003982, AC006251, AL031005, L78810, AC005479, | |
| | | | | | AC003665, AP000550, Z98050, AL096701, L34079, AL031722, AC005089, AC010077, | |
| | | | | | AC008018, AC003111, AL132712, AC005971, AC005632, AC005225, U80460, Z84476, | |
| | | | | | AC005102, AC004975, U95740, AC002395, AC005722, AC003663, AF069489, AC006059, | |
| | | | | | AC005326, M87923, U95742, AC004973, AC006039, AC006211, AC005412, M63480, | |
| | | | | | AC018769, AC001231, AC002425, AC004262, AC004882, Z83849, AC006450, AP000505, | |
| | | | | | AL022165, AP000694, AL035684, AD000092, AC005034, AC006312, AC005901, AC006257, | |
| | | | | | AL035398, Z93783, AC005377, AC004983, AL133246, AC004895, AC005670, AF117829, | |
| | | | | | M63544, AL022313, AL021368, AC005291, AL023807, AL031670, AC005324, AC002476, | |
| | | | | | AB023049, AC006505, AC008009, AC004076, AC006501, AC005332, AC006160, Z99716, | |
| | | | | | AC007435, AF109907, AF129756, AC007283, Z81369, AL031432, AL133245, AL049843, | |
| | | | | | AL008735, AL023096, AL008730, AC010170, AL024498, AL080243, AC005753, AC005874, | |
| | | | | | AC004922, AF134471, AC006965, AC004020, AC005261, Z81314, AF196971, AC005005, | |
| | | | | | AP000512, AL023803, AC005755, AC006581, AL031283, and U91322. | |
| HPMGD63 | 2044 | 694518 | 1-682 | 15-696 | N59650, Z40592, F02367, and AA480778. | |
| HPMFX29 | 2045 | 690704 | 1-616 | 15-630 | W84490, W84350, AL044564, AI972017, AF086479, AF097027, AF097026, and AC002992. | |
| HPMFL73 | 2046 | 867670 | 1-717 | 15-731 | AA773011, and AF047825. | |
| HPMFC02 | 2047 | 920327 | 1-904 | 15-918 | AI361020, AI806300, AI339924, AA972324, AI689765, AI141310, AI798724, AI005122, | |
| | | | | | AW015619, AI002107, AA721275, and Z59058. | |
| HPMFB26 | 2048 | 867674 | 1-348 | 15-362 | AA736385, AA262258, AL022164, AC005520, and AC007559. | |
| HPMEG77 | 2049 | 772503 | 1-397 | 15-411 | AA178897, AA178882, and AA179898. | |
| HPMDQ89 | 2050 | 880787 | 1-444 | 15-458 | AI634152, AI624814, AL135959, and AL049631, | |
| HPMDP10 | 2051 | 968350 | 1-415 | 15-429 | AW002399, AW450136, AI624994, AW082789, AI936619, AI953139, AA923323, AI377859, | |
| | | | | | AI808017, AW452164, and AL109754. | |
| HPMDF06 | 2052 | 954567 | 1-114 | 15-128 | W28809. | |
| HPMAM93 | 2053 | 791407 | 1-361 | 15-375 | R42698, AI921147, AW001714, AA985608, AW025311, AI367373, and AA369641. | |
| HPMAL77 | 2054 | 772740 | 1-628 | 15-642 | AA149508, H66540, H53279, R99964, and AA369352. | |
| HPMAL73 | 2055 | 764752 | 1-155 | 15-169 | AA369348, AA018792, and AI439103. | |
| HPMAK71 | 2056 | 503690 | 1-428 | 15-442 | AA369278, AA369277, AA368633, AA297498, R86114, R92608, AC008101, AC016830, | |
| | | | | | AC005736, AC006252, AC002477, AL024507, AC016027, AC006205, AC005303, AL035458, | |
| | | | | | AL031683, AC004966, AC005695, AL031295, AL035682, AC005082, AL008729, U52112, | |
| | | | | | AL109764, AC007350, AR036572, U91328, AF003529, AL049839, AC006213, U95742, | |
| | | | | | AC004477, AC002369, AL035420, AC004916, AC005666, AC007371, AF111168, and | |
| | | | | | AC007216. | |
| HPMAJ83 | 2057 | 781518 | 1-396 | 15-410 | R10536, and AA369467. | |
| HPMAJ50 | 2058 | 572808 | 1-331 | 15-345 | AA369413. | |
| HPMAI10 | 2059 | 968695 | 1-202 | 15-216 | AA303040, AA369200, F18842, AA535216, N23913, F17700, AA489939, AA603530, | |
| | | | | | AI281818, AA829044, AI349580, AI682665, AI884383, AA659608, AA633762, AA385798, | |
| | | | | | AI538658, AL047349, AA993818, AI537458, AI251429, AA463590, AW088745, AI439910, | |
| | | | | | AA837035, AL041894, AA633920, AI354564, AA701080, AW068316, AA584125, AI087040, | |
| | | | | | AA376760, AA639946, AA312303, AA372949, AA679794, AA502818, AI054333, AA661499, | |
| | | | | | AI753113, AA302969, AI814739, AA449997, AL079734, AI453714, AA994578, AW023111, | |
| | | | | | AA608751, AW085623, AA947269, AW079664, AI382324, AI537424, AA984187, AW084246, | |
| | | | | | AW402458, AA621838, AW149156, AW302017, AA722039, AA904137, AA613624, | |
| | | | | | AA601356, AA452906, AI933714, AA714322, R92983, F31380, AL119600, AW410354, | |
| | | | | | AA483381, AA362714, AI056177, AI798493, AW188976, AI583321, AI207424, F16133, | |
| | | | | | AW268277, AI383057, AI053911, AI925491, AA338262, T57767, AA779783, AI590593, | |
| | | | | | AA847622, AA484370, AA484419, AI860587, AA811208, AA157458, AA601327, AW196014, | |
| | | | | | AI254779, AA282820, AA083003, AA084609, AW073510, H45698, AI754037, AA579208, | |
| | | | | | AA558404, AI002941, AA078337, AI054352, C14692, AA715173, AA206132, AP000695, | |
| | | | | | AC007999, AC006333, AC005565, AC004659, U91326, AC005666, U63834, AC005821, | |
| | | | | | AC005015, AL031311, AL022323, AL050307, AC002544, AC002477, AP000556, AC005069, | |
| | | | | | AC005399, AC005412, AC003100, AC005803, AC003959, AC005602, AP000114, AL035495, | |
| | | | | | AL135744, AC005011, AC007731, AJ229041, AC005500, AC003665, Z95118, AP000512, | |
| | | | | | AL049636, AC005387, AC000134, AL049757, Z95114, AC005225, AC004821, AC004386, | |
| | | | | | AL034423, AC004883, AL049776, AC008015, AB023049, AC006241, AC004228, AL035659, | |
| | | | | | AC005081, AP000557, AL133448, AC004253, AC004263, AC004408, AC007279, AC007327, | |
| | | | | | AC006538, AL109984, L35676, AL021394, AC004655, AC008394, AL031258, AC004167, | |
| | | | | | AC005612, AC004491, U82828, AC005940, AL022165, AC005837, AB023050, AC006441, | |
| | | | | | AL022318, AC005022, AL031589, AC007225, U41483, AC002418, AC005920, AC005759, | |
| | | | | | AF017104, Z84480, Z93244, AL035684, AC005206, AC004232, AC006141, AL121748, | |
| | | | | | AC007056, Z98044, U33956, AC005207, AC006050, AL035086, AF165926, AC005519, | |
| | | | | | AL023584, AC005696, AP000511, AL023807, AC009516, AL031296, AL021391, AL033525, | |
| | | | | | AC004472, AL121603, AC005695, Z85986, AC002551, AC005667, AP000502, AF111168, | |
| | | | | | AC004148, AL049692, AL049869, U95742, AC018633, AL132774, AL034417, AC003982, | |
| | | | | | AC004587, Z97353, AC003035, AL022476, AC003669, AC007308, AC007216, AL008726, | |
| | | | | | AL022721, AL133289, AL133396, AL020993, AC006285, AC005535, AP000696, AC004900, | |
| | | | | | AC005755, AF190465, Z69707, Z98750, AF134726, L44140, AC005049, AC002300, Z83826, | |
| | | | | | AC005377, AL034420, AF002223, AC003684, AL050348, AL050325, AL049795, AL133163, | |
| | | | | | AL031587, Z98946, AL031295, Z99496, AC002400, AC005899, AL024507, AC004895, | |
| | | | | | AJ246003, AP000212, AP000134, AC004884, AC004049, AC008125, AF047825, AC005368, | |
| | | | | | AC005875, AF207550, AL035420, AL132712, AL080243, AP001053, AC005921, AC007238, | |
| | | | | | AC007388, AL022171, AP000555, AC004851, AL121754, AC007899, AC004605, AC004019, | |
| | | | | | AL022345, AP000350, L78810, AL050332, AC004622, AL050333, AC005209, AL023804, | |
| | | | | | AL023284, AC005233, AC005988, AL021407, AC011422, AC005740, AC003037, AC004647, | |
| | | | | | AC005566, AC000039, AC004966, AL078603, AC005597, AP000303, AC005295, AC002301, | |
| | | | | | AL136295, AD000684, AC005089, AC005531, AC005529, AC004067, AC004993, AC005005, | |
| | | | | | AC006055, AC004771, AL031846, AC016025, U07563, AC002128, AC005082, AC005736, | |
| | | | | | AC004000, AC002310, AC004051, AC005520, AF031076, AC005971, Z95115, AC007073, | |
| | | | | | AF064861, AC007845, AL008721, AC005288, AC005324, AC006079, AL031733, Z93023, | |
| | | | | | AL121654, AL133353, AP000011, AL035443, and AC003071. | |
| HPMAH85 | 2060 | 783344 | 1-436 | 15-450 | N24966, and AA369334. | |
| HPMAH56 | 2061 | 867711 | 1-378 | 15-392 | AI969185, AA369304, AA369303, AC002404, AL034417, and AL133163. | |
| HPMAB10 | 2062 | 968723 | 1-538 | 15-552 | AA400632, AA400317, AA513753, AI188727, AI148002, AI797479, AI090223, AI833007, | |
| | | | | | AA676886, AA740345, AA536076, AI336523, AI191303, AA978356, AI017725, AI128273, | |
| | | | | | AA639692, AA468753, AA724081, H27059, AI879456, AI500369, N41692, R07494, | |
| | | | | | AA252085, AA368986, AI436367, AW363134, AA838338, AA947905, AA707248, AA199605, | |
| | | | | | AA670492, AA633704, AA931186, AW081785, AI554783, AI432454, AA927473, AI886832, | |
| | | | | | AI886932, AA542849, U75998, F34689, AI970899, AI865318, AI142293, F26406, R07547, | |
| | | | | | AA811357, AI815926, AI815728, AA353038, and AI831322. | |
| HPLBW22 | 2063 | 679217 | 1-271 | 15-285 | AA101449, and AA368833. | |
| HPLBW02 | 2064 | 921331 | 1-501 | 15-515 | AA644353, AI305162, and AA368822. | |
| HPLBT54 | 2065 | 731065 | 1-524 | 15-538 | R77180, and AA368801. | |
| HPLBT53 | 2066 | 728517 | 1-436 | 15-450 | AA429609, AA368800, Z68274, and AL117391. | |
| HPLB541 | 2067 | 712707 | 1-546 | 15-560 | W69937, W69806, AA368743, and AF086311. | |
| HPLBQ96 | 2068 | 796069 | 1-208 | 15-222 | AI950844, AA970836, AA368531, AI761793, AW071107, R68649, and C00439. | |
| HPLBO90 | 2069 | 787208 | 1-352 | 15-366 | AA404593, AI732819, AI821540, AA459410, AA368625, and AA404736. | |
| HPLBN79 | 2070 | 781854 | 1-313 | 15-327 | AA368571, AI565323, AI479183, and N49068. | |
| HPLBB47 | 2071 | 975477 | 1-733 | 15-747 | N40247, AA467841, AA467897, AA368245, AI017480, AA973025, AA860186, AA305650, | |
| | | | | | AA305127, AA307746, AW067937, AW299379, AC005881, and AL023280. | |
| HPLAX14 | 2072 | 727885 | 1-500 | 15-514 | W69552, AA368102, R50327, W21480, AA477047, AW383764, AA356448, AA368997, | |
| | | | | | AC005071, AF161081, and AF161080. | |
| HPLAV44 | 2073 | 715732 | 1-481 | 15-495 | H53753, AW386067, AA367999, H63477, and AC003006. | |
| HPLAI10 | 2074 | 968707 | 1-562 | 15-576 | AI128337, AA572738, and AA367352. | |
| HPJFA10 | 2075 | 963322 | 1-594 | 15-608 | AI810835, and AI817587. | |
| HPJEV95 | 2076 | 929723 | 1-515 | 15-529 | AA159265. | |
| HPJEU01 | 2077 | 928408 | 1-359 | 15-373 | R19571, AA468022, AA583898, AW364981, AI872020, AW276817, AA469451, AA828749, | |
| | | | | | AL119691, AA169263, AA502860, AI110688, AA501821, AA580808, AI801600, AW303196, | |
| | | | | | AI699710, AW274349, AA665021, AA362698, AA806796, AA724333, AA508034, AL042853, | |
| | | | | | AA507824, AI284640, AA548058, AI247199, AA812139, AI305766, AI053790, AA581903, | |
| | | | | | AI634384, AW193265, AW103758, AI963720, AI635279, AW301350, AL044858, AA521323, | |
| | | | | | AA299761, AA521399, AA533725, AA513141, AW084252, AI345157, AI476312, AW440545, | |
| | | | | | AI687343, AW028392, AA984708, AA584167, AI061334, AI270117, AA531079, AA491814, | |
| | | | | | AA714453, AA448231, AW438643, AA525824, AA452563, AA847952, AW062682, | |
| | | | | | AA828042, AA618452, AI564454, AL138265, AW002350, AW265009, AI144101, AA372481, | |
| | | | | | AW419237, AW327868, AA774222, AA808877, AA623002, AA720702, AA523837, AI355206, | |
| | | | | | AI350211, AA219115, H85842, AI311557, AI619997, R97780, AA576336, AI149478, | |
| | | | | | AA490183, AA480772, AI017415, AI686267, AA541423, AA634889, AI908381, AA613397, | |
| | | | | | AA610491, H73082, AI860013, AL045053, T74382, AA478355, AL046409, AW440497, | |
| | | | | | AI110760, AA604333, AI289067, AA781010, AI754658, AA715255, AA715267, AA483771, | |
| | | | | | AL043009, AI281881, AA551503, AW273218, AA826671, AI307608, AW302903, AA468456, | |
| | | | | | AI536665, AA653375, AA658362, AA503154, AI801482, AW274346, AW168618, AI240168, | |
| | | | | | AA702614, AA577906, AI445674, AI624142, AI783494, AI345518, AA351056, AA494097, | |
| | | | | | AI885249, AA828677, AI633390, AI669453, AI744995, AI207496, AA782304, AW276827, | |
| | | | | | AW410400, AI537955, AA847499, AW149339, AW265170, AW157608, AW269488, | |
| | | | | | AI568678, AI054343, AW196064, AA552843, AI583283, AA788982, AW050498, AW088202, | |
| | | | | | AI434695, AW276435, AA573003, AA610271, AW270382, AA954924, AW268973, AL045808, | |
| | | | | | AL046156, AA664909, AA620525, AI744188, AL119713, AW238278, H18959, AI499588, | |
| | | | | | AI357288, AI821271, AI357212, H63262, AI085719, AI814735, AI003751, AI246119, | |
| | | | | | AW080125, AW408047, AL038705, W79504, H66632, AA220943, AI828208, AW264934, | |
| | | | | | AA405453, AI254316, AL079511, AL049869, AL035462, AL078474, AC005911, AC003977, | |
| | | | | | AC007564, AC005288, AC007308, AL132716, AC004884, AC005091, AC002470, AC005212, | |
| | | | | | AJ239318, AC004655, AC004531, AC011421, AC003009, AC005376, AC008275, AC006312, | |
| | | | | | AC005037, AF003528, AF029308, AC005274, AC004883, AC004814, AL133353, AL023284, | |
| | | | | | AL022147, AC018633, AC005839, AC005082, AC007686, AL049647, AC004538, AC006270, | |
| | | | | | AL008725, AC006037, AC007099, AC004690, AC005324, AC007919, AL133321, AL022165, | |
| | | | | | AC008079, AC004894, AC005028, AL121578, AC007226, AJ003147, AF015153, AC006238, | |
| | | | | | AL096701, AC004167, AC004622, AC010168, AC004832, AF036405, AL121603, AC002429, | |
| | | | | | AP000567, AC005411, AC015853, AC002064, AC005531, AC002452, AL031651, AC007750, | |
| | | | | | AL109847, AL031682, U69569, AC007151, AC007731, AC004544, AP000049, AF130342, | |
| | | | | | AC005224, AC007051, AC002310, AC004905, AC004216, AL049697, AC006360, AP000311, | |
| | | | | | AL049825, AC005180, AL121658, AC007450, AP000275, AL049556, AL022322, AC004587, | |
| | | | | | AL049696, AF130351, AC007751, AC004010, AC005614, AC005820, AC003950, Z83846, | |
| | | | | | AC008040, AC005246, AL031681, AL049757, AC005019, AC006207, AP000105, AP000037, | |
| | | | | | AC004848, AF015148, AC005191, AC004584, AB020859, U67211, AP000043, AP000111, | |
| | | | | | AC004975, AC004028, Z99716, AL035587, AC002430, AC007041, Z98744, Z83826, Z49235, | |
| | | | | | AL031255, AL009029, AC004686, AL050333, AP000556, AL109985, AC004943, AC007537, | |
| | | | | | AC000085, AC003962, X55933, AC003109, AC005154, AC002365, AC007384, AL079303, | |
| | | | | | AC004913, AP000095, AL035458, AL078593, AC007165, AJ229042, AC005871, AL137100, | |
| | | | | | AL031285, AF165926, AF042090, AL132992, AC006254, AC008055, AL049795, AC005015, | |
| | | | | | AC002067, AC009411, AC002379, AL031733, Z98745, AL035681, AC008115, AC005225, | |
| | | | | | AC005412, AC000025, U35114, AF161800, AC005193, AJ006996, AL031589, AC002041, | |
| | | | | | AJ246003, AC004994, AR036572, U91328, AC003691, AL136018, AC004838, AP000239, | |
| | | | | | AL031277, Z54246, AC004796, AP000953, AC003665, AC008127, AC004098, AC002565, | |
| | | | | | AC003684, AF112482, AL132799, AF165138, AP000432, AC005772, AC004562, AC005235, | |
| | | | | | AC005230, AC006004, AC005488, AL035423, AC005678, AC006155, AL109829, AC007207, | |
| | | | | | AC002476, AL049776, AC004019, AL078603, AC007064, AC016025, AL031577, AL031230, | |
| | | | | | Z69719, AC000004, AC004033, Z69917, AL096771, AC004638, AC006130, AL022302, | |
| | | | | | AC006597, U47924, AC004895, U95742, AC006241, AL031904, AL022724, AL021155, | |
| | | | | | AC002564, AC005011, AL078581, AC007285, AC002402, AF146191, AL109865, AC007676, | |
| | | | | | AP000352, AC004057, Z98753, AP000555, AC006482, AP000965, AL021154, AL049832, | |
| | | | | | AL035530, AC007632, AC006026, and AB023051. | |
| HPJET11 | 2078 | 965894 | 1-588 | 15-602 | N62272, and AI049662. | |
| HPJE517 | 2079 | 859867 | 1-426 | 15-440 | AI469935, AA035546, R54113, T27117, and H41850. | |
| HPJEL02 | 2080 | 918315 | 1-318 | 15-332 | AA001172, and AC006987. | |
| HPJEG53 | 2081 | 974074 | 1-505 | 15-519 | AC006137, and AC007160. | |
| HPJDW93 | 2082 | 867759 | 1-715 | 15-729 | AA213989, and AW016127. | |
| HPJDT03 | 2083 | 922815 | 1-388 | 15-402 | AA446260. | |
| HPJDP54 | 2084 | 949149 | 1-287 | 15-301 | AA621949, and AI935081. | |
| HPJDF61 | 2085 | 889928 | 1-757 | 15-771 | C14389, AA360910, H81346, D80195, C14014, D51423, D81026, D50979, C15076, D80164, | |
| | | | | | D59467, D59502, D59275, D80193, D80227, D80038, D80166, D58283, D80022, D81030, | |
| | | | | | D59859, D59619, C14331, D80210, D80391, D80240, D59787, D51799, D80253, T59438, | |
| | | | | | D80043, D80269, D80212, U82828, AC005668, AF036405, AL096867, AC005300, AL050306, | |
| | | | | | AC007688, AC008044, AC007052, AC004967, AC005071, AC004913, AL031666, AC007276, | |
| | | | | | AC006509, AJ003147, AP000502, AL109657, AC003041, AC005529, AF023268, AL080243, | |
| | | | | | D88547, AC004990, AC020663, AC003071, AC004223, AC005829, AF053356, AC005821, | |
| | | | | | AC004150, AF134726, and AC010206. | |
| HPJDC01 | 2086 | 915056 | 1-470 | 15-484 | AI279943. | |
| HPJDA25 | 2087 | 951281 | 1-572 | 15-586 | AW408615, AI815752, AI906637, and AF047690. | |
| HPJCU29 | 2088 | 928407 | 1-615 | 15-629 | AW339568, AA525000, AW087208, AI284640, AA350859, AI471481, AA649642, AW276827, | |
| | | | | | AW193265, N25296, AA469451, AA829223, AL046409, AI061334, AI049634, AI35021 1, | |
| | | | | | AW193432, T07451, AI688846, AI289067, AI341664, AI431303, AA491814, AL041412, | |
| | | | | | AI613280, AI887483, W79504, AI619997, AI375710, AI340453, AI754658, F36273, AA664535, | |
| | | | | | AA134367, AI345654, AI017024, AI344844, AI963720, AI814735, AA594145, AA568778, | |
| | | | | | AJ830390, AA394271, AW338086, AI064864, AI281881, AI334443, AA551503, AI053672, | |
| | | | | | AW303196, AW274349, AA810370, AW438643, AI446464, AA831375, AF150152, AI871722, | |
| | | | | | AI298710, AA630030, AA714453, AA598824, AW301350, AI623898, AI133164, AA719805, | |
| | | | | | AW410400, AA652764, AW166815, AW029038, AL041690, AA126051, AA126035, | |
| | | | | | AA610491, AI434695, AI537955, AA526342, AI754955, AW406162, AI379719, AI888008, | |
| | | | | | AI085719, AA486414, AI270117, AI962050, AA652057, AI801600, AA771811, AI708009, | |
| | | | | | AI732186, AW303876, AW162049, AI929531, AA598586, AI610159, AA713815, AW265009, | |
| | | | | | AA470969, AA581903, AI821271, AW276817, AI679782, AI133102, AW088846, AW439558, | |
| | | | | | AA191620, AW269488, F29989, AI339850, AI291268, AI291124, AW406755, AW419262, | |
| | | | | | AA521323, AI282832, AL044940, AA513181, AI567674, AW302013, AL138455, AI341548, | |
| | | | | | AI110770, AI471543, AI133636, AA522942, AA582911, AA644538, AI251002, AI499134, | |
| | | | | | AI963095, AA862173, AA730684, AW339687, AI358343, AL038785, AW265385, AA491831, | |
| | | | | | AI151261, AI499938, AF150222, AA634146, AA682912, AI358229, AI281697, AI367497, | |
| | | | | | AW008317, AI160117, AA587604, AW104748, AA542991, AI357551, AL138265, AA678436, | |
| | | | | | AI287651, AA323749, AA649705, AI561060, AL120674, AI745325, AL048925, C05986, | |
| | | | | | AI148277, AI859742, AI625244, AI761471, AW270270, AI457397, F19012, AA084070, | |
| | | | | | AL119691, AI281903, AW440836, AW406447, AI143242, AA623002, AA602528, AA837084, | |
| | | | | | AW272758, AW157005, AI937850, AA111909, AA531372, AI801591, AI365988, C75026, | |
| | | | | | AA569387, AI669453, AW162489, AW088058, T06828, AA644551, AA487858, AA665742, | |
| | | | | | AW008952, AA569205, AA071144, AA148489, AA348311, AI469003, AI590689, AI590958, | |
| | | | | | AI262909, AA302963, AA599920, AI279165, AA703820, AI371070, AI951889, AI245679, | |
| | | | | | AI653886, AI866908, AW148792, AI471487, AI561255, F23205, AI801482, AI873916, | |
| | | | | | AA577906, AL120687, AA837351, AA729721, AI744995, AA521399, AA992126, AW071196, | |
| | | | | | AA977743, AI683577, AW276435, AI539563, AI828208, AL079645, AI570261, AI917271, | |
| | | | | | AW243960, AI635818, AA721981, AI469624, F01314, AI028510, N25042, AA492166, | |
| | | | | | AI624142, AI749559, AI569086, AA488395, AW103758, AL049610, AL031283, AC004522, | |
| | | | | | AC004901, AC005033, AL050342, AC006544, AL022161, AC004953, AF001549, AC002558, | |
| | | | | | AL035541, AC004070, AP000244, AC007221, AC018769, Z84484, AL035494, AC004703, | |
| | | | | | AC006543, AL022323, AC005821, AC003098, AC005829, AC005839, Z98941, AL031735, | |
| | | | | | AL049554, U92032, AC002412, AC005482, Z84478, AC002300, AC009069, AC007240 | |
| | | | | | AL109611, AC006559, AL034424, AL022320, AL080241, U69730, AC003690, AC004817, | |
| | | | | | AC005682, AL035420, AC000086, AL008638, AL024498, AC007242, AL049611, Z82202, | |
| | | | | | AL049692, AC004551, AC000003, AC004605, AC005901, AC002289, AC003003, AC005988, | |
| | | | | | Z75889, AC000124, AL031681, AC007966, AC003669, AC002407, AC005086, AC002288, | |
| | | | | | AF047825, AP000077, U95739, AC003035, AC005751, AC008008, AC005736, AC006059, | |
| | | | | | AC003049, AC004870, AC011456, AL110503, AL022068, AL132642, AP000946, AC005566, | |
| | | | | | AL021307, AC009802, AL049632, AC006958, AC005244, AL023283, AL008639, AC010175, | |
| | | | | | AC002287, AF179633, AC005632, AC006079, U51559, AC006960, AC004832, AC018633, | |
| | | | | | AC006537, AP000010, AC002492, AF049895, AC004931, AL109939, AC006112, AF191069, | |
| | | | | | AF096876, AC006479, AP001046, AC004690, AL079333, AC003964, AL133162, AP000127, | |
| | | | | | AP000205, U62317, AL008720, U91321, AP000073, Z84489, AC002429, AL022326, Z94865, | |
| | | | | | Z95331, Z97184, AC007541, AC004019, AC004967, AC006153, AC005531, U66059, | |
| | | | | | AL110122, AL049833, AP000459, AF165147, AC005741, AC004948, Z82188, AL021877, | |
| | | | | | Z95152, AC000353, AL035681, Z95115, AC007114, AC005815, AC005778, AL096712, | |
| | | | | | AL034549, AL035419, AC007298, AC005089, AR036572, U91328, AC002395, AL080243, | |
| | | | | | Z84814, AP000512, AF068862, AC005696, Z86061, AC002477, AC006505, AL035250, | |
| | | | | | AL049744, AC002115, AC007068, AC002457, U47924, AC005245, AP000253, AL034451, | |
| | | | | | AL023581, AC005019, AC004659, AF029308, Z97989, AL049569, AC004990, AC008101, | |
| | | | | | AL033376, AL031650, AL049745, Z85987, AC005046, AL121593, AP000952, AC005274, | |
| | | | | | AP000213, AJ003147, AP000135, AC004638, AP000031, AC006057, AL035588, AC004848, | |
| | | | | | X54180, AC002375, AC004884, AF015154, AL121748, AC007319, AL049539, AL049829, | |
| | | | | | AC005323, AC004453, AL109981, AF111168, AC002094, AP000495, AL022311, AL021808, | |
| | | | | | AL031778, AC004047, AC005859, AL121603, AC000397, AL121591, AL023281, AL031319, | |
| | | | | | AC007243, AL022163, AC005041, AC002400, AC004455, AF134726, Z69838, AC005412, | |
| | | | | | AL034553, AC007682, AC006441, U62631, U91326, AC004837, AL133245, AC008064 | |
| | | | | | AC007091, Z68872, AC007934, AC005940, and AC006430. | |
| HPJCT81 | 2089 | 494874 | 1-401 | 15-415 | T47764, AI240418, AI042373, AI680840, and T23659. | |
| HPJCT26 | 2090 | 559949 | 1-628 | 15-642 | | |
| HPJCS73 | 2091 | 975087 | 1-540 | 15-554 | AC009533, and AC008013. | |
| HPJCS43 | 2092 | 715082 | 1-426 | 15-440 | | |
| HPJCS32 | 2093 | 699046 | 1-261 | 15-275 | | |
| HPJCN60 | 2094 | 887600 | 1-408 | 15-422 | AC005754, and AF152495. | |
| HPJCL55 | 2095 | 670083 | 1-580 | 15-594 | AA460600, AA971933, AA461528, AI028767, AW104221, AA916255, AI807812, AA815321, | |
| | | | | | AA609716, AA897273, and AA382975. | |
| HPJBU40 | 2096 | 710928 | 1-411 | 15-425 | T79399, T79485, and AC004460. | |
| HPJBU09 | 2097 | 625362 | 1-520 | 15-534 | H14685, H11846, and Z42042. | |
| HPJBS74 | 2098 | 765390 | 1-579 | 15-593 | AA199800. | |
| HPJBS52 | 2099 | 726535 | 1-505 | 15-519 | R69458. | |
| HPJBS35 | 2100 | 867818 | 1-427 | 15-441 | R08072. | |
| HPJBL76 | 2101 | 769889 | 1-764 | 15-778 | N20501, W21595, AA971971, AI017087, AA782105, AI924135, and AC007066. | |
| HPJBL30 | 2102 | 948721 | 1-1114 | 15-1128 | AI743553, AI458005, AA855142, AI808388, AI808190, AA854848, AI167631, AI458852, | |
| | | | | | AI740975, AI184926, AI027358, AI084343, AI041477, AA860979, AA782086, AI864309, | |
| | | | | | AA585255, and AL035562. | |
| HPJBK25 | 2103 | 974606 | 1-199 | 15-213 | | |
| HPJBK14 | 2104 | 974593 | 1-317 | 15-331 | Z98272, and AC005202. | |
| HPJBH45 | 2105 | 717088 | 1-391 | 15-405 | H02676, R21208, and AC006480. | |
| HPJAX30 | 2106 | 607408 | 1-748 | 15-762 | | |
| HPJAU73 | 2107 | 806718 | 1-306 | 15-320 | W04456, H09371, D59238, H09370, N34243, AA091691, and N75681. | |
| HPJAP92 | 2108 | 887830 | 1-416 | 15-430 | Z97832. | |
| HPJAO13 | 2109 | 824243 | 1-895 | 15-909 | AI284640, AI801600, AA745582, AA491814, AI350211, AA745431, AI902694, AW080134, | |
| | | | | | AI053672, AL133723, AW193265, AI688846, AI446464, AA492132, AA985038, AA747480, | |
| | | | | | AA350859, AA318652, AI286356, AI471543, AI679045, AA649642, AI610159, AA503258, | |
| | | | | | H64777, AA515435, AI761471, AI469624, T07451, AI281697, AI251002, AI205126, F25276, | |
| | | | | | AA977743, AA515751, AA559290, AI281881, AW419262, AI610376, AW276435, AA678436, | |
| | | | | | AA747276, AW088058, AW274349, AI648558, P29989, AI061334, AA605274, AA747472, | |
| | | | | | P36273, AI962050, AI287651, AA553465, AI264743, AI344844, AI198376, AA377730, | |
| | | | | | AA483034, AA650244, AA469451, AI312149, AI049634, AA745560, AI918421, AI471481, | |
| | | | | | AW103981, AI937850, AA490165, AI768952, AA659083, AI367975, AA594145, F18974, | |
| | | | | | AI245679, AA364224, AA365302, AA680243, AI286264, AI624698, AW440976, AA441788, | |
| | | | | | T40338, AW236342, AA521323, AA557879, AA843450, AW265170, AI287964, AW029038, | |
| | | | | | AL046409, P31204, F28776, F37169, H64560, AI305547, AW193432, AI339850, AI963720, | |
| | | | | | T53607, AI929531, AL120483, AA347927, AA708678, AI282832, AI358571, R91994, | |
| | | | | | AI904894, AW243960, AI358343, AW243698, AI184226, AW166815, AA657918, AA515051, | |
| | | | | | P23279, AL045182, AI355206, AW264973, AI919029, AI431303, F33566, AW276827, | |
| | | | | | AA347930, P37286, AW303196, AA886584, AA244415, AI206785, N43757, AA302963, | |
| | | | | | AA482711, AA338486, AI270117, AA501722, AA229785, AI821271, AA503154, AA669840, | |
| | | | | | P35673, AA557686, AI653905, N71930, AW272758, AW301350, AA358122, AA654771, | |
| | | | | | P34558, AW104748, AW406755, AA664535, AA100372, AA084070, AA810318, AW265654, | |
| | | | | | AA364456, AI924251, AW261871, AA682912, AW088202, H41319, T08638, AI619997, | |
| | | | | | AW162049, AI832782, AI633007, Z98473, AA581903, AI358501, AA669251, AA394271, | |
| | | | | | AI365988, AI569086, P28576, AI083946, AI963095, AA610491, AI866956, AI299050, F28204, | |
| | | | | | T06783, AW238278, AI692265, AI802526, AI358229, AA515224, T40617, T29180, AI083998, | |
| | | | | | AL119691, AA528516, AI309740, T40077, F26152, C75026, AI709365, AI133636, AI081095, | |
| | | | | | AF150152, AA715609, AI567674, AC004076, AP019664, D83989, X75335, AC007446, | |
| | | | | | AC005598, U57007, I51997, AL031680, AL008725, M87916, AP000297, X55925, U57009, | |
| | | | | | U14718, U80017, AC009498, Z30979, M37551, AF015152, U18394, AP001035, X55928, | |
| | | | | | X54180, U18391, U18392, U57006, U18393, U57005, U18390, AL049776, S75337, M87919, | |
| | | | | | AC005546, U18399, S70697, X55924, U18398, AL035448, Z81370, AC006942, AL031118, | |
| | | | | | X55932, AL023553, AC005291, AL109801, AC006205, U18395, AC006537, AC005032, | |
| | | | | | AC005790, AC005335, X54181, X54178, X55931, U57008, AC006251, X54175, S70707, | |
| | | | | | S70694, U02058, U02054, U02063, Z93016, AC005028, U14716, AF147277, AP000044, | |
| | | | | | AB020859, AP000112, AB024685, U14719, U14713, AL031577, AC007386, AL035458, | |
| | | | | | AC005284, AF077058, AC003954, U14710, AC002038, X55922, U14714, AC005019, X55926, | |
| | | | | | AL031650, Z75888, U18387, X55930, AC005912, U14711, U14712, AC011198, AC005614, | |
| | | | | | U95740, U14706, AP000306, AC005193, AC007298, Z94721, U14695, U14705, Z75887, | |
| | | | | | U14702, U14689, U14691, U14685, U14686, U18396, AP000047, AC007370, AB023057, | |
| | | | | | AC002564, U02048, AC009069, AP000520, AC005565, D26067, Z84474, M87918, U72787, | |
| | | | | | AC007216, AC005251, AP000115, AC005815, AC000387, U14715, AC004020, AC004263, | |
| | | | | | AC005069, D87000, U14703, S70699, AL031427, U95742, AL022154, U47924, AC008115, | |
| | | | | | AB020668, S77605, AF055066, AF015156, AC006208, X54179, U14699, U14687, U14688, | |
| | | | | | U14692, AP000553, AL139054, AC009516, AC004964, AC006211, AC004193, AC004659, | |
| | | | | | AC005071, AL132992, AC002404, AC004957, U62292, AC001164, AP000567, D89870, | |
| | | | | | A39972, AC002544, Z85987, AL133404, Z92845, AC005250, AC008079, AF139813, Z82195, | |
| | | | | | U14717, AL034553, AL110120, AL031714, AC006285, AC004990, AC005592, AL031054, | |
| | | | | | AL035209, AC006336, AL023513, U67221, X54177, AL035450, AC007099, AL035551, | |
| | | | | | AL050318, AC004453, AC006204, AC004854, Z98744, AC004638, AC007012, AP001172, | |
| | | | | | U18400, AF015160, Z84814, AC004637, AL031602, AC005838, AC004813, AC004019, | |
| | | | | | AF015153, Z98043, AC004878, AC006152, AC005360, AC004765, U63721, AC003982, | |
| | | | | | AC004187, AC006511, AC005071, AL034549, AC006207, AC005104, U14700, AC010436, | |
| | | | | | AC005993, AC004152, AL021546, U14690, AL049633, AC004890, Z31005, Z82208, | |
| | | | | | AF015155, AP000252, AL133399, AC005670, AC007312, AC007243, AC008101, AC007043, | |
| | | | | | U73684, AL021977, AC004477, AL121603, AC007617, Z75746, U34879, U91326, AL034548, | |
| | | | | | and AL049781. | |
| HPJAN69 | 2110 | 754858 | 1-346 | 15-360 | | |
| HPJAN67 | 2111 | 751384 | 1-308 | 15-322 | AA961913, AI088134, AW263056, AI923972, AW205741, W19869, AC004962, and | |
| | | | | | AL049431. | |
| HPJAN57 | 2112 | 734503 | 1-239 | 15-253 | AL133246. | |
| HPJAJ20 | 2113 | 669000 | 1-754 | 15-768 | R11971. | |
| HPJAE51 | 2114 | 725761 | 1-564 | 15-578 | H16572, AW241811, H18666, AW241812, AW129128, AW009414, AA553981, AA876116, | |
| | | | | | AI243349, AA757971, AL035696, AC004842, AF020802, AP000687, AJ229041, AL035252, | |
| | | | | | AC005908, AL009179, and AL022324. | |
| HPJAA27 | 2115 | 419786 | 1-348 | 15-362 | E17067, and E17068. | |
| HPICG93 | 2116 | 887817 | 1-434 | 15-448 | | |
| HPICE06 | 2117 | 935095 | 1-804 | 15-818 | H97402, R51737, N69864, and N24204. | |
| HPIBY36 | 2118 | 708183 | 1-504 | 15-518 | H08396, R25790, N53251, N51204, Z42071, and AP001115. | |
| HPJBT62 | 2119 | 743135 | 1-475 | 15-489 | R23515, N76536, T74959, F12749, AI961429, F11571, and AA640294. | |
| HPJBO89 | 2120 | 786741 | 1-459 | 15-473 | H96715, W90749, R49610, AA983768, AA904877, AA677746, R38813, and AL133095. | |
| HPIBI89 | 2121 | 867845 | 1-426 | 15-440 | R99003. | |
| HPIBH31 | 2122 | 838809 | 1-428 | 15-442 | H73369, N34255, AW160399, H79944, AW239079, AA132425, R20300, H73299, N30499, | |
| | | | | | AW407963, H70394, R97376, W52852, AA182911, AW407596, AA302225, N43927, W19497, | |
| | | | | | T70776, W31972, N42142, T85051, N23533, AA093843, AA305409, AA312807, AA045678, | |
| | | | | | W80575, AA326688, AI245848, AA035464, AA329750, AA229940, AW175673, W07289, | |
| | | | | | AA332809, AI631124, AA372693, R07414, AW407906, R57473, AA299454, AA455701, | |
| | | | | | N55991, AA230126, H03161, AA223846, AW205900, H96200, AA364785, AA467792, | |
| | | | | | AA035465, AA307572, AA024761, C00198, W76420, AA176320, AA120782, AI719711, | |
| | | | | | AI719084, AI453530, AW162019, AW173349, AI984009, AI088520, AA639784, AA127810, | |
| | | | | | and AL024498. | |
| HPIBC93 | 2123 | 785971 | 1-426 | 15-440 | AI814342, AW001123, AI924201, AI935359, AA888820, AI366738, AA665651, AW134874, | |
| | | | | | AA252373, AA766826, AI198343, AA670436, H42655, H62371, AI763375, Z97630, AF077740, | |
| | | | | | Z79834, Z79925, Z58542, and Z58541. | |
| HPIBB45 | 2124 | 867850 | 1-165 | 15-179 | | |
| HPIBB43 | 2125 | 715037 | 1-234 | 15-248 | | |
| HPIBB32 | 2126 | 698901 | 1-172 | 15-186 | AL021366, and AL050332. | |
| HPIBB19 | 2127 | 668489 | 1-405 | 15-419 | | |
| HPIAW91 | 2128 | 790033 | 1-713 | 15-727 | AI690139, AI697496, N91409, N69381, AI695286, AC004200, AP000519, AB023056, and | |
| | | | | | AF055066. | |
| HPIAV06 | 2129 | 935111 | 1-373 | 15-387 | AA600329, AI061271, AI609972, AA573000, AA551268, AI580707, AA665532, AI306717, | |
| | | | | | AL138199, AA502207, AA302661, AA295865, AA295874, AA838091, AA378489, AA779783, | |
| | | | | | T40629, AA601343, AA577824, AA665187, AI520967, AI452836, AA526424, AA553579, | |
| | | | | | H25938, AA599080, AI417586, H47201, AA318116, AW084173, AL037777, AA349606, | |
| | | | | | AA320521, C16718, N94325, AW236288, AI494417, R70884, AA099840, AL137946, | |
| | | | | | AI921706, AA172191, AA349937, AL041375, AA719523, AI819391, AA262752, AA009855, | |
| | | | | | AA551400, AA468196, AI932900, AA552966, AI570943, N91711, AA468247, AA810154, | |
| | | | | | AA552202, AA137274, AL042373, AI889579, AA659656, T94140, N75708, Z97353, | |
| | | | | | AC007707, Z98941, AL034429, AL109984, AL132642, AL035685, AC007934, AP001038, | |
| | | | | | AB023048, AL035106, AC022517, AC004259, AC004967, AL132987, AL021395, AL035457, | |
| | | | | | AB023050, AC003035, AC005095, AC012085, AC005940, AC004912, AL022577, AL031733, | |
| | | | | | AL034555, AC003667, AC006432, AC004149, AL031594, AP000501, AP000036, AC005513, | |
| | | | | | AC005243, AC004881, AC007381, AL031845, AP000511, AL049745, AC007242, AL035090, | |
| | | | | | AC004033, AC002040, AC005823, AC007731, AP000263, AC005366, AC005500, AF037338, | |
| | | | | | AC007639, AC003684, AF179633, U73634, AC007314, AC007298, AC004585, AP000100, | |
| | | | | | AF126403, AC004674, AC002390, AC006313, AL031230, AC013417, AL049694, AC006312, | |
| | | | | | AC006388, AC005325, AL031297, AC006080, AC005220, AC004922, AC005291, AC004814, | |
| | | | | | Z83844, AC005598, AC004525, L78833, AC004228, AC004947, AC007172, AC004000, | |
| | | | | | AL121578, AL139054, AL031668, AC005529, AC005071, AL034420, AL133238, AL008583, | |
| | | | | | Z84487, AC002375, AC007690, AC005006, AC000003, AC005527, AF107885, U73638, | |
| | | | | | AL031735, AL035086, AC004953, AC004687, AF067844, AL050325, AC005037, AC004217, | |
| | | | | | AC005859, AC012384, AC005881, AL035251, AC002395, Z83840, AC005913, AC006443, | |
| | | | | | AC007450, Z97054, AC008372, AC005695, AC005821, AC004876, AC006132, AP001040, | |
| | | | | | AC006536, AC005304, AF053356, AL035460, AC004216, AC007349, AF045555, AD000813, | |
| | | | | | AL109657, AL035659, AC007637, AF001552, AC004491, AC005067, AC000159, AF139813, | |
| | | | | | AL008582, AL049869, Z84484, AC005480, AC004858, AC009516, AC007559, AC002312, | |
| | | | | | AC005158, U91318, AP000279, Z93017, AL031311, AL031186, AP000152, AC007182, | |
| | | | | | AC011311, AC007308, AC002492, AC005305, AF111168, AL031255, Z85986, AL031685, | |
| | | | | | AC005081, AC003681, L78810, AC009405, AL035587, AC002091, AC007225, AC005245, | |
| | | | | | AF017257, AB020868, AC005800, AC020663, AC006480, AC005409, AL117258, AC002369, | |
| | | | | | AL008637, AL031427, U93037, Z73359, AC005015, AC002054, AF196969, AL096702, | |
| | | | | | AL050318, AC006948, AP000106, AP000038, AC003030, U47924, AC002094, AC007227, | |
| | | | | | AL035398, AP000512, AL035420, AC004770, AC007868, AC002470, AC005544, AC006441, | |
| | | | | | AC007388, AC004812, 134294, AL035461, AL009179, AC005277, AJ229041, AC006037, | |
| | | | | | AL021878, AC002504, U91321, AL031677, AC002531, AL049757, Z97832, AC005519, | |
| | | | | | AC005993, AC007860, AC004883, AC002350, AF024533, AC005288, AL049748, AC002400, | |
| | | | | | AC006254, AC007842, AL033518, AL031291, AC004673, AP000103, M87912, AC006026, | |
| | | | | | AL035079, AL049712, Z95114, AC004143, AC006430, AP000154, AC005088, AC005923, | |
| | | | | | AC000085, AC006333, and AF200465. | |
| HPIAQ70 | 2130 | 973604 | 1-507 | 15-521 | | |
| HPIAP79 | 2131 | 774817 | 1-499 | 15-513 | AL043020, T66111, T74122, R53143, R20480, R05568, F12380, H05013, and Z92544. | |
| HPIAD10 | 2132 | 906987 | 1-1270 | 15-1284 | AA601278, AI791227, AL121287, AW069227, AI307201, AW168433, AA578621, AA587516, | |
| | | | | | AW404225, AA832145, AI285578, AI309943, AI634187, AI590404, T08386, AI890794, | |
| | | | | | AC005233, AL031983, AC003999, AL021026, AC006137, AC007182, AC007298, AC007685, | |
| | | | | | AL079342, Z82188, AL118497, Z92547, Z68756, AP000322, AL021978, AP000121, AL021154, | |
| | | | | | AC003010, AF109907, AC004887, AC003964, AL031767, AC006210, AC007388, AP000053, | |
| | | | | | AP000168, AL021393, AP000362, AP000281, AC004785, AC007425, Z97205, U91328, | |
| | | | | | AC004216, AR036572, AB020863, AB020868, AC005697, AC008064, AF001552, AC004858, | |
| | | | | | AC004125, AL050307, AC004897, AC005057, Z93244, AC004106, AC000029, AC005228, | |
| | | | | | AP000040, AP000108, AC002390, Z84467, AF152365, AL035414, AC005295, AC004455, | |
| | | | | | AC007327, AC005839, AC005011, AL035608, AC007240, AC004974, AL049712, AC006116, | |
| | | | | | Z86090, AL096776, AC004388, AC005482, AC005181, U95740, AP000338, AC007284, | |
| | | | | | AC005252, Z68192, AC005184, AC007406, U62293, AP000216, AL034402, AF117829, | |
| | | | | | AL024507, AC008040, AL022163, AL031293, AP000432, AC005291, AC005730, AC005971, | |
| | | | | | AC005331, AC007263, AC004003, AL132992, AB023050, AC004844, AC004832, AL079304, | |
| | | | | | AL035089, AC003006, U91318, AC005588, AL021918, AC003101, AL132774, AC005618, | |
| | | | | | AC004817, AL022578, AC006032, AC005953, AC002375, AP001053, AC006167, Z95704, | |
| | | | | | AF196970, AL109967, AP000511, AC006257, AC009399, AL078602, AC005027, AL031280, | |
| | | | | | AL021807, AC004859, AC005838, AC009498, AC004702, AL133404, AC002394, AL139054, | |
| | | | | | AL031653, Z97055, AF015416, AC006480, AC007114, AP000144, AL035420, AC009946, | |
| | | | | | AL136168, AL049869, AC005102, AC006536, AC006509, AL031665, AC006277, AL109847, | |
| | | | | | AC005881, AC003046, AF111169, AL133241, AC004087, AC005411, AC005036, AC004797, | |
| | | | | | Z84480, AC005874, AF134471, AP000353, Z95115, AP000043, AP000111, AF002993, | |
| | | | | | AC002123, AL050306, AC005534, AC006059, AC004525, AC005993, AC007546, AC004104, | |
| | | | | | AC004605, AC005029, AL133304, AC005609, AC010206, AC002531, AC007656, AC002464, | |
| | | | | | Z95116, AC005401, AC005013, AC003037, AC007462, AP000140, AL009051, AP000509, | |
| | | | | | AC004185, AP001058, AL022237, AP000088, AC006484, AC004910, L47334, U91325, | |
| | | | | | AC004975, AC005028, AL117258, AF172277, AC006075, AC004067, AC007225, D84394, | |
| | | | | | AC006387, AC005049, AC004921, AL110503, AL121877, AC005799, AC005050, AC004825, | |
| | | | | | AC005535, AC004838, U52112, AC004964, AP000431, AL022396, AC007541, AC007028, | |
| | | | | | AL133355, AL049872, and AC004690. | |
| HPHSB91 | 2133 | 790313 | 1-307 | 15-321 | | |
| HPHSB21 | 2134 | 671118 | 1-401 | 15-415 | | |
| HPHSA94 | 2135 | 793084 | 1-196 | 15-210 | | |
| HPHAE81 | 2136 | 778036 | 1-404 | 15-418 | AI674979, AI493794, AI261833, AI478181, AW300149, AI769515, AI373263, R07018, | |
| | | | | | AI672274, AW301213, AW301193, AA910740, AJ249199, and AF141289. | |
| HPFMG06 | 2137 | 933696 | 1-209 | 15-223 | AA165204. | |
| HPFMB10 | 2138 | 961758 | 1-670 | 15-684 | AA548727, Z28355, AI557262, AA585439, Z30131, AI557731, AI535639, AA585101, | |
| | | | | | AI525306, AI557238, AI525556, AI536138, AI557807, AI541307, AI526194, AI541205, | |
| | | | | | AI541365, D61254, T11028, AA585453, AI546945, AI525316, AI541415, AI541535, AI547039, | |
| | | | | | AI546999, R28735, C16300, AI535813, AI535660, AI541374, D57491, AI541390, AI541013, | |
| | | | | | AI557787, AI525431, R29445, AI541510, AL041346, AL041096, AL047012, AL041358, | |
| | | | | | AL041277, AL041163, AL041098, AL040621, AL043538, AL041324, AL040464, AL044162, | |
| | | | | | AL041086, AL043496, AL041296, AL041233, AL041140, AL040193, T23985, AA585476, | |
| | | | | | AI540967, AA585155, AL040149, AA585434, AI557808, R29218, AI557082, AI557799, | |
| | | | | | AI541346, AL040155, AL043444, AI541523, AL044529, AI526140, AI557602, AI557796, | |
| | | | | | T18597, AL041197, AL041347, AL043612, AL045725, AI546855, R29177, AL039915, | |
| | | | | | AA174170, AL040463, AL047219, AL041227, AL047057, AL047170, AL040119, AL047036, | |
| | | | | | AL080031, AL041292, AL041051, AL047183, AL040322, AL041131, AL046330, R45895, | |
| | | | | | AL041133, AI546828, AL041238, AL041142, AL045817, AI546875, AI556967, AL040529, | |
| | | | | | AL040625, AL040510, D55233, AL043467, AL044186, AL044037, AL040091, AL040128, | |
| | | | | | AL040168, AL040255, AL040285, AL040342, AL040332, AL040553, AL040617, AL045684, | |
| | | | | | AL041159, AL040745, AL040370, AL043677, AL046442, AA585440, AL040839, AL041752, | |
| | | | | | D61185, AL043775, AL044165, AI557727, AL043492, AL041602, AL045920, C16305, | |
| | | | | | AL038838, AL040253, AL044074, AL041635, AL045990, AL040458, D53447, AL044199, | |
| | | | | | AL044187, AL040090, AL040263, AL040294, AL040329, AI525856, AL040082, AL044272, | |
| | | | | | AL040444, AL041186, AL040148, D59436, AL043537, AL041730, AL041523, AL043627, | |
| | | | | | AL041246, AL046392, AL041374, AL040576, AL040052, AI525500, AL043845, AI557740, | |
| | | | | | D59751, AL042096, AL039338, AL042135, AL044064, AL038983, AL039316, AL043923, | |
| | | | | | AL043814, AL043848, AL045753, AL041459, AL043570, AL041577, AL044201, AL044258, | |
| | | | | | AL046850, C14391, AL038532, AL040768, AL037727, AL044274, AL045857, AL079878, | |
| | | | | | AL049018, Z32822, AL046994, AL040414, AL040571, AL046914, R28967, AI142134, | |
| | | | | | AL038822, AI526184, AL040238, AI557734, AL046327, AL134524, AI541508, AL041168, | |
| | | | | | AA585098, AI557763, AL049069, AI525320, AI540974, AI524891, AA283326, AL045671, | |
| | | | | | T41289, AI557279, AL040472, R28965, AI546891, C16293, R28892, R28895, AI557864, | |
| | | | | | AI546829, AL037335, AL039744, AL041278, AL045989, AI541027, AI547006, AL037343, | |
| | | | | | D60765, AI541514, AI557802, AA585329, AL039360, AI541356, AI541534, AA170832, | |
| | | | | | AL040075, AL038761, AI546996, D57186, AL041955, AI526187, AL046147, A25909, | |
| | | | | | AR062871, AR038855, A85395, A85476, AF082186, AJ244004, AJ244005, X81969, AJ244003, | |
| | | | | | AR037157, AR062872, AR062873, A20702, AR017907, A20700, A43189, A43188, I44681, | |
| | | | | | AJ244007, AR038762, A98767, A93963, A93964, I63120, A98420, A98423, A98432, A98436, | |
| | | | | | A98417, A98427, I15717, I08396, I15718, A93016, I08395, Z32836, X83865, AR008429, | |
| | | | | | Y16359, A86792, A84772, Y09813, A84776, A84773, A84775, I18895, A84774, AR067731, | |
| | | | | | AR054109, AJ230935, A58524, AR067732, A58523, A58522, A91750, M28262, D78345, | |
| | | | | | E03627, I13349, I48927, AJ230902, A60212, U94592, A60209, A60210, I03331, A60211, | |
| | | | | | AI8053, I84553, I62368, I06859, I84554, AR031566, A02712, I00682, A77094, A77095, | |
| | | | | | A81878, A95051, AI1623, E00609, AI1624, D50010, AF149828, AI8050, A23334, A75888, | |
| | | | | | I70384, A64973, A90655, A60111, A23633, AR007512, E13740, A70872, AI1178, E01007, | |
| | | | | | AI0361, AR043601, A02710, E12615, AJ230972, AR035193, A92133, E14304, A07700, | |
| | | | | | AI3392, AI3393, AR031488, I13521, AJ230951, I52048, A27396, E16678, AR027100, I49890, | |
| | | | | | I44531, I28266, A35536, A35537, I21869, A02135, A04663, A02136, A04664, A91965, A95117, | |
| | | | | | I44516, A70040, A82653, AR038066, A24783, A24782, E16636, AI1245, A70869, A20699, | |
| | | | | | E00696, I60241, I60242, AR009151, E00697, I66485, I01995, I66487, E03813, AJ231009, | |
| | | | | | I66482, I66483, I66484, I66498, I66497, I66496, I25027, AR027099, I66486, I26929, I44515, | |
| | | | | | I26928, I26930, I26927, I08051, I05558, AR051652, AR051651, I19525, I08389, D13509, | |
| | | | | | A22738, D13316, AB025273, AJ230867, AJ231028, AC005913, AR051957, E17098, I66495, | |
| | | | | | I66494, A22734, AR064707, AR054723, AR035975, AR035977, AJ230845, AF006072, | |
| | | | | | AR022273, AJ231011, AR035974, AR035976, AR035978, X55486, U87250, AR050070, | |
| | | | | | A06631, X82786, S60422, AR051865, A62298, X07299, Z30183, E12584, A82595, A82593, | |
| | | | | | AR063812, AR051864, I36244, AJ243486, Y14219, X76012, I05845, AR031358, AR031365, | |
| | | | | | AJ230996, AJ244006, I03669, I03668, AI6035, AR017826, A62300, X82834, AR003381, | |
| | | | | | I33632, E03654, AF213384, Y08991, A22739, AJ131952, AF135243, AB005666, AR009152, | |
| | | | | | S68736, and L36913. | |
| HPFDX38 | 2139 | 709302 | 1-571 | 15-585 | AA649151, AA251443, AW080521, AI261734, and AA761257. | |
| HPFCZ82 | 2140 | 780198 | 1-509 | 15-523 | W73400, W73375, AA550828, AF086321, and AC008042. | |
| HPFCZ60 | 2141 | 430125 | 1-477 | 15-491 | N27955. | |
| HPFCZ10 | 2142 | 968360 | 1-308 | 15-322 | | |
| HPFCR23 | 2143 | 675120 | 1-432 | 15-446 | H01127, and AI696650, | |
| HPFCP82 | 2144 | 867881 | 1-675 | 15-689 | AW023111, AW021917, AI635440, AI800180, AW328331, AA714110, AI800168, AI962030, | |
| | | | | | AL046519, AW237905, AI887235, AA297145, AA129746, AI792521, AA831638, AI440117, | |
| | | | | | AI687343, AW270255, AI491765, AI799607, AL119691, AI821931, AW419389, AW275432, | |
| | | | | | AI755057, AW008169, AI254959, AI792499, AA528503, AA773463, AW238253, AI380617, | |
| | | | | | AL119247, AA456924, AI345132, AA502532, AI267269, AL037714, AW189113, AA837686, | |
| | | | | | AI278972, T05118, AI753672, AI279417, AI889795, AI889804, AI732789, AA284247, | |
| | | | | | AW157456, AI874341, AA433894, AW162697, AI369580, AI445934, AI912401, AL135357, | |
| | | | | | AI284543, AI250552, T74524, AW168420, AW410354, AA828637, AI144055, AA397389, | |
| | | | | | H38769, AA314891, AW238484, AA864603, AW407632, AA618316, AI053793, T49633, | |
| | | | | | AI362442, AI560085, AI251034, AI206841, AC005913, AC007327, AL035090, AL022320, | |
| | | | | | AC005082, AC004805, AL078477, AL031846, AC004659, AC007193, AC007216, AC007011, | |
| | | | | | AC007363, U95742, AL023580, AC000052, AC004025, AC005022, AL133353, AC004877, | |
| | | | | | AC007277, AL031053, AC007684, AL035073, AL049830, AL031186, AL031297, AC003991, | |
| | | | | | AC007919, AP000080, AC007425, AC005730, AC004019, AC004531, AC004673, AF134471, | |
| | | | | | AC006064, AC004796, AR038762, AL049570, AL050332, AC007151, AC007738, AL049557, | |
| | | | | | AC007546, AC006153, AC004053, AF031078, AC006581, AF030876, AC005736, AF181896, | |
| | | | | | AL035413, AC007051, AL031311, AC004743, AC008055, AF017104, AL022336, AC005969, | |
| | | | | | Z80896, AC007857, AC004832, U85195, Z93023, U91321, AC005089, AB023048, AC002326, | |
| | | | | | AE000658, AL034549, AC002395, AC004975, AC007899, AC005324, AC009946, AC002480, | |
| | | | | | AL035414, AC002070, Z93241, AC005399, AC005246, AL035610, AL109758, AC007450, | |
| | | | | | AC004804, AP000076, AP000962, AC003012, AC006455, AC008012, AC005771, AC002316, | |
| | | | | | AC005553, AL035405, AC004 106, AL109657, AL031779, AE000660, AC007100, AL049779, | |
| | | | | | AC008009, AC007436, AL031346, AC004821, AC007676, AC005696, AC007242, AC005053, | |
| | | | | | AC006285, AC005071, AC004895, AL033521, AL050307, AC002465, AL035659, Z97353, | |
| | | | | | AP000035, AC004540, AC003108, AL021326, AC006385, AC005529, AF196779, Z85996, | |
| | | | | | AC005046, AL049869, U95743, AL133321, AF165926, AC004383, AC004466, AL133445, | |
| | | | | | AL023807, AC005207, AC005821, AL021366, AC006316, AL022323, AC010205, AP000356, | |
| | | | | | AF020503, Z98304, AC005520, AB026898, AC002556, AC005609, AP000510, AC005703, | |
| | | | | | AC009178, AC007687, AC006026, AL117351, AL021579, AC002553, AC006065, AC007564, | |
| | | | | | AC005874, AD001527, AC005962, AC005755, D87675, AC008040, AL049646, U91327, | |
| | | | | | AC007066, AP000038, AL031133, AF067844, AL132777, AC005920, AL133448, AL008732, | |
| | | | | | AC005152, AP000141, AC005323, AP0Q0501, AC004196, AL133246, AC002492, AC006552, | |
| | | | | | AC006406, AC004167, AC007227, AL050348, AC005901, AC005562, AL008583, AC005094, | |
| | | | | | AF001549, AC006965, AC004408, AC007199, U96629, AC007371, AL109801, AC005015, | |
| | | | | | AC004126, AC005534, AC005409, AL031257, AC002429, AC009464, AC004232, AL021154, | |
| | | | | | Z94056, AC004072, AL021918, AC005900, AB014078, AL034369, AP000088, AL050309, | |
| | | | | | Z82206, AC007041, AF111167, AL031597, AC009516, AC002425, AC004253, AC009509, | |
| | | | | | Z75887, AC007052, AL049760, AP000152, AP000010, AJ239322, AF027390, AL121603, | |
| | | | | | AC000353, AB020868, AC006241, AL008710, AC002996, AL049776, AC008072, Z82244, | |
| | | | | | AC003101, Z82217, AC004099, AC002470, AL031313, AL031664, AF134726, AL133163, and | |
| | | | | | AC006597. | |
| HPFCP53 | 2145 | 526574 | 1-487 | 15-501 | H66573, AA381762, AI689019, H54210, AA563770, AA664604, AI244254, AW021116, | |
| | | | | | AI500552, AA130647, AA879053, AI275183, AA669706, H64777, AA367788, AA468486, | |
| | | | | | AA604843, AI588856, N45421, AA573213, H93293, AA310557, AI004591, F02412, AI623563, | |
| | | | | | AI270476, AW168483, T08421, AI309384, AA448838, AI803809, N67387, H55894, AA837715, | |
| | | | | | AI471691, AA298386, AA599495, AI473701, AI279759, AA904275, AI627581, F02421, | |
| | | | | | AI440324, AI598060, AI754291, R92640, AI471572, T03203, AA574286, AI357551, AI885572, | |
| | | | | | AW189353, AA650447, AW168479, AI271762, AI305258, AI360514, AI609223, AL046746, | |
| | | | | | AA669709, AI687962, N38789, AI076236, AA847099, AI821044, AA669102, AA487542, | |
| | | | | | AA679872, AA491484, AA077776, F17700, AA086318, AI561116, AA378683, AA558344, | |
| | | | | | M78007, AA365586, AW079809, AA613627, AI889579, W95503, T94116, H96518, | |
| | | | | | AW270256, AW404844, H44786, AI915081, AA664283, AL045709, AA640979, AC012627, | |
| | | | | | AC005969, AC002452, AC003664, AC005841, AJ250915, AC007999, M17262, AL049775, | |
| | | | | | AC009509, AC004854, AC005620, AC005988, AC003086, AC002314, AD000671, AC004805, | |
| | | | | | AL022313, Z84487, AC005207, AC004783, AL031665, AC003690, AL020997, AL096817, | |
| | | | | | AC004263, AL022318, L48038, AL022578, AC002059, U63721, AL049793, AC004659, | |
| | | | | | AL137434, AC004254, AL020996, AL021937, AC000003, AC005832, AL022156, AC006273, | |
| | | | | | AC000026, AC002115, I34294, AC007435, AC005913, AC005291, AL049589, AL096791, | |
| | | | | | AC003110, AC004637, AL021155, AC007363, AL109837, AC020663, AC006043, AC006126, | |
| | | | | | AC006930, AB015355, AC000052, AC005072, AC018633, AL033392, AL031447, AC005277, | |
| | | | | | AC007371, AC005274, U47924, AC006512, AC007386, U73167, U90094, AC005498, | |
| | | | | | AC007228, AF092925, AC002544, AC004967, AF187725, AC005164, AC005548, Z98884, | |
| | | | | | U29953, AC005921, Z85987, U62292, AC005911, AL023494, AC011504, AC008273, | |
| | | | | | AC004890, AC006538, AC006487, AL031431, AC005746, AC005378, AC003989, AC007326, | |
| | | | | | AC005908, U75285, Z49237, AC005512, AC003963, AC005377, AC005368, AC005154, | |
| | | | | | AL034379, AL080250, AL031664, AL121767, AP000128, AP000206, AC007666, AC006501, | |
| | | | | | AP000245, AP001053, AC009514, AC004019, AC002558, AJ239321, AD000092, AL022721, | |
| | | | | | AC004033, AC005899, AC005932, AL031662, AL008725, AL049794, AC003663, AC005006, | |
| | | | | | AP000553, AC009516, AC005874, AF134471, AC007055, AC002073, AL031602, AL022165, | |
| | | | | | AC005089, AL049709, AC005358, AC006057, AC004552, AC004668, AC002994, AC005580, | |
| | | | | | AC005390, AC005288, AL008635, AC006050, AC004859, AL035455, AC003982, AC005602, | |
| | | | | | U07563, AL022320, AL035659, AF196779, AC008044, AC006014, Z82198, AC008115, | |
| | | | | | AC005488, AC005581, AC005480, AC005588, U80017, AC010077, AC005722, AC005940, | |
| | | | | | AL133353, AL035530, AC003101, Z46773, AC005482, AC005318, Z93241, AL031432, | |
| | | | | | AL021707, AC004887, AC008179, AL133216, AC005484, AP000493, AC005529, AC005599, | |
| | | | | | AF030294, AC004150, AL121653, AC005209, AC006511, AL109628, AL022396, AL049872, | |
| | | | | | AP000688, Y10196, AF200923, U88317, AC005081, Z83856, AC005796, AC005387, | |
| | | | | | AC006361, AC004016, Z95703, AC003958, AC005519, AP001067, AC005520, AC005231, | |
| | | | | | AL078584, AC009802, AC000134, Z98048, AL031311, Z68756, AC005778, AF042484, | |
| | | | | | AL078472, AC007690, AC005822, AC004253, AC004832, AL078634, AL031466, AB007872, | |
| | | | | | AL096772, Z69917, AP001059, AC004678, AP001058, U07562, AL035398, AC004596, | |
| | | | | | AC004891, AC004460, AC010197, AC007388, and AL133241. | |
| HPFCM45 | 2146 | 723501 | 1-537 | 15-551 | H14121, AI375113, AA744592, AA960851, AI298360, AW293609, AW386311, AW386307, | |
| | | | | | AW379359, and AW386340. | |
| HPFCM27 | 2147 | 682098 | 1-537 | 15-551 | AI126345, N75862, and N22068. | |
| HPFCL56 | 2148 | 732601 | 1-343 | 15-357 | AA424616, AW206710, W48815, and AA284281. | |
| HPFCL24 | 2149 | 867889 | 1-321 | 15-335 | AI741779, AI203371, AA464709, AA725428, AA771747, U25770, and AA725175. | |
| HPFCG02 | 2150 | 921196 | 1-376 | 15-390 | H66442, and AC005484. | |
| HPFCA01 | 2151 | 928672 | 1-412 | 15-426 | T95327, AI823904, AW206324, T95680, AI369869, AI939557, and AC005531. | |
| HPELD12 | 2152 | 969248 | 1-671 | 15-685 | AI801883, AA782908, AA026115, and AA770002. | |
| HPEKI04 | 2153 | 926104 | 1-413 | 15-427 | T77896, T77813, and AA009652. | |
| HPEKE01 | 2154 | 914414 | 1-521 | 15-535 | AA977210, AI589896, AI198170, and AI557234. | |
| HPEBT82 | 2155 | 524246 | 1-146 | 15-160 | AL040143, AA747480, C06327, AA747276, AI888365, AA502103, AA132553, AW303196, | |
| | | | | | AW301350, AA310158, AW274349, AL079433, AI865364, AA747375, AI537185, AI890348, | |
| | | | | | AA828704, AI434706, AI536146, AI370475, AL042420, AI306028, AC004972, AL132987, | |
| | | | | | AC006017, AC004812, AC007226, AL031721, AF196779, AC002553, AL034429, AC006057, | |
| | | | | | AC006965, AP001051, AC006449, AC003043, AL031650, Z83849, AC007064, AL133245, | |
| | | | | | AC006160, AC006277, AC004884, AC002558, AL031602, AL132992, AL035361, AC005233, | |
| | | | | | AP000556, Z98200, AC007052, AC002429, AC007546, AC018633, AC005844, L44140, | |
| | | | | | AL050341, U66059, AC005250, AC002492, Z99716, AC004585, AC004028, AL021939, | |
| | | | | | Z83840, AC007878, AL049757, AC005562, AL031848, AC005695, AC005324, AC007773, | |
| | | | | | AC003957, AC005548, AL049776, AC008039, AC006548, AC003037, AC002485, AC005321, | |
| | | | | | AC005231, AC005771, AF111167, AL049872, AP000111, AL035460, AP000961, AL133297, | |
| | | | | | AL031662, AC009247, AC016025, AC005412, AC002301, AC002041, AC000081, AC007536, | |
| | | | | | AL023803, AC004861, AP000557, AC009516, AC004466, AC005358, AC008045, AL008718, | |
| | | | | | AL031280, Y14768, AF117829, AC007686, AC004149, AC004217, AC005971, AC003007, | |
| | | | | | AB003151, AC004647, AC004150, AP000505, Z86090, AC008372, AC006362, AC002316, | |
| | | | | | AC005759, AJ003147, AC002404, AC005566, AC004890, AP000501, AL133289, AC010077, | |
| | | | | | AC007040, AL022329, AL022397, AF196969, AC006039, AL121603, AL023577, Z82244, | |
| | | | | | Z97196, AC005632, AC005808, AC007421, AC006285, AP000344, AC009479, AC005037, | |
| | | | | | AC007537, AC000353, AC005089, AL031123, AC004460, AC004913, AC004019, AP000018, | |
| | | | | | AC000003, AL133163, Z95115, AC006486, and AC007227. | |
| HPEBT78 | 2156 | 773844 | 1-136 | 15-150 | AW339853,AW188119,AI991660,AI369596,AI494519, andN39086. | |
| HPEBT68 | 2157 | 753692 | 1-233 | 15-247 | T40308, AA584201, AI732378, AI872020, AW327868, AA679936, AL042853, AA847952, | |
| | | | | | AA828749, AA581903, AI270559, AA478355, AL119691, AA515549, AI580250, AI963720, | |
| | | | | | AW265385, AA531186, AW274349, AW002350, AA580808, AI457397, AA618452, | |
| | | | | | AA503600, AI284640, AI696962, AA640410, AA640430, AI908730, AA847499, AA015846, | |
| | | | | | AA682912, AI783581, AI345518, AA806796, AI754955, AW131208, AI583283, AL046409, | |
| | | | | | AI358571, AL121336, AA610688, AI369580, AI732120, AW303196, AA658362, AW022406, | |
| | | | | | AW264934, AA503475, AW419262, AW088846, AA631480, AI677645, AI589230, AL043719, | |
| | | | | | AA623002, AI632991, AL046457, AA680243, AW301350, AA613203, AI521062, AW075511, | |
| | | | | | AI350211, AA720702, AI568678, AL036037, AA483256, AL121235, AA812281, AA532700, | |
| | | | | | AA491284, AA846952, AA724333, AA533303, AI431303, AI471887, AA493708, AF034184, | |
| | | | | | AI570261, AW023149, AI754253, AW157608, AI745325, AA358409, AL041146, AA491814, | |
| | | | | | AA503258, AI687343, AA490183, AW151713, AI298710, AA503039, AI281881, M37551, | |
| | | | | | U57007, AC006039, AC006207, AC004834, AC006285, U73634, AC005531, AP000567, | |
| | | | | | AL020997, AC004797, AC006539, AC007226, Z68756, AC006037, AC005598, AL121655, | |
| | | | | | AL031281, AC007050, AC005081, AC005913, AC006238, AL049766, AC016025, AC007216, | |
| | | | | | AC004848, AC005191, AL080243, AF161800, AC004990, AL021368, AC000353, AC007685, | |
| | | | | | X75335, D83989, L49046, Z86090, AL021978, AC005754, AC005180, AF002223, AC006538, | |
| | | | | | AL132992, AP000009, AC007845, AL117258, AL078621, U57004, AC005701, AL021878, | |
| | | | | | AC006057, AC007160, AL023494, AB004907, U91322, AC004678, AL009028, AC004002, | |
| | | | | | AC015853, AC005666, AC007370, AC004150, AC002504, AF165926, AF038458, AC004895, | |
| | | | | | AL033392, AC005863, AC006449, AC005274, AC005520, AC004596, AL049759, AL022326, | |
| | | | | | AB023049, AC003109, AL133163, AL022320, AF002992, U07000, AC008079, AL096808, | |
| | | | | | AP000225, AL022311, AC012599, AL031722, AC008080, Z84721, AC007731, AC002465, | |
| | | | | | AC005102, AC007043, AC005379, AC005500, AC000024, AL049633, AP000354, AL031255, | |
| | | | | | AC004236, AL133245, AC006075, AC004556, AC006160, U57008, AL021877, AF217403, | |
| | | | | | AC004021, AC007999, AL135744, AC005363, AP000556, AC007270, AL022302, AR036572, | |
| | | | | | U91328, AL132712, AC004019, AL078603, AC005255, AC005037, AC005067, AC004913, | |
| | | | | | AC005242, AL031657, AC005258, AL049539, AC005632, AC004643, AC002301, U82696, | |
| | | | | | AJ246003, AP000150, AC005566, AC006011, AC004638, U95742, AC016026, AC004671, | |
| | | | | | Z82190, AC006023, AC006270, AL080238, AC003075, AC007064, AC006597, AC006540, | |
| | | | | | Z98050, Z95152, AC005071, D87008, AL109628, AC007537, AC004859, X69907, AC004944, | |
| | | | | | AL049743, AC004485, AL035423, AC005091, AL034430, AC009247, AF015148, AC005015, | |
| | | | | | AC006958, AP000344, Z98044, AL049696, AL132777, AP000356, AF045555, AC006474, | |
| | | | | | AC004254, AL023876, AF015153, Z79997, AF042090, AL121658, AC010436, AC007751, | |
| | | | | | AC005920, X55926, AP000114, AP000046, D83253, AC006042, AL133289, X54180, U18391, | |
| | | | | | Z99754, U18392, U57006, U18394, U18395, X55925, U57005, X54179, AP000359, AL023879, | |
| | | | | | AC006241, D88268, AC006453, X55929, AC003070, AC007066, X55933, AC005088, | |
| | | | | | AC004854, AC003104, AC004802, AP000303, AP000557, AC005516, AC005399, AC009405, | |
| | | | | | AC002395, AL049825, AL022724, AL133382, AL031228, AL035681, AL022328, AC005013, | |
| | | | | | AC005600, AC002412, AC006327, Z95331, AC005212, Z98744, AC008041, AC004051, | |
| | | | | | AC002067, AL035072, Z99716, AL109759, AP000563, AC007546, AL022322, AL034549, | |
| | | | | | U67825, AL078611, AC004463, AL031587, and Z93930. | |
| HPEBT54 | 2158 | 731002 | 1-385 | 15-399 | | |
| HPEBT49 | 2159 | 530021 | 1-372 | 15-386 | AC005089, AC005940, U91323, AC005666, AC007546, and AC003093. | |
| HPEBT34 | 2160 | 706836 | 1-358 | 15-372 | | |
| HPEBT14 | 2161 | 535061 | 1-235 | 15-249 | AW179046, AL133500, and AC003071. | |
| HPEBT07 | 2162 | 954214 | 1-303 | 15-317 | AC002351, AC005875, AL022326, and AC006312. | |
| HPEBO67 | 2163 | 578516 | 1-216 | 15-230 | H78283, AI127890, AW090182, AW001838, W72897, and AF086351. | |
| HPEBL08 | 2164 | 960240 | 1-408 | 15-422 | AI021894, AI359246, AI422145, AI800895, AI689642, T89411, and AC007684. | |
| HPEBH01 | 2165 | 921767 | 1-333 | 15-347 | AA019103. | |
| HPEBG89 | 2166 | 785942 | 1-505 | 15-519 | AA425851, and AA425691. | |
| HPEBG10 | 2167 | 867888 | 1-271 | 15-285 | AA533740, and AI984425. | |
| HPEBA89 | 2168 | 910250 | 1-490 | 15-504 | AA758474. | |
| HPEBA61 | 2169 | 742251 | 1-74 | 15-88 | AC007036. | |
| HPEBA05 | 2170 | 928027 | 1-357 | 15-371 | AI217338. | |
| HPEAG43 | 2171 | 468542 | 1-485 | 15-499 | AA634147, AA837087, N63746, AC006197, AL031311, AC006079, AL035555, AC004790, | |
| | | | | | AL031670, AL022727, AC002457, AL096803, AL049874, Z98048, AC005881, AC003663, and | |
| | | | | | AE000659. | |
| HPEAD72 | 2172 | 761472 | 1-371 | 15-385 | H24817. | |
| HPEAB12 | 2173 | 968847 | 1-498 | 15-512 | AI656658, AI991597, AI962317, AW204277, and AI963904. | |
| HPEAA57 | 2174 | 514231 | 1-441 | 15-455 | AC008039. | |
| HPEAA40 | 2175 | 867899 | 1-332 | 15-346 | AA879011. | |
| HPDWR11 | 2176 | 965249 | 1-629 | 15-643 | AI694423, AA773635, AA443144, AA443143, AI918138, AW206226, AI337165, AI350411, | |
| | | | | | N80841, W07349, AW197541, and AW138024. | |
| HPDWN05 | 2177 | 928563 | 1-478 | 15-492 | AI627858, AI674644, AI521975, AA653609, AA447670, R37708, H18650, and P34959. | |
| HPDVM01 | 2178 | 913859 | 1-454 | 15-468 | AA905449, AA969031, U62317, and AC005859. | |
| HPDVD11 | 2179 | 965276 | 1-293 | 15-307 | AI809869, and AA918215. | |
| HPDRU11 | 2180 | 965307 | 1-346 | 15-360 | N52071. | |
| HPDRR06 | 2181 | 968601 | 1-436 | 15-450 | AA8061 14, AW242125, AI249498, AI560615, AI274667, AI972210, Z28533, and AW361342. | |
| HPDRN07 | 2182 | 951838 | 1-601 | 15-615 | AI365618, AA197089, AW023975, AI570067, AW008217, H05066, AI828721, AI620666, | |
| | | | | | H24331, AI684999, AA205931, AA601336, AI572680, AI921744, AI890297, AW338376, | |
| | | | | | AI619994, AA171400, AI281622, AI174489, AA218684, AA878350, AA523812, AA579082, | |
| | | | | | AI821342, AA935827, AW337817, AI860423, AW020102, AW021674, AW275432, AI889177, | |
| | | | | | AA084320, AI798521, AA847341, AA507499, AA112864, AI434103, AA610644, AA557945, | |
| | | | | | AA584241, AI819419, AI249365, H79277, AI000314, AA720582, AA493245, AA227713, | |
| | | | | | AW157128, AA636077, AI254267, AI567676, AI538404, AI862716, AA135761, AI733523, | |
| | | | | | AW021917, AA584489, AI969090, AI872229, AI813920, AW129188, AA629668, AL044966, | |
| | | | | | AI038029, R64110, AI755214, AI754567, AI925588, R79396, AI114755, AA669238, AI734076, | |
| | | | | | AA809546, AA733089, N99245, AI174827, W44797, AI857834, H47461, AI609992, N27340, | |
| | | | | | AA618531, AA814719, AW149241, AW340905, AA826109, AA779599, AA598608, | |
| | | | | | AA554289, AW028376, AA550989, AI148840, AW192930, AW069769, AI754105, C75332, | |
| | | | | | AI439525, AI307563, AI049845, AA280886, AL135490, AA112646, AW023111, AI201983, | |
| | | | | | AA225141, AW277240, AW439224, AI123488, AW021847, N49298, AA525156, AW085626, | |
| | | | | | AW162762, AA570255, AA834891, W69639, AA522864, AI803824, AA129000, AI003391, | |
| | | | | | AA364147, AI282479, AI754926, AA573564, AL044701, AW189853, AA657808, AA182928, | |
| | | | | | H54601, AA167656, M77888, T50676, F35684, AA702637, AA969564, W02419, AA342029, | |
| | | | | | AW237905, AI791659, R61387, AA086042, AI732690, AI890857, AI732327, AA635150, | |
| | | | | | AI815210, AI926876, N66744, AI459879, AI370470, AW083966, AI754257, AI932871, | |
| | | | | | AA492496, R67038, AI587213, AA488419, AA714011, H59856, AI734075, AA772493, | |
| | | | | | AA904211, AA633804, AW243817, AW070901, AI934664, AW419227, AA862312, AI446574, | |
| | | | | | AI249688, AI921765, AW085811, AA100107, F23221, AA503298, AA640305, AI523356, | |
| | | | | | AA470490, AA828840, AA653291, AA483606, AI537020, AC004263, AC006947, AP000359, | |
| | | | | | AC005327, Z83844, AC007686, AC007055, AC006530, AC005015, AL049553, AF207955, | |
| | | | | | AC006441, AL049780, AC004228, AC007540, AL035417, Y10196, AC001228, AP000510, | |
| | | | | | AC005043, AL049709, AL034423, AC007030, AF195658, AC005081, Z97196, AL139054, | |
| | | | | | AC007066, AC005519, Z99716, AL031587, AL136295, AC007308, AC006039, AC005529, | |
| | | | | | AC007695, AL133246, AL020998, AC005412, AF111169, Z98044, AL049569, AC004999, | |
| | | | | | AC005702, AC006241, AC004882, AL031291, AL031651, AL121657, AL021937, AC006312, | |
| | | | | | AC004938, Z85987, AC004707, AC005180, Z82184, AL022165, AC004150, AC002352, | |
| | | | | | AC004770, AC002470, AC004963, Z93241, AC004851, Z70289, AL031055, AC002310, | |
| | | | | | AC005668, AC010200, AL035588, AC004974, AC004841, AL049776, AC006449, AC005280, | |
| | | | | | U91321, AF001549, AC004477, AC002115, U91318, AL022312, Z99774, AC003025, | |
| | | | | | AL034548, AC004973, AC005684, AC007227, Z93017, AC007151, AC004811, U91326, | |
| | | | | | AC004605, AC005031, AC012384, AL031985, AF095725, AC000065, AF139813, AC006055, | |
| | | | | | AL022314, AL031005, AC007207, U80017, Z98051, AL022330, AC005815, AC005005, | |
| | | | | | AF207550, AC002347, AC004787, AL031284, AL035458, AC000025, AC006561, AC002544, | |
| | | | | | AL022097, AC004797, AF196779, AC005377, AL117694, AL009181, AL121754, AL096712, | |
| | | | | | M89651, AC005932, Z48051, AF047825, AC005838, AC007773, AC004032, AC005874, | |
| | | | | | AF134471, Z98949, AP000501, AC005320, AL031664, AL035071, AB023049, Y18000, | |
| | | | | | AC004832, AC007955, AC007917, AB023060, AC006581, U95739, AL035089, AC004169, | |
| | | | | | AL031667, AC004825, AC004531, Z95115, AL034420, AC006511, AL031295, AC006560, | |
| | | | | | AL031053, AF111167, AC005696, AC005220, AC005375, AC002059, AC006057, AL035422, | |
| | | | | | AC003101, AL080312, AL109839, AC007225, AL049829, AL109984, AC004820, AP000558, | |
| | | | | | AC005520, AL080243, AL008718, AC003104, AC004686, AL109627, AL133546, AL031666, | |
| | | | | | Z95118, AL049872, AL050318, AC006162, AJ251973, U78027, AC004230, AC004887, | |
| | | | | | AC002400, AC007011, AC006229, AC006450, AC004883, AC002375, AC004000, AF196971, | |
| | | | | | AC005871, AE000658, AC002316, AC002369, Z97055, AC007016, AC006942, AP000555, | |
| | | | | | AC004417, AL035461, AC004216, AL135960, AJ131016, AC007041, AL034554, AC003043, | |
| | | | | | AC009516, AL121653, AL035681, AC005058, AL030996, Z82215, AC005261, AL031281, | |
| | | | | | AB026898, AC005908, AC007546, AP000114, AP000046, AL022326, AL021939, AL133445, | |
| | | | | | AD000092, Z85996, AL033524, AC003006, AC000105, AC005539, AL020997, AC003969, | |
| | | | | | AL078621, AC010209, AC006236, AL078581, AC005562, AC008372, AC005899, AL096701, | |
| | | | | | AC004834, AC004687, AL035086, AC004638, AC004881, AP000036, and AL133355. | |
| HPDRG01 | 2183 | 914416 | 1-757 | 15-771 | AW182845, R06052, AI342212, R05947, and Z61625. | |
| HPDPS12 | 2184 | 969342 | 1-448 | 15-462 | AA703816, AA258655, and AW173253. | |
| HPDPP12 | 2185 | 969341 | 1-466 | 15-480 | AA491958. | |
| HPDPC08 | 2186 | 957822 | 1-443 | 15-457 | AL043010. | |
| HPDOW10 | 2187 | 961782 | 1-430 | 15-444 | AI301598, AA889756, AA279491, AI301605, AA721450, and AL020997. | |
| HPDOO10 | 2188 | 961881 | 1-754 | 15-768 | AI939627, AI199438, AI498865, Z99396, AW392670, AL036418, AL038837, AL037051, | |
| | | | | | AL036725, AW384394, AL036858, AA631969, AW372827, AL119443, AW363220, AL119497, | |
| | | | | | AL119483, AL039074, AL119319, AL119355, AL119457, AL119324, AL036924, U46349, | |
| | | | | | AL119484, AL119363, AL119391, U46350, AL119522, U46341, U46351, AL119341, | |
| | | | | | AL038509, AL119418, AL119335, AL039564, AL119396, AL039085, AL039156, AL039108, | |
| | | | | | AL039109, AL039128, AL119496, U46347, AL037639, AL119444, AL134531, AL037094, | |
| | | | | | AL039659, AL036196, AL036190, AL037205, AI142137, AL119439, U46346, AL042984, | |
| | | | | | AL037526, AL134538, AL037085, AL038531, AL042614, AL036767, AL043029, AL037082, | |
| | | | | | AL037077, AL036268, AL119399, AL042965, AL042975, AL134527, U46345, AL039625, | |
| | | | | | AL039648, AL045337, AL038520, AL119488, AL042542, AL036238, AL038851, AL043019, | |
| | | | | | AL042551, AL043033, AL038447, AL043011, AL042544, AL039678, AL039629, AL042450, | |
| | | | | | AL039386, AL037615, AL043003, AL119464, AL036733, AL037027, AL037178, AL036774, | |
| | | | | | AL036719, AL036998, AL039410, AL036679, AL036886, AL036765, AL036191, AL036158, | |
| | | | | | AR060234, AR066494, A81671, AR023813, AR064707, AR069079, AB026436, and | |
| | | | | | AR054110. | |
| HPDOF11 | 2189 | 965491 | 1-870 | 15-884 | AI939537, AI363373, and AL021997. | |
| HPCTK02 | 2190 | 917480 | 1-434 | 15-448 | N24908, AI916992, and N49979. | |
| HPCTD03 | 2191 | 922149 | 1-361 | 15-375 | AF150341, AI767747, AI972527, N85789, AI637774, AC001555, L81893, AC006077, and | |
| | | | | | L81892. | |
| HPCTC04 | 2192 | 925777 | 1-485 | 15-499 | AI635931, AW241388, AI360647, AI218091, AI868064, AI824561, AC006198, and AL079338. | |
| HPCQQ07 | 2193 | 951646 | 1-399 | 15-413 | AI350228, AI792022, R20916, AI701465, AI457852, AI261722, AI741246, AF017104, and | |
| | | | | | AC016831. | |
| HPCPM63 | 2194 | 954940 | 1-483 | 15-497 | AI131455, and AI761541. | |
| HPCOV68 | 2195 | 911075 | 1-578 | 15-592 | AA604716, R49364, and AC004500. | |
| HPCAO89 | 2196 | 946913 | 1-464 | 15-478 | | |
| HPCAK66 | 2197 | 320415 | 1-331 | 15-345 | | |
| HPCAG81 | 2198 | 778177 | 1-388 | 15-402 | R33353, AA482623, and AW237518. | |
| HPCAF65 | 2199 | 573368 | 1-410 | 15-424 | AW023975, AA610255, AA847622, AI223968, AA599080, AA132912, AA358086, AA736713, | |
| | | | | | AI066711, H71678, AA744094, AA744048, AA551268, AA282951, AW151761, AA557945, | |
| | | | | | AI537020, AL045476, AA515728, AI828721, AI025930, AI925065, AI823705, H12857, | |
| | | | | | AW245354, AA856866, AI824476, W02497, AI446259, AI590404, AW104163, AW440368, | |
| | | | | | N41775, AA984829, AA779783, AA847047, H40324, AA719523, AI078409, AI973173, | |
| | | | | | AW088631, AA993636, AI636734, N90460, AI816537, AW129188, AA664604, AI471467, | |
| | | | | | AI421755, T07327, AI282479, AI307563, AA747375, AC005484, AC002310, AC007376, | |
| | | | | | AC006966, AC005913, AC002303, AL121769, AL031427, AF045555, AC006125, AC004522, | |
| | | | | | AC006130, AL031657, AC005081, AL079295, AL049829, AF207550, AL031846, AC002418, | |
| | | | | | AC004859, AC007371, AF196779, AL031431, AC004662, AC004386, AC004882, AC005225, | |
| | | | | | AC002504, Z83844, AC005529, AL121653, Z97056, AC005695, AC004491, AC004813, | |
| | | | | | Z98884, AC005972, Z68870, L44140, AC003108, Z98200, Z85987, AC005520, U82668, | |
| | | | | | AL035658, AC001234, AC006449, AC005598, AL034400, AL031228, AL035684, AC007842, | |
| | | | | | AL136295, AC004686, D86995, AC007227, AC007327, AC003010, AC000353, AC000025, | |
| | | | | | AC005046, AC004834, AL132777, D87675, AC002302, AC002551, AC002128, AL109963, | |
| | | | | | AL022476, AC007129, U91321, AL031276, Z98048, AC009501, AL135960, AJ131016, | |
| | | | | | AC009542, AL008629, AF109907, AC004895, AC004477, AC002492, AL121603, AC005412, | |
| | | | | | AL132987, AF134726, AC004876, AC005546, AC007664, AC007541, AP000011, AP000152, | |
| | | | | | AC006088, AL049694, AC007766, AC004881, AC007358, AC002126, AC007216, AL031311, | |
| | | | | | AC004134, AC005940, AC005971, AC005089, AC004099, AC003101, AC005277, AC007308, | |
| | | | | | AC007551, AL049872, U78027, AL031283, AL078593, AC002470, AL022322, AC006064, | |
| | | | | | AF011889, AC007565, AL135744, AL109613, AC005696, AC005383, AC007536, AL031230, | |
| | | | | | AC005730, AL008735, AC004975, AL133448, AC009330, AC004851, AC007681, AC005821, | |
| | | | | | AL034429, AC005736, AC004821, AC002425, AC003682, AC005666, AC007226, AC000134, | |
| | | | | | U52112, AC002400, AC007193, AC008044, AC007283, AC006057, AC005531, AL031005, | |
| | | | | | AF031075, AC004144, AC005015, AC006285, AL049757, AL022396, Z83843, AL096791, | |
| | | | | | AL033527, AL022721, AP000048, AC006333, AL022165, AC006487, AL031287, AC004792, | |
| | | | | | U62293, AC007263, U63721, Z83822, AC007999, AF017104, AC008015, U96629, AL024509, | |
| | | | | | AC007298, AF111167, AC005519, AC002059, AP000115, AP000212, AP000134, AC006552, | |
| | | | | | AC005537, AC004382, AF030876, AC005562, AC004596, AC005280, AC007546, AC002350, | |
| | | | | | AL078611, AC006026, Z96776, AF030453, AC006241, AC016830, AL078476, AL021154, | |
| | | | | | Z95115, AC004832, AL049539, AC004655, AL109623, AP000553, AC006006, AC006530, | |
| | | | | | AC003043, AC007160, AL049748, AC005363, AC005527, AC006505, U10087, AC005071, | |
| | | | | | AL078581, AL109758, AC006146, AC005486, AC016025, A3009610, Z82180, AL035422, | |
| | | | | | AC005082, AR036572, U91328, U91323, AL109627, AC005839, AL080250, AC005261 | |
| | | | | | AL133382, AC009181, AC000082, AP001060, AP000010, and AC002347. | |
| HPCAD17 | 2200 | 584754 | 1-1073 | 15-1087 | | |
| HPCAB54 | 2201 | 728857 | 1-395 | 15-409 | AA112321. | |
| HPCAB45 | 2202 | 575233 | 1-233 | 15-247 | | |
| HOVEV01 | 2203 | 914553 | 1-721 | 15-735 | AI042120, AI520690, AI346542, R80717, N70361, H97746, AA678405, T48628, T95511, | |
| | | | | | R50705, AI678296, R99146, AA973947, AW392739, AL046192, W05002, AW138135, R50704, | |
| | | | | | AW371372, AI620712, AI350513, AI423566, AI342100, R80716, D79458, AA933894, T95510, | |
| | | | | | AA622588, T48627, AW392719, AA781834, AA258040, AL040243, AI684279, AI537677, | |
| | | | | | AW104724, AI624279, AI564719, AL119748, AI815232, D79367, AI567940, AI254731, | |
| | | | | | AW132056, AI445025, AI648509, AI491852, AL045266, AI537024, AL049085, AI500706, | |
| | | | | | AI922901, AI499463, AW262565, AI269862, AI275175, AI802542, AI677796, AI433976, | |
| | | | | | AL045500, AI433157, AL043326, AI500523, AI539771, AL134830, AI619502, AI335449, | |
| | | | | | AI500659, AI491776, AI648663, AI520785, AI536638, AI702068, AI801766, AI269205, | |
| | | | | | AI811344, AW087445, AI637584, AI284484, AI559296, AI591316, AI554427, AI890833, | |
| | | | | | AI926790, AW026882, AW148408, AW071349, AW301409, AI445237, AW151138, AL079977, | |
| | | | | | AI610402, AW198090, AI921248, AI702073, AW004685, AI573032, AI446628, AW087207, | |
| | | | | | AI682971, AW088793, AI868831, AI624206, AI702406, AI571909, AI475451, AW162071, | |
| | | | | | AI287489, AW150578, AI654276, AI889376, AI620284, AI524671, AW129659, AL079963, | |
| | | | | | AW169671, AI560099, AI468872, AL036361, AI440239, AI815855, AW090013, AI249257, | |
| | | | | | AI590999, AI866608, AI568296, AI538716, AI432969, AI439745, AA225339, AI349004, | |
| | | | | | AI872711, AI828731, AI569583, AI499393, AI871697, AI273048, AW268220, AI520862, | |
| | | | | | AL047763, AI828682, AI250293, AI590227, AL043981, AI696612, AI824746, AW274192, | |
| | | | | | AI572676, AI583065, AI584140, AL041150, AI536685, AI436456, AW020561, AI538259, | |
| | | | | | AI570909, AI499131, AW082113, AA835801, AI567846, AI567993, AI432656, AI475371, | |
| | | | | | AL121328, AI431975, AW403717, AW073270, AW168795, AI857296, AI701074, AI612913, | |
| | | | | | AI625079, AW148363, AI627360, AL042551, AI540832, AI863014, AW149869, AI567128, | |
| | | | | | AI635461, AI274508, AI499512, AW080327, AI889133, AI445432, AW075667, AI284517, | |
| | | | | | AI434223, AI859511, AI590118, AI538829, AI654750, AW167924, AI538218, AI687362, | |
| | | | | | AW148716, AI862144, AL119791, AW082040, AL042628, AI679990, AI913437, AL121270, | |
| | | | | | AI886124, AI687728, AI590021, AW301505, AI224992, AI349598, AW170635, AI784252, | |
| | | | | | AI697137, AI682841, AI610756, AI521012, AI801608, AI819326, AI590120, AI499285, | |
| | | | | | AI521040, AI679321, AW086113, AW118398, AW103371, AW008048, AL042745, AI274013, | |
| | | | | | AL036736, AI633419, AW166903, AI064830, AI862139, AI801322, AI539780, AI690426, | |
| | | | | | AI630928, AI289937, AW169653, AI610645, AI801325, AI636445, AI634345, AI518683, | |
| | | | | | AI609580, AI364788, AI500146, AI280637, AI884469, AI434281, AI569616, AC007860, | |
| | | | | | I48979, I89947, I48978, S68736, AL050149, AF090901, AL110196, AL133080, A08916, | |
| | | | | | AL117460, AL110221, AF113019, Y11254, I89931, AL122050, A08913, AF118070, AF090934, | |
| | | | | | AF078844, AF113676, AL050138, AL122123, E07361, X84990, AF113677, AF158248, | |
| | | | | | X82434, AL137557, AJ000937, AL133640, AF111851, AL050116, X63574, AL122121, | |
| | | | | | AF106862, Y16645, AF118094, 878214, AF017152, AL049314, AL137283, A65341, | |
| | | | | | AL080124, AL133075, AF104032, E03348, AF113689, AF113694, Y11587, AL133016, | |
| | | | | | AB019565, AF090900, AL049452, AL080060, AL122093, U42766, AL050277, AR059958, | |
| | | | | | AF090903, AF125949, AF090943, AL137459, AL117457, AL050108, AF090896, AL137527, | |
| | | | | | A93016, AF113691, AF113699, I49625, AL133557, AL096744, AL050393, AF079765, | |
| | | | | | AF146568, AL133565, AF113690, AL049938, AF113013, AJ242859, L31396, AF091084, | |
| | | | | | L31397, AF125948, AF017437, AF118064, AL133093, AL080137, AL050146, AL117394, | |
| | | | | | AL133606, AL110225, AL049466, AL049382, AL049430, AC002086, U91329, AF097996, | |
| | | | | | E02349, AJ238278, AL137550, AR011880, A08910, AL133560, AL117585, A58524, A58523, | |
| | | | | | AL049464, AE177401, AL122098, E07108, AL122049, AL049300, Z82022, AL034402, | |
| | | | | | AL117583, AF067728, A08912, AF183393, U00763, U35846, A77033, A77035, I03321, | |
| | | | | | AL117435, A08909, AL050024, AL137271, X72889, AL137463, I33392, AL133113, X70685, | |
| | | | | | AL022165, AL133568, AL137648, X65873, AL122110, AL049283, AL137560, AL137538, | |
| | | | | | A03736, U72620, X96540, X93495, AI2297, AL080159, U80742, X98834, I09360, AL080127, | |
| | | | | | AJ012755, AF087943, U67958, AL133072, AL110197, AF061943, E08263, E08264, AF000145, | |
| | | | | | AF153205, AL137523, S61953, AC006336, AL133104, AL050172, X53587, I42402, AL137521, | |
| | | | | | Y09972, AL133014, AF111112, AL122111, AC002464, AC005940, E15569, AL133077, | |
| | | | | | AF119337, A93350, I26207, I66342, AF026816, AL137526, I17767, AC008394, AF026124, | |
| | | | | | AC006371, AF079763, AL137556, AF095901, AC004383, U68387, A08911, Z37987, Y14314, | |
| | | | | | I00734, E00617, E00717, E00778, AR000496, U39656, AF185576, AL122118, AR054984, | |
| | | | | | AR038969, M30514, AL137476, AL133067, and AF057300. | |
| HOVEU10 | 2204 | 961865 | 1-595 | 15-609 | Z99396, AW392670, U46351, AL042450, AL043019, AL043033, U46341, U46350, AL119324, | |
| | | | | | AL043008, AL119457, AL119335, AL042989, AL119401, AL134536, U46347, AL043029, | |
| | | | | | AL134525, AL042614, AL043003, AL134531, and AR066494. | |
| HOVEU06 | 2205 | 933737 | 1-324 | 15-338 | | |
| HOVEO04 | 2206 | 926209 | 1-165 | 15-179 | W24148. | |
| HOVEE20 | 2207 | 909030 | 1-432 | 15-446 | N77523, AW371758, AA295628, AF150239, AA351493, and AF161544. | |
| HOVDD82 | 2208 | 948619 | 1-514 | 15-528 | AA814916, Z99396, AL036858, AL119319, AW392670, AL036924, AL036418, AL038837, | |
| | | | | | AA631969, AL119443, AL037051, AL036725, AL037094, AW372827, AW384394, AL119497, | |
| | | | | | AW363220, U46349, U46351, U46341, AL119341, AL037085, AL119483, AL039074, | |
| | | | | | AL037639, AL119335, U46350, AL036196, AL037082, AL119457, AL119324, AL037077, | |
| | | | | | U46345, AL119484, AL119363, AL119391, AL119355, U46346, AL134920, AL119522, | |
| | | | | | AL119396, AL119418, AL042975, U46347, AL038509, AL119444, AL119496, AL039564, | |
| | | | | | AL039085, AL039156, AL134533, AL042965, AL039108, AL039109, AL039128, AL042433, | |
| | | | | | AL042614, AL119464, AL119439, AL119399, AL134902, AL042984, AL037615, AL036268, | |
| | | | | | AL134531, AI142131, AL036190, AL037526, AL134538, AL042551, AL036733, AL038520, | |
| | | | | | AL043019, AL042970, AL038531, AL134529, AL042450, AL036767, AL043029, AL042544, | |
| | | | | | AL042542, AL119488, AL036238, AL038851, AL043003, AL036998, AL037178, AL037027, | |
| | | | | | AL036679, AL036191, AR060234, AR066494, A81671, AR023813, AR064707, AR069079, | |
| | | | | | AB026436, and AR054110. | |
| HOVDD10 | 2209 | 961887 | 1-391 | 15-405 | N43177. | |
| HOVCP77 | 2210 | 772210 | 1-604 | 15-618 | R41728, H24352, R39867, R60774, F10382, R59965, R45695, Z38252, R42431, D81791, | |
| | | | | | R45265, and F01387. | |
| HOVCO50 | 2211 | 932544 | 1-572 | 15-586 | AW235624, AI703030, W56086, AA442067, AA460968, AA478475, AA830981, AA767533, | |
| | | | | | and AI193242. | |
| HOVCN57 | 2212 | 734779 | 1-455 | 15-469 | H44610. | |
| HOVCM77 | 2213 | 772208 | 1-429 | 15-443 | R61245, AP000495, and AC002076. | |
| HOVCM03 | 2214 | 924196 | 1-304 | 15-318 | AI193258. | |
| HOVCI89 | 2215 | 786917 | 1-321 | 15-335 | AA436552, AI280208, AA885577, AI692637, AI435485, and Z99289. | |
| HOVCI08 | 2216 | 959470 | 1-1020 | 15-1034 | AA634064, AW082209, AA781620, R50614, R53385, AI991409, AA035741, H39673, Z59735, | |
| | | | | | Z54887, Z54886, and Z65048. | |
| HOVCD33 | 2217 | 702445 | 1-315 | 15-329 | R44210, and AL040454. | |
| HOVCC57 | 2218 | 465313 | 1-393 | 15-407 | AI347543, AI004448, and T40955. | |
| HOVBQ07 | 2219 | 858863 | 1-591 | 15-605 | AA552163, AA469920, AW205550, AW341591, AI742174, AI620502, AW027003, W91950, | |
| | | | | | AW026996, W91877, AI215036, AI207964, and AA523613. | |
| HOVBK69 | 2220 | 757594 | 1-411 | 15-425 | AA436185, AW052178, H96098, AA653580, and AA416482. | |
| HOVBK38 | 2221 | 956238 | 1-663 | 15-677 | AI140254, AA948324, AA251283, AA862605, AI240375, AA825275, AA999858, AI301152, | |
| | | | | | AI342674, AA011200, AA815310, W58239, AA931576, AI094483, AI302269, AI202732, | |
| | | | | | AA649941, AI342676, R71253, AA449275, AI383771, AI831916, AI308112, R12392, | |
| | | | | | AA525847, H52934, H06918, R34144, W58328, AI695242, R71305, AA876287, W89053, | |
| | | | | | N93696, AA005209, AA251692, R34143, W89107, and AC006251. | |
| HOVBK24 | 2222 | 858857 | 1-395 | 15-409 | T96953, and T72381. | |
| HOVBI67 | 2223 | 751665 | 1-861 | 15-875 | AI040113, W87283, AA700434, W87282, and AC004975. | |
| HOVBI20 | 2224 | 669730 | 1-215 | 15-229 | H80446. | |
| HOVAZ89 | 2225 | 904818 | 1-483 | 15-497 | | |
| HOVAZ65 | 2226 | 750273 | 1-445 | 15-459 | AA406496, N46132, AA406518, and H96338. | |
| HOVAY88 | 2227 | 827077 | 1-397 | 15-411 | | |
| HOVAY55 | 2228 | 736077 | 1-472 | 15-486 | H01079. | |
| HOVAY42 | 2229 | 713812 | 1-373 | 15-387 | | |
| HOVAY03 | 2230 | 921959 | 1-276 | 15-290 | AL139054. | |
| HOVAW62 | 2231 | 745704 | 1-234 | 15-248 | AA062554, AI869336, AW170609, H13995, AA631622, H13997, H14028, AI569586, | |
| | | | | | AA632137, and AC004143. | |
| HOVA025 | 2232 | 678163 | 1-361 | 15-375 | H57248. | |
| HOVAN51 | 2233 | 725005 | 1-535 | 15-549 | T79639, N70408, N57728, T83855, AA001363, AI078086, T93794, and W03748. | |
| HOVAJ07 | 2234 | 953422 | 1-438 | 15-452 | H26739, AI668579, AI733528, and AL020995. | |
| HOVAJ05 | 2235 | 932093 | 1-453 | 15-467 | AI031837, AI985078, T25928, AC003692, AL121973, AC004019, AL049766, and AL121603. | |
| HOVAF07 | 2236 | 953553 | 1-151 | 15-165 | AA828882, and AA829114. | |
| HOVAF01 | 2237 | 916770 | 1-413 | 15-427 | AI252937, N74027, AA836182, AW338228, AI744524, AA910108, AA772555, AI027046, | |
| | | | | | AI823533, F02523, AI823535, AW102980, AA745302, AI371165, AW002825, AA887470, | |
| | | | | | AF001549, AP000502, AC004651, AC002996, U91318, AF134726, AF053356, AC000353, | |
| | | | | | AL023575, AC004820, AP000113, AP000045, AC004985, AL031587, AC002073, AC005288, | |
| | | | | | AC005821, AC002310, AC004967, AC005071, Z93930, AP000553, AC007041, AC004703, | |
| | | | | | AC006014, AC004552, AL023801, AC005015, AL035249, AC005081, AC007371, AC007216, | |
| | | | | | AP000299, AL136295, AL031230, AL034549, AC003689, AL109628, AC004834, AC007358, | |
| | | | | | Z98941, AC005620, AC007955, AC007382, AC007191, AC005765, AC006241, AL020997, | |
| | | | | | AL031283, U91326, AL031659, AC005789, AC002544, AC005837, AL122023, AC005874, | |
| | | | | | AF134471, AC004814, AC003047, AC005823, AC005086, AC004883, AL049843, AL009181, | |
| | | | | | AL022323, AL008715, Z98200, AC012330, S79836, U11297, AL049832, AL096791, | |
| | | | | | AL033547, AC002477, AC004125, AL050317, AC004882, AL031846, AC002357, AC002549, | |
| | | | | | Z94801, AC007325, AL035405, AC007981, L47234, AC005911, AC000075, U80017, | |
| | | | | | AC007151, AC002400, AC008079, U78027, AC004531, AC004983, AC004217, AJ003147, | |
| | | | | | AF045555, AC004837, AC004257, AC006101, AC004953, AC004966, AC005363, AL050325, | |
| | | | | | AC005606, AC006088, AC020663, AC007688, Z81364, AL024507, AC004832, U95742, | |
| | | | | | AL022476, Z92542, AC004583, AF039907, AP000208, AC006544, AC005225, AP000247, | |
| | | | | | AC007229, AL109627, AC008132, AF030453, Z99943, AC002553, Z97183, and AL049748. | |
| HOVAC77 | 2238 | 578783 | 1-353 | 15-367 | | |
| HOVAC54 | 2239 | 578809 | 1-499 | 15-513 | R06198. | |
| HOVAC26 | 2240 | 578810 | 1-410 | 15-424 | AA180856, AA312397, AA477002, N64587, F03493, AA722297, AA550850, AI141130, | |
| | | | | | AW246295, X56997, AC005253, AL133448, AC002477, AC003663, AJ003147, AC007308, | |
| | | | | | AC006064, AL022320, AC007421, AL022323, AC005632, AC006480, AP000704, Z83840, | |
| | | | | | AC005786, AL049779, Z85986, AC005520, AC005004, AL132712, Z98036, AC005274, | |
| | | | | | AC007637, AC005089, AB023049, AC005231, AL049776, AC005180, AL133353, AC007676, | |
| | | | | | AC009516, AC007298, AC006285, AC005940, AC005081, AL031295, AP000356, AC006211, | |
| | | | | | AL021707, U63721, AC006101, AC004883, AC005048, AC020663, AC000134, AC012627, | |
| | | | | | AC005488, AC007546, AP000065, AL080243, AC006511, AC002470, AL078638, AP000049, | |
| | | | | | AC005332, U85195, AC004019, AP000311, AC005531, AC004491, AE000658, AL135744, | |
| | | | | | AC005412, AL023553, AL008582, AP000557, AC005391, AL139054, AC002365, AC006538, | |
| | | | | | AP000116, AP000555, AC006014, AL031733, AC007226, AF003529, AL031589, AC006449, | |
| | | | | | U82668, AF134726, AC005971, AC004890, AC005841, AP000509, AL022721, AP000343, | |
| | | | | | AC003977, AP000248, Z98950, AL079342, AL050318, AL049569, AC005005, AC004253, | |
| | | | | | AC005243, AC005899, AP000556, AL031848, AC002347, AC004000, AC005229, AL133445, | |
| | | | | | AC005184, AC006026, AC005029, AL132777, AC007227, AC016025, AC005519, AC003962, | |
| | | | | | AL109627, AC004139, AL035398, AL031432, AL078581, D87675, AL020993, AC003029, | |
| | | | | | AP000212, AP000134, and AL031282. | |
| HOVAB85 | 2241 | 578788 | 1-394 | 15-408 | AA938198, AI480041, and AA836516. | |
| HOVAB61 | 2242 | 578791 | 1-672 | 15-686 | AI912696, AA189100, AA449441, AI298393, N66646, AI281387, N66606, AA448930, T40424, | |
| | | | | | T41267, N22111, AL096827, and AF086039. | |
| HOOKF10 | 2243 | 961499 | 1-479 | 15-493 | AI292005. | |
| HOOKF04 | 2244 | 925784 | 1-577 | 15-591 | AI807982, AI240099, AA868661, AA625993, AW269043, AI221135, AI024201, N33757, | |
| | | | | | AI799092, and AF092091. | |
| HOOJU04 | 2245 | 925774 | 1-345 | 15-359 | AI432402, AI276478, AI675712, and AA662663. | |
| HOOIN04 | 2246 | 925783 | 1-541 | 15-555 | AI206132, AI760658, AW207202, AI361331, AI309566, AL119748, AI436462, AL049085, | |
| | | | | | F37471, AL042628, AL040243, AL035684, AB014511, AF152243, AL122049, and AC000403. | |
| HOOJK11 | 2247 | 965292 | 1-472 | 15-486 | AI333634, and H78014, | |
| HOOJH05 | 2248 | 928627 | 1-238 | 15-252 | AI223084, AA411815, and AA403084. | |
| HOOJE02 | 2249 | 917454 | 1-372 | 15-386 | AI192015. | |
| HOOJL05 | 2250 | 928644 | 1-430 | 15-444 | AA470830, AI859849, AI766193, AW439625, AW439820, AI962973, AA464728, AI888957, | |
| | | | | | AA463944, AA235454, AI933818, AA468183, AA844370, and AI127133. | |
| HOOIG03 | 2251 | 922510 | 1-423 | 15-437 | AA088667. | |
| HOOHP02 | 2252 | 917424 | 1-415 | 15-429 | AW024908, AA678379, AA477631, N54347, and R26531. | |
| HOOHE67 | 2253 | 969061 | 1-795 | 15-809 | N95228, AW016802, AI375092, AI985579, AI188610, AI656562, AI972873, AI991588, | |
| | | | | | AW055145, AI936408, AI292190, AI094172, AW182193, AI191047, AI078514, AI763004, | |
| | | | | | AI830734, R38989, R49050, AA046092, H49273, AI202609, R99234, AI262420, H19327, | |
| | | | | | AL037112, W87481, AA581541, N94137, AI221613, AA404487, W69271, AI521710, Z38912, | |
| | | | | | R05523, H12506, AI468774, AA046135, AI984653, AW236116, AA099158, AA019723, | |
| | | | | | AI554117, AI090954, AW007126, N70968, AL035700, AC007270, and AF131754. | |
| HOOHD06 | 2254 | 933873 | 1-235 | 15-249 | AI560165, AI955723, AW138740, and AL133011. | |
| HOOAB23 | 2255 | 522227 | 1-542 | 15-556 | AW292981, AA363225, AA363226, AI250281, AI912329, AI745457, AI815151, AI744548, | |
| | | | | | AI760693, AA076391, H74235, AA491864, AA557604, AW301854, AA601230, AL079769, | |
| | | | | | W60522, AI370264, AA501906, H63742, AC005544, AC005921, AF053356, AC016025, | |
| | | | | | AC006285, AC005702, AB023048, AF165926, AC005280, AL035089, AC007262, AC004000, | |
| | | | | | AL031848, AC005529, AC004150, AL132777, AL049874, AC005844, AC006354, AL031733, | |
| | | | | | AC005212, AL009151, AC005071, Z95113, AC007540, AL109865, AC007993, AC005520, | |
| | | | | | AC004099, AF109907, AC002470, AF030453, AC000085, AC006958, D84394, AC005881, | |
| | | | | | AL033527, AL133163, AL021154, AF152364, AL109839, AF118808, AC005261, AC005015, | |
| | | | | | AL135744, AC009516, AC004797, AC002350, Z95152, AC005004, AC004686, AC005200, | |
| | | | | | Z92542, AL031666, AF196779, AC002117, AL133448, AC005193, AC004253, AP000512, | |
| | | | | | Z85986, AC004858, AC006344, AC005081, U82828, AL022336, AC004458, AC004963, | |
| | | | | | AC006203, AC005726, AC002544, AC004841, AL022328, AP000553, AC005191, AL049694, | |
| | | | | | AC004491, AC007055, AC003070, AC007207, AC006547, AC004531, AC016027, AP000689, | |
| | | | | | AC006160, AC016830, AL022316, AC005288, AC005067, AC004659, L78833, AC005488, | |
| | | | | | AL049758, AF088219, AC003982, AC006111, AP000555, AC006057, AC005694, AL049539, | |
| | | | | | AC005065, AC000025, AL050307, AL022238, AF190465, AL034379, AC004970, AP000155, | |
| | | | | | AP000013, AC004675, AB001523, Z83840, Z98941, AF067844, AL020993, Z82215, | |
| | | | | | AC010209, AF200465, Z83843, AC007011, AC006101, and AC004024. | |
| HOOAB05 | 2256 | 932925 | 1-569 | 15-583 | AI080164, and AA363261. | |
| HONAK10 | 2257 | 968610 | 1-324 | 15-338 | AA362963, AA281759, AW117976, AL135744, AF196969, AC006539, AC006077, AL049850, | |
| | | | | | AC009516, AC004678, AP000553, AC005372, AC005411, AL049780, AP000114, and | |
| | | | | | AP000046. | |
| HONAH06 | 2258 | 936029 | 1-1105 | 15-1119 | AA362851, AI499938, AW085790, AA488903, AL043009, AW069227, AA443390, AA569648, | |
| | | | | | AW304580, AA281461, AA547979, AL041706, AI688846, AW022934, AW021161, | |
| | | | | | AW193432, AI634187, F36273, AI510838, AI344844, AW269488, AI061334, T47138, | |
| | | | | | AI049709, AI471481, AW193265, AI963720, AI560085, AL079869, AI287651, AL046409, | |
| | | | | | AW438643, AI341664, AI350211, AI755214, AI369580, AI334443, AI279165, AI148277, | |
| | | | | | AW162489, AW270270, AI619997, AA581903, AW338035, AA350859, AW338021, AI754567, | |
| | | | | | AI375710, AA610491, AI457313, AI613280, AI754105, AI355206, AA493708, AL079645, | |
| | | | | | AI587583, AL119691, AI587565, AW270716, AW148792, H73550, T74524, AI431303, | |
| | | | | | AW276827, AA714453, AI635279, AA169194, AA348311, AA483606, AI291268, AI291124, | |
| | | | | | AI380617, AI287451, AW419389, AI687343, AA631507, AA167792, AI801600, AI053672, | |
| | | | | | AA570740, AI371070, AA758934, AI284640, AI270117, AI801591, AW327868, AI340453, | |
| | | | | | AI761471, AA181773, AI801482, AA599920, AI589230, AL135377, AA491814, AI471572, | |
| | | | | | AI744995, AI379719, AA177061, AI912322, AI635819, AI017024, AW022379, AI733856, | |
| | | | | | AW023672, AL118991, AI583142, AA577906, AW245354, AA847499, AI537506, AI446259, | |
| | | | | | AA719805, AW237905, AI860020, AI300054, AC005730, AC002377, AC007240, AC005180, | |
| | | | | | AC004531, AL049588, AC008372, AC005486, AL049776, AC006285, AL031602, AC002404, | |
| | | | | | AC009784, AC005274, AC004453, AC004019, AC006064, AP000049, AL035659, AC005620, | |
| | | | | | AC004596, AC005081, AC004859, AC005215, AP000311, AL121653, AC006111, AL080243, | |
| | | | | | AC004890, AC005529, AP000511, AL022163, AC005015, AL021707, AP000555, AL139054, | |
| | | | | | AC004707, AC016025, AP000501, AC005280, AC006449, AL133246, AC006312, AC007308, | |
| | | | | | AC004650, AC005011, AL121578, AC006544, AC000052, AC005913, AL050332, AC005288, | |
| | | | | | Z98752, AC012599, AC006254, AC006597, Z84487, AC006130, AC002350, AF196969, | |
| | | | | | AC004028, AC005520, U95742, AC006596, AC004150, AC007227, AL132712, AL049643, | |
| | | | | | AC003957, AC003982, AC005778, AC005088, AC005488, AL034549, AC006057, AC006538, | |
| | | | | | Z98885, AC006480, AP000088, Z92542, AF053356, AL133448, AC002091, AL121655, | |
| | | | | | AL035072, AL109984, AJ229041, AC004967, AC004745, AC005071, AC007546, AC006543, | |
| | | | | | AC008044, AL133289, AF165926, Z98044, AC005924, AP000557, AL031311, AC004922, | |
| | | | | | AL049692, U80017, AC005874, AF134471, AL031589, U89337, D87675, AC008150, | |
| | | | | | AF117829, AC004638, AC005031, AC007055, AL022165, AP000034, AL049766, AC007666, | |
| | | | | | AC004985, AL033525, U85195, AL031295, AC004797, AL009181, AJ246003, AC005089, | |
| | | | | | AC005899, AL035423, AL021453, AL135744, Y14768, AC004526, AC002059, AC004799, | |
| | | | | | AC004675, AC009516, AC000025, AF049895, AC004913, AP000556, AC005291, AP000356, | |
| | | | | | AL121658, AC004812, AC006079, AF200465, AP000513, AC007919, AF205588, AC007292, | |
| | | | | | AC007536, AC000075, AC002301, AF001549, AC007731, AC004686, AC005324, Z97352, | |
| | | | | | AC002395, Z82215, Z98742, AF108083, AJ011930, AC003101, AC007999, AC005500, | |
| | | | | | AL022326, AP000031, Z86061, AP000558, AC005028, AL021392, AC002369, AC005519, | |
| | | | | | AC004764, AC002996, AB000882, AC003104, AC008115, U47924, Z94044, AC007371, | |
| | | | | | AE000658, AC005057, AL022320, AF088219, AF111168, AC004033, AP000512, AL022328, | |
| | | | | | AC007216, AF029308, U91319, AC005666, AL049636, AC007684, AL049709, D88270, | |
| | | | | | AL009179, AC005632, AL109628, AC010168, AC006966, Z98200, AC004477, AF001552, | |
| | | | | | Z85987, AC005736, AC004087, AC004821, AP000359, AC005722, AC000353, AC004999, | |
| | | | | | AC005600, Z85996, AC007207, AF134726, AP000143, AL031427, AL033521, AC005387, | |
| | | | | | AF190465, AL021937, AC005212, AC005229, AC005562, AL096701, AL031774, AC005696, | |
| | | | | | AC006001, AC006211, AC002425, AL031255, AC018633, AJ003147, AC007011, AC005911, | |
| | | | | | AL049869, AL022322, AC020663, Z94056, AC007406, AC005531, AC002365, AP000505, | |
| | | | | | AC004933, AJ010770, AL035681, AL035422, AL096712, and Z95114. | |
| HONAL50 | 2259 | 723571 | 1-545 | 15-559 | W86672, and AA362593. | |
| HONAD65 | 2260 | 747152 | 1-290 | 15-304 | AA362745, and AA085323. | |
| HONAD02 | 2261 | 859016 | 1-1041 | 15-1055 | AA362710, AI873444, AA889371, AW376675, AI261617, AW376657, AW390112, AW376696, | |
| | | | | | AI857990, AI431824, AI963829, AI632752, AI590245, AI953341, AW376640, AA888092, | |
| | | | | | AF118395, and AF118855. | |
| HOGEW23 | 2262 | 973221 | 1-595 | 15-609 | AW392670, U46349, AL119355, AW363220, AW384394, AL119443, AW372827, AL119319, | |
| | | | | | AL119497, U46345, U46350, AL119341, AL119457, AL119399, U46347, AL119391, U46351, | |
| | | | | | AL119324, U46346, Z99396, AL119484, AL119363, AL119444, U46341, AL119483, | |
| | | | | | AL119335, AL134920, AL119439, AL119396, AL134902, AL119522, AL134527, AL042433, | |
| | | | | | AL037205, AL119496, AL119418, AL039912, AL134538, AL119488, AB026436, AR054110, | |
| | | | | | A81671, AR069079, AR060234, and AR066494. | |
| HOGDQ03 | 2263 | 922578 | 1-402 | 15-416 | AA863353, D62887, AL119319, AL119355, AL119391, AW392670, AL119464, AL119324, | |
| | | | | | AL119341, U46349, AL119457, AL119484, AW372827, Z99396, AW384394, AW363220, | |
| | | | | | U46350, U46341, AL119497, AL119483, AL119363, U46347, U46351, AL119443, AL119444, | |
| | | | | | AL119522, AL042984, AL119396, AL119439, U46346, AL134536, AL119335, AL037205, | |
| | | | | | U46345, AL134902, AL119401, AL134538, AL042433,AI142131, AB026436, and AR054110. | |
| HOGCW89 | 2264 | 973227 | 1-780 | 15-794 | AW392670, AL119355, U46349, AL119319, AL119483, AL119341, AL119457, U46351, | |
| | | | | | AL119324, AW372827, U46346, AW363220, U46350, Z99396, U46347, AW384394, | |
| | | | | | AL119443, AL119484, AL119363, AL119391, AL119444, AL119497, AL119418, AL042984, | |
| | | | | | U46341, AL119439, AL042433, AL037205, AL119335, AL134902, AI142131, AL119401, | |
| | | | | | AL119522, AL134536, AL134538, U46345, AL119399, AL134525, AL119396, AL119496, | |
| | | | | | AL119464, AR054110, AR060234, AB026436, AR066494, A81671, and AR069079. | |
| HOGCT13 | 2265 | 657284 | 1-751 | 15-765 | R54129, andR14999. | |
| HOGCR31 | 2266 | 463874 | 1-592 | 15-606 | R70301. | |
| HOGCR10 | 2267 | 964761 | 1-687 | 15-701 | N52836. | |
| HOGCQ54 | 2268 | 859076 | 1-594 | 15-608 | AA236968, AA761761, AA236930, AI823768, AI990131, AA195511, AW297141, AF139471, | |
| | | | | | AP000547, and AP000365. | |
| HOGCH05 | 2269 | 930813 | 1-663 | 15-677 | N57691, H58749, and AF134882. | |
| HOGCE07 | 2270 | 859077 | 1-531 | 15-545 | R17461, and AA614012. | |
| HOGCD61 | 2271 | 761991 | 1-465 | 15-479 | R56752, F06590, AA338081, R15941, AA453210, T74962, R14640, F12752, AL117612, and | |
| | | | | | AC009514. | |
| HOGCC63 | 2272 | 745130 | 1-430 | 15-444 | AA021008, and AA057308. | |
| HOGCA65 | 2273 | 750308 | 1-547 | 15-561 | T97004, AI076315, and T87200. | |
| HOGBJ26 | 2274 | 847191 | 1-394 | 15-408 | AA923566, AI754510, AI018234, W68384, AI376764, AI335263, AI769932, AI143581, | |
| | | | | | AA456821, AI949857, W18181, AW305247, AI613113, W68500, H30442, AI190109, H11954, | |
| | | | | | R44819, AA873841, AA767140, R16196, H30441, R16198, T16809, and H88480. | |
| HOGBE27 | 2275 | 682232 | 1-281 | 15-295 | AA025299. | |
| HOGAM56 | 2276 | 908904 | 1-960 | 15-974 | AI631040, and AA594778. | |
| HOGAI73 | 2277 | 764490 | 1-412 | 15-426 | AA258075, AC007688, AC004878, AL133500, and AC006241. | |
| HOGAI26 | 2278 | 681919 | 1-497 | 15-511 | H48638, W03175, and H58992. | |
| HOGAH71 | 2279 | 760431 | 1-355 | 15-369 | AA055623. | |
| HOGAG57 | 2280 | 734848 | 1-621 | 15-635 | AA737314, AA682280, AA010792, AA143573, AA953433, H23757, AA011221, AA745273, | |
| | | | | | AA188649, and AF205935. | |
| HOGAD77 | 2281 | 772319 | 1-563 | 15-577 | R85394, AI078027, and R84629. | |
| HOGAC69 | 2282 | 756713 | 1-694 | 15-708 | AA594141, AI740524, AI419995, AA903241, AW069464, AI340359, AW194431, AI017580, | |
| | | | | | AA858303, AI803720, AA074277, AL044093, AI921819, AI557117, AI190687, U69197, | |
| | | | | | AI802592, AA889669, AI983007, AA207148, H11397, H96787, H16250, AI814813, AA427905, | |
| | | | | | AI333376, AI268881, AI061243, AI963361, AA191622, AA846829, AI819766, AI190464, | |
| | | | | | N51259, AA669068, AI150891, AA157806, AA135198, AA206434, AI925182, AL044094, | |
| | | | | | AA135111, AW169049, AA034036, AI472734, AA135106, AW272442, N22707, AA609322, | |
| | | | | | AA910279, AI262450, N71642, AI362641, N66837, AI138341, AA847184, N45294, T15527, | |
| | | | | | AA907298, AI433939, AW263961, N67513, AA658226, T89105, AW183696, AA931425, | |
| | | | | | AW105669, AA541311, AA160287, AA578579, AW069630, AW166420, AW021379, | |
| | | | | | AI799396, AA610333, AI216722, AA620459, AA741223, AA704085, AI970644, AI864144, | |
| | | | | | AA588415, F10050, T94064, AI277023, AA904093, AA747271, AA593048, AI160470, | |
| | | | | | AW090441, AI445175, AI873497, Z41528, D20243, T10553, AA043331, T11277, AI383429, | |
| | | | | | AI868926, AA886271, AA613110, AA043332, AW384062, AI687569, R23931, R00190, | |
| | | | | | N31181, AI917566, AI123136, AJ132258, AF061940, AF061938, AF061941, and AF061939. | |
| HOFNW81 | 2283 | 789232 | 1-499 | 15-513 | AW149722, AA452511, AA452655, AA359415, AI802674, AA341041, AA852853, AA149479, | |
| | | | | | AW247428, AA359435, and AF104222. | |
| HOFNW69 | 2284 | 533713 | 1-658 | 15-672 | AI694574, AI299316, AI916308, AI809867, AI683372, AI650987, AI216772, AI700681, | |
| | | | | | AI634004, AL042841, AI968717, AL042842, T67552, AA031777, AA778375, AI290605, | |
| | | | | | AI806369, AI379501, AI433552, AI934582, AI635280, AI917817, AI968679, AW205433, | |
| | | | | | AA640031, T94679, AW073063, AA400802, AI560612, T94326, AA736650, R44761, T55416, | |
| | | | | | and C01874. | |
| HOFNW68 | 2285 | 753048 | 1-142 | 15-156 | | |
| HOFNW65 | 2286 | 815822 | 1-417 | 15-431 | D38026. | |
| HOFNW45 | 2287 | 720755 | 1-104 | 15-118 | | |
| HOFNW07 | 2288 | 953436 | 1-397 | 15-411 | | |
| HOFNU50 | 2289 | 724437 | 1-465 | 15-479 | W00809, H71229, AI688559, and AC005412. | |
| HOFNL96 | 2290 | 888569 | 1-366 | 15-380 | | |
| HOFNI90 | 2291 | 788947 | 1-353 | 15-367 | | |
| HOFNI85 | 2292 | 784366 | 1-303 | 15-317 | | |
| HOFNI72 | 2293 | 760643 | 1-332 | 15-346 | | |
| HOFNI71 | 2294 | 760392 | 1-353 | 15-367 | | |
| HOFNI58 | 2295 | 859094 | 1-337 | 15-351 | | |
| HOFNJ56 | 2296 | 859093 | 1-396 | 15-410 | | |
| HOFNI42 | 2297 | 713816 | 1-290 | 15-304 | | |
| HOFNJ37 | 2298 | 859102 | 1-346 | 15-360 | | |
| HOFNI33 | 2299 | 859103 | 1-333 | 15-347 | AW248328. | |
| HOFNI32 | 2300 | 699299 | 1-364 | 15-378 | | |
| HOFNI10 | 2301 | 964682 | 1-305 | 15-319 | D86969, AF127774, and Z83822. | |
| HOFNI02 | 2302 | 917347 | 1-189 | 15-203 | | |
| HOFNC80 | 2303 | 835718 | 1-353 | 15-367 | | |
| HOFNC79 | 2304 | 774037 | 1-411 | 15-425 | | |
| HOFNB63 | 2305 | 613681 | 1-307 | 15-321 | AI251832, AA622670, AA888154, AA994676, AA890531, AI141391, AI025322, AI587539, | |
| | | | | | AA628616, AI338781, AW055053, AI147905, AA040767, AW272916, AI192845, AI338006, | |
| | | | | | AI095692, AI144012, AI051360, AI205873, AA970491, AI374939, AI678799, AI869782, | |
| | | | | | AI423147, AA973818, AI439825, AI520772, AW438950, AI694600, AI040992, AA935932, | |
| | | | | | AA418706, AI091801, AI750219, AA425949, AI636432, AI079960, AA872649, AI061431, | |
| | | | | | AA779735, AW275907, AA576868, H97795, W61292, AA814520, AW440409, AA812517, | |
| | | | | | AI274100, AI128370, AA861315, AW169816, AA026344, N50703, AW440389, AA147089, | |
| | | | | | AI887699, H25461, AW270131, AI201428, AA099879, AI080203, AA173333, AA147095, | |
| | | | | | Z21890, AW023278, AA780492, R52994, AI630374, AA173438, AW189739, AI890908, | |
| | | | | | AA714013, R31084, H28954, AA037330, AA468886, T06660, AI217891, H07854, AA176908, | |
| | | | | | Z41333, AI949085, D57501, AI351274, AA037329, AI864848, R34332, AA885673, AI079089, | |
| | | | | | R80423, AA599378, AA464883, AI784205, R41882, AI864749, AI860102, T04889, T15425, | |
| | | | | | AW189623, AA418715, AI982539, D53365, AW237884, T35361, AA284089, T25943, | |
| | | | | | AA629755, W52902, H27251, AA489825, AI718058, AF000982, and U42386. | |
| HOFNB55 | 2306 | 731801 | 1-54 | 15-68 | | |
| HOFNB51 | 2307 | 725684 | 1-419 | 15-433 | | |
| HOFMU70 | 2308 | 489858 | 1-142 | 15-156 | | |
| HOFMU67 | 2309 | 743184 | 1-1345 | 15-1359 | AI394585, AI347406, AW300884, R60771, AI609950, N94357, AA768117,AA830837, | |
| | | | | | AA778534, AI024114, AI340016, AI675916, AW027671, AW027648, AA983621, AI272784, | |
| | | | | | AA918495, AA724472, AI335706, AI421130, AI340312, AI632085, AI159997, F35349, | |
| | | | | | R49581, W52231, R36293, AL119324, AI431351, AL119399, AL119464, AI432666, AL119457, | |
| | | | | | AI431346, AI432662, AI431243, AL042544, AI623302, AW392670, AI431354, AI431307, | |
| | | | | | AI431316, AW372827, AL119443, AI432644, AI432649, AI431337, AI431312, AI432674, | |
| | | | | | AL119355, AW128897, AI791349, U46351, AI432651, AI431230, Z99396, AI492509, U46350, | |
| | | | | | AI432661, AL119319, AL134902, AI431238, U46349, AW081103, AI432675, AI431347, | |
| | | | | | AI432653, AL119483, AI431328, AI432654, AI432655, AI431310, AW384394, AI432650, | |
| | | | | | AI432677, AW363220, AL119497, AI432665, AL119484, AL119363, AL119391, AI431248, | |
| | | | | | AI431330, U46347, AI432647, AI492519, U46341, AL119444, AL119401, AI432657, | |
| | | | | | AL119341, AI431241, AI431345, AW128900, AL119418, AL042450, AI432643, AI431353, | |
| | | | | | AI492510, AI431247, AL119439, AI431357, AL119522, AL119396, U46346, AL119335, | |
| | | | | | AL037205, AI432672, AL134536, AI492520, AI431751, AI431255, AI431254, AI432676, | |
| | | | | | AI432673, AI432658, AL134538, AW129223, AL134533, AL042984, AL043033, AI431308, | |
| | | | | | AL119496, AL134525, U46345, AI431231, AI431257, AI432664, AI431314, AI431236, | |
| | | | | | AW128846, AW128884, AL042433, AL042614, AI142131, AL043029, AI431358, AL134542, | |
| | | | | | AL043011, AL043019, AL042542, AL042965, AL042975, AL043003, AL042551, AR066494, | |
| | | | | | AB026436, AR060234, AR054110, Y17793, A81671, AF064854, and AR069079. | |
| HOFMU29 | 2310 | 824242 | 1-1023 | 15-1037 | | |
| HOFMT55 | 2311 | 888552 | 1-226 | 15-240 | | |
| HOFMT45 | 2312 | 891512 | 1-292 | 15-306 | | |
| HOFMS43 | 2313 | 947973 | 1-360 | 15-374 | | |
| HOFMS09 | 2314 | 972725 | 1-447 | 15-461 | AW392670, U46347, AL043003, AL119439, AL119484, AW363220, AW384394, AL134132, | |
| | | | | | AL119457, AL134530, AL134519, AL134531, AL134527, AL134528, AL043147, AL119522, | |
| | | | | | U46351, AL119324, U46350, AL134536, Z99396, AL134533, AL134902, AL119497, | |
| | | | | | AL119443, AL134153, AL119496, AL119396, AL119399, AL042989, AI142134, AB026436, | |
| | | | | | and AR069079. | |
| HOFMP09 | 2315 | 943358 | 1-545 | 15-559 | | |
| HOFMI25 | 2316 | 491360 | 1-412 | 15-426 | H16801, and AW080504. | |
| HOFMF82 | 2317 | 693987 | 1-155 | 15-169 | | |
| HOFMF81 | 2318 | 788733 | 1-383 | 15-397 | AA425224, N23786, N36074, AA779556, T66056, H29680, R60682, AW367327, T77025, | |
| | | | | | H08571, F13183, Z43231, R19696, AI668657, AI734217, R54134, R18168, F12174, F08075, | |
| | | | | | F07164, AA642020, F06393, AA314127, T33549, R12223, W20302, F07553, F05907, F05321, | |
| | | | | | F05322, F05267, AF182814, and AJ243721. | |
| HOFMF19 | 2319 | 888780 | 1-445 | 15-459 | | |
| HOFAF25 | 2320 | 942367 | 1-981 | 15-995 | AA829001, AA837772, AC008154, and AC009275. | |
| HOFAD78 | 2321 | 886485 | 1-689 | 15-703 | Z99396, AL038837, AL037051, AL036725, AA631969, AL039074, AL036418, AL039085, | |
| | | | | | AL036858, AL039564, AW384394, AL039156, AL038509, AL039108, AW392670, AL039109, | |
| | | | | | AL039128, AW363220, AL036924, AL119497, AL037094, AL039440, AL039659, AL038531, | |
| | | | | | AL036196, AL039625, AL039648, AL045337, AL038447, AL036767, AL037082, AW372827, | |
| | | | | | AL037526, AL036190, AL037639, AL039678, AL039629, AL119443, AL039423, AL036238, | |
| | | | | | AL039150, AL038520, AL040992, AL042909, AL119391, AL119319, AL037077, AL119457, | |
| | | | | | AL119396, AL119324, U46341, AL119483, AL037726, U46347, AL119484, AL119363, | |
| | | | | | AL119341, AL119335, AL119355, AL038851, U46350, AL119522, U46351, AL039410, | |
| | | | | | U46349, AL119496, AL036998, AL037615, AL037085, AL036733, AL039386, AL036268, | |
| | | | | | AL119418, AL119444, AL042450, U46346, AL119399, AL134533, AL037027, AL037178, | |
| | | | | | AL042614, AL045353, AL037205, AL119439, AL036765, AL036679, AL042965, AL042975, | |
| | | | | | AL134528, AL036973, AL119511, U46345, AL036191, AL042984, AL119488, AL134527, | |
| | | | | | AL042551, AL134538, AL036719, AL042970, AL043003, AL042542, AL042544, AL043019, | |
| | | | | | AL043029, AL037021, AL037054, AL036836, AL036158, AL119464, AL036774, AL036886, | |
| | | | | | AL036999, AR060234, AR066494, AR023813, A81671, AR064707, AR069079, AR054110, | |
| | | | | | AB026436, and AR064706. | |
| HODKG07 | 2322 | 951875 | 1-662 | 15-676 | AA653929, F20611, and F20551. | |
| HODJU05 | 2323 | 929321 | 1-471 | 15-485 | AL135682, AA446265, T26578, H06982, C14389, C14331, D80195, D59502, D59619, D80210, | |
| | | | | | D80240, C15076, D80164, D80212, D80022, D80166, D80219, D80193, D81030, C14429, | |
| | | | | | D59467, D59275, D80227, D81026, D58283, D59859, D80391, D59787, D51423, D51799, | |
| | | | | | D80253, D80045, D80043, AA305578, D80269, D80038, D80196, D50979, D80188, D59889, | |
| | | | | | D59927, AA305409, D80248, D57483, D59610, D80378, D80366, D51022, D50995, D80024, | |
| | | | | | AA514188, AW177440, AW360811, D80241, D51060, AW178893, D80133, D80522, D80251, | |
| | | | | | D80132, AA514186, T03269, AW179328, C14014, C75259, D80302, AW377676, AW378532, | |
| | | | | | AW375405, C05695, AW177501, AW177511, AW377671, D80268, AW178762, D80134, | |
| | | | | | AW366296, D80439, AW360844, D51250, AW360817, AW375406, D58253, D80064, | |
| | | | | | AW378534, AW179332, AW377672, AW179023, AW178905, AW178775, AW369651, | |
| | | | | | D80168, F13647, D59373, AW352158, D59695, D80949, AW352117, AI910186, AW352171, | |
| | | | | | AW176467, C14407, AW178906, AW352170, AW177731, D80247, AW178907, D52291, | |
| | | | | | AW179019, AW179024, AW177505, C14298, AW179020, AW360841, AW178909, | |
| | | | | | AW177456, AW352174, AW179329, AW178980, AW177733, AW378528, AW178908, | |
| | | | | | AW178754, AW179018, C14227, D80157, T11417, D81111, D51103, AW179004, AW179012, | |
| | | | | | AI905856, AW178914, AW378525, AW367967, D59503, AW177722, AW177728, D51759, | |
| | | | | | AW179009, AW360834, AW178774, AW178911, AW378543, AW352163, D58246, C06015, | |
| | | | | | AW378540, C14077, Z21582, D59627, D80258, AW178983, D59653, AW178781, T48593, | |
| | | | | | D58101, C03092, AW352120, AW177723, AA285331, D51213, AI535850, D51097, D45260, | |
| | | | | | C14975, AW378533, C14344, D80014, AA809122, AW367950, AI557751, AI525923, H67854, | |
| | | | | | H67866, AW177508, T03116, AW178986, D45273, AW177497, D80228, D59317, AI535686, | |
| | | | | | AW177734, AI525917, D59551, C14973, D51221, AI557774, D59474, AI525920, D60010, | |
| | | | | | AA514184, D60214, AI525227, C13958, T02974, T03048, C14957, C14046, AI525925, | |
| | | | | | AI525242, AI525235, D51053, AI525912, AW378542, F13796, AI525215, AW378539, C16955, | |
| | | | | | C05763, AI535961, Z33452, AI525237, AI525222, AC007686, A84916, AJ132110, A62300, | |
| | | | | | A62298, AR018138, AF058696, AR008278, AB028859, X67155, Y17188, D26022, A25909, | |
| | | | | | A67220, D89785, A78862, D34614, Y12724, I82448, D88547, A82595, X82626, AR060385, | |
| | | | | | AB002449, A94995, AR016808, AR025207, AR008443, I50126, I50132, I50128, I50133, | |
| | | | | | AR066488, AR016514, A45456, AR060138, I14842, A26615, AR052274, AB012117, | |
| | | | | | AR066490, Y09669, A43192, A43190, AR038669, AR066487, I18367, A30438, X68127, | |
| | | | | | AR054175, D50010, Y17187, A85396, D88507, AR066482, A44171, A63261, A85477, I19525, | |
| | | | | | A86792, AR008277, AR008281, X93549, AR008408, AR062872, A70867, AR016691, | |
| | | | | | AR016690, U46128, D13509, I79511, A64136, A68321, AR060133, U79457, AF123263, | |
| | | | | | AR032065, X72378, and AR008382. | |
| HODJL04 | 2324 | 926200 | 1-314 | 15-328 | AA649610, AA761836, and Z97195. | |
| HODHK07 | 2325 | 952193 | 1-521 | 15-535 | H03808. | |
| HODHG11 | 2326 | 966063 | 1-704 | 15-718 | AI208573. | |
| HODGL88 | 2327 | 859300 | 1-655 | 15-669 | W78906, N87704, R01599, and AF131819. | |
| HODGJ02 | 2328 | 918476 | 1-466 | 15-480 | N77172, AA247874, and AC004492. | |
| HODFY10 | 2329 | 963350 | 1-461 | 15-475 | AA426476, and AA424622. | |
| HODFX19 | 2330 | 842138 | 1-733 | 15-747 | AI376921, AA975777, AI001802, AI986107, AI277187, AA024836, AA814148, AA946575, | |
| | | | | | AI823500, AI934527, R01773, AA069448, AI214374, AI261766, AI740547, AI149941, R67552, | |
| | | | | | AI761204, H22357, AA991800, AI394623, AI090982, T50900, AA634859, AA931388, and | |
| | | | | | AF055496. | |
| HODFX12 | 2331 | 969588 | 1-320 | 15-334 | AI936005. | |
| HODFX04 | 2332 | 926278 | 1-479 | 15-493 | AA976439, and N77643. | |
| HODFW95 | 2333 | 795281 | 1-798 | 15-812 | W93859, W93898, AA829836, and AF086497. | |
| HODFW40 | 2334 | 859320 | 1-542 | 15-556 | AA972774, and AI694547. | |
| HODFR85 | 2335 | 783789 | 1-489 | 15-503 | N76385, AA954669, N71863, AI041474, and AI937830. | |
| HODFL37 | 2336 | 948703 | 1-450 | 15-464 | | |
| HODEJ11 | 2337 | 966065 | 1-476 | 15-490 | AA242986, and AA242787. | |
| HODFI66 | 2338 | 974317 | 1-523 | 15-537 | | |
| HODFH45 | 2339 | 974916 | 1-606 | 15-620 | AL121595. | |
| HODFG82 | 2340 | 779191 | 1-544 | 15-558 | AI733904, and AA160258. | |
| HODFF88 | 2341 | 974911 | 1-1843 | 15-1857 | D80164, D59502, D80193, D80195, D59275, C15076, D80227, D58283, D80022, D80166, | |
| | | | | | D81030, D59859, D51799, D59619, D80210, D80391, D80240, D59787, D51423, D80253, | |
| | | | | | D80043, D80269, D50979, D80212, D80038, D80196, D80024, D80219, D80188, C14331, | |
| | | | | | D59467, D57483, D59927, D80378, D80366, C14389, D59889, D50995, D80045, D59610, | |
| | | | | | AA305409, C14429, D80241, D51060, T03269, C14014, AW178893, C75259, AA305578, | |
| | | | | | D81026, D59695, D51022, AW179328, D81111, AW178775, D80134, AW378532, AW177440, | |
| | | | | | D51250, AW352158, D80268, F13647, AA514188, AW369651, D80251, D80522, D51079, | |
| | | | | | D80248, D80949, D58253, AW178762, D80168, D52291, C14227, AA514186, AI905856, | |
| | | | | | AW177501, AW177511, D80133, Z21582, AW360811, C05695, C14298, AW352117, D80064, | |
| | | | | | AW176467, AW375405, AW378540, C14407, AW377671, D51097, AW366296, D80302, | |
| | | | | | AW360844, AW360817, AW375406, AW378534, AW179332, AW377672, AW179023, | |
| | | | | | AW178905, D80132, AW360834, AA285331, D80439, AW352171, AW377676, AW178906, | |
| | | | | | AW352170, AW177731, D80247, AW178907, AW179019, AW179024, D51103, AW177505, | |
| | | | | | AW360841, AW179020, AW178909, AW177456, AW179329, AW178980, AW177733, | |
| | | | | | AW378528, AW178908, AW178754, AW179018, AW179220, AI557751, AW179004, | |
| | | | | | AW178914, AW378525, AW352174, T11417, D80157, AW177728, D59627, D51759, | |
| | | | | | AW367967, AW178774, AW178911, AW378543, AW352163, D59503, D80258, D80014, | |
| | | | | | C06015, AI557774, AW178983, AW352120, T03116, AW178781, T48593, D58246, C14077, | |
| | | | | | D59653, AW177723, D58101, D45260, AI525923, AW178986, AW367950, C03092, | |
| | | | | | AA809122, H67854, D59551, H67866, C14975, T02974, AW378533, AW378539, D51213, | |
| | | | | | AW177734, AI535686, D59317, D51221, AI525917, C14973, AA514184, C14344, D45273, | |
| | | | | | AI525925, AI525920, D59474, AI525227, D31458, C14046, AI525242, AI525235, T03048, | |
| | | | | | AI525912, AW378542, AI525215, AI525237, C16955, C05763, Z33452, AI535850, AI535961, | |
| | | | | | A84916, AJ132110, A62300, A62298, AR018138, X67155, Y17188, D26022, A25909, A67220, | |
| | | | | | D89785, A78862, D34614, D88547, AF058696, X82626, AR008278, AB028859, AR025207, | |
| | | | | | I82448, Y12724, A82595, AB012117, AR060385, AB002449, A85396, AR066482, A44171, | |
| | | | | | A85477, A94995, X68127, I19525, A86792, X93549, AR008443, AR016808, U87250, I50133, | |
| | | | | | I50126, I50132, I50128, AR066488, AR016514, AR060138, A45456, A26615, AR052274, | |
| | | | | | I14842, Y09669, A43192, A43190, AR038669, AR066487, A30438, AF135125, D88507, | |
| | | | | | AR066490, D50010, AR054175, I18367, Y17187, A63261, AR008277, AR008281, AR008408, | |
| | | | | | AR062872, A70867, AB033111, AR016691, AR016690, U46128, D13509, AR060133, I79511, | |
| | | | | | AR064240, A64136, A68321, U87247, AB023656, U79457, AF123263, X93535, and | |
| | | | | | AR008382. | |
| HODFE04 | 2342 | 926999 | 1-429 | 15-443 | R83400. | |
| HODFD73 | 2343 | 909812 | 1-603 | 15-617 | AL050332, AF050183, AF058790, AF058789, AF048976, and AB016962. | |
| HODFC79 | 2344 | 774156 | 1-415 | 15-429 | W93152, and AW272240, | |
| HODEZ45 | 2345 | 974337 | 1-516 | 15-530 | | |
| HODBU01 | 2346 | 915167 | 1-508 | 15-522 | R93800, T77247, and R08385. | |
| HODET07 | 2347 | 952194 | 1-410 | 15-424 | H80608. | |
| HODES10 | 2348 | 963474 | 1-186 | 15-200 | AA076702, and AC004928. | |
| HODEO35 | 2349 | 859364 | 1-124 | 15-138 | AA595928, AA461421, and AP000553. | |
| HODEK82 | 2350 | 779245 | 1-673 | 15-687 | AI660692, H96927, and AI471598. | |
| HODEA14 | 2351 | 859375 | 1-664 | 15-678 | N44316, L44479, AW016606, AA524565, AI809352, and AC004821. | |
| HODDX64 | 2352 | 745810 | 1-460 | 15-474 | N71060, T99547, AC001228, U51281, and Z97056. | |
| HODD589 | 2353 | 531075 | 1-476 | 15-490 | N52086, and AA927904. | |
| HODD574 | 2354 | 765863 | 1-221 | 15-235 | T77437, and AW292096. | |
| HODDF37 | 2355 | 420051 | 1-536 | 15-550 | AC002559. | |
| HODDE02 | 2356 | 920961 | 1-419 | 15-433 | AI378347, AI082130, and AA563785. | |
| HODCZ64 | 2357 | 745966 | 1-391 | 15-405 | C14014, D80253, D51060, D80366, AA305409, D80439, AA514186, D80166, D59619, D80210, | |
| | | | | | D80240, D80188, D59275, D81030, D80133, D80247, D81026, D59859, D80024, D80212, | |
| | | | | | D51799, D80164, D80219, C14389, D51423, D80043, D57483, D80022, D80391, D59787, | |
| | | | | | D80251, D80268, D80195, D58283, C15076, D80248, AI525923, D59610, C14331, D59502, | |
| | | | | | D59467, D80038, D80227, D80157, D80196, D80269, D59889, D51022, D50979, D80522, | |
| | | | | | D50995, D51103, D59653, D59927, AA305578, D80193, D80045, C06015, D80241, D80302, | |
| | | | | | AA514188, D51759, AW360811, D80378, AW177440, C05695, AW178893, C14429, D59373, | |
| | | | | | T03269, C75259, D45260, AW377671, AW375405, H67854, T03116, D81111, C03092, H67866, | |
| | | | | | AW178906, AW366296, AW360844, D51221, AW360817, D58246, AW179328, AA809122, | |
| | | | | | T48593, AW375406, AW378534, AW179332, T11417, AW377672, AW179023, AW178905, | |
| | | | | | D80064, AW177731, AW378528, AW178762, AW179019, AW378532, AW177734, F13647, | |
| | | | | | AI525917, AW177501, AW177511, AW360834, AI535686, AW179020, C14227, D80258, | |
| | | | | | AW377676, AW352171, C14957, Z21582, D59503, D59317, AW352170, D80014, D59474, | |
| | | | | | AW178907, AW177733, AI525920, AW178908, AW179024, C14973, C14344, AW378533, | |
| | | | | | D59551, AA514184, D51250, D58101, AW360841, AW352120, AW177505, D60010, | |
| | | | | | AW178775, AW367950, AW178909, AW177456, AW179004, AW179329, AW178980, | |
| | | | | | AW176467, AW178986, AW178914, AI525235, AW178774, AW178754, AW179018, | |
| | | | | | AW352158, D80949, D59695, AW352117, D52291, D59627, D60214, AI525215, D51079, | |
| | | | | | AI525227, C14046, AI557774, C14407, AI557751, D80228, AI525912, AW179009, AW179012, | |
| | | | | | AI525925, AW178911, AW378543, AW378525, AW378540, AW177722, AW352163, | |
| | | | | | AI525242, AA285331, AI525222, AW177728, D51213, AW378539, Z30160, D45273, D80168, | |
| | | | | | C16955, C14298, AW378542, C05763, Z33452, T02974, AW178781, D51053, AW360855, | |
| | | | | | H67858, AI525237, AI910186, C04682, T02868, AW369651, C13958, AI525928, C14077, | |
| | | | | | AI525903, D31458, AI525216, AI525238, D50981, N66429, AI525228, AW177508, AW177497, | |
| | | | | | T03048, AI525239, A62298, AJ132110, A84916, AB028859, AR018138, AR060385, AR008278, | |
| | | | | | A62300, A82595, AF058696, AB002449, I50126, I50132, I50128, I50133, AR016514, I14842, | |
| | | | | | X67155, AR060138, A45456, Y17188, A94995, AR054175, D26022, A26615, AR052274, | |
| | | | | | A43192, Y12724, A43190, AR038669, A25909, AR066488, Y09669, AR066487, Y17187, | |
| | | | | | A67220, D89785, A78862, D34614, A30438, AR008443, AR008277, AR008281, A63261, | |
| | | | | | D88547, AR062872, A70867, AR016691, AR016690, U46128, D50010, X82626, A64136, | |
| | | | | | A68321, AR008408, I79511, D13509, AR025207, X68127, AR060133, AF123263, AR032065, | |
| | | | | | and Z82022. | |
| HODCZ39 | 2358 | 875811 | 1-410 | 15-424 | W04443, AA132310, R78009, and AC012627. | |
| HODCY73 | 2359 | 764543 | 1-447 | 15-461 | AI816780, AI458427, AI828772, AA970754, T90292, AA723211, C15270, R55335, AI700847, | |
| | | | | | AI800369, F04197, AA172179, R48809, AA634235, H26791, AW137473, R48921, AI056206, | |
| | | | | | and AL021920. | |
| HODCY32 | 2360 | 859543 | 1-514 | 15-528 | | |
| HODCW83 | 2361 | 781287 | 1-194 | 15-208 | AI570526, W35195, AA425012, AI190032, AI949009, AW236490, AI632129, and AI695985. | |
| HODCV61 | 2362 | 868291 | 1-760 | 15-774 | | |
| HODCO15 | 2363 | 660502 | 1-608 | 15-622 | W00867, AL045871, AL046306, AB014529, and AF176555. | |
| HODCJ84 | 2364 | 973286 | 1-680 | 15-694 | | |
| HODCC05 | 2365 | 932633 | 1-772 | 15-786 | AA773910, W28027, AP000549, and AC006946. | |
| HODCA90 | 2366 | 792611 | 1-356 | 15-370 | AA005005. | |
| HODBZ85 | 2367 | 784526 | 1-370 | 15-384 | H70407. | |
| HODBX08 | 2368 | 960178 | 1-617 | 15-631 | W87564, and AA837795. | |
| HODBU72 | 2369 | 766284 | 1-336 | 15-350 | AA503323, H89112, H89218, and AF086031. | |
| HODBK84 | 2370 | 859558 | 1-614 | 15-628 | AA682892, AC002116, AC007537, AC006071, AL031432, AL021366, AL050332, AC004921, | |
| | | | | | AC004841, Z93016, AC002477, AC006960, and AC005480. | |
| HODBF61 | 2371 | 742114 | 1-240 | 15-254 | | |
| HODBF40 | 2372 | 529387 | 1-325 | 15-339 | AF179633. | |
| HODBF33 | 2373 | 702750 | 1-179 | 15-193 | N78634, AI655262, AI219603, AI337066, AW016620, AW299342, AA806525, AI343418, and | |
| | | | | | AA314128. | |
| HODBF17 | 2374 | 529389 | 1-338 | 15-352 | AW297233. | |
| HODBD93 | 2375 | 792579 | 1-510 | 15-524 | AA150484, AA156687, AI915919, T24517, and AL122023. | |
| HODBD73 | 2376 | 764670 | 1-503 | 15-517 | R95802. | |
| HODBC42 | 2377 | 529635 | 1-560 | 15-574 | AA031438, AA031560, AI335617, and AC004067. | |
| HODBA48 | 2378 | 721931 | 1-662 | 15-676 | N35773, AA020962, AA429989, AA019518, and AC005046. | |
| HODAZ21 | 2379 | 826693 | 1-606 | 15-620 | D80195, D80022, D80043, D58283, D80302, D80038, D50979, C14389, D59467, D80164, | |
| | | | | | D59275, D80253, D80227, D59502, D50995, AA305578, D51423, D80247, D80522, D80439, | |
| | | | | | D80188, D81026, D80269, C14014, D80366, D59859, C14331, D80166, D59619, D80210, | |
| | | | | | D51799, D80391, D80240, D59610, D59787, AA305409, D51022, C15076, D81030, D80248, | |
| | | | | | D80212, D80268, D80193, D80196, D80045, D80219, AA514188, D59927, D80024, D57483, | |
| | | | | | D80378, D51060, D51103, D59889, D80133, AA809122, D80241, AA514186, D80157, D80251, | |
| | | | | | AW360811, AW177440, D51759, C06015, C14429, AW178893, T03269, D45260, AW377671, | |
| | | | | | AW375405, C75259, AW178906, H67854, D59653, AW366296, AW360844, AW360817, | |
| | | | | | AW179328, T48593, AW375406, AW378534, AW179332, C05695, AW377672, AW179023, | |
| | | | | | AW178905, AW177731, AW378528, AW178762, AW179019, D59373, AW378532, | |
| | | | | | AW177501, AW177511, AW179020, AW352171, AW377676, H67866, AW352170, T11417, | |
| | | | | | C03092, AW178907, AW178908, AW179024, T03116, AI525923, AW176467, D51250, | |
| | | | | | D59317, F13647, AW360841, AW360834, AW352120, AW177505, D52291, AW178775, | |
| | | | | | AW367950, AW178909, AW177456, AW179004, AW179329, AW178980, AW178986, | |
| | | | | | AW178914, AW178774, D80258, AW177733, AW178754, AW179018, AW352158, D59503, | |
| | | | | | C14973, AW352117, D58246, D81111, AI525917, D80014, D60214, C14227, D80064, C14344, | |
| | | | | | AW378533, D59695, C14957, AI525227, AW179009, AI535686, AW179012, D51221, D59474, | |
| | | | | | AW178911, D59627, AW378543, AW378525, AW378540, AW177722, AW352163, D60010, | |
| | | | | | D59551, AW177734, AW177728, AI525920, and AA514184. | |
| HODAX45 | 2380 | 723449 | 1-384 | 15-398 | R07196, and N59556. | |
| HODAV84 | 2381 | 592179 | 1-623 | 15-637 | | |
| HODAV24 | 2382 | 679165 | 1-392 | 15-406 | H60974, R07912, N22871, and H84048. | |
| HODAK55 | 2383 | 745532 | 1-411 | 15-425 | R83642, T81960, AW068239, H60497, N44274, AA318156, H10590, AW404818, AA642219, | |
| | | | | | AA773468, N72512, W85743, AA009995, T92075, R12889, AA853594, W21986, AI686932, | |
| | | | | | AW024419, AA743833, AA627696, AW162688, AW003662, AA326440, AW088539, R21041, | |
| | | | | | AA053566, AI955325, AW364257, AI565761, AA337700, AI827029, AL137377, AF100752, | |
| | | | | | AC004472, M30143, Z14044, and AF122048, | |
| HODAK05 | 2384 | 932639 | 1-453 | 15-467 | AA132943. | |
| HODAE72 | 2385 | 529638 | 1-122 | 15-136 | | |
| HODAE55 | 2386 | 529637 | 1-163 | 15-177 | | |
| HODAE48 | 2387 | 529639 | 1-116 | 15-130 | D61881. | |
| HODAE01 | 2388 | 921680 | 1-306 | 15-320 | H69836. | |
| HODAA92 | 2389 | 790588 | 1-239 | 15-253 | | |
| HODAA85 | 2390 | 784534 | 1-173 | 15-187 | | |
| HODAA80 | 2391 | 529560 | 1-284 | 15-298 | | |
| HODAA69 | 2392 | 529563 | 1-334 | 15-348 | AC007030. | |
| HODAA54 | 2393 | 859582 | 1-237 | 15-251 | | |
| HODAA34 | 2394 | 529570 | 1-300 | 15-314 | AL034553. | |
| HODAA21 | 2395 | 859583 | 1-502 | 15-516 | T48184, and AL035530. | |
| HODAA15 | 2396 | 523382 | 1-119 | 15-133 | AL022068. | |
| HODAA07 | 2397 | 954157 | 1-106 | 15-120 | | |
| HODAA04 | 2398 | 927711 | 1-291 | 15-305 | | |
| HOCPU05 | 2399 | 928651 | 1-753 | 15-767 | AI189844, AI201116, AA609456, AA584808, AA780934, AI219194, and AL022721. | |
| HOCPH02 | 2400 | 917453 | 1-468 | 15-482 | AI610771, AI469844, N40199, AA588746, T70544, N39125, AI937318, AI500487, R37094, | |
| | | | | | R16096, AI748890, and AA258667. | |
| HOCPF02 | 2401 | 917630 | 1-820 | 15-834 | AA280263, AA403050, and AL050343. | |
| HOCOV07 | 2402 | 951744 | 1-557 | 15-571 | AA766710, AA767401, AA804400, AI860423, AI753904, AI434653, N66775, AA555232, | |
| | | | | | AI357762, W45274, AA084504, AW249660, AI521525, AA846923, AI571863, AW249541, | |
| | | | | | AW020150, AI926102, AA324559, AA326603, AA632024, AA324059, AW084445, AA773098, | |
| | | | | | AI537368, AW008217, AA582622, AC016025, AC005071, AC005902, AC004820, AC005696, | |
| | | | | | AC005919, AL022327, AC005971, Z82244, AL121652, AC007227, AP000240, AC005089, | |
| | | | | | AC005011, AC006166, AC004386, AL096701, AL021453, AC007899, AC004230, AC004821, | |
| | | | | | AC005920, AC016831, AC002418, AC004034, AL022336, Z99716, AB023051, AC005412, | |
| | | | | | AC002312, AC005913, AL034420, AC004223, AC006449, AL021808, AF109907, AC005907, | |
| | | | | | AL049795, AC004531, AF196779, AL109627, Z94044, Z98941, AC005046, AL035685, | |
| | | | | | AC005081, AC005084, AC007308, AP000501, AC005562, AC004991, AL139054, AP000512, | |
| | | | | | AC005839, AP000500, AC004099, AC005325, AC005399, AJ003147, AC007216, AC005874, | |
| | | | | | AF134471, AL031311, AL023575, AC005206, AL035249, AC004834, AC002554, AC005667, | |
| | | | | | AP000096, AC002492, AC009247, AP000356, AL022326, AL096775, AL022316, AC006040, | |
| | | | | | AC008009, AL034417, AC004967, AC007686, AL033392, AC000159, AL096763, AC004019, | |
| | | | | | AC005736, AC007225, AC002425, AF001548, L44140, AC005015, AD000092, AC005972, | |
| | | | | | AL031133, AL023281, AC000353, AC006953, AL109865, AP000248, AC004150, AP000152, | |
| | | | | | U91328, AC006111, AC006121, AB003151, AL034553, AC005527, AC005041, AC006011, | |
| | | | | | AF196971, AL022165, AC007226, AC005391, AC004797, AC005932, AC008372, AL133163, | |
| | | | | | AC004263, AL050306, Z99714, AC005231, AC004686, AL031284, AC005754, AC004789, | |
| | | | | | AC002310, AC005225, AL035400, AL031680, AC005377, AC005821, AC005682, AL032821, | |
| | | | | | AC005187, AL034379, Z95331, AL021546, AC006581, AC005899, AL031985, AC004253, | |
| | | | | | U52112, AL031295, L47234, AC005829, AR036572, Z93930, AF038458, AP000555, | |
| | | | | | AL033527, AC005094, AC005049, AC005023, AL049839, AL031602, AC005755, AF001549, | |
| | | | | | AL117330, Z93017, AC006441, AL080243, AC004883, AC005280, AC005519, AL035413, | |
| | | | | | AC004560, AL035071, AL096791, AC002350, AC004036, AC004526, Z84480, AC003101, | |
| | | | | | AC004999, AC004491, AC006505, AC005529, AL121655, AL022323, AL049830, AC004033, | |
| | | | | | AC007151, AC005300, AC007371, U96629, AC007666, AL031281, AF134726, AC007546, | |
| | | | | | AL109758, AL035458, AC005057, AP000502, AC009363, AL049569, AC006160, AC003982, | |
| | | | | | AC002126, AL109827, AC005484, AL132712, AC005332, AL049843, U91321, and AC005288. | |
| HOCMM01 | 2403 | 914464 | 1-814 | 15-828 | AI348389, AA631606, and AL031297. | |
| HOCMI24 | 2404 | 878363 | 1-512 | 15-526 | AA088637, and AW298364. | |
| HOCMC01 | 2405 | 914552 | 1-444 | 15-458 | AA699519. | |
| HNOJJ12 | 2406 | 969077 | 1-1757 | 15-1771 | AW295026, AI276473, AI553987, H08317, AI955362, H50857, W38821, T75180, R56504, | |
| | | | | | T70815, F12882, R19236, T78969, R20397, T98878, R19579, AI312653, H95935, AA090801, | |
| | | | | | AA361971, AA479557, R92663, AA454914, AI659055, AI480397, AI524497, AI440293, | |
| | | | | | AA788769, AI589107, AA630007, AI380567, AA564726, AI262311, AW027577, AI766536, | |
| | | | | | AI332995, AA044714, AA100613, AI471849, AI674449, AI190957, AI632486, AI891104, | |
| | | | | | AI298730, T77169, R45788, H22006, T86237, R80609, T83221, H20293, AI690130, AA368757, | |
| | | | | | AW179044, W73553, N80081, AA730555, AI338393, and D25218. | |
| HNOAD04 | 2407 | 926258 | 1-745 | 15-759 | AA814415, AI378392, N45120, AI457108, AA809495, AA835661, AA831169, AI351546, | |
| | | | | | R43018, R44581, AI824326, and AW136327. | |
| HNNNB08 | 2408 | 957719 | 1-346 | 15-360 | AI467919, AI091495, AI219406, R66014, H12334, R71247, R26409, C18360, C18357, H53522, | |
| | | | | | H02244, R78907, AA368929, R67934, R77608, R38313, R34846, R62787, R10842, R67128, | |
| | | | | | R65605, AJ937850, AL046409, AW303196, AW274349, R24497, AI471481, AW301350, | |
| | | | | | AI613280, AW193432, AI375710, AI350211, AI341664, AI537955, AW193265, AI688846, | |
| | | | | | AI345654, W79504, AI365988, AI291268, AI291124, F29989, AI334443, AA350859, AI053672, | |
| | | | | | AW438643, AW406755, AI653886, AW419262, AI499938, AA649642, AI608771, AA133986, | |
| | | | | | AI357551, AI281881, AW338086, AA594145, R24492, AL041690, AI358229, AW406162, | |
| | | | | | R27623, AA719805, T07451, N25296, AA134367, R71050, AI198376, AI475569, AI340453, | |
| | | | | | AI344844, AA654771, AI963720, AA551503, AA613345, T06828, AA599129, AW302013, | |
| | | | | | AI061334, AA581903, AI635818, AI270117, AW079135, F19012, R62788, AA720758, | |
| | | | | | AI284640, AW339687, AI379719, AA533725, AI744995, AW276827, AA630925, AA630030, | |
| | | | | | AI133164, F18974, AW265009, AI262909, AA599920, AA714453, AA664015, AI583594, | |
| | | | | | AI754955, AI801600, F36306, AA179136, AW338500, F03525, AI887483, AA491814, | |
| | | | | | AI357288, AI888008, AI537030, AI564185, AI283911, AI289067, AL044940, AI568678, | |
| | | | | | AI801591, AA577906, AA720702, AI364809, AI708009, AA825357, AI002834, AA074130, | |
| | | | | | AL119691, AL042420, AA352803, AF150152, AW117750, M86143, AA525824, AI246119, | |
| | | | | | AA603445, AA280632, R77905, AA486414, AI889923, AA446657, AA649705, AA970213, | |
| | | | | | AA259245, AA973803, AA368936, AA621858, AI431303, AW088718, AI358343, AI049634, | |
| | | | | | R98967, AI635272, AI370074, AI370094, AA861959, AA713815, AI370057, AW265385, | |
| | | | | | AI471572, T29180, AA678436, AA364429, AL079812, AA513293, AA573020, R97934, | |
| | | | | | AI446464, AI313166, AA810318, AA491762, AA579063, AI827234, AI917156, AI053790, | |
| | | | | | AW338419, AI921188, AI697369, AA346458, AI370878, AI589230, AA629415, AA113376, | |
| | | | | | AI871722, AA639248, AL135405, AA437161, AA664535, AA126777, AA829223, AI888518, | |
| | | | | | AI434695, AW339568, AA641103, AA559290, AI963095, AI471543, AI754658, AI761471, | |
| | | | | | AA623002, AA225072, AW088058, AL048925, AW103981, AI339440, AA621704, AA602528, | |
| | | | | | AW303876, AC005281, AF077058, D83989, X53550, X75335, AF015157, M87919, U18391, | |
| | | | | | U57005, U18392, X55925, U18390, U18394, X54175, X54180, U57006, U18393, X55930, | |
| | | | | | I51997, S77605, U18395, X55926, U57009, U57008, X55932, X54178, U18398, U18387, | |
| | | | | | X54181, U18399, X54176, X55931, 870707, U67801, AF015151, X54179, AF015153, | |
| | | | | | AP000297, AL031668, X60459, AL078581, U18396, U57007, AF015147, X76629, AF015154, | |
| | | | | | AL023882, AF015149, U67827, M37551, AP000044, AP000112, AF015155, U80017, U18400, | |
| | | | | | AL117330, Z22650, Z84487, AC005914, AC004814, AC002350, AL121577, AC005535, | |
| | | | | | AC005245, U66059, U78027, X55927, U57004, AF060568, AF161343, L47228, Z98258, | |
| | | | | | AC004799, U73649, AL049692, AC008163, AC005815, AC004087, AL049745, AC004975, | |
| | | | | | AC004915, AC007278, X53548, U67231, X55928, AL035665, AF123462, AC005907, | |
| | | | | | AC004686, AL031777, X54177, X55924, AC005808, AC004841, AL035361, AL049759, | |
| | | | | | AC007193, AL121825, AL021398, X88791, AL035422, AL079333, AL035460, AP000358, | |
| | | | | | AL021069, AC021092, AC007919, AL049845, U91326, AP000151, AC004650, Z98941, | |
| | | | | | AP000143, AC008115, AC004765, AL008629, AC004455, AC004895, AL049562, Z498 16, | |
| | | | | | Z68332, AC007051, AC000114, AR042836, AC005844, AC002119, AC005034, AF001549, | |
| | | | | | S56773, AC007319, AC006160, AC004010, AL031388, AF023460, AC006511, AL136295, | |
| | | | | | AB020872, AC006512, AC005745, AJ003147, U67831, U67233, AP000010, AC004933, | |
| | | | | | AC007536, AL022238, X55922, AP000014, AC005391, AC006208, AC005837, AF095855, | |
| | | | | | AC006277, AC005370, AC007878, AL034420, AL033397, AC005335, AC005776, AP000114, | |
| | | | | | U95742, AL021808, AL049757, U62293, AL031848, AL035089, AL031286, Z85986, | |
| | | | | | AC006213, AC005257, AC006305, AB020867, AP000090, AC004099, AC006599, AC004884, | |
| | | | | | AC005516, Z69666, AF184110, AC007216, AL078463, AC007151, AL132992, AF053356, | |
| | | | | | M87916, AL050097, U72787, AL121892, AL021453, AL096701, Z93241, U62292, AC005541, | |
| | | | | | AL132985, AC006538, AP000502, AC004016, X55923, AL078477, AL049776, AC008072, | |
| | | | | | AC002299, AC003119, AC005866, Z86061, AC005821, Z93024, AC005696, AC007308, | |
| | | | | | AC005046, Z83846, AC009516, AL079340, U67222, AC007688, AC002544, AC010382, | |
| | | | | | AC004526, AC006040, AD000092, 543650, AC007541, AC008062, Z95114, U67226, | |
| | | | | | AL031255, AC001164, AC006128, Z82180, AL031685, AL136018, M19045, J03801, E01888, | |
| | | | | | E02193, AC004931, AC005251, AL049839, AC004217, AC006960, AC008059, AC002470, | |
| | | | | | AL133163, AC005358, AL133485, and U67229. | |
| HNNNA07 | 2409 | 899742 | 1-619 | 15-633 | | |
| HNIAB92 | 2410 | 683077 | 1-199 | 15-213 | AL039150, AL039085, AL039156, AL039108, AL039074, AL038837, AL039625, AL039648, | |
| | | | | | AL037726, AL038531, Z99396, AL039109, AL040992, AL039128, AL036973, AL045337, | |
| | | | | | AL037051, AL045353, AL036725, AL039564, AL039678, AL039659, AL039629, AL044407, | |
| | | | | | AL039423, AL042909, AL039410, AL039924, AL039386, AL039538, AL038821, AL036858, | |
| | | | | | AL037526, AL044530, AL036924, AL036196, AL039566, AL037639, AL045341, AL043422, | |
| | | | | | AL038447, AL038025, AL038851, AL036238, AL043445, AL037615, AA514190, AL037082, | |
| | | | | | AL039509, AL036117, AL036767, AL043441, AL043423, AL038983, AL036733, AL036679, | |
| | | | | | AL037077, AL049018, D80134, D59619, T23659, D80196, D80219, AL044125, AL039643, | |
| | | | | | T24119, AL045794, AI535983, AL037178, D51423, AL037027, H00072, D59787, T48598, | |
| | | | | | T24112, H00069, D80253, AL036964, C14227, AA631969, D59927, AL041233, AL040193, | |
| | | | | | AL041296, AL041086, AL043496, AL044162, T23947, AL037085, AL036268, AL041324, | |
| | | | | | AL043538, AL040621, AL041098, AL041163, AL041277, AL041358, AL047012, AL041346, | |
| | | | | | AL040155, AL041197, AL040463, AL047219, AL041227, AL047170, AL040119, AL041292, | |
| | | | | | AL041051, AL040322, AL041131, AL046330, AL041133, AL041159, AL041238, AL041142, | |
| | | | | | T11051, AL040625, AL040510, AL043467, AL044186, AL044037, AL040091, AL040128, | |
| | | | | | AL040168, AL040285, AL040342, AL040332, AL040617, AL045684, AL040745, AL040370, | |
| | | | | | AL043677, AL040839, AL041752, AL041168, AL043775, AL044165, AL043492, AL041602, | |
| | | | | | AL045920, AL037436, AL038838, AL044074, AL041635, AL040458, AL044187, AL040090, | |
| | | | | | AL040294, AL040329, AL040082, AL044272, AL041186, AL040148, AL041730, AL041523, | |
| | | | | | AL043627, AL037443, AL041374, AL040052, AL043845, AL039338, AL044064, AL039316, | |
| | | | | | AL043923, AL042096, AL043814, AL037335, AL043848, AL037435, AL041459, AL043570, | |
| | | | | | AL037343, AL037323, AL041577, AL044258, AL046850, AL038532, AL040768, AL037727, | |
| | | | | | AL046994, AL040414, AL040571, AL046914, AI142134, Z25782, AL041347, AL040464, | |
| | | | | | AL047057, AL047036, AL047183, AL040529, AL039744, AL046442, AL043444, AL037177, | |
| | | | | | AW013814, AL041278, AW452756, AW450376, AL036998, AL045857, AL044274, AL045671, | |
| | | | | | AL079878, AL041096, D80227, AL040444, AL134524, AW135155, AL040553, AL040253, | |
| | | | | | AL045753, AL046392, AW451070, AL036158, AL040263, AL036765, AL038822, D80366, | |
| | | | | | AL042135, AL036191, R47228, D80168, AL040576, AL045990, AL041955, AL039360, | |
| | | | | | Z25783, AL040255, AI547295, AL042898, AL040149, AL036999, AL044199, AL047163, | |
| | | | | | AL045725, AL037279, AL040472, AR062871, AR064706, Y11449, AR063812, AR017907, | |
| | | | | | I84553, I84554, A95051, AR062872, AR062873, A92133, I06859, A20702, AI8050, A23334, | |
| | | | | | A75888, I70384, A02712, A60111, A23633, AR007512, A43189, A43188, A20700, AI8053, | |
| | | | | | E04616, AR043601, AR064707, A84772, A84776, A84773, A84775, A84774, AR067731, | |
| | | | | | A35536, A35537, AR067732, A02135, A04663, A02136, A04664, A58522, A91750, I19525, | |
| | | | | | AI1245, E13740, I66495, I66494, I60241, I60242, I13349, I66498, I66497, I66496, I66486, | |
| | | | | | I66487, U87250, A02710, E12615, AR035193, A07700, AI3392, AI3393, AR027100, I28266, | |
| | | | | | I21869, I08051, A70040, AR054723, Y11447, AR022240, AR051692, D88984, M28262, | |
| | | | | | Y11458, A06392, I68636, A91754, AR031374, A49700, AR031375, A58521, AR020969, | |
| | | | | | Y17188, I18371, AR025207, X68127, A97211, A38214, A44171, I56772, I95540, AR018924, | |
| | | | | | A63067, A51047, A63064, AR018923, A48774, A63072, A48775, AR068507, AR068506, | |
| | | | | | AR015960, AR000007, AR015961, A80951, Y11445, AI0361, X58217, A67220, AF019720, | |
| | | | | | A25909, S70644, D44443, AF130655, AR036905, AJ244003, AJ244004, AJ244005, A98767, | |
| | | | | | A93963, A93964, I63120, X73004, AR038762, I00074, D14548, A04442, A04441, A04448, | |
| | | | | | A04447, I19516, A95052, AB007195, AR043602, AR043603, A95117, A23998, AR000006, | |
| | | | | | A58524, A58523, AR008430, A85477, A85396, AR066482, D34614, AR037157, A86792, | |
| | | | | | A93016, A91965, I12420, AR054109, AR035975, AR035977, AR035978, AR035974, | |
| | | | | | AR035976, AR038286, A60957, A64081, A24783, A24782, A28040, A81878, I92483, S78798, | |
| | | | | | AB012117, I03343, A60968, E00523, Z96142, X15418, Y11923, AF156294, AF156296, | |
| | | | | | AR036903, D28584, I01992, A60985, A60990, E14304, A60987, I19517, A27396, A76773, | |
| | | | | | A22413, I25027, E16590, I26929, I44515, I26928, I26930, I26927, A58525, A49045, E16678, | |
| | | | | | A82653, I25041, E16636, AF118808, X73003, AF156300, AI5078, AJ230906, AJ230872, | |
| | | | | | A22734, I03664, AF096793, X07094, Y11926, I03665, I02252, I04204, AJ230933, V00745, | |
| | | | | | AI8722, AF096810, X83978, A34724, I49890, I44516, A51384, I00077, E03165, E02221, | |
| | | | | | E01614, E13364, S69292, A92636, X92518, I82415, I82416, I00079, A58526, A91753, and | |
| | | | | | I07888. | |
| HNJAB73 | 2411 | 764172 | 1-536 | 15-550 | | |
| HNIAB26 | 2412 | 974750 | 1-374 | 15-388 | AI241225, AI497916, AI807817, AA287075, AA410717, W69383, W69382, AI167280, H75982, | |
| | | | | | D31247, AA428123, F06544, T78145, AA419308, AA404625, N41831, AA339686, N56216, | |
| | | | | | D31349, AA284532, AI672472, AI366704, AW130807, AI590376, AI274769, AI370149, and | |
| | | | | | AI357616. | |
| HNBVH02 | 2413 | 917719 | 1-272 | 15-286 | AI128931, N59410, H71850, H68617, AW026005, H72896, R89336, R89422, AI890794, | |
| | | | | | AL120188, AL117354, Y10196, and AC005535. | |
| HNBVC03 | 2414 | 922402 | 1-384 | 15-398 | AA455727. | |
| HNBUQ06 | 2415 | 933673 | 1-633 | 15-647 | AI003929, AI203393, AI434650, AI741385, AI239480, AA931467, AI819627, AW183189, | |
| | | | | | F31423, F35609, AA905778, F21790, and AW105048. | |
| HNBUO01 | 2416 | 914361 | 1-520 | 15-534 | AA501715. | |
| HNBUI10 | 2417 | 961734 | 1-483 | 15-497 | AA954976, AI017449, T89711, W69257, AI150048, AA534436, T89631, AI261657, | |
| | | | | | AW166311, AI627633, AA947856, W69170, AI831660, AI473887, AA909065, AI140835, | |
| | | | | | AA862617, AW449791, AW445047, T89808, and AI795971, | |
| HLWFJ69 | 2418 | 754476 | 1-398 | 15-412 | R76168, and R39664. | |
| HLWFB01 | 2419 | 915399 | 1-481 | 15-495 | AW451092, AI653216, AA825520, AA828034, AW449785, AA766435, AI379959, AA811081, | |
| | | | | | AA626324, AA251105, AI281315, AI281259, AA252357, AI857494, AA767770, AA961612, | |
| | | | | | AA884914, AI910531, AA883131, and AL117637. | |
| HLWEH10 | 2420 | 963548 | 1-600 | 15-614 | N27780, H55265, AC004527, and AL078614. | |
| HLWEA90 | 2421 | 787632 | 1-438 | 15-452 | AA397990, W65316, and AC010582. | |
| HLWDZ31 | 2422 | 917643 | 1-880 | 15-894 | AA758158, AA143536, AA311020, AW403447, W63569, AA004530, AA683390, N29003, | |
| | | | | | AA209228, H28875, AA305513, AL120940, W77945, AA582670, AA297602, C18645, | |
| | | | | | AW402233, R23541, AA132404, AI752266, AA115891, T19100, AA442767, AI768639, | |
| | | | | | AW183765, AI816897, W38538, AI829074, R19741, T34258, H12133, W44478, F12975, | |
| | | | | | R61604, N34198, AI769388, T34524, AL121186, Z30133, T31614, H06006, T34085, | |
| | | | | | AW188331, AA429756, R80093, T28136, T75286, AI767235, AA126374, T34569, T34148, | |
| | | | | | AI908731, AA864619, F07189, H12905, N33792, T85612, AI685398, T31638, H62867, N69429, | |
| | | | | | N20135, H62527, AA352184, H82866, H09563, T31635, AI224550, AW363446, AA704311, | |
| | | | | | H96883, R10946, N84652, T52635, W56201, D82488, D82543, R26017, AI274027, D82466, | |
| | | | | | R10524, N36374, AI283942, D82428, AA962407, N90094, AA380459, W32740, N36598, | |
| | | | | | AI224548, C06105, AI739339, AA132405, W27707, AA375383, F07315, F05953, AA310081, | |
| | | | | | T78753, AA004531, F05952, AI023176, AI299400, R85616, W20495, H84839, T25453, | |
| | | | | | N83818, T27432, AA054436, T25450, H63569, R53662, AW381573, AA694564, AA130964, | |
| | | | | | AL008725, AF107406, D17446, and S83440. | |
| HLWDD01 | 2423 | 915378 | 1-419 | 15-433 | AI266250, AW069227, AI634187, AI457313, R83014, AA610255, R16565, R48980, AI254508, | |
| | | | | | AI251696, AA715508, AA601673, AW090629, AL031296, AC004851, AC004031, AF207550, | |
| | | | | | AL021367, AB022785, AP000065, AL110502, AF165926, AC005280, AC005253, AL009181, | |
| | | | | | AC005828, AL049780, AC004531, U52112, AC005081, AC004890, AL031281, Z97054, | |
| | | | | | AL133246, AC002314, AC006537, AC005940, AD000671, AC008124, AP000553, AF157814, | |
| | | | | | AC004771, AL096791, AL020997, Z95115, AC005324, AC005669, AF134726, AC005209, | |
| | | | | | AB026898, AC006965, M89651, AC004812, AC005291, AP000557, AL031255, AC005146, | |
| | | | | | AC005071, AL109798, AC006241, AC006146, AC002477, AC005702, U80017, AC006449, | |
| | | | | | AJ006216, U73629, AC009516, AC007386, AC004770, AF001549, AL022322, AP000509, | |
| | | | | | D84394, AC005785, Z98044, U07563, AC007283, AC005067, AC007227, AC005231, | |
| | | | | | AL035458, AC002472, AC005342, AC007676, AB017602, AC007055, L78810, AC006539, | |
| | | | | | AC005914, AL023584, AC004560, AC004859, AC003982, AB002353, AL031228, AP000359, | |
| | | | | | AC005086, AC006946, AP000694, AC000025, AC008545, Z95331, AC002115, AC007934, | |
| | | | | | AL034420, AC006530, and AL035659. | |
| HLWDB48 | 2424 | 856512 | 1-670 | 15-684 | N42593, AA376825, AW104181, AI215001, N83895, AA374608, AW293450, AB020685, and | |
| | | | | | M77174. | |
| HLWCP60 | 2425 | 739801 | 1-419 | 15-433 | AA053452, T07266, and AB020631. | |
| HLWCN93 | 2426 | 791854 | 1-682 | 15-696 | R11514, R10440, R97177, AI890794, AL117694, U07563, L47334, AC005023, D83253, | |
| | | | | | AL109802, Z84484, AP000009, AF001549, AC002978, Z84480, AC008989, Z93930, Z98742, | |
| | | | | | AC005071, AC007993, AL031319, U89337, Z98044, AC002070, U91318, AF001552, | |
| | | | | | AC007030, AC003046, AP000299, AL121657, AF039907, AC007450, AF190465, AC005722, | |
| | | | | | AC005602, AL035410, AB000882, AC004750, AC006581, AC003009, AP000229, AP000113, | |
| | | | | | AP000045, AC006543, AL035073, AC003683, AC002400, AC006312, AC008372, AC005409, | |
| | | | | | Z82206, AC007227, AP000555, AC016025, AF053356, AL109967, AC006450, U63721, | |
| | | | | | AC004953, AC005792, AC007773, AC004751, AP000502, AL009181, AP000689, AC006544, | |
| | | | | | L48038, AC004878, AC006030, Z93244, AC004832, AP000696, AB003151, AC003101, | |
| | | | | | AL035587, AL023284, AC004967, AF030453, and AC005231. | |
| HLWCN50 | 2427 | 723787 | 1-416 | 15-430 | N47899, H53415, and AL049742. | |
| HLWCF83 | 2428 | 781069 | 1-660 | 15-674 | W33061, R98276, and AC004022. | |
| HLWCF33 | 2429 | 687995 | 1-489 | 15-503 | AA121582, AW368442, AA188145, AB011132, and U90333. | |
| HLWCE47 | 2430 | 720156 | 1-599 | 15-613 | AI207452, AI936201, and AA005229. | |
| HLWCB93 | 2431 | 623773 | 1-546 | 15-560 | AW082490, AW157667, AI032875, AC005899, AC005231, AL109623, AC006449, AL049539, | |
| | | | | | AL049779, Z98941, AC006312, AC004383, AC004491, AJ003147, AC007157, AL139054, | |
| | | | | | AC006285, AC006450, AL031276, AC005792, AC005015, AC005086, AF196779, AC002470, | |
| | | | | | AC002287, AC004913, AC004876, AL034549, AL133355, AL035587, AP001054, AL035413, | |
| | | | | | AL109827, AC007546, AL049780, Z98200, AL109984, AC007151, AC005081, AC004813, | |
| | | | | | Z85986, Z84469, AC007308, U91323, AC005902, Z84487, AL049709, AC007055, AL022336, | |
| | | | | | AL031281, AF024533, AC005412, AC005585, and AC005484. | |
| HLWBX42 | 2432 | 917920 | 1-445 | 15-459 | AA427651, AI143307, AW262122, AA703186, AI659343, AI341865, AI336119, AW237136, | |
| | | | | | AI298482, AI090247, AI333715, AI803140, AA579615, AI056488, AA779669, AA620404, | |
| | | | | | AI089588, AI278727, AW090136, AI811913, AA427568, AI911844, H91654, AI610128, | |
| | | | | | AW129695, AA593874, AI870923, AA651783, AA112592, AA058719, AI400566, AA506145, | |
| | | | | | AA622437, AA478461, AA862138, AI784558, AI589813, AW007077, AW169327, AI377030, | |
| | | | | | AW438992, AW328677, AA112591, and AC005606. | |
| HLWBW29 | 2433 | 690515 | 1-375 | 15-389 | H71264. | |
| HLWBT09 | 2434 | 887877 | 1-405 | 15-419 | | |
| HLWBS62 | 2435 | 743406 | 1-627 | 15-641 | AA214571, AI341246, AI686298, AI652114, W72303, AW391831, AW445137, AI672184, | |
| | | | | | AI872269, AA805368, AA765438, AI865260, AI867970, AI364061, AA653004, AA283893, | |
| | | | | | Z41015, AI652648, T82714, AW274161, AI964056, AC005203, and AC006111. | |
| HLWBR85 | 2436 | 784261 | 1-431 | 15-445 | AI984203, W67492, AA883778, W67493, and AF086252. | |
| HLWBQ91 | 2437 | 790072 | 1-449 | 15-463 | N91340, AF174590, AF199355, AF176699, and AL022395. | |
| HLWBJ65 | 2438 | 747784 | 1-526 | 15-540 | AA424081, and AL049611. | |
| HLWBH92 | 2439 | 791355 | 1-443 | 15-457 | AA457580, and R79039. | |
| HLWBG78 | 2440 | 888068 | 1-395 | 15-409 | T89902, H30889, H22380, and H43169. | |
| HLWBF48 | 2441 | 721530 | 1-367 | 15-381 | AI016222, R14088, AW189819, and Z73965. | |
| HLWBE74 | 2442 | 887967 | 1-336 | 15-350 | | |
| HLWBC21 | 2443 | 869611 | 1-850 | 15-864 | AI625008, W81042, AI161322, AI913667, AI284153, AA194209, AI654706, N51502, | |
| | | | | | AA194051, AW205155, AI739408, AI380903, AA025476, AW392596, AW385770, AI240820, | |
| | | | | | AW135136, AI697491, AW204701, AA680407, AA478609, AI916011, AI242934, AI497867, | |
| | | | | | AA341635, AA025395, AA693802, AA521100, AI392857, and AC002400. | |
| HLWBA80 | 2444 | 720397 | 1-484 | 15-498 | N41645, AW293280, AA287310, D86324, AF074480, AF074481, AB013814, Y15010, and | |
| | | | | | D21826. | |
| HLWBA27 | 2445 | 931387 | 1-614 | 15-628 | W88551, AW404842, AA292392, N41305, AA292935, N41626, AA491168, AA444087, | |
| | | | | | H01356, R76165, AA001523, W45105, N28012, N42038, AA084557, AA296707, AW402649, | |
| | | | | | AA069991, AA293237, AA428716, H80482, AA551614, AA297430, AA298686, AA128142, | |
| | | | | | R75992, R77570, H68568, AA627682, AA405634, R89661, H28321, R78029, AI908992, | |
| | | | | | N45084, H48883, AA298929, AA151090, AA055024, AA122427, AA296825, H91109, | |
| | | | | | AA315750, R83924, AI218665, H72458, R08383, AA132173, AA027794, AA046903, | |
| | | | | | AA077970, AA296925, W02601, AA297915, AA297486, AA297626, AI582212, AW170331, | |
| | | | | | AA297026, H50802, N33748, AA297426, H24598, AA297282, AA296904, AA419378, | |
| | | | | | AA296946, and AF070657. | |
| HLWAW86 | 2446 | 785395 | 1-522 | 15-536 | AA460460, AA969196, and AA885014. | |
| HLWA509 | 2447 | 625419 | 1-223 | 15-237 | AA602628, AA352444, AA363279, AC005969, AC004087, AL035414, AC006511, AL109627, | |
| | | | | | AC004167, AL034430, AL133246, AC002543, L78833, AB022785, AC007055, AL049692, | |
| | | | | | AP000032, AC005971, AP000065, AC005747, AC005726, and AL031311. | |
| HLWAR08 | 2448 | 959139 | 1-378 | 15-392 | AA078617, AJ133128, and AF160798. | |
| HLWAO67 | 2449 | 751503 | 1-509 | 15-523 | H82640. | |
| HLWAL31 | 2450 | 948928 | 1-110 | 15-124 | | |
| HLWAJ18 | 2451 | 666281 | 1-634 | 15-648 | H15126, AB006621, and AF043644. | |
| HLWAF02 | 2452 | 919714 | 1-1216 | 15-1230 | AW003851, AW088297, AI004165, AW269624, AW073468, AA577265, W72446, AI863050, | |
| | | | | | AI421770, AA421538, AI075847, AA700334, AA417216, AI240802, AI190446, AA780709, | |
| | | | | | AA483528, AI569614, N94131, AA810760, R12682, W76345, AA814987, AI358895, | |
| | | | | | AA872030, AA730737, N98502, AI690632, AI680891, R43271, N69310, R94006, W31068, | |
| | | | | | AA864933, N58801, F10192, R16421, H99624, AI469697, AI017646, AI370275, AL036104, | |
| | | | | | R93962, AA295338, AA357137, T52302, T52379, Z41369, F09802, H26767, AI370655, | |
| | | | | | AA411262, AA318970, W74385, AI094731, AA411187, AF004539, AI344163, AI609867, | |
| | | | | | AI308040, AI311256, AI271279, AI224267, AW384040, AW274178, AA741082, H26877, | |
| | | | | | AW302337, AI284896, T65221, and R06090. | |
| HLWAE09 | 2453 | 789030 | 1-451 | 15-465 | R20247, AI200505, AW004679, AA157883, AA314101, F36978, AA225574, AW305024, | |
| | | | | | F31978, AW005776, AW337620, AW028286, AI022592, AI039214, AI797665, AW080293, | |
| | | | | | N53067, AA131444, AA126253, AA724826, AA428376, AA418101, AW197423, AA865238, | |
| | | | | | H10347, AA618216, AA069136, AA437116, C16904, F22050, AA147181, AA393974, | |
| | | | | | AI970244, T11676, H56645, R58957, AA069174, N62528, AI908026, AW303992, AA069297, | |
| | | | | | H15057, AA031896, AA552427, and AL050260. | |
| HLWAD57 | 2454 | 734655 | 1-450 | 15-464 | AA213840, AI348503, AI680719, AA401344, AI868950, AI565065, AW058511, AI476408, | |
| | | | | | AI298543, AI680824, AW207207, AA970373, AI084988, N74713, N22538, AL049651, | |
| | | | | | AL133371, AL079352, Z83745, AC002416, AC006928, AL033539, and Z83848. | |
| HLWAD33 | 2455 | 702317 | 1-454 | 15-468 | AI220952, R21518, AC004675, and AF088219. | |
| HLWAD32 | 2456 | 699158 | 1-289 | 15-303 | | |
| HLWAD02 | 2457 | 919725 | 1-529 | 15-543 | AI500547, and AW276592. | |
| HKZAH11 | 2458 | 965175 | 1-809 | 15-823 | AI653262, AI637996, AI538731, AA808027, AL036361, AI536685, AI811344, AW087445, | |
| | | | | | AA470491, AI499381, AI866090, AI608936, AI475371, AI270183, AI491852, AW088793, | |
| | | | | | AI590415, AL079963, AW132056, AI284084, AI612913, AI537677, AW081036, AW102785, | |
| | | | | | AL134259, AI818980, AW235482, AI802542, AL042745, AI635461, AL042382, AW051258, | |
| | | | | | AI453322, AI271786, AW082113, AI637584, AI819976, AI698391, AI281773, AW150578, | |
| | | | | | AI524671, AI926367, AI280637, AI559296, AI862139, AI491775, AI280747, AI890833, | |
| | | | | | AI926790, AI564719, AI863241, AI932794, AI611738, AI955917, AI619502, AI677796, | |
| | | | | | AW129659, AW026882, AW104724, AI610402, AI433 157, AI702073, AI978703, AI619607, | |
| | | | | | AW192687, AI633125, AI922365, AL121365, AI570989, AI697321, AI521560, AI890223, | |
| | | | | | AW080746, AI929108, AI620003, AI439762, AI269205, AI889376, AW081797, AI632408, | |
| | | | | | AI499285, AI815855, AI648509, AI254731, AL119863, AI866457, AL036403, AW129916, | |
| | | | | | AI872545, AI571909, AL045500, AI569583, AI798456, AI440448, AI624206, AI696612, | |
| | | | | | AI922901, AI274508, AI934259, AI921248, AI570807, AI431975, AI783792, AW198090, | |
| | | | | | N33175, AI799183, AI285735, AI287326, AI538085, AI567769, AI889189, AW071349, | |
| | | | | | AI318280, AI636456, AI815232, AI536638, AW151485, AI452876, AW262565, AI634751, | |
| | | | | | AI439256, AW075381, AI609331, AL042744, AI468872, AW104827, AI445025, AA225339, | |
| | | | | | AI679174, AW074172, AL036780, AI355827, AI627988, AI648663, AW150453, AI670009, | |
| | | | | | AI432969, AW118518, AW073865, AI174394, AA806720, AI871697, AL042628, AW074161, | |
| | | | | | AI923370, AI281772, AI590227, AL039086, AL036901, AW020561, AL036736, AI816010, | |
| | | | | | AI874261, AL036265, AI440239, AI285448, AI865931, AI538259, AI654276, AI269862, | |
| | | | | | AI933589, AI491897, AW080090, AI625079, AL047763, AW148363, AI684234, AW192652, | |
| | | | | | AI434468, AW160376, AL044207, AI873644, AI249800, AW190042, AI640873, AI445432, | |
| | | | | | AI521040, AI499463, AI859511, AI630928, AI571439, AI631107, AI636588, AW080327, | |
| | | | | | AI922676, AI567993, AI687728, AW088903, AW076093, AL043975, AI567128, AW162071, | |
| | | | | | AI801460, AI591420, AI539771, AI500523, AI686817, AL048871, AI306613, AI247293, | |
| | | | | | AL040241, AI537273, AW118496, AI819326, AW075667, AW166903, AI634737, AI539780, | |
| | | | | | AI697137, AI591075, AW148408, AL045266, AI572021, AI682798, AI634345, AI818683, | |
| | | | | | AI435641, AW117746, AI812015, AI610690, AI921379, AI537024, AW169671, AI801152, | |
| | | | | | AI796743, AI476046, AI886753, AI687127, AI828682, AI610307, AI687362, AI620284, | |
| | | | | | AI252023, AI918435, AW050850, AW193530, AI609589, AW073270, AI457369, AI286256, | |
| | | | | | AI284517, AI431327, AI358107, AI538116, AI247193, AW166583, AI567940, AI923124, | |
| | | | | | AI682971, AI469532, AF177401, I48979, I89947, I48978, AL133560, AL050277, AF113019, | |
| | | | | | A65341, AF113694, AF111851, AL122050, AL122110, AL117435, AL137459, Z82022, | |
| | | | | | A77033, A77035, AF090903, S68736, A08913, AL137557, AL137550, AL122121, A08916, | |
| | | | | | AL137271, AF146568, AF090900, A08910, Y11587, AL110221, AF158248, E07108, | |
| | | | | | AL117457, A58524, A58523, I89931, AL050149, AF090901, I49625, AF183393, AL122098, | |
| | | | | | AL050393,AR011880, AF113677, AL133080, AL122093, AF125948, AF104032, AL110225, | |
| | | | | | X82434, A08909, Y16645, I33392, AL117460, AL137463, X72889, AJ238278, U35846, | |
| | | | | | AF113690, AL133640, AF078844, X63574, AF090934, AL049452, AF017437, AF090943, | |
| | | | | | AF017152, AL133075, AF113691, AF106862, AF113013, AL049314, AL117583, AL133606, | |
| | | | | | AF118094, AL080124, AF087943, AF113699, E02349, AL117585, AL050138, AL133565, | |
| | | | | | AL122123, E03348, E07361, AF113689, AL049382, AL096744, Y11254, AJ000937, S78214, | |
| | | | | | AL050146, AF091084, AL049430, AR059958, AL133016, AL049466, U80742, AL133113, | |
| | | | | | AL049938, AL049283, AL133557, AL050116, U42766, AL110196, X84990, L31396, | |
| | | | | | AL050105, AF090896, AF079765, L31397, AF118070, AL080159, AB019565, AL080060, | |
| | | | | | AL049464, AF113676, AJ242859, AF125949, AF118064, AL133093, AL050024, AL137538, | |
| | | | | | AL080137, AL117394, AL137527, AI2297, A93016, U00763, A03736, X65873, I03321, | |
| | | | | | AL133072, AL049300, AF097996, AL137283, AL137521, U67958, AF026124, U91329, | |
| | | | | | X96540, AL122049, A08912, X98834, U72620, X70685, AL080127, X93495, AF067728, | |
| | | | | | AL137429, Z37987, AL137533, AL110197, AL137648, A93350, I26207, AJ012755, AF111849, | |
| | | | | | AL122118, AF061943, AF111112, AF057300, AF057299, AF026816, AL050172, B08263, | |
| | | | | | E08264, AL110280, I42402, AL137480, I09360, AF185576, E05822, I00734, AF119337, | |
| | | | | | E00617, E00717, E00778, AL133077, A07647, E15569, AR013797, AR000496, AL137560, | |
| | | | | | U39656, Y14314, AL133568, AR038854, AJ006417, AL137478, S61953, U49908, AF153205, | |
| | | | | | I66342, AL133014, E02221, AR038969, AL080148, AF000145, AL133067, U96683, U68387, | |
| | | | | | AF008439, Y09972, AL137476, AL137523, AL137292, AF081197, AL133104, AL137529, | |
| | | | | | AR020905, AL137556, AF079763, AL137526, AL133665, Z72491, AL122111, AL117440, | |
| | | | | | AF003737, AC006371, AF106827, U58996, I17767, AF067790, A08911, E04233, AL137294, | |
| | | | | | A45787, AL137488, U78525, X87582, AL133098, AF162270, Y07905, AF081195, AF132676, | |
| | | | | | AF061836, X81464, Y10655, AL080074, AF061981, AL023657, I09499, X62580, AF061573, | |
| | | | | | M30514, L30117, AF139986, AF095901, and AE126247. | |
| HJMBX19 | 2459 | 668568 | 1-405 | 15-419 | R32287, AA455162, AA456525, AA135649, and AI083959. | |
| HJMBS77 | 2460 | 772101 | 1-314 | 15-328 | AW104918, and N62731. | |
| HJMBS10 | 2461 | 964464 | 1-595 | 15-609 | T92671, AP000309, AP000048, and AP000116. | |
| HJMBQ90 | 2462 | 788834 | 1-543 | 15-557 | AI912028, AW205965, AW204265, AA039572, and AA641146. | |
| HJMBN02 | 2463 | 919737 | 1-470 | 15-484 | AA557385, and AC005214. | |
| HJMBI93 | 2464 | 929114 | 1-390 | 15-404 | AI090083, AI829485, AW205724, AA772573, AA845116, AA074956, AA115510, AW190595, | |
| | | | | | AA022952, AI141599, AA628482, AI051949, AW371164, AI097055, AI890975, AI337839, | |
| | | | | | AA736989, AI081563, AI041864, AI393834, AI469272, AI342319, AW338241, AW264160, | |
| | | | | | AI583596, AI354880, AI183444, AI936936, AL047697, AA700866, N94495, AA543017, | |
| | | | | | N93380, AI493628, N32842, AA026953, N35378, AI198542, AI033873, AI034219, AI092332, | |
| | | | | | AW079884, AI862812, AA830087, T15721, AI268105, N48023, AI280189, AI766704, W79295, | |
| | | | | | AA771789, AA693396, AW081435, AI923501, AA789217, AI690543, AA704989, N69040, | |
| | | | | | AA192860, AI758815, R39361, R97800, AI820003, AI378456, AI672120, D62879, F05041, | |
| | | | | | AI904662, AI266086, AI914468, AA699763, AI907483, AA788953, AA923476, N79464, | |
| | | | | | AA888029, AI355472, W81453, AI634896, T41193, AA649798, AA649807, R01135, | |
| | | | | | AA862997, AI302880, Z39546, N69916, AA343461, AI221819, AI266004, AA939287, D62955, | |
| | | | | | AA526695, T32169, H23424, AW152231, AI829263, D79898, N40473, AI040552, AI933545, | |
| | | | | | AA484853, AA913558, H00652, AW409609, T24050, AW002183, AW020740, D79437, | |
| | | | | | AA992887, AA682612, AA888356, R38439, H05312, T31408, T31832, F03611, AA026821, | |
| | | | | | T40331, AI220939, AA501526, T40800, AA987725, AA643534, AA894839, T31460, AI458807, | |
| | | | | | T31396, T24820, N66339, T34745, AA114833, AA676395, W79282, AW384647, AW384682, | |
| | | | | | AW384661, AW384674, AW384672, AW384666, AW384683, AI129830, AW196003, R46594, | |
| | | | | | AI815016, AA055008, AI094056, H00741, AI926449, AI472549, AA193064, N91240, D79446, | |
| | | | | | AA856615, AI538772, AI114447, AL110153, and AF113701. | |
| HJMAV93 | 2465 | 828110 | 1-431 | 15-445 | AI828559, N33343, AA512946, AW242837, AA776686, AA908183, AW402709, AA761704, | |
| | | | | | AI088906, AA035207, AA045460, AI418843, AI362157, AW183346, R05828, AA627883, | |
| | | | | | AA026236, C20746, and AA349140. | |
| HJMAU07 | 2466 | 961623 | 1-488 | 15-502 | AI631661, AI656482, AI655799, AW168207, AI745171, AI739521, AW073890, AW161625, | |
| | | | | | AW157477, AW157176, AW002703, AW090343, AA738238, AI906428, AW293743, | |
| | | | | | AW328076, AW328075, AA249074, AI991472, AI653282, AI652717, AI654896, AW393827, | |
| | | | | | AW393832, AI203310, AW390900, AA776677, AW390889, AA381902, AW364462, N93494, | |
| | | | | | AW160794, AW163150, AW161159, AI802780, AA974383, AB016089, AF201422, AB016092, | |
| | | | | | AC004493, AB016088, and AF161338. | |
| HJMAQ86 | 2467 | 785410 | 1-544 | 15-558 | AA082617, AA082622, T49308, and U73643. | |
| HJMAQ14 | 2468 | 657579 | 1-465 | 15-479 | R25621, C04010, and C03959. | |
| HJMAJ91 | 2469 | 811222 | 1-439 | 15-453 | H96543, AA043831, AW250847, AI741631, AI741642, T72311, AI761422, AI992202, | |
| | | | | | AI143894, AA194496, AA635765, AI992194, AA983373, AI890651, AI341988, AA336193, | |
| | | | | | AI081852, C02956, T84215, D79135, AI050718, AA424281, AA348739, AA194697, | |
| | | | | | AA029252, W51957, AI475478, AA370818, AA349624, N80191, AA216646, AI805451, | |
| | | | | | AA907523, AI248525, AA565574, W48641, AA609560, AI077909, AA378570, AA112530, | |
| | | | | | AW408361, AA161054, AI709345, AI497917, AI074107, AA150947, W38482, AA279104, | |
| | | | | | AA654134, AI131385, H08872, AL138451, W07568, and C03234. | |
| HJMAI62 | 2470 | 742612 | 1-343 | 15-357 | AI927723, AA430100, AI749184, AA493808, AI755214, AI754567, AI061313, AI797998, | |
| | | | | | AI355246, AI299442, AI754105, AI090334, AI336771, AA659923, AA904275, AI732458, | |
| | | | | | AA127499, AA630854, AA669238, AW172727, AL048060, AI821881, AI821918, AI049845, | |
| | | | | | AL046519, AW272815, AI791457, AI732501, AA526415, D44672, AI859438, AI283938, | |
| | | | | | AW167154, AL079553, AW238495, AW439703, AA297208, AA714110, AI076236, R83585, | |
| | | | | | AW008184, N42508, AA468322, AI801563, AA577755, AA480486, AW410983, N38991, | |
| | | | | | AA593537, AI598003, AW021608, AI686703, AW407632, AA535216, R94909, AW002831, | |
| | | | | | AA470496, AI078409, AI274691, AW167799, AW151247, AA297666, AA469230, AA309156, | |
| | | | | | AA600202, AI049643, AI620992, AI862716, AI884404, AC002325, AC001644, AC005233, | |
| | | | | | AC005768, AL121603, AC004999, AC005484, AC005031, AC005682, AC005697, U95739, | |
| | | | | | AP000501, AC004878, AC006312, AF111168, AL121653, AL021391, AC004910, Z99716, | |
| | | | | | AL132712, Z94721, AP000355, AC005619, AL050318, AC004033, AC005565, AF196779, | |
| | | | | | AP000248, AL121748, AC004253, L44140, AC005261, AD000671, AF165926, AL121782, | |
| | | | | | AC002400, M89651, AC005391, AL035405, AC005924, AC005703, AP000030, AL031733, | |
| | | | | | AC004099, AL031255, M37468, AC004771, AC004020, AC005632, AL035659, AC005759, | |
| | | | | | AL117337, AF064861, AL121658, Z68756, AC002126, AC004859, AC006953, Z93023, | |
| | | | | | AL031311, AC007868, AL121580, AL031432, AL035071, AL109952, AC002477, AL022316, | |
| | | | | | AC005037, AC005074, AL008582, U80017, AF001548, Z93930, Z68322, AF205588, | |
| | | | | | AL022336, AL035422, AF003529, AC004228, AF023268, AC005215, AC005180, AC005231, | |
| | | | | | AC002991, AC005725, U52112, AC007055, AC002350, AC005081, AC003663, AC007766, | |
| | | | | | AC008044, AF134726, AC003982, AC007421, AC007686, AD000812, AC006241, AJ236701, | |
| | | | | | AC006449, AL117355, AC006441, AC005696, AC004686, AC004148, AF039906, AC007637, | |
| | | | | | Z86090, AC003043, Z94865, AL022315, AP000301, AC004805, AL035697, AC004150, | |
| | | | | | AC002558, AC005972, AC005695, AC008009, AP000503, AC016027, AC006515, AL031662, | |
| | | | | | AC006468, AC000025, AC006261, AC005914, AC005933, AC006285, AL021877, U78027, | |
| | | | | | AC004659, AC006530, U92032, Z84489, AL035423, Z84466, AC005331, AL022165, | |
| | | | | | AF165088, AC005516, AC005800, AP000251, AC007666, AC007225, AD000092, Y10196, | |
| | | | | | AC005192, AC004491, AL049569, AL109623, AF187320, L78810, AP000359, AC002470, | |
| | | | | | AC004983, AP000252, AC006480, AC006139, AC005911, AC005193, AL031680, AC005899, | |
| | | | | | AL020997, AC007308, AL031575, AC006211, AL096791, AC000353, AC006013, AC005520, | |
| | | | | | AP000350, AP000065, AC002985, AL021453, AL008718, AL035698, AC007227, AC005527, | |
| | | | | | AL031602, AC005529, AL096817, AL049631, AC016830, AL050308, AC005736, AC007546, | |
| | | | | | AF042091, AL034420, AC004895, AC004643, U85195, AC005618, AL022318, AL021154, | |
| | | | | | AC000134, AC005534, AL009181, AC006370, AL049576, AC007298, AC004922, AP000008, | |
| | | | | | AC004950, AC010077, AL022721, AF024534, AL137191, AC005837, AP001055, AL031584, | |
| | | | | | AC006317, AC005102, AC005089, AL031985, U91326, AC002316, AC005325, Z83844, | |
| | | | | | AC002306, AC007066, AL096701, AE000658, AL022476, AL135744, AL049780, AL133448, | |
| | | | | | AC002565, AC005701, and AC004963. | |
| HETLF29 | 2471 | 909762 | 1-404 | 15-418 | AA960957, AI001155, and AC004664. | |
| HETJY68 | 2472 | 752542 | 1-598 | 15-612 | AW002051, AI634267, AI243174, AA436186, AA436311, AI431959, AI061116, AA761592, | |
| | | | | | H06947, N23373, AA086090, and AA947734. | |
| HETID12 | 2473 | 655199 | 1-497 | 15-511 | AA054591, and AJ090055. | |
| HETHO01 | 2474 | 921649 | 1-420 | 15-434 | H73781, H73794, and AA250749. | |
| HETHB18 | 2475 | 529467 | 1-233 | 15-247 | | |
| HETFF68 | 2476 | 529587 | 1-193 | 15-207 | | |
| HETFF43 | 2477 | 529589 | 1-190 | 15-204 | AC002430, and AC007384. | |
| HETDU61 | 2478 | 742157 | 1-407 | 15-421 | R09668, W27308, AI017666, and T40006. | |
| HETDA25 | 2479 | 677490 | 1-323 | 15-337 | T75438, and AC005041. | |
| HETCO27 | 2480 | 533536 | 1-101 | 15-115 | AC004525. | |
| HETCH01 | 2481 | 961038 | 1-577 | 15-591 | T63959, AI903998, AI903827, AI903970, AA846926, AI903969, and T25149. | |
| HETBM55 | 2482 | 929285 | 1-419 | 15-433 | W58542, W58508, AA338107, AL110415, Z21137, AA677723, AB033071, and AL049742. | |
| HETBE61 | 2483 | 965638 | 1-690 | 15-704 | AA044700, AI217938, AA621573, AI341648, AI888183, AA448474, AI378270, AI377879, | |
| | | | | | AA761808, AA908986, AI554608, AI499447, AA405744, AI658858, N94970, AA826528, | |
| | | | | | AA845274, AA337749, AW104676, AA514257, AA450024, AA446662, N99058, AI200828, | |
| | | | | | AI638236, AA749175, AA907567, AI860350, N30595, AI015967, W56551, R42965, T72602, | |
| | | | | | AA496049, AI240555, AI628397, AA992373, F09967, AI680576, AI970903, AF120324, | |
| | | | | | AF120323, and AF151833. | |
| HETA591 | 2484 | 790499 | 1-699 | 15-713 | N40393, N27230, AI001868, W03460, AA336991, AA293193, AA456181, AA352669, | |
| | | | | | AA404703, AA404253, AA455873, and AB029039. | |
| HETAS81 | 2485 | 778539 | 1-272 | 15-286 | AA195574. | |
| HETAS62 | 2486 | 754155 | 1-475 | 15-489 | N94153, AA337208, and AL021368. | |
| HETAJ14 | 2487 | 660831 | 1-744 | 15-758 | W73113, W73134, AA336749, and H71426. | |
| HEQCC01 | 2488 | 924849 | 1-991 | 15-1005 | AI984000, AW269830, AI801497, AI376738, W44650, AI951239, AI299070, W44651, | |
| | | | | | AI277888, AI090780, AI460194, AA913912, AA889345, AI469976, AI277222, AI470014, | |
| | | | | | AI302046, AI352112, W70230, H57665, AW385653, W70229, AI206087, Z24798, AJ141926, | |
| | | | | | W61319, H58505, AW129398, AI393721, W65404, AA092527, AW385674, AA853182, | |
| | | | | | AA527482, AI147785, AA229903, AI916555, AI832158, AB037938, and AC004477. | |
| HEQBT78 | 2489 | 773528 | 1-239 | 15-253 | AA088215, | |
| HEQBP18 | 2490 | 855578 | 1-451 | 15-465 | AC005412, AP000212, AP000134, AC005081, AC002302, AC005015, AB003151, Z97055, | |
| | | | | | Z85987, AC005899, AL035415, AC005088, AP000688, Z99128, AL139054, AL079295, | |
| | | | | | AC004953, AC002094, AF196969, AF001549, AC006480, AC005914, Z81369, AC004966, | |
| | | | | | AC005480, AF045555, AC004491, AC002544, AC006530, AC005011, AC004659, AP000553, | |
| | | | | | AC003109, AC004815, U91323, AC006449, AF196971, AL034379, AP000689, AF064861, | |
| | | | | | AC005225, AF030453, and AL050307. | |
| HEQBI09 | 2491 | 739877 | 1-241 | 15-255 | AI682994, AI860517, R59606, AW128847, AA427939, AW089100, AA688398, AA678726, | |
| | | | | | AA865152, AI301869, AI537473, AI635629, AA206817, AI635651, AI635668, AI589266, | |
| | | | | | AA382581, N30811, W26239, AA522648, W51988, AA083277, AR068569, and E02783. | |
| HEQBG85 | 2492 | 827915 | 1-262 | 15-276 | AA242840, D31085, AA375146, AA329739, AA359153, AA375223, AA461165, AA852329, | |
| | | | | | AA113413, AA461339, AI375044, D86983, and AF200348. | |
| HEQBG60 | 2493 | 427813 | 1-366 | 15-380 | C16876, AA194321, AA433852, C17161, AA180946, AI525618, AI557711, AA074286, | |
| | | | | | C17197, C17260, AI061627, AI114766, AA632855, AL036120, AI110700, AI110702, | |
| | | | | | AI733732, A1110877, AI133691, AA247674, AA469023, AA469454, AI557407, AA468291, | |
| | | | | | AA469339, AA533497, C18679, AI791942, AW277101, C18086, AI525833, AA457778, | |
| | | | | | AI557430, AI525740, AI525655, AI114723, AL037233, C17850, AI525594, AI110881, | |
| | | | | | AI114736, AI557512, AI133606, AI557620, AA190509, AA099765, AI525675, C17646, | |
| | | | | | AA496319, AI065146, AI110734, AI114585, C18308, AI133681, AA225972, AA211183, | |
| | | | | | AA193158, C17276, AI133444, AI525609, AA149719, AA210993, AA193139, AI133323, | |
| | | | | | AI111183, AA192142, AA650320, AL036950, AA985072, AA147287, AA263129, C17869, | |
| | | | | | AA111992, AA730713, AI525223, AI525224, AI174851, AI133348, AI525704, C17777, | |
| | | | | | AA213805, AA259235, AA214706, AA1 12937, AA187242, AI002878, AA095540, AI524915, | |
| | | | | | AI525208, AI525308, AW270677, AA610217, AA096071, AA179575, AA226053, AA093633, | |
| | | | | | AA192769, A1110870, AI525584, AA677781, AA092031, C18932, AA714096, AA211267, | |
| | | | | | AA193022, AA193077, AA186774, AI557196, AA713554, AI541088, AA090151, AA090965, | |
| | | | | | AA196107, AA180127, AA090969, AA088526, AA090214, AA085797, AA094071, AI678834, | |
| | | | | | AA104032, AA096116, AI750078, AA083602, AA090907, AA579547, AA573649, AI557051, | |
| | | | | | AI064914, AA177026, AA091026, AA093711, AA082180, C17762, D51282, AA090990, | |
| | | | | | AA179142, AA090166, AA090807, AA130057, AA090943, AA197087, AA196431, AA187784, | |
| | | | | | AI833114, AA195842, AI207615, AI720161, AA115803, AA180940, AI002718, AI557661, | |
| | | | | | AA757623, AI133486, AA095787, AA603485, AA618243, AI147501, AA215934, AA090757, | |
| | | | | | AA093442, AA659381, AI114764, AA249267, C18118, AA090144, AA092908, C17330, | |
| | | | | | AA837217, AI459413, AI721213, C17357, AI114553, C18846, AA929066, AA094655, W56031, | |
| | | | | | AI721239, AI114569, AA091885, AI720842, C17253, AA216092, AA089796, AA640485, | |
| | | | | | AA196942, AI366461, AA091799, AA464911, AI832465, AA249171, AA091648, AI174902, | |
| | | | | | AI525114, AI133302, AA094383, AA736456, AI557580, AA214119, AA467951, AA216196, | |
| | | | | | AA176675, AA090764, AA071205, R28885, AA093449, AA653037, AA487737, AI985682, | |
| | | | | | AA515626, AA131159, AA213941, AL047782, AA192982, C02686, AA559143, AI833042, | |
| | | | | | AI114776, AA652805, AA985256, AA090427, AA641024, AA091970, AA090288, AI541480, | |
| | | | | | AA092535, AA197267, L08441, I27367, X93334, X54629, J01415, X62996, V00662, D38112, | |
| | | | | | AF134583, U35430, X93347, D38113, X93335, D38116, D38114, AB005535, and A70826. | |
| HEQBE78 | 2494 | 772860 | 1-399 | 15-413 | | |
| HBQBE71 | 2495 | 760305 | 1-439 | 15-453 | AC006254. | |
| HEQAZ01 | 2496 | 916321 | 1-448 | 15-462 | T89326. | |
| HEQAM59 | 2497 | 739220 | 1-146 | 15-160 | W20223, and AW300240. | |
| HEQAK94 | 2498 | 793250 | 1-286 | 15-300 | AI884723, AI971997, AW136547, AW168144, AI582351, AW028249, H11116, R36152, | |
| | | | | | AI982536, R71232, AI926458, and AC004126. | |
| HEQAF54 | 2499 | 729594 | 1-451 | 15-465 | R53056, and H08598. | |
| HEQAD73 | 2500 | 914044 | 1-579 | 15-593 | AW291088, AA037761, AI937151, AA148558, AI207722, AA143058, AW242313, AA039270, | |
| | | | | | AA150219, AW248839, AW134681, AA782955, AW044454, AI720406, AA159625, AI824032, | |
| | | | | | AI359017, N44915, AW247279, AA136239, AW249260, AA136326, AA736535, AA312218, | |
| | | | | | AA159616, AA165673, N33099, AI677832, AI869047, AI867484, AA159698, AW247893, | |
| | | | | | AA934072, AA143176, D60324, R29152, AI590805, AW169153, N57511, AI393129, | |
| | | | | | AI080402, H83533, N34512, AF161487, AF161527, AC007565, and AC007229. | |
| HEQAA93 | 2501 | 792255 | 1-546 | 15-560 | W92197, AJ272825, AA016235, W94926, AI243425, AW082258, AW297127, AI241137, | |
| | | | | | AI424820, AA813649, and AI289258. | |
| HEPCB04 | 2502 | 941270 | 1-512 | 15-526 | AI917109, AW003912, AI080595, AA235033, AA235201, AW450977, AI969306, AA193652, | |
| | | | | | AA193549, AI928801, R22829, T69554, AA588382, N94214, N80329, R17380, AL023581, | |
| | | | | | AF153605, and AF151861, | |
| HEPB092 | 2503 | 952996 | 1-427 | 15-441 | W80428, AI281960, W58699, AA417821, AI191334, AA524259, AI140335, AI272028, | |
| | | | | | AI198251, AI279567, AI077948, W58105, AA976989, AI279283, AA568684, N75444, | |
| | | | | | AI768190, AA471035, AI042070, H27894, R69416, AI207043, AI093933, AA931805, | |
| | | | | | AA057072, AA776787, AI356687, N89605, AI830795, H20193, AI125808, AI125797, | |
| | | | | | AI160353, AI394538, AI336185, AI858974, AI352347, AI268758, AI298093, AI298398, | |
| | | | | | AI268851, AI191106, AA976789, AI184456, AW000778, AA479904, AA976567, AI184383, | |
| | | | | | N80954, AA328860, AA482453, AI338345, AI042254, N68172, N80657, AI813413, N68196, | |
| | | | | | AI343021, AA705334, AA931904, AA532627, AA721003, AA715390, W69319, AW327781, | |
| | | | | | AI301403, W58698, W58215, N68260, AA481706, W05193, N54740, AI086220, AA159198, | |
| | | | | | AI369601, AI074994, AI184042, AW439353, W69215, AW149380, H03721, H19993, H83921, | |
| | | | | | H02830, AA428492, AW071418, N80631, R98136, H83779, R69545, AI800014, AA603925, | |
| | | | | | H20384, H72739, T35392, AI026120, H50256, AI370680, AI554686, AA356398, AA765315, | |
| | | | | | AW150959, AW008524, AA513681, AA481467, and R48307. | |
| HEPB085 | 2504 | 783362 | 1-679 | 15-693 | AI090010, AA779356, R70094, AI088640, R79670, R28363, R39498, and AF121177. | |
| HEPAY26 | 2505 | 825778 | 1-180 | 15-194 | AI678727, AI373871, AA335883, R47985, AI915014, and AA586390. | |
| HEPAX40 | 2506 | 535627 | 1-726 | 15-740 | AI888322, AA149051, AA149050, AI051764, AI985657, AI862905, AI082688, AI559607, | |
| | | | | | AW151020, AI275490, AI824512, AI240781, AW294730, AI370307, AI925301, AI491857, | |
| | | | | | H28424, H39903, D62631, AI956009, and AL137566. | |
| HEPAX16 | 2507 | 667665 | 1-473 | 15-487 | AI216316, N95121, AA524146, AA826400, AI572953, AA576084, AA243582, AA693835, | |
| | | | | | AA648272, AA830864, AA872868, AI083498, AI278286, R64633, AI919073, F25383, | |
| | | | | | AJ624649, AI380699, AW027102, R64632, AA975873, AA971324, and AL035416. | |
| HEPAQ35 | 2508 | 707533 | 1-520 | 15-534 | T86787, N47173, AA335769, AA406114, AI560856, AA410382 and AA774453. | |
| HEPAP34 | 2509 | 703336 | 1-669 | 15-683 | AA458879, AW138005, AA406623, AI749863, AI299810, AI968830, AI084067, AI749131, | |
| | | | | | AA335721, AI473485, AA976661, AA464428, AA411695, AW130055, C03960, AI880337, | |
| | | | | | AI904562, AA864979, AA781665, AI198298, AA430699, AI275029, AA706499, AW206841, | |
| | | | | | C01121, and AI695779. | |
| HEPAN05 | 2510 | 932893 | 1-477 | 15-491 | AI218711, AI918047, AI918977, AI288674, AI085618, AI139776, F29008, AA335421, | |
| | | | | | AI929165, F35667, AC004751, and AC004646. | |
| HEPAK04 | 2511 | 933039 | 1-477 | 15-491 | AI004158, AA335529, AA847893, AI262232, AW292700, AI950883, AA808598, AW183055, | |
| | | | | | AA505961, AA478576, AA255751, AI468599, AI417159, AI678423, AW043579, AI333775, | |
| | | | | | AI521274, AA009947, AI379044, AI089360, AI027938, AW173026, N49409, AA417796, | |
| | | | | | AA173415, R94723, AI972464, W31503, H63962, AI703182, AW193647, AI741193, | |
| | | | | | AA456887, AA470626, AA885985, D30922, and AC006557. | |
| HEPAJ14 | 2512 | 657440 | 1-231 | 15-245 | H26683, and AA335271. | |
| HEPAJ04 | 2513 | 933091 | 1-353 | 15-367 | AI219496, AI187819, AW085963, AA335263, AA669515, AC007993, and AC002094. | |
| HEPAE58 | 2514 | 509130 | 1-348 | 15-362 | R46509, AA335475, AA335926, and Z63111. | |
| HEPAE02 | 2515 | 921389 | 1-211 | 15-225 | AA484651, AA335440, and AC004887. | |
| HEGBC03 | 2516 | 922550 | 1-290 | 15-304 | AI445299, AW005649, AJ470184, AB032959, and AL021393. | |
| HEGBB67 | 2517 | 751233 | 1-340 | 15-354 | AW295266, AI765278, AI261553, AI367242, AI050799, AI433693, AI672068, AI308137, | |
| | | | | | AI769877, AW003759, AI201838, H18343, AI761277, AI823875, R85423, H18100, AI760769, | |
| | | | | | AI984928, AW149699, H20325, R84272, AA860751, AI369859, AI262936, AI474901, | |
| | | | | | AA013231, AA013325, and H18141. | |
| HEGBA01 | 2518 | 915596 | 1-425 | 15-439 | T51466, and AC006333. | |
| HEGAX04 | 2519 | 927260 | 1-522 | 15-536 | AA236038. | |
| HEGAQ91 | 2520 | 789940 | 1-261 | 15-275 | H54234, AL037663, W84821, AJ012221, AJ007014, and AL031319. | |
| HEGAL55 | 2521 | 731654 | 1-423 | 15-437 | AI962879, AA133284, AI863307, AI679213, AA768727, AA417760, AI083774, H95609, | |
| | | | | | AI538225, AW409962, AA516124, AA417846, AW196578, AW074110, AI168476, AI825102, | |
| | | | | | and AI885413. | |
| HEGAJ08 | 2522 | 959216 | 1-557 | 15-571 | AA059456, AA040649, R60003, AA058951, AI970861, AA662962, AW268083, and | |
| | | | | | AA045527. | |
| HEGAC02 | 2523 | 918992 | 1-519 | 15-533 | AA813370, and Z93016. | |
| HEEAY84 | 2524 | 782706 | 1-370 | 15-384 | N77524. | |
| HEBAX09 | 2525 | 912065 | 1-400 | 15-414 | AW305246, AA405462, and AA336099. | |
| HEEAW40 | 2526 | 710655 | 1-385 | 15-399 | AA176878, AA984649, and AB009973. | |
| HEEAP59 | 2527 | 738892 | 1-401 | 15-415 | AA083887. | |
| HEEAM25 | 2528 | 677599 | 1-771 | 15-785 | AA086139, AI088145, AW131790, AI857700, AI283095, AI813629, AJ917113, AI478664, | |
| | | | | | AI919281, AI967944, AI499083, AI655215, AW136596, AI767765, AI825582, W16832, | |
| | | | | | AA831238, AI381212, AW028578, Z19309, AA912593, AI497888, H86248, AA019370, and | |
| | | | | | AF061261. | |
| HEEAH94 | 2529 | 794257 | 1-332 | 15-346 | AI832117, and T60136. | |
| HEEAH76 | 2530 | 769950 | 1-503 | 15-517 | T90469. | |
| HEEAH57 | 2531 | 734488 | 1-475 | 15-489 | AA158378. | |
| HEEAH16 | 2532 | 661827 | 1-598 | 15-612 | W94212. | |
| HEEAG51 | 2533 | 930810 | 1-430 | 15-444 | T51329, R55106, AW298352, U73637, AF015416, and AF083108. | |
| HEEAG12 | 2534 | 724929 | 1-546 | 15-560 | AA577763, AA633422, AL037129, AA400644, AI814562, AI951746, AA160713, AW273309, | |
| | | | | | AI760380, AI829095, AI830606, AW410028, AA069839, AI762794, AA740152, AI079211, | |
| | | | | | AI831826, AI436417, AA715294, AW248582, AI479090, AI446523, AI564707, AI580739, | |
| | | | | | AI718353, A1114856, AI031714, AI979218, AW020139, AI927726, AI625558, AI803385, | |
| | | | | | N63450, AI499665, AA609811, AL041488, AI559675, AA808909, AI805112, AA721567, | |
| | | | | | AI356504, AW131446, AI371162, AI608666, AA621666, AW117835, N47802, AW303837, | |
| | | | | | AI635165, AI792502, AI792459, AI681955, AI356534, AI741024, AA461161, AI371783, | |
| | | | | | AW167885, AW269461, AA186776, AI961876, AI569468, AI983819, AI198692, AI677976, | |
| | | | | | AI580884, AI285382, AI627469, W69718, AI684007, N26300, AI285371, R74106, AA070631, | |
| | | | | | AW082099, AI187296, AI122688, AI619582, AI923356, AI053500, AA465244, AI568377, | |
| | | | | | AI475683, AA569404, AW131064, N62435, AI378096, AI114801, AI361711, AI538412, | |
| | | | | | AI053809, AW102909, AI284485, AA609804, AA157510, AA983155, AA719436, N69868, | |
| | | | | | AI581694, AA813458, AI025704, AW068095, AA730994, N49709, AI254995, AA772777, | |
| | | | | | AI272877, AI025243, N68207, AA074131, W29008, AI241762, AA069789, N49747, | |
| | | | | | AW001954, AI635898, AW167269, AI821623, N24969, AI565122, AA679739, AW295592, | |
| | | | | | AI708945, AA426103, AI129305, H81268, T57228, AA454089, AA173256, AA570192, | |
| | | | | | AW167442, H88671, AI888551, AW130022, AA218723, AA490126, AA160557, AA629812, | |
| | | | | | AW316580, T48377, W07841, AW238570, AA402187, N64337, AI401141, AA582071, | |
| | | | | | AA582069, N71249, W28998, AA878904, AI537917, AA398896, AA393126, AA158019, | |
| | | | | | AW028732, W81377, AW117980, AI587486, AA385065, N67689, AI686807, AI969514, | |
| | | | | | AA070932, R69118, N55579, AI951358, AA501522, AI690866, R82294, R69237, AI866191, | |
| | | | | | AA069566, AA807712, W95312, AI539138, AW151663, R49753, AA557272, F27924, | |
| | | | | | AI200767, AW073563, W94577, AA861022, AI074168, AA490869, AI682865, AA719453, | |
| | | | | | H89972, H16003, AA972251, AA888800, AA311106, AA479531, AA158667, AA725811, | |
| | | | | | AA365495, AI751587, AI624034, AA015906, AA569951, T74260, H93995, AA716314, | |
| | | | | | AA452503, AA863083, AA506968, H02178, AA429696, AA427565, AA720992, H43481, | |
| | | | | | F26439, AA828474, T55982, AA504793, R27973, AW193086, AI001209, AA630055, | |
| | | | | | AI791854, AI886874, AI752142, AA255883, AI359741, AA340175, AA031466, AA427714, | |
| | | | | | N79151, R46819, H53048, D11678, AW014403, T55334, AA485288, AW316811, AA429565, | |
| | | | | | AA832289, AA398182, F27649, H88719, AA015746, AA046017, AI289762, H86474, R85355, | |
| | | | | | W78088, R68012, AA485423, F22385, N49815, H60678, X07417, AJ238283, AB026899, | |
| | | | | | AP000352, Z75889, AP000500, AL031057, AL031430, AC005192, AL118497, AP000345, | |
| | | | | | AL021394, AC006077, Z69705, AC005013, AC007372, AC005681, AC004754, AC004757, | |
| | | | | | AL049837, AL109938, AC005667, AL024507, AF186194, AF020802, Z75746, AC005881, | |
| | | | | | AC005530, AC002544, AC007666, AC006132, AB023056, AF165926, AC007999, L09706, | |
| | | | | | AC000378, AC000052, AC005206, AL031671, Z83843, AP000555, AJ004799, AC002487, | |
| | | | | | AL031391, AC006344, AC004019, AF019413, AC006539, AP000502, Z11740, AL109847, | |
| | | | | | AP000514, AL049839, AB014080, AC004067, AP000520, AF117829, AP000687, AC005204, | |
| | | | | | AC006039, AC004558, AJ229041, AL022721, AC007066, AC002295, AC006441, AC004206, | |
| | | | | | AL096773, Z83826, Z83841, AC004887, AC005962, AL034394, Z94054, AC005694, | |
| | | | | | AC004860, AC004167, AC003991, U91326, AC007687, AC006952, AL023875, AJ011930, | |
| | | | | | AL117356, Z82976, AP000354, AL050321, Z98742, AC006222, Y18000, AC020663, | |
| | | | | | AC003663, AC005570, AC008981, AL034421, AC002525, AC004448, AC004858, Z83844, | |
| | | | | | AB023048, AL035407, AL022101, AP000511, AL133246, AL031685, AC006251, AL023575, | |
| | | | | | AF109076, AC005006, AL135745, AJ003147, AF165147, AF109907, AC006008, AF050154, | |
| | | | | | AC005529, AL133243, AC006427, AL049653, AL035458, AC004520, AL096703, AC005034, | |
| | | | | | AC004021, AC006198, AC006236, AC005531, AL022332, AC006992, AC004922, AL035073, | |
| | | | | | AC009731, Z98304, AL021877, AL079342, AF129077, AC007546, AC007860, AC004912, | |
| | | | | | AC006449, AL035455, AC002299, AL121756, AL121653, AC006557, U92032, Z84489, | |
| | | | | | AF053356, AC005510, AC004655, AL035681, AP000432, AC006121, AC004813, AL020995, | |
| | | | | | AC005324, AF111169, AL031650, AC008282, AC005913, AC006011, AC005829, AL031594, | |
| | | | | | AL022401, AL049776, AL133312, AC016027, AC004213, AL021918, AP000350, AP000457, | |
| | | | | | AC005343, AL022400, AC007225, AC005668, AC002375, AC007172, Z93403, AL133245, | |
| | | | | | Z93017, AL034402, AL035608, Z84487, AC005874, AF134471, AL022723, Z95889, | |
| | | | | | AL136504, AF107885, AL133297, AL109758, AC000353, AC005828, AC004474, AL031602, | |
| | | | | | AF134726, Z69710, AL121577, Z73900, AC007560, AL021938, AC006120, AC006026, | |
| | | | | | AC008101, AC007376, AL021154, AF011889, AC002531, AB000879, AC005971, AB000882, | |
| | | | | | AC002402, AC002455, L34079, AL020997, AC007387, AL137191, AC000134, AL135879, | |
| | | | | | AL121790, Z95437, AL034430, AC005320, Z82203, AC005684, AP000506, Z82215, | |
| | | | | | AC015853, AL008583, AC004973, AC004158, AC005832, AC005060, AC002996, AC016830, | |
| | | | | | AL133304, AC003102, AC002536, AC009241, AF052041, AC006313, AL049539, AC007283, | |
| | | | | | Z82196, AC005567, AC007298, AJ010395, AC004762, AL049757, and AL021397. | |
| HEEAD13 | 2535 | 470886 | 1-182 | 15-196 | N44039. | |
| HEEAB40 | 2536 | 710668 | 1-414 | 15-428 | R08794, AI470646, AA506458, AA303007, AI002941, AI933534, AI691091, AI903462, | |
| | | | | | AW380254, AA011026, AW021735, AW275510, AA493695, AA321168, AA455670, | |
| | | | | | AW089101, AI311927, AA131035, AI933658, AA019312, AA635739, AW338179, AA676971, | |
| | | | | | AI460009, AW004884, AA788982, AA188676, AI633390, AL045739, AI584186, AA679154, | |
| | | | | | AI431240, AI469968, AA179944, AI888752, AI005388, AI872020, AI927741, AA834707, | |
| | | | | | AA223174, AA358515, AA527209, AL042225, AA847515, F25733, AW193461, AA600869, | |
| | | | | | AW022897, AA101689, AI268334, AI268336, AW276827, AL120343, AL046205, AA572713, | |
| | | | | | AA584612, AI687343, AI249573, AI696595, R07234, AW023865, AW168618, AW270343, | |
| | | | | | R68223, AW265009, C75026, AA467820, AI611569, AI611598, AL043009, AL045053, | |
| | | | | | AA468244, AW020340, AI133164, AI345157, AI521632, AI246409, AA570385, AL037042, | |
| | | | | | AW075998, AW193265, AA420998, AI350211, AW340844, AA421078, AI860020, AI953275, | |
| | | | | | AA613345, AA279421, AI619997, AL119713, AW302903, AA720702, AW402237, AI149478, | |
| | | | | | AI860013, AI962874, AI017251, AI110595, AA568494, AW102846, AW439562, AI754653, | |
| | | | | | AI199137, AI110688, AI754658, AW104030, AA355083, F27407, N49368, AA580808, T77680, | |
| | | | | | AA789192, AW169038, AA338904, AI271126, AA747070, AI500453, AW273218, AA662478, | |
| | | | | | AW167374, AW178018, AW177870, AW131155, AA494089, AL038705, AA833896, | |
| | | | | | AA833875, AA584167, AA577906, AI311684, T40308, AI932599, AI133297, AI744995, | |
| | | | | | AI251082, AI631317, AI309643, N27584, AA837600, AW050726, AA468022, AW438643, | |
| | | | | | AA834792, AI085719, AA480792, AA838190, AA640410, AA640430, AA357991, AC003070, | |
| | | | | | AL034428, AL122020, Z93096, AC005660, AC009411, AC002426, AC006568, U82828, | |
| | | | | | AC003009, Z85996, AP000350, AC005005, AL049843, AC004687, AP000556, AP000557, | |
| | | | | | AP000552, AC009516, AL034429, Z71183, AL023879, AL121825, AC004016, AP000351, | |
| | | | | | AC005800, AC005753, AP000352, AC005155, AC006336, AC006350, AL080241, AL035587, | |
| | | | | | AC005833, AC006236, AC007686, AC005771, AC005899, AL049760, AL022316, AP000553, | |
| | | | | | AC003691, X55922, AC007114, AC004233, AL031228, Z85987, AF001552, AC007546, | |
| | | | | | U91318, AL110292, AF001550, AP001056, AC000088, AC000071, AC005703, AL136295, | |
| | | | | | AF002997, M87917, U04355, AC005512, Z84718, U18181, AC007225, AC004893, AL079295, | |
| | | | | | AC007036, AC005071, AC005736, AC007536, AL008716, AC005091, AC005007, AF109907, | |
| | | | | | AC008042, AF001298, AC004173, AC004397, AP000304, AC004192, AP000047, AC005233, | |
| | | | | | AC006962, AL133382, AF003626, AC004975, AP000115, AP000504, AL008721, AL034420, | |
| | | | | | L78833, AL022101, AL031767, Z84466, AC000025, AC004837, AC005519, AC005844, | |
| | | | | | AC005527, AL132716, AL009172, AC005088, AC006017, AC004945, AC006120, AC003035, | |
| | | | | | AF129756, AL031054, AC005539, AL109628, Z95114, AC007308, AC005529, AL035541, | |
| | | | | | AC007263, AC004491, AC002368, AC005781, Z99755, AC005412, X87344, AC006254, | |
| | | | | | AL031294, AL031055, AC005988, AC004525, AC002303, AL031730, AL031733, AF024533, | |
| | | | | | AC005821, AL133404, AC007993, U91321, X98745, AP001045, Y07848, AC000026, | |
| | | | | | AL034554, AC002059, U85195, AE000658, AC005738, AL031447, AC010206, AC006125, | |
| | | | | | AC004081, M87926, AL031286, AF043945, AF064866, AC006007, AC004984, AC008012, | |
| | | | | | AL133448, AL031075, AC003689, M17623, X66401, AL031295, AC004818, AC005209, | |
| | | | | | AF001549, AC005479, U69639, AC007774, AL137682, U61238, U60970, U61224, U57833, | |
| | | | | | AF184614, Z99754, AC007162, AC004652, AC005212, AC004242, AC004883, AL031667, | |
| | | | | | AC003101, AC003046, AL109653, AL022331, AC004066, AC006942, AL133163, AC005906, | |
| | | | | | U95090, AC006055, AC012384, AC006991, AP000240, AL079300, AC008545, AC004816, | |
| | | | | | AL110164, AL096805, AL031276, AC003658, U78027, L81648, M87921, Z68285, AF030880, | |
| | | | | | AF172277, AC005740, AB014078, AB004907, AB023052, AC004750, U73635, AC003690, | |
| | | | | | U75931, Z81450, AP000302, AC005525, AC006127, AC006138, AF037338, AC005202, | |
| | | | | | AC004755, AC005624, AC005568, Z69733, AC002499, Z70688, AF050154, AC007565, | |
| | | | | | AC006277, Z93024, AC005777, AC004643, AL049856, AC004209, Z70051, AC006139, | |
| | | | | | AL080242, AC004696, AL121934, and AC002037. | |
| HEAAX26 | 2537 | 684734 | 1-264 | 15-278 | H97463. | |
| HBAAU20 | 2538 | 911255 | 1-443 | 15-457 | H91826, and Z97989. | |
| HEAAR47 | 2539 | 973284 | 1-444 | 15-458 | AC004672. | |
| HEAAR21 | 2540 | 883939 | 1-522 | 15-536 | AW295831, AI369420, AW298562, AW151269, and AC005146. | |
| HEAAN43 | 2541 | 842032 | 1-323 | 15-337 | R97645. | |
| HEAAM71 | 2542 | 950736 | 1-612 | 15-626 | T87255, AA078363, and AC008039. | |
| HEAAL76 | 2543 | 770200 | 1-425 | 15-439 | AA169155, and AI741303. | |
| HEAAG84 | 2544 | 896892 | 1-591 | 15-605 | | |
| HEAAG42 | 2545 | 714041 | 1-1098 | 15-1112 | AA044749, AA135685, AA135713, AA156933, AA099390, AA099389, R67663, AA135671, | |
| | | | | | R66064, R24427, AA044673, AA043522, and AA043523. | |
| HBAAB66 | 2546 | 844361 | 1-804 | 15-818 | AI340603, AL037454, AI358042, AI308035, AI678409, AW268060, AI345347, AA806719, | |
| | | | | | AW302973, AW089275, AI445069, AA088789, AI561356, AA464646, AI656270, AI906328, | |
| | | | | | AI582966, AI571511, AA417129, AI581139, AI537677, AI568060, AW059828, AI623941, | |
| | | | | | AI951062, AI950973, AL038778, AI365256, AI242248, AI434731, AI281687, AW059713, | |
| | | | | | F36859, AI621341, AI539153, AI345131, AI472536, AI473451, AW148970, AI207454, | |
| | | | | | AI446373, AW193467, AL118781, AW078805, AW082532, AA911767, AI678446, AI336575, | |
| | | | | | AW090279, AI868163, AI537643, AL041115, AW084097, AI284509, AI570257, AI267185, | |
| | | | | | AA070889, AI348901, AI636197, AL047042, AW021717, AI624304, AL037582, AW150826, | |
| | | | | | AL037602, AI570966, AI469505, AI697324, AI280607, AL039086, AI699011, AI446823, | |
| | | | | | A1114703, AI345253, AI589428, AI345677, AI349933, AI859464, AI886594, AW021091, | |
| | | | | | AI917963, AI628325, AI800464, AI468970, AA493923, AL040241, AI687568, AI050666, | |
| | | | | | AI866469, AW085786, AW172975, AW020419, AI799674, AI312210, AI452876, AI491710, | |
| | | | | | AI801556, AI963040, AI345745, AI366922, AW302924, AI400725, AL036638, AI560679, | |
| | | | | | AI873638, AI634919, AI633321, AI565172, AI623736, AI554487, AI915295, AW088560, | |
| | | | | | AI583578, AI684021, AW169671, AI539800, AL048351, AI470293, AI885989, AI567582, | |
| | | | | | AA587590, AI472566, AI916419, AW163834, AI866608, AW082600, AA916133, AI933992, | |
| | | | | | AI671669, AL039276, AA830396, AI521560, AW051088, AI671651, AW161202, AI309306, | |
| | | | | | AI610357, AI439020, AL048323, AW151136, AW044029, AI886415, AW411235, AI421091, | |
| | | | | | AI683559, AI251221, AA853213, AL048340, AI269205, AI499915, AI263331, AI446124, | |
| | | | | | AI345688, AI366875, AI360560, AA019328, AI590702, AI291973, AW080214, AA853539, | |
| | | | | | AA127565, AW191844, AI310332, AA807088, AL036954, AW076127, AI866082, AW411351, | |
| | | | | | AA099519, AI401697, AI811422, AI559863, AL042382, AI865320, AW409775, AW088899, | |
| | | | | | F34866, H89138, AW403717, AW190725, AI696969, AW058233, AI270099, AL047387, | |
| | | | | | AI648663, AI679622, AW268261, AW082623, AW020095, AI923989, AW151850, AI419650, | |
| | | | | | AW131112, AI249877, AW150326, AW132107, AI524654, F33262, N63128, AW081383, | |
| | | | | | AI874151, AL038575, W60514, AI801325, AI333104, AL036772, AI929108, AI539771, | |
| | | | | | AI554343, AI620093, AI537837, AI334445, AW410609, AI612721, AL046463, AI573026, | |
| | | | | | AL047344, AI270295, AA908294, AI095113, AW089006, AW088944, AI624529, AI805688, | |
| | | | | | AI306562, AI521108, AI611743, N25081, AI289791, AI349957, AW083804, AW168503, | |
| | | | | | AI520765, AA830821, AI590423, AI479577, AI912531, AI888621, AI336634, AI696626, | |
| | | | | | AI357599, AA292158, AA848053, AA761557, AI589993, AW149876, AW079334, AI310940, | |
| | | | | | AI866465, AI345005, AC002404, AL133104, AL110196, I33392, AI8777, I41145, AL137480, | |
| | | | | | I48978, AF113019, U77594, AF118094, AL133072, Y11587, S77771, AL080154, AF000145, | |
| | | | | | I89947, AL080159, I17544, AF044323, AR038854, Y10080, L30117, A08913, AF162270, | |
| | | | | | A08910, A08911, A08909, A76337, A08916, A08912, AF036941, A57389, A08907, AF067420, | |
| | | | | | A08908, AR029490, I42402, AL133016, A45787, AL133014, AL133619, U49908, U67958, | |
| | | | | | AL133081, AF030513, S76508, I89931, I89934, I49625, AL117416, AF079765, AF061573, | |
| | | | | | AL137478, AF159615, X84990, E06743, AF117657, AL137547, U80742, AL137294, | |
| | | | | | AL049324, AL137556, L19437, Y10823, U92068, AF107847, AF061795, AF151685, | |
| | | | | | AL050138, AJ006417, U72620, AL122123, AF111112, A21103, Y16645, X87582, E05822, | |
| | | | | | AL122106, AL117460, AR034821, E02221, AI8788, D55641, AF095901, AC002467, | |
| | | | | | AF012536, AF137367, AL137292, AL137258, AL049465, AF026816, AL049464, AF028823, | |
| | | | | | AF022813, I48979, X63162, AF183393, AF205861, AL137256, X66975, AI2297, D83989, | |
| | | | | | AL110171, AF113689, AF126247, AL049339, AL137557, X79812, AF215669, AF118070, | |
| | | | | | AL137574, AL117578, AL133075, I66342, AF015958, S68736, AF185576, AL117435, | |
| | | | | | AL137555, M92439, U51587, AL110218, AR068753, AR068751, AF207750, AF132676, | |
| | | | | | AF061836, E01314, AL023657, AL137660, AL137705, X53587, AL080060, AF003737, | |
| | | | | | Y11254, AF065135, A76335, AL137538, X55446, I92592, U96683, AF090900, AL050108, | |
| | | | | | I68732, A93016, I89944, AF119337, AF091084, E15582, L13297, AL137530, AF094480, | |
| | | | | | AF185614, Z37987, Y14314, AF113676, AF016271, X72387, X93495, AL137548, AR053103, | |
| | | | | | AL137463, X82434, 536676, AF067728, AL049460, AL137640, AF118090, AF115392, | |
| | | | | | AF118092, AL080110, AL137536, AL110221, AL050149, AF199027, AJ003118, AF158248, | |
| | | | | | AF061981, AL137488, AL080148, AF139986, AL117629, AL137550, E01614, E13364, | |
| | | | | | AL080163, Z97214, AF016047, AL122045, AL133560, AL133558, AL133640, AL117626, | |
| | | | | | E12806, AF200464, AF151109, AL122098, AL122100, A07647, I09499, AL117440, AF146568, | |
| | | | | | AF180525, AL080137, U72621, AF008439, AL137476, AF113691, AC007298, Y10655, | |
| | | | | | AL137627, Y16258, AF114170, Y16257, E02756, Y16256, AL137526, A07588, E04233, | |
| | | | | | L40363, AL133645, AF113699, X80340, AR038969, AF210052, E01812, AL133624, | |
| | | | | | AF026124, AF047716, M96857, AF039138, AF039137, A27171, AF081571, U78525, | |
| | | | | | AL110224, AL122121, AF057300, AF057299, AF182215, X83508, AL137300, AF179633, | |
| | | | | | AF169154, AL080086, AL137429, X66862, I09360, and AL133093. | |
| HCORB05 | 2547 | 928679 | 1-426 | 15-440 | AI343543, AA580865, AA932494, AA581041, AL119399, AL042544, AL042382, AL119457, | |
| | | | | | AL079794, AL043168, AL043152, AI345347, AL119511, AI698391, AI624293, AI627988, | |
| | | | | | AI890907, AW161156, AI002285, AW130930, AI868931, AI682798, AI866770, AI884318, | |
| | | | | | AW051088, AI886753, AI572096, AI270429, AI473536, AI624120, AW130534, AI889189, | |
| | | | | | AI918449, AI620284, AI538850, AI587121, AI491775, AI702073, AL079963, AL037454, | |
| | | | | | AI570807, AW163834, AI538055, AI499890, AL120853, AI824576, AI433157, AI916419, | |
| | | | | | AI241923, AL039086, AL119863, AI270183, AL043355, AI633125, AL037582, AL037602, | |
| | | | | | AI538564, AI915291, AW152182, AI580436, AI670009, AI918435, AL038445, AI445992, | |
| | | | | | AI923989, AW169604, AA806720, AW021717, AI627893, AI863382, AL037649, AI866469, | |
| | | | | | AI493567, AI917252, AW080746, AI500061, AW192687, AI866083, AI961589, AA641818, | |
| | | | | | AI686906, AI567582, AI267162, AI799183, AI671642, AI919500, AI567769, AI582932, | |
| | | | | | AL079741, AI521560, R32821, AI950729, AI963846, AW167083, AI954183, AI612913, | |
| | | | | | AW050850, AL121014, AI802542, AW238688, AI623941, AL036274, W74529, AI890507, | |
| | | | | | AI207656, AI969655, AW129659, AI446373, AW131294, AI579901, AL036638, AW129230, | |
| | | | | | AI919534, AL041734, AW151136, AI445990, AI926878, AI631095, AI872423, AI635016, | |
| | | | | | AL036673, AI932794, AI536738, AI434741, AI874261, AI285448, AW193911, N29277, | |
| | | | | | AI766348, AI452560, AW020397, AI889376, AI648509, AI572021, AW161579, AI866040, | |
| | | | | | AL041772, AI280607, AW022699, AI859991, AI537261, AI623179, AI799408, AI254226, | |
| | | | | | AI630252, AI923370, AA579618, AI869125, AI440239, AL038605, AI434468, AW162194, | |
| | | | | | AI345416, AI802240, AI345612, AI270706, AW051258, AL045500, AW079409, AI288305, | |
| | | | | | AI554821, AL134259, AI690748, AL046595, AW303152, AW026882, AW020419, AI609069, | |
| | | | | | AI522052, AI345415, AA740450, AI889372, AL048496, AW149925, AI571439, AI860003, | |
| | | | | | AI800155, AI963458, AI345778, AA420722, AW089275, AI874166, AI702068, AI284517, | |
| | | | | | AI702406, AW243886, AA127565, AL046200, AI284484, AI801152, AI288285, AW083374, | |
| | | | | | AI612750, AW192652, AL119324, AI698427, AI540674, AA502794, N33175, AI685517, | |
| | | | | | AI559619, AW020693, AI471282, AI954504, AI884528, AI499963, AW149026, AI580198, | |
| | | | | | AI493576, AW198090, AW118518, AI917963, AI345745, AI538764, AI500588, AI866465, | |
| | | | | | AI284131, AW090071, AW160916, AI651840, AI815232, AW168452, AI281762, AW006032, | |
| | | | | | AI866457, AI630928, AI590630, AI242248, AI439452, AI590830, AA908294, AI863191, | |
| | | | | | AI355779, AI628331, AW090736, AI499986, AW102864, AI354630, AI619502, AL040241, | |
| | | | | | AI951950, AL036802, AI768496, AL121365, AI870192, AI866090, AI536574, AI287233, | |
| | | | | | AI635067, U77594, Y11587, I89947, AF139986, I48978, I33392, Z82022, AF158248, U35846, | |
| | | | | | AF090900, A08910, A08909, AR013797, AR038854, A77033, A77035, AF111849, AF177401, | |
| | | | | | AF126247, AL122100, AL133560, AL080148, AF113677, AF183393, AL133075, AF030513, | |
| | | | | | A08916, A08913, AF090943, E06743, AL050277, AF079763, AL137479, AR020905, | |
| | | | | | AF087943, AL096744, I09499, AF111851, AL133067, X84990, A08908, AL050092, I48979, | |
| | | | | | AF090934, AF067728, E05822, AL133080, AL137271, M27260, AF090903, Y09972, Y10080, | |
| | | | | | AL137533, AL133113, AL050138, AL137480, AL133558, Y10936, AL137294, X52128, | |
| | | | | | AL133557, AL117435, A65341, X70685, AF069506, AF106657, AL133072, A08912, I89931, | |
| | | | | | A93350, AF061795, AL050149, AF151685, AL137557, I49625, Y07905, AL133565, AL137292, | |
| | | | | | AF078844, AJ000937, E02349, AL137550, AF061981, AL122093, U42766, Y16645, AL080159, | |
| | | | | | Y14314, E15569, AL050393, AL117583, AB007812, S78214, U88966, AF067790, X87582, | |
| | | | | | AL117460, AL133016, X83508, AF091084, AF118070, AL049430, AL049382, AL133640, | |
| | | | | | AL050116, A45787, A03736, AL110280, X82434, AL049314, AF153205, AF026816, X81464, | |
| | | | | | AF097996, AL049283, AL110196, I46765, Z37987, AF185576, U78525, AL137488, AF106862, | |
| | | | | | A21103, L19437, AL049452, AL110221, AL023657, AJ012755, AB019565, AF017152, | |
| | | | | | AF000301, X72889, AL137529, AL117457, D16301, X57961, AL133665, AL133568, | |
| | | | | | AL122121, AF061943, E12747, A15345, AF111112, AL122110, AL050024, AI8777, A08907, | |
| | | | | | AL122050, AL117416, AL137521, AF008439, A08915, A58524, A58523, AL137539, | |
| | | | | | AF113019, AF118094, AL049938, AF113699, AL122106, AF090901, AR034821, AF061573, | |
| | | | | | AF113690, S36676, AL137560, AL049466, A76335, X80340, AL080234, AL117394, L04504, | |
| | | | | | AL080163, AF081197, AF113691, AL050366, D83032, I00734, AL137463, AF119337, | |
| | | | | | AF113694, AF100931, AF017437, AL137283, AF132676, Z72491, AF106827, AF061836, | |
| | | | | | U58996, AL137459, AL080158, AF026124, AF090886, E00617, E00717, E00778, AL050146, | |
| | | | | | AL050108, U80742, AI2297, E02221, AF079765, AF032666, AF057300, AF057299, X98834, | |
| | | | | | U72620, AR011880, AL137537, AC002467, S76508, I89934, X06146, AL137478, X92070, | |
| | | | | | AL110225, AF146568, AJ005690, AL049465, X96540, AL110218, AL080074, AL137640, | |
| | | | | | I03321, AL137538, AF039138, AF039137, AL122118, AL050155, AF081195, AF028823, | |
| | | | | | M86826, AL117649, E07108, AF162270, A07647, AF125948, I66342, X93495, E01614, | |
| | | | | | E13364, AL137476, AL080124, A08911, AL049300, X79812, Y11254, I42402, and AL133098. | |
| HCOPM06 | 2548 | 933473 | 1-616 | 15-630 | AI494320, AI289626, AA349607, and AC004230. | |
| HCOPI07 | 2549 | 951645 | 1-399 | 15-413 | AA683346, AI991127, and AW385510. | |
| HCOPF07 | 2550 | 951655 | 1-476 | 15-490 | AI027619, AA926665, AA954546, AA398085, AA621275, AA634531, and AA724256. | |
| HCOOF07 | 2551 | 951693 | 1-504 | 15-518 | AI160370, AA993156, and AW269609. | |
| HCONP02 | 2552 | 917577 | 1-332 | 15-346 | AA226397, H29285, Z39193, and D61466, | |
| HCONM33 | 2553 | 971637 | 1-463 | 15-477 | AI339840, N40932, AW044507, AI216527, AI620878, AW316937, AI292180, AI358083, | |
| | | | | | AI954691, AW006263, AA321122, AA321123, AI654341, N46790, AI953114, N69895, | |
| | | | | | AI970523, AA226346, AA226347, and AF196969. | |
| HCOMM05 | 2554 | 925952 | 1-1647 | 15-1661 | AI681802, AA534542, AL044632, AI912061, AI912050, AI271683, AA587766, AA143726, | |
| | | | | | AA565889, AI298280, AA079779, AI983603, AI052230, AI369272, AI148467, AI028441, | |
| | | | | | N93876, AI950520, AW024410, AW138648, AI933105, AI244430, AA436795, AA583571, | |
| | | | | | AA079751, AA595313, AA158795, AI373637, AA947417, R27340, AW182724, AW381284, | |
| | | | | | AI869920, AI348932, AI244362, AI335320, AI305978, AI991003, AI250467, AI335365, | |
| | | | | | AI611516, AI252717, AW086414, AI252210, AI310178, AI252203, AI345138, AI308005, | |
| | | | | | AI310659, AI250541, AI311180, AI250964, AW301779, AI348928, AW086115, AI250009, | |
| | | | | | AI311179, AI345868, AI305732, AI311504, AW303046, AI269522, AI254155, AI335130, | |
| | | | | | AW301495, AI251162, AI862506, AI371584, AI311043, AI251045, AI590436, AI284537, | |
| | | | | | AI310038, AW301422, AI224292, AI252538, AI053635, AA158794, AI862262, AW268255, | |
| | | | | | D31472, AI685886, AW371409, AI540612, AW071370, W40369, AI886550, AW371414, | |
| | | | | | AI955911, AI024888, AA143739, AI254135, AI246935, AW177721, T35070, C00345, | |
| | | | | | AW371416, AA902858, AW369434, AA581215, AW117919, AI932915, AI554245, AW132056, | |
| | | | | | AI800433, N80094, AI358213, AW088899, AI539153, AI919107, AI680457, AI802833, | |
| | | | | | AW020095, AA946741, AI698401, AL110306, AW118398, AI251830, AL041772, AI805769, | |
| | | | | | AI929108, AI468872, AI680280, AI251205, AI888621, AL046356, AW195957, AW002342, | |
| | | | | | AI889953, AI659795, AI520809, AI569309, AW151785, AI498579, AI478123, AL119791, | |
| | | | | | AI922901, AW198075, AW088134, AI432736, AI610645, AI587606, AI699011, AI476109, | |
| | | | | | AI697324, AI335214, AW081255, AI868831, AW073994, AI888944, AW189415, AI280670, | |
| | | | | | AI590686, AI783861, AL119863, AI866608, AI886124, AI345746, AI680498, AI628217, | |
| | | | | | AI802240, AL040241, AI687065, AI469738, AI805688, AI249877, AI345677, AI952920, | |
| | | | | | AI431909, AI633062, AW406745, AI343059, AI376180, AW168031, AI682743, AI349933, | |
| | | | | | AI689175, AI345608, AW084219, AW103886, AI933785, AI633419, AI922577, AW071417, | |
| | | | | | AI554218, AA225339, AI866002, AI433976, AI800138, AI828731, AW079159, AW191844, | |
| | | | | | AI619716, AI696626, AI824576, AI612759, AW089179, AW151729, AI696819, AI867042, | |
| | | | | | AI566630, AI689571, AI280661, AI636619, AI955866, AI537617, AI919345, AI800453, | |
| | | | | | AI812015, AW105620, AI961310, AI963216, AI590120, AI494201, AW082594, AI627880, | |
| | | | | | AI308032, AI282326, AI866770, AI400725, AI345471, AI366549, AW148716, AI636719, | |
| | | | | | AI648684, AI344785, AI249962, AI866741, AI868931, AL043326, AW020693, AI801322, | |
| | | | | | AW088903, AW151714, AI364788, AW085681, AW129230, AI611743, AI471361, AW083804, | |
| | | | | | AI493559, AI628833, AI696533, AI589993, AI365256, AW151136, AI539771, AW059837, | |
| | | | | | AL137526, I48978, AL050138, AL080127, AF078844, A65341, AL122098, I42402, A08916, | |
| | | | | | I48979, AL080060, I89947, AF026816, X84990, A08913, I89931, AF158248, A08910, I49625, | |
| | | | | | AE061943, A08909, AF017152, AL049382, AL050277, AF125949, AF104032, AL137538, | |
| | | | | | S68736, AL080074, AF177401, AL133014, AL122121, AF162270, S78214, AL122093, | |
| | | | | | AL133606, AF003737, AF113689, U67958, AR059958, A45787, AL117440, AF111112, | |
| | | | | | AL137556, E03348, AR000496, U39656, U96683, AL133560, AR038969, Y11587, AL137271, | |
| | | | | | AL133093, AL050146, AL080137, A08912, Y16645, AL137527, AF081197, AL110196, I33392, | |
| | | | | | AL117394, X93495, AL137463, AB019565, I26207, AR038854, AL137478, AL133640, | |
| | | | | | AL133081, L30117, AF113691, AF008439, U72620, AL133104, AF097996, X87582, E05822, | |
| | | | | | AL050024, A77033, A77035, X70685, AL049314, X92070, AL110221, AL133016, X96540, | |
| | | | | | AL133565, X72889, AF113019, I09360, AL117460, Z37987, AL133075, Y14314, AL050149, | |
| | | | | | AL133077, A58524, A58523, A93016,AR013797, AF111849, AL117585, AF026124, | |
| | | | | | AL137521, AF081195, AR011880, AJ242859, Y09972, AF113676, AF090896, E02221, | |
| | | | | | AF079765, E04233, S61953, AF091084, AF100931, AF183393, E07108, A07647, AL080124, | |
| | | | | | AL137476, AF119337, AF113690, AF067728, X63574, U00763, X53587, AL049466, | |
| | | | | | AF090934, AL122049, AF118064, AF118070, AL122050, AL080159, AL133098, AL133557, | |
| | | | | | AF113013, AL096744, AL133568, AF146568, U80742, AL133113, AF106862, AF057300, | |
| | | | | | AF057299, AL137557, AI2297, AL050393, X82434, AL137459, Z82022, AL050108, | |
| | | | | | AF185576, U78525, AJ006417, AL122110, AL133067, I03321, AL049300, AF090943, | |
| | | | | | AL049283, AF113699, E15569, AL117457, AL049464, X65873, A03736, AF067790, | |
| | | | | | AL049452, A90832, X62580, AL133645, AL137550, AL050116, I00734, AF090901, U35846, | |
| | | | | | AF111851, AF113694, AF017437, AF113677, L19437, AF118094, Y11254, AJ000937, | |
| | | | | | AL133080, AE087943, AL049430, AL137560, AF132676, Z72491, E02349, AF061836, | |
| | | | | | M30514, U58996, AL122111, AF210052, AL117583, AL137648, AF079763, AF153205, | |
| | | | | | AJ238278, A93350, AF090900, AF090903, E08631, AF125948, L31396, AL137533, E00617, | |
| | | | | | E00717, E00778, U68387, AL110225, Y07905, AL117435, AL133072, U42766, AL117432, | |
| | | | | | L31397, AL137480, U91329, AJ012755, AL110280, X98834, AL122123, E08263, E08264, | |
| | | | | | E07361, AL137300, I41145, AL137294, AL050172, AL137273, AL080086, AL133665, | |
| | | | | | AL122118, AL137292, AC002467, AL137283, A18777, AL137705, AL049938, AL110197, | |
| | | | | | AL117649, E06743, AF051325, AF061795, AI284538, and AI335140. | |
| HCHQA48 | 2555 | 908495 | 1-558 | 15-572 | R71963, and AF201303. | |
| HCHOX63 | 2556 | 957690 | 1-942 | 15-956 | W52941, H61325, AW024501, AA594317, AW182848, H55390, Z83838, and Z93244. | |
| HCHNW48 | 2557 | 862478 | 1-312 | 15-326 | AA778950. | |
| HCHMX82 | 2558 | 850340 | 1-566 | 15-580 | W85822, AI379248, AA935747, W85821, and AF111167. | |
| HCHMW18 | 2559 | 966985 | 1-524 | 15-538 | W30916, N99978, AI660617, AA307815, AW166174, AA877685, AI692837, F07221, | |
| | | | | | AI123170, AI906507, AW390249, AA078788, and AB017614. | |
| HCHMJ89 | 2560 | 786765 | 1-300 | 15-314 | T79918. | |
| HCHMI96 | 2561 | 800129 | 1-567 | 15-581 | U91323. | |
| HCHMI15 | 2562 | 935298 | 1-946 | 15-960 | AI202736, AL134545, AW298000, AA126125, R54251, H12916, AI497978, AW296905 | |
| | | | | | T35758, AI347137, AA190916, Z42146, AI989727, R96064, AL050318, AB023181, and | |
| | | | | | U67140. | |
| HCHCI07 | 2563 | 952957 | 1-486 | 15-500 | AA777369, AA700323, AI243088, AW292657, AW292654, and AL031666. | |
| HCHCH68 | 2564 | 869084 | 1-488 | 15-502 | AA494453, T75265, R51391, T78355, AA368764, R61709, AA101560, R35616, and Z25135, | |
| HCHCG28 | 2565 | 686431 | 1-590 | 15-604 | T77459, AA052981, T89679, AI138597, AW104281, AW050704, AA053474, T78622, | |
| | | | | | AA677771, AW207204, AI049552, AA005222, AA515524, H07942, C01507, and AI367213. | |
| HCHCE78 | 2566 | 773428 | 1-226 | 15-240 | AI142134, AL038838, AL037436, AL038822, AL037295, AL038983, AL040617, AL044186, | |
| | | | | | AL041238, AL047012, AL044037, AL047170, AL040463, AL040576, AL041752, AL045684, | |
| | | | | | AL038532, AL040625, AL037727, AL047219, AL044162, AL040839, AL043677, AL040193, | |
| | | | | | AL043467, AL040510, AL040621, AL043538, AL047183, AL043496, AL040464, AL046442, | |
| | | | | | AL041133, AL041324, AL037435, AL043492, AL040322, AL041602, AL041098, AL044125, | |
| | | | | | AL041347, AL041096, AL041635, AL045753, AL043923, AL043814, AL040294, AL043845, | |
| | | | | | AL038761, AL044074, AL044064, AL041955, AL041459, AL041577, AL041730, AL040052, | |
| | | | | | AL041523, AL043627, AL040472, AL041374, AL046850, AL040768, AL043848, AL040444, | |
| | | | | | AL042135, AL043570, AL046994, AL046914, AL039316, AL046392, AL045671, AL041246, | |
| | | | | | AL049018, AL045990, AL039643, AL037341, AL037343, AL037335, AL045857, AL079852, | |
| | | | | | AL037443, AL037323, AL037279, AL039432, AL042096, AL042898, AL038745, AL039360, | |
| | | | | | AL134524, AL043941, AL045817, AI547295, AI547006, AL040075, AL045328, AL041163, | |
| | | | | | AI541506, AL041296, AI526186, AL040119, AI547039, AL044272, AL046327, AL041086, | |
| | | | | | AL044258, AL040149, AL041168, AI526194, AL044199, AL041159, AL041344, AL047057, | |
| | | | | | AL045920, AL040148, AL041358, AL044201, AL040458, AL044187, AI526073, AL041233, | |
| | | | | | AI546855, AL041292, AL041346, AL040571, AL041142, AL040332, AL044529, AL039338, | |
| | | | | | AL040529, AL079878, AL041197, AL046330, AL040745, AL040370, AL044274, AL040128, | |
| | | | | | AI525320, AL047036, AL045989, AL047163, AL040342, AL040553, AL041186, C16305, | |
| | | | | | AA585476, AL040414, AL041277, AL039744, AI526187, AL134110, AL040285, AL040155, | |
| | | | | | AL040091, AL044165, AL043440, R28735, AL041131, AL040090, AL041051, AL040168, | |
| | | | | | AL043775, AI526176, AL041278, R29177, AI557084, AL040253, AI546891, AL041227, | |
| | | | | | AL040082, AL043444, AL040329, AL046150, AL041140, AL045327, AI525306, AL040255, | |
| | | | | | AI541345, AL040385, AL040238, AI541535, AI535660, AI535639, AI546899, AI546921, | |
| | | | | | AL040263, AI541356, AI526184, AI557262, AL045725, AL038651, D61254, D29033, | |
| | | | | | AL043612, AL039915, AL049069, AL043537, AL046147, AL041210, AL080031, T23957, | |
| | | | | | AI557787, AI557864, AL046097, AI557279, AJ239433, AI525321, T23888, Z28355, AI541510, | |
| | | | | | AI557727, T23985, AI541527, Z30131, AI541365, AI557148, AI541013, AI525203, AI540967, | |
| | | | | | AI557807, AL048677, AI541374, AI525556, R29218, AI547250, AL045211, AI525431, C15189, | |
| | | | | | AI557734, AI546945, AI541514, AI546999, AL046099, AA585439, AI541509, AI541307, | |
| | | | | | AI547291, AI541523, D57186, AA585101, AL045994, AL045340, I08396, AR064707, | |
| | | | | | AR038762, I08389, AR035975, AR035977, U94592, AJ230935, Y09813, I19525, X81969, | |
| | | | | | AJ230902, I66487, E13740, AR009151, D13509, Y16359, I66485, AJ238010, A91750, I15718, | |
| | | | | | I08395, I15717, AR066494, M28262, AJ230951, AR031566, A85395, A85476, E03627, | |
| | | | | | AJ244003, AJ244004, I48927, AJ244005, A90655, I03331, 100682, X83865, A02712, E12615, | |
| | | | | | A02710, AR035193, A92133, A84772, A98767, A20699, E14304, A77094, A77095, AI1624, | |
| | | | | | A11623, E00609, A07700, E00696, AI3392, AI3393, I62368, AR031488, I13521, E00697, | |
| | | | | | A84776, A81878, A84773, A84775, I52048, A93963, A93964, A27396, AR062872, I63120, | |
| | | | | | AR017907, A84774, AR043601, A95117, A95051, AI8053, AR027100, I49890, AR062873, | |
| | | | | | I44531, AI1178, E01007, I28266, AR067731, AI8050, AR037157, AR054109, A23334, | |
| | | | | | A75888, I70384, A60212, A60209, A60210, A64973, AR067732, A60111, A60211, A23633, | |
| | | | | | I21869, AR007512, I13349, B03813, A25909, AI0361, A86792, A58522, A91965, A24783, | |
| | | | | | I44516, A24782, A70040, I66482, I60241, I60242, I66483, I66484, E16678, AF082186, A82653, | |
| | | | | | I66498, I66497, I66496, AR038066, A58524, AR027099, I66486, E16636, A58523, A93016, | |
| | | | | | AR051652, D78345, I18895, AR035974, AR035976, AR035978, I44681, I84553, I84554, | |
| | | | | | A11245, AR062871, I06859, AR051651, AR038855, AF149828, I18302, AJ231009, E12584, | |
| | | | | | D17247, A35536, A35537, A02135, A02136, A04663, A04664, I01995, A20702, I25027, | |
| | | | | | A43189, A43188, A20700, I26929, I44515, I26928, A98420, A98423, I26930, I26927, A98432, | |
| | | | | | A98436, A98417, A98427, I08051, D50010, AR008429, I05558, AJ230867, AJ244007, A22734, | |
| | | | | | A93923, A22738, A93916, A24548, Z32836, A24546, AR051957, E17098, AJ231028, I05845, | |
| | | | | | AB025273, D13316, AJ230972, A93931, AJ230845, A70872, AR063812, AI6035, Y14219, | |
| | | | | | S60422, I66495, I66494, A22739, A06631, I33632, AR009152, I03669, E03654, I66481, I03668, | |
| | | | | | A83642, A83643, A68112, A68104, I15353, I66488, I66489, I66490, I66491, I66492, I66493, | |
| | | | | | AR054723, A05993, A05975, A05973, A05991, A83151, A05995, AR023813, and AJ230996. | |
| HCHBQ27 | 2567 | 682308 | 1-232 | 15-246 | AI142134, AL037436, AL038838, AL038983, AL037295, AL037435, AL037727, AL038532, | |
| | | | | | AL038822, AL037323, AL037443, AL040617, AL044186, AL041238, AL047012, AL040294, | |
| | | | | | AL041635, AL044037, AL045817, AL047170, AL040463, AL040576, AL045753, AL041752, | |
| | | | | | AL045684, AL040625, AL047219, AL044162, AL043923, AL043814, AL044074, AL041602, | |
| | | | | | AL043492, AL040839, AL043677, AL040193, AL043467, AL040510, AL037343, AL043845, | |
| | | | | | AL037335, AL040621, AL043538, AL047183, AL043496, AL040464, AL046442, AL040472, | |
| | | | | | AL044064, AL041730, AL041523, AL041133, AL043627, AL041459, AL041577, AL041324, | |
| | | | | | AL040052, AL040322, AL040444, AL040149, AL041374, AL041098, AL046850, AL040768, | |
| | | | | | AL046994, AL040119, AL041955, AL043848, AL046914, AL043570, AL042135, AL041096, | |
| | | | | | AL044125, AL045920, AL040075, AL041163, AL044272, AL039316, AL047057, AL041347, | |
| | | | | | AL046392, AL045671, AL040458, AL041159, AL038761, AL044199, AL041292, AL041358, | |
| | | | | | AL041168, AL044187, AL044258, AL041296, AL040148, AL040332, AL045990, AL041142, | |
| | | | | | AL041346, AL041086, AL049018, AL040529, AL040370, AL040745, AL046330, AL041197, | |
| | | | | | AL046327, AL040128, AL047036, AL041233, AL040342, AL040571, AL040553, AL041246, | |
| | | | | | AL039338, AL044274, AL040285, AL079878, AL041277, AL042096, AL044165, AL040091, | |
| | | | | | AL040155, AL039360, AL041186, AL041131, AL039744, AL037341, AL045989, AL040414, | |
| | | | | | AL039432, AL041051, AL040168, AL044201, AL040090, AL043775, AL039643, AL041278, | |
| | | | | | AL079852, AL040253, AL041227, AL045857, AL043941, AL041140, AL040255, AL040238, | |
| | | | | | AL134524, AL040082, AL040329, AL043444, AL040263, AL045725, AL039915, AL037279, | |
| | | | | | AL043612, AL042898, AL041210, AL044529, AL049069, AA585101, T23957, AL045328, | |
| | | | | | AA585476, T23985, AL038745, I11028, AL043537, AL045211, AL046147, AI525556, | |
| | | | | | AI525431, AI541374, Z28355, Z30131, AI541365, AI540967, T23888, AI541514, AL080031, | |
| | | | | | AA585439, R28735, AL047037, AI547039, D61254, AI546999, AI541523, AI541535, R29445, | |
| | | | | | R29177, AI525306, AI547295, T41289, AI557731, AI546945, AI546891, AI526194, AI526073, | |
| | | | | | AI541508, AI546855, AI557262, AI557787, AI525316, AA174170, AI541017, AI541534, | |
| | | | | | AI557799, AI541509, AI546828, AI535639, AI557807, AA585453, AI541390, AI536138, | |
| | | | | | AI525328, C16300, AI556967, AI541307, C15189, AI525320, AI526140, AI541013, AI526184, | |
| | | | | | AL041344, AI557238, AI541510, C16305, AI546875, AL043440, AI526187, R29218, | |
| | | | | | AA585356, AJ239433, AI546899, AI557796, AL047163, D57491, AI557802, AL134110, | |
| | | | | | AI525321, AL046097, AI541345, D55233, C14723, AL036259, AL040385, AI526196, | |
| | | | | | AI526176, AL046360, AR064707, Y16359, E13740, D78345, I18895, A60212, A60209, | |
| | | | | | A60210, A60211, M28262, AJ244003, AJ244004, AJ244005, I08396, E03627, I48927, A98767, | |
| | | | | | A93963, A93964, AR062872, 163120, AR017907, AR062873, A25909, AF082186, AI8050, | |
| | | | | | A23334, A75888, I70384, A60111, A23633, AR007512, I15717, A91750, I15718, A81878, | |
| | | | | | A90655, A02712, A77094, A77095, A95051, AI8053, A64973, AR031566, AR062871, I84553, | |
| | | | | | I84554, I06859, I00682, AI1623, AI1624, E00609, AI1178, E01007, I13349, AI0361, I08395, | |
| | | | | | AR043601, A20702, A43189, A43188, A20700, A98420, A98423, A98432, A98436, A98417, | |
| | | | | | A98427, A35536, A35537, A85395, A85476, A02135, A02136, A04663, A04664, AR038855, | |
| | | | | | A11245, X83865, A84772, A84776, A84773, A84775, A84774, AR067731, AR037157, | |
| | | | | | AR054109, AR067732, A86792, A58522, I03331, A02710, E12615, AR035193, A92133, | |
| | | | | | E14304, A07700, AI3392, AI3393, I62368, AR031488, I13521, I52048, A27396, AR027100, | |
| | | | | | I49890, I44531, I28266, I21869, A91965, I44516, A70040, E16678, A82653, E16636, A93016, | |
| | | | | | AR038762, I44681, A24783, A24782, A95117, A58524, A58523, AF149828, I05558, X07299, | |
| | | | | | I01995, I25027, I26929, I44515, I26928, I26930, I26927, I08051, I60241, I60242, A20699, | |
| | | | | | E00696, E00697, E03813, I66482, AR009151, I66485, I66483, I66484, I66498, I66497, I66496, | |
| | | | | | AR038066, AR027099, I66487, I66486, AJ230935, AR051652, D50010, AJ244007, AR051651, | |
| | | | | | U94592, AJ230902, X81969, AR008429, A22738, I08389, D13316, AJ230951, Y09813, | |
| | | | | | AJ231009, AJ230972, E12584, I19525, AB025273, AR051957, AR035975, AR035977, D13509, | |
| | | | | | Z32836, I18302, AJ238010, AJ231028, A70872, E17098, I66495, I66494, AR035974, | |
| | | | | | AR035976, AR035978, AR066494, A70869, A22734, AR022273, D17247, AJ230867, | |
| | | | | | AJ230845, I36244, AR051864, AJ231011, AR051865, A06631, S60422, A93923, AR063812, | |
| | | | | | A24548, A24546, Y14219, A93916, I05845, A93931, AJ230996, AI6035, I03669, I03668, | |
| | | | | | AR009152, I33632, 166481, A83642, A83643, A68112, A68104, I15353, I66488, I66489, I66490, | |
| | | | | | I66491, I66492, I66493, A83151, E03654, A05993, A05975, A05973, A05991, A05995, | |
| | | | | | AR054723, AR023813, and A22739. | |
| HCHBN09 | 2568 | 625420 | 1-296 | 15-310 | AA490421, AL042558, AA143483, AI751943, AA570806, AA484359, AA559183, AA653913, | |
| | | | | | AA630887, AA523435, AA501772, AA559952, AA527935, AA524677, AA225694, AA210775, | |
| | | | | | AA503945, AW238516, AW068638, AA602214, AA573681, AA713862, AA244217, | |
| | | | | | AA715930, AA507086, AA225790, AA808984, AA226111, AA484441, AA215536, AA569543, | |
| | | | | | AA177022, AW205065, AA721566, AA579157, AA504410, AA484585, AA507346, AA501732, | |
| | | | | | AA469188, AA572887, AA420582, AA484413, AA559222, AA483267, AA503561, AA503559, | |
| | | | | | AA501776, AA226527, AA244238, AA244062, AA593223, AA558141, AA507083, AA508631, | |
| | | | | | AA484393, AW262396, AA501676, AW270415, AW276908, AA507504, AA501686, | |
| | | | | | AA243995, AA128300, AA226184, AA578473, AA614211, AA640515, AA480385, AI546955, | |
| | | | | | AA640374, AA640660, AA525062, AA558384, AA558321, AW238171, AA533287, AA513603, | |
| | | | | | AI547126, AA484407, AA484411, AI752801, AA744305, AA578301, AA484493, AA501860, | |
| | | | | | AA469324, AA225576, AA558562, AA650456, AA226721, AA507340, AA580043, AA565166, | |
| | | | | | AA177069, AA654282, AA507851, AI751343, AA501702, AA470558, AA501768, AA420704, | |
| | | | | | AA213708, AI547141, AA469320, AI541035, AA470511, AA126213, AA229564, AA156629, | |
| | | | | | AA418713, AL047173, AA420674, AA484506, AA715538, AA715539, AA558552, AA177158, | |
| | | | | | AA578705, AA484528, AA095495, AA641115, AA577936, AA228389, AA578934, AA226065, | |
| | | | | | AA484825, AA492033, AA557861, AA225908, AA593222, AA554099, AA572721, AA229733, | |
| | | | | | AA524632, AA092036, AA728878, AA280059, AA244235, AA484371, AA420581, AA503581, | |
| | | | | | AA484351, AA469430, AA715953, AA484473, AA640279, AA506724, AA484355, AA569626, | |
| | | | | | AA558635, AA572695, AI541320, AA244291, AI750492, AA229680, AA632980, AA744014, | |
| | | | | | AA484503, AA744402, AA503572, AA492436, AA603249, AA484501, AA501628, AA632877, | |
| | | | | | AA484598, AW068441, AA228318, AA516524, AA745386, AA082424, AA721565, AA484497, | |
| | | | | | AA552890, AA559234, AA248574, AA568529, AA507529, AA578038, AA578046, AA225681, | |
| | | | | | AA513550, AA703294, AA904212, AA578286, AA216366, AA721557, AA558278, AI908775, | |
| | | | | | AA501743, AW404859, AA572940, AA480386, AA569729, AA578235, AA565138, AA244176, | |
| | | | | | AA650405, AA420814, AA420781, AA228769, AA832132, AA225824, T25993, AW238161, | |
| | | | | | AA504185, AA742807, AA650193, AI751960, AA984344, AA742817, AA910156, AI570436, | |
| | | | | | AA090304, AA713894, AA911380, AA230090, AA557473, AW134801, AA418450, AA535657, | |
| | | | | | AA524782, AA640849, AA501719, AW138762, AA148775, AW270207, AA910120, | |
| | | | | | AA558842, AA713729, AA715509, AI752091, AA602216, W65429, AA630940, AA484920, | |
| | | | | | AA650621, AA744273, AA659512, AA904299, AA713887, AA508052, AA558282, AA568519, | |
| | | | | | AA910096, AW419149, AA715931, AA552891, AA640998, X00525, V01270, AF061800, | |
| | | | | | X82564, M11167, U34341, X59733, X59734, U13369, U34339, U34336, U34342, U34338, | |
| | | | | | U34337, AF061798, AF061799, U34340, AF061797, X02995, E08821, AF173998, AF152142, | |
| | | | | | AF152161, AF152150, AF152151, AF152152, AF152155, AF152156, AF152157, AF152159, | |
| | | | | | AF152160, AF152162, AF152164, AF152165, AF152166, AF152167, AR016103, AF152144, | |
| | | | | | AF152158, AF152922, AF152145, AF152153, AF152154, AF152168, AF152149, AF152163, | |
| | | | | | AF152148, AF152143, AJ270045, A85621, AJ270046, AF152146, AF152147, A85520, A86292, | |
| | | | | | AC005626, and AL136329. | |
| HCHBM26 2569 681404 1-140 15-154 | AI142134, AL038838, AL037343, AL038983, AL037436, AL037335, AL037323, AI547295, | | | | | |
| | | | | | AL037443, AL037727, AL038532, AL134524, AL044125, AL038822, AL040193, AL037435, | |
| | | | | | AL044162, AL041347, AL047012, AL040621, AL043538, AL043496, AL043923, AL043814, | |
| | | | | | AL041238, AL044186, AL040617, AL041324, AL043845, AL040463, AL047170, AL038761, | |
| | | | | | AL044037, AL041635, AL040294, AL044064, AL041459, AL041577, AL047219, AL040464, | |
| | | | | | AL040625, AL040576, AL045684, AL041752, AL045753, AL037295, AL046850, AL040768, | |
| | | | | | AL041098, AL046994, AL046914, AL040052, AL040510, AL043467, AL040444, AL043677, | |
| | | | | | AL040839, AL047183, AL043492, AL041602, AL041246, AL044074, AL041730, AL041523, | |
| | | | | | AL043627, AL041374, AL043848, AL043570, AL040472, AL042135, AL046442, AL040075, | |
| | | | | | AL041133, AL045671, AL045817, AL041955, AL040322, AL039316, AL045328, AL041296, | |
| | | | | | AL041096, AL046392, AL040119, AL039360, AL041163, AL044272, AL041086, AL044258, | |
| | | | | | AL042096, AL040149, AL041168, AL044199, AL041159, AL047057, AL045920, AL040148, | |
| | | | | | AL049018, AL041358, AL038745, AL040458, AL044187, AL041233, AL039643, AL041292, | |
| | | | | | AL041346, AL045990, AL040571, AL041142, AL040332, AL042898, AL037341, AL039338, | |
| | | | | | AL040529, AL079878, AL041197, AL046330, AL040745, AL040370, AL044274, AL040128, | |
| | | | | | AL047163, AL043941, AL134110, AL047036, AL040342, AL040553, AL041186, AL040414, | |
| | | | | | AL041277, AL039744, AL044201, AL040285, AL045989, AL040155, AL040091, AL044165, | |
| | | | | | AL046327, AL041131, AL040090, AL041051, AL040168, AL079852, AL043775, AL041278, | |
| | | | | | AL039432, AL040253, AL045327, AL041227, AL037279, AL040082, AL043444, AL045857, | |
| | | | | | AL040329, AL040255, AL040238, AL041140, AL038651, AL040263, D29033, AL045725, | |
| | | | | | AL039915, AL043612, AL048677, AI547291, AL041210, AL044529, AI318479, AL041344, | |
| | | | | | AL049069, R29218, AA585325, R28895, AA283326, T10982, R28967, AL038878, R28965, | |
| | | | | | AA174170, R28892, R29262, T11028, R45895, R28735, R29445, AL038024, AL048714, | |
| | | | | | R29177, AA585476, R29172, AL045211, AL047340, AA585101, D61254, Z28355, AI546875, | |
| | | | | | AI557734, AI526176, AI557864, AI541356, AI525306, AI557262, T18597, AL043537, D57491, | |
| | | | | | C16300, T23957, T23985, D59436, R29179, AI526184, AI541508, AI525500, AI525431, | |
| | | | | | AI541523, AI547006, AI546999, AI525556, AI547250, Z32822, D55233, C14723, AL048657, | |
| | | | | | AI541374, AA585439, C16293, D53472, C16305, AI557787, AI526194, AI541514, AI546945, | |
| | | | | | AI540967, AI541390, AI557763, AI541205, AA585329, T41289, AI557731, AI541365, C15737, | |
| | | | | | D57186, AI541533, AI557740, AI557727, AI541535, AR064707, AJ238010, AR066494, | |
| | | | | | D17247, A93923, D50010, D13509, E13740, A93916, Y16359, AR062872, AR062873, A91750, | |
| | | | | | A84772, Z32836, A84776, A84773, A84775, A84774, I05558, A93931, A60212, A60209, | |
| | | | | | A60210, A60211, I19525, X83865, AJ244003, AJ244004, AJ244005, X81969, A98767, A20702, | |
| | | | | | A93963, A93964, I63120, AR062871, AR017907, A43189, A43188, A20700, A25909, A98420, | |
| | | | | | A98423, A98432, A98436, A98417, A98427, AF082186, D78345, E03627, I48927, A35536, | |
| | | | | | A35537, A02135, A04663, A02136, A04664, I84553, I84554, E17098, I06859, AI8050, A23334, | |
| | | | | | A75888, I70384, A60111, A23633, AR007512, A81878, AB025273, AR038855, A90655, | |
| | | | | | D13316, A02712, A77094, A77095, A95051, AI8053, A64973, I08389, AR031566, I00682, | |
| | | | | | A11245, AI1623, AI1624, E00609, AI1178, E01007, I13349, AI0361, AI6035, I05845, | |
| | | | | | AR043601, I08396, A85395, A70872, A85476, I44681, AR067731, AR037157, AR054109, | |
| | | | | | AR067732, A86792, A58522, AR063812, M28262, AF149828, Y14219, I33632, I03331, | |
| | | | | | S60422, I01995, A22738, A02710, E12615, AR035193, A92133, E14304, A07700, AI3392, | |
| | | | | | AI3393, I62368, AR031488, I13521, I52048, A27396, I25027, AR027100, I49890, I44531, | |
| | | | | | I28266, I21869, I26929, I44515, I26928, I26930, I26927, A91965, I44516, A70040, E16678, | |
| | | | | | A82653, I08051, E16636, I15718, A93016, I15717, A22734, A24783, A24782, A95117, | |
| | | | | | AR035975, AR035974, AR035977, AR035976, AR035978, A58524, A58523, AJ231028, | |
| | | | | | AJ230935, AJ230972, E03654, A06631, AR054723, AJ244007, I08395, AR023813, I66495, | |
| | | | | | I66494, I60241, I60242, I66498, I66497, I66496, I66486, I66487, AJ230902, AJ230845, | |
| | | | | | AJ231009, A05993, A05991, AJ230867, AJ230951, A22739, and AJ230996. | |
| HCHAI62 | 2570 | 743411 | 1-135 | 15-149 | AL134524, AL045327, AL045328, AL047163, AL042898, AL134110, AL038838, AL037343, | |
| | | | | | AI547295, AL037295, AL038983, AI142134, AL037436, AL037335, AL037323, AL037727, | |
| | | | | | AL037443, AL038532, AL038878, AL044125, AL047037, AL037435, AL038822, AL041347, | |
| | | | | | AL040193, AL043923, AL043814, AL047012, AL041238, AL044162, AL044186, AL040617, | |
| | | | | | AL043845, AL038761, AL043496, AL040463, AL047170, AL044037, AL041635, AL040294, | |
| | | | | | AL044064, AL041459, AL041577, AL047219, AL040576, AL040625, AL045684, AL043538, | |
| | | | | | AL041752, AL040621, AL045753, AL046850, AL040768, AL046994, AL046914, AL040052, | |
| | | | | | AL040444, AL040464, AL040510, AL043467, AL043677, AL040839, AL043492, AL041602, | |
| | | | | | AL044074, AL041730, AL041523, AL043627, AL041374, AL047183, AL043848, AL043570, | |
| | | | | | AL040472, AL042135, AL041324, AL046442, AL041133, AL045671, AL041098, AL039643, | |
| | | | | | AL041955, AL045817, AL039316, AL040322, AL040075, AL046392, AL039360, AL040119, | |
| | | | | | AL038651, AL041096, AL044272, AL041246, U46344, AL044258, AL042096, AL041168, | |
| | | | | | AL041163, AL044199, D29033, AL041159, AL045920, AL040148, AL047057, AL040149, | |
| | | | | | AL041296, AL049018, AL040458, AL044187, AL041358, AL041086, AL038745, AL041292, | |
| | | | | | AL045990, AL040571, AL041346, AL041142, AL040332, AL043941, AL039338, AL079878, | |
| | | | | | AL040529, AL135012, AL041233, AL037341, AL041197, AL046330, AL044274, AL040745, | |
| | | | | | AL040370, AL040128, AL079852, AL039432, AL040553, AL048677, AL047036, AL045989, | |
| | | | | | AL040342, AL041186, AL040414, AL039744, AL041277, AL040285, AL040155, AL040091, | |
| | | | | | AL044165, AL041131, AL040090, AL037279, AL041051, AL040168, AI318479, AL047611, | |
| | | | | | AI547291, AL043775, AL045891, AL042655, AL041278, AL041344, AL040253, AL041227, | |
| | | | | | AL040082, AL042420, AL045857, AL042523, AL042931, AL045494, AL042802, AL042508, | |
| | | | | | AL040329, AL043089, AL042741, AL040255, AL043321, AL047092, AL040238, AL042488, | |
| | | | | | AI432644, AL046356, AI623302, AI431307, AI431316, AI431238, AL043444, AL042515, | |
| | | | | | AL038024, AI432666, AL042533, AL079953, AL043239, AL042842, AL043166, AL048714, | |
| | | | | | AL043091, AL047340, AL040263, AL042853, AL041862, AL042832, AL042729, AI431246, | |
| | | | | | AI432653, AI431323, AI431321, AI431315, AW081103, AI432650, AL048657, AL042787, | |
| | | | | | AL042519, AL043278, AL043295, AI432654, AL043196, AL040207, AI431235, AL045725, | |
| | | | | | AL047675, AI432656, AI866786, AL042468, AL039915, AI866465, AI815232, AI801325, | |
| | | | | | AI866691, AJ238010, AR064707, AR066494, A93923, D17247, AL133053, AL122101, Y17793, | |
| | | | | | AL133074, AL133049, A93916, A85203, A93931, AL133076, AL133082, AL133068, | |
| | | | | | AR023813, and AF019249. | |
| HCHAH04 | 2571 | 487985 | 1-61 | 15-75 | | |
| HCHAG52 | 2572 | 726081 | 1-395 | 15-409 | | |
| HCDMF96 | 2573 | 796196 | 1-418 | 15-432 | AI459248, AI701427, AI023601, and N91037. | |
| HCDME32 | 2574 | 863374 | 1-593 | 15-607 | AA405957, AA416555, T19219, AL134902, AI142134, AL119355, U46349, AL119457, | |
| | | | | | AL043004, U46346, and AR066494. | |
| HCDMC86 | 2575 | 785134 | 1-316 | 15-330 | AI675751, AA977468, AW183837, AI208676, AA401383, AI184678, AI016502, AA448192, | |
| | | | | | and AA927251. | |
| HCDMC25 | 2576 | 677627 | 1-565 | 15-579 | H10593, and AI221385. | |
| HCDMC23 | 2577 | 675490 | 1-354 | 15-368 | | |
| HCDMC22 | 2578 | 672815 | 1-228 | 15-242 | AL119791, AI318280, AI611348, AW149236, AI252023, AI590830, AI567351, AI886753, | |
| | | | | | AI866798, AL040241, AL038445, AI446373, AI285826, AI345745, AI446538, AI680498, | |
| | | | | | AW268122, AI340603, AA572758, AL036631, AI288285, AW161579, AI312428, AI923989, | |
| | | | | | AI567612, AI866770, AA012905, AI783504, AW163834, AW302965, AL036638, AI348854, | |
| | | | | | AL040169, AI537677, AI802240, AL121463, AW088899, AI345347, AA420722, AW151138, | |
| | | | | | AI538885, AI500659, AI570861, AI917252, AI648684, AI431424, AI499986, AI589267, | |
| | | | | | F37471, AI500523, AI865906, AI246319, AI335426, AI590423, AI348777, AI457188, | |
| | | | | | AI889168, AW132034, AW188382, AL036146, AA493647, AI633419, AW089572, AI926800, | |
| | | | | | AI815232, AI249497, AW074993, AI349614, AW238730, AW268253, AA225339, AI312152, | |
| | | | | | AI284131, AI873644, AW149227, AI345735, AI344785, AI627988, AI923370, AI569583, | |
| | | | | | AL079963, AL038605, AI620284, AI254727, AA640779, AI349937, AI445992, AL120853, | |
| | | | | | AI349645, AI874166, AL045620, AI500061, AI670009, AI433157, AI254042, AI702073, | |
| | | | | | AI610402, AW087200, AI801793, AW022682, AI281773, AW105601, AI871709, AI823670, | |
| | | | | | AI500662, AW073898, AI633125, AI698391, AI801325, AI340627, AI915291, AI916419, | |
| | | | | | AI349772, AI627985, AI582932, AL048656, AA613907, AI521560, AI889189, AL040243, | |
| | | | | | AL045500, AI621179, AW059713, AW269097, AI612885, AI888661, AI251221, AA833760, | |
| | | | | | AI499263, AI284517, AW193134, AI500706, AL038565, AW167918, AW169604, AI862144, | |
| | | | | | AI696626, AI866573, AI890806, AI554821, AA579232, AA635382, AI336495, AI955906, | |
| | | | | | AW198144, AI610645, AI436429, AI950664, AI065027, AI309401, AW020693, AW118382, | |
| | | | | | AL119863, AI343112, AL036980, AI348897, AW026882, AI254226, AI689420, AL042627, | |
| | | | | | AI440263, AI349598, AI950892, AI683585, AI539771, AI273843, AI866608, AI682841, | |
| | | | | | AI539808, AI744256, AW302992, AI445237, AI497733, AL036274, AW084056, AI686877, | |
| | | | | | AI446795, AI281779, AI434256, AW068845, W33163, AI933589, AI620639, AI867042, | |
| | | | | | AI696819, AL038779, AI869367, AI889147, AL036403, AI468872, AI280661, AA528822, | |
| | | | | | AI699011, AW025464, AI754897, AI537617, AI919345, AW088903, AI500077, AW169653, | |
| | | | | | AI494201, AI758613, AW081255, AW152469, AI251830, AI635492, AI366549, AI636719, | |
| | | | | | AI539153, AW151136, AI281800, AA974049, AL036396, AI918449, AL039086, AI682743, | |
| | | | | | AI587121, AI570807, AI611743, AI679504, AW071349, AW071417, AW083804, AI889148, | |
| | | | | | AW301300, AI684265, AI589993, AL036664, AW075207, AI349256, AL036802, AI753683, | |
| | | | | | AW089272, AI277255, AI439601, AI699857, AW268072, AA804740, AA420758, AW075084, | |
| | | | | | AI345608, AI270183, AI608936, AI364788, AI491776, AI334884, AI307543, AW160386, | |
| | | | | | AI699865, AW130534, AF118090, AL050393, U42766, AL117460, AR011880, X70685, | |
| | | | | | AL133565, I89947, AF104032, A08916, I48978, AF061943, A08913, AF090896, AF078844, | |
| | | | | | A08910, A08909, AL049938, AF090901, AL117585, AL133557, I89931, U00763, AF113690, | |
| | | | | | AF113694, AL137521, I03321, I49625, AL133016, AF097996, AF106862, AL137550, S78214, | |
| | | | | | AF125949, AI2297, AL050138, E03348, AJ242859, AL117394, Y11254, AF017437, AF090943, | |
| | | | | | AL049314, AF090900, AL050116, AL050146, AL117435, AF118094, AF118070, AF111851, | |
| | | | | | AL110221, AL096744, AF113013, X82434, AL137557, AL122050, AL122093, AL133113, | |
| | | | | | U35846, AL122121, AL049466, E02349, AL133606, AF026816, AF113019, AL110196, I33392, | |
| | | | | | AF113699, AL050149, AL050277, I48979, A90832, L31396, X65873, L31397, AB019565, | |
| | | | | | Y16645, AL137271, AL049452, AF113676, AF158248, A58524, A58523, AL080124, | |
| | | | | | AL117583, A07647, X93495, AF113691, X72889, AL049464, S61953, AL137283, AF118064, | |
| | | | | | AF067728, I17767, AF090903, AL110225, X98834, AL049283, X84990, AL050108, AF057300, | |
| | | | | | AF057299, U72620, AL080060, U67958, AL049382, M30514, AL117457, AF125948, | |
| | | | | | AL133568, AL133560, A93016, AL137463, AL122110, AF091084, AF090934, AF113677, | |
| | | | | | I26207, X87582, AL050024, A77033, A77035, AF087943, AL133640, AL137459, AF183393, | |
| | | | | | AJ238278, E07108, U80742, A03736, X63574, AJ012755, AL137479, X96540, AL049300, | |
| | | | | | A65341, AJ000937, AL133080, AL049430, I42402, Z82022, AR059958, AF026124, AF177401, | |
| | | | | | AF079765, E07361, AL122049, AL137648, U91329, AL133093, AF079763, AL137538, | |
| | | | | | Y09972, S68736, AF003737, AF113689, Y11587, AF146568, AL137527, A08912, AL122123, | |
| | | | | | E05822, AL133098, AL133077, E15569, Y10655, I09360, AL080159, AL122098, AF017152, | |
| | | | | | AL080127, AL133075, AL080137, L13297, I00734, AR038854, AL133104, AR038969, E00617, | |
| | | | | | E00717, E00778, AL110280, E08263, E08264, AF119337, AL133067, AJ006417, AF061573, | |
| | | | | | AL110159, AL137556, AF106827, AL133072, AL137560, A93350, U68387, X83508, | |
| | | | | | AL133014, AR034821, AF111112, AF100781, AR000496, U39656, Z72491, AL133081, | |
| | | | | | AF153205, Y14314, AF185576, E04233, U58996, L30117, AL117649, I66342, AL137526, | |
| | | | | | AL096751, AF162270, AL110197, Z37987, AF016271, AF111849, AL137574, AL080074, | |
| | | | | | AR054984, E08631, AF182215, AF067790, AI8777, A08908, X92070, U96683, A45787, | |
| | | | | | AL117440, U78525, AL137480, AL137476, S75997, AL137533, Y07905, AL133031, | |
| | | | | | AF008439, AL049347, S36676, AF051325, A76335, AL050092, and AL137478. | |
| HCDMC06 | 2579 | 934663 | 1-364 | 15-378 | AI249688, AW265688, AI077941, F00533, AA904275, AW341903, R70333, H71250, | |
| | | | | | AI185394, AW380074, AL046746, AA779783, AI640411, AI287921, F23327, AA504878, | |
| | | | | | AA640260, AW271904, AA177075, AA526193, AA593471, AI803809, AI446205, AA569190, | |
| | | | | | AA381762, AA745356, AI205181, AW275719, AA847029, H82416, AA342189, AA657835, | |
| | | | | | AA664604, AI536625, AI281474, AW408063, AI754037, AA310557, AW270768, AI915081, | |
| | | | | | AI824541, AL039187, AI038304, AI569100, AW192599, AI754105, AA598927, AW131356, | |
| | | | | | AI755214, R91827, AW157005, AI754567, AA262752, AI028510, AW008074, AI624528, | |
| | | | | | AW383952, AI338426, AL120976, F00982, R70883, AI080307, AI570943, AA743811, | |
| | | | | | AI872503, AA992126, AI291037, H91844, AW277174, AW069450, AI859438, AI580707, | |
| | | | | | AI581486, AW268190, D58782, AA805841, AA666215, AI377413, H96518, AC006121, | |
| | | | | | AC009248, AL034420, AC006044, AF107885, AC005089, Z93017, AL009181, AC007967, | |
| | | | | | AC005071, AC004217, AC000041, AC005971, Z99716, AP000553, AC004531, AF038458, | |
| | | | | | U91326, AC002350, AC005037, AC008372, AC006285, Z84480, AC003101, AL035450, | |
| | | | | | U02047, AC004253, AC005944, AL023803, U95739, U62317, AC016025, AC005740, | |
| | | | | | AC005064, AC005562, U73649, AP000252, AL049776, AC005632, AC005516, AC002059, | |
| | | | | | AC006211, AC000134, U91321, AC005730, AC006026, L48038, AC002398, AC007012, | |
| | | | | | AC009516, AC019014, AL139054, AL132777, AL021394, L78833, AC002477, AC002544, | |
| | | | | | AP000212, AP000134, AC006277, I34294, AC006064, U07000, AC006130, AC004797, | |
| | | | | | AC007327, AL049589, AF178650, AL109939, AC006538, AP000106, AC007225, AC004975, | |
| | | | | | AL021391, AC004633, AL031577, AC004000, AC005069, AC005726, AC005696, AL035410, | |
| | | | | | Z82208, AL023807, AL096791, AC007363, AL022326, Z79997, AC007686, AC006449, | |
| | | | | | AC005670, AP000692, AD000833, AL049692, AL121767, AC004883, AP000245, AL035045, | |
| | | | | | AB001523, AL021368, AC002375, AC005664, AB020865, AC000026, AL022336, Z74617, | |
| | | | | | AC005539, AC007242, AC007666, AC004757, AF222686, AL078611, AL024508, AP000115, | |
| | | | | | AP000359, U85195, AL049745, AC005756, AL049757, AC004596, AC002310, AL031281, | |
| | | | | | AC005988, AL031662, AC007308, AL022400, AC007387, AL035659, AE000658, AL080243, | |
| | | | | | AL022165, AC004859, AC005755, AC006237, AC007785, Z93023, AP000348, AC004196, | |
| | | | | | AC004765, Z83826, Z82201, AL031053, AL049709, AC009275, AC002073, AC004832, | |
| | | | | | AC007450, AL031311, AC002041, AL049780, AC005924, AC004796, AL109827, AC005550, | |
| | | | | | AC005488, AC006359, AC003661, AL021154, AC005681, AC006354, AC004848, AC002563, | |
| | | | | | Z82176, AC005901, AC000052, AB023048, AL035610, AC007227, AL035458, AC005829, | |
| | | | | | AP000966, AB020864, AC005878, AL022724, AL031848, AC007676, AC008072, AC006241, | |
| | | | | | AC007784, AC002476, AC006965, AC005932, AC002377, AP000343, AC005914, AC000353, | |
| | | | | | AL035420, AC004019, AC006166, AL049761, AC005055, AP000128, AP000206, AC002480, | |
| | | | | | AC009263, U29953, AL008635, D87675, AL024498, AC005180, AC007221, AC010077, | |
| | | | | | AL109628, AC005184, AC004913, AC007999, AP000030, AC005377, AC005899, AC007688, | |
| | | | | | AC007066, AC006578, AL031297, AP000558, AJ010597, AL021366, AC005778, AC004148, | |
| | | | | | AL035530, Z85986, AC004520, AC005962, AL049554, AF095901, AC006486, AC005536, | |
| | | | | | Z82181, AC004003, Z82244, AC000075, AL035455, and AC004447. | |
| HCDMB91 | 2580 | 789551 | 1-330 | 15-344 | AA297443, AA564510, H01110, AA730795, W96277, AA020873, AA947369, AC005031, | |
| | | | | | AL008719, U80017, AC005015, AC004996, AC002511, AC004655, AC002991, AC002477, | |
| | | | | | AC004253, AC005231, AC002565, AC003665, AC006312, AC005837, AP000556, AL034379, | |
| | | | | | AP000557, AP000552, AC006275, AP000247, AC004216, AC007919, AC005484, AC005529, | |
| | | | | | AC002301, AC005821, AL031673, AC006449, AC000025, Z98742, AP000106, AL034421, | |
| | | | | | AC000379, AC005527, AL049869, AC002404, AC002365, AC005924, AC005102, AC000003, | |
| | | | | | AC016025, AL023807, AC002312, AC005081, AC003950, AL049757, AL109758, Z99774, | |
| | | | | | AC004019, AC004531, AL135744, AC005288, AL022165, AC005071, AC007225, AL022721, | |
| | | | | | AL109628, AL021878, AC002470, AL096701, AL050350, AC000353, AC005736, AF196969, | |
| | | | | | AL021155, AC005730, AF053356, AC004125, AL080243, AC004702, AC000052, AC006121, | |
| | | | | | AC004890, AC007151, AF196779, AC004967, AC005921, AC005520, AF129756, AF111168, | |
| | | | | | AC007688, AC005911, AC002300, AP000514, AC004832, AC004477, AC007055, AC007637, | |
| | | | | | AC002310, AC004098, AL023553, AC004910, AL031255, and AF111167. | |
| HCDMB42 | 2581 | 713300 | 1-230 | 15-244 | | |
| HCDMB41 | 2582 | 711996 | 1-563 | 15-577 | AI525277, and AA079259. | |
| HCDMB27 | 2583 | 682389 | 1-323 | 15-337 | | |
| HCDMB12 | 2584 | 968918 | 1-613 | 15-627 | AL134524, AI142134, AL038983, AL045328, AL037727, AL042898, AL047163, AL049018, | |
| | | | | | AL038838, AL037343, AL039643, AL037436, AL037335, AL037323, AL037443, AL038532, | |
| | | | | | AL044125, AL047012, AL040193, AL044162, AL037435, AL041347, AL040621, AL043538, | |
| | | | | | AL043496, AL040464, AL038761, AL038822, AL043923, AL043814, AL041238, AL044186, | |
| | | | | | AL040617, AL040463, AL047170, AL043845, AL041324, AL045327, AL044037, AL041635, | |
| | | | | | AL040294, AL041098, AL047219, AL044064, AL041459, AL041577, AL047183, AL040625, | |
| | | | | | AL045684, AL041752, AL042135, AL046850, AL040768, AL046994, AL040510, AL046914, | |
| | | | | | AL043467, AL040052, AL040444, AL043677, AL040839, AL043492, AL041602, AL044074, | |
| | | | | | AL041730, AL041523, AL043627, AL041374, AL043848, AL043570, AL134110, AL041163, | |
| | | | | | AL046442, AL045753, AL041133, AL040576, AL045671, AL040322, AL039316, AL041096, | |
| | | | | | AL041246, AL040472, AL041296, AL046392, AL040119, AL044272, AL041086, AL044258, | |
| | | | | | AL047057, AL047037, AL042096, AL041168, AL041955, AL041159, AL045920, AL040148, | |
| | | | | | AL041358, AL039360, AL037295, AL040458, AL044187, AL041233, AL041292, AL041346, | |
| | | | | | AL045817, AL045990, AL040571, AL041142, AL040332, AL039432, AL040075, AL040529, | |
| | | | | | AL039338, AL079878, AL041197, AL047036, AL046330, AL038745, AL040745, AL040370, | |
| | | | | | AL044274, AL044199, AL040128, AL040149, AL037341, AL040342, AL040553, AL041186, | |
| | | | | | AL041277, AL040414, AL039744, AL040285, AL040155, AL040091, AL044165, AI547295, | |
| | | | | | AL041131, AL040090, AL079852, AL041051, AL045989, AL043941, AL040168, AL044201, | |
| | | | | | AL043775, AL046327, AL040253, AL041227, AL037279, AL040082, AL045857, AL043444, | |
| | | | | | AL079977, AL040329, AL041278, AL119324, AL038878, AA585439, AL040263, AL040238, | |
| | | | | | AL040255, AL045725, AL041140, AI541205, AA585453, AL039915, T18597, U46344, | |
| | | | | | AL043612, AL044529, AL119457, AL038651, D29033, AI557808, AL041344, AI541321, | |
| | | | | | AL119511, AI525556, AI557082, AL135012, AI557602, AI557731, AW392670, AI557238, | |
| | | | | | AL049069, AL041210, AI541027, AI525500, AL048677, AI541346, AI557262, AW372827, | |
| | | | | | D59436, AL043152, AL045891, R45895, AA174170, R29218, R28895, AA283326, T10982, | |
| | | | | | AI547291, C15737, R28735, R29445, R28892, T11028, AI557864, AI431323, AL047611, | |
| | | | | | R29177, AA585476, R28967, R28965, AI535813, AL079953, AL042655, AI318479, AA585329, | |
| | | | | | AA585101, D61254, Z28355, AI546875, AI557734, AI525306, AL043537, D57491, AL045211, | |
| | | | | | C16300, AL043168, T23957, T23985, AI541356, AA585325, R29262, AL047092, Z32822, | |
| | | | | | AI526184, AI541508, AI525431, AR064707, AR066494, AJ238010, A93016, AR023813, | |
| | | | | | A58524, A58523, AF082186, D17247, A93923, AL133053, AL122101, Z32836, I62368, I05558, | |
| | | | | | A60212, A60209, A60210, A60211, AL133074, D50010, D13509, AJ244003, AJ244004, | |
| | | | | | AJ244005, A22738, E13740, Y16359, 108389, X81969, A98767, A20702, AL133049, A93963, | |
| | | | | | A93964, AR062872, 163120, AR062871, AR017907, A43189, AR062873, A43188, A20700, | |
| | | | | | A25909, A98420, A98423, A98432, A98436, A98417, A98427, D78345, E03627, I48927, | |
| | | | | | A35537, A35536, A02136, A04664, A02135, A04663, I84553, I84554, E17098, I06859, A18050, | |
| | | | | | A23334, A75888, I70384, A60111, A23633, AR007512, AR060234, A81878, AB025273, | |
| | | | | | AR038855, A90655, D13316, A02712, A77094, A77095, A95051, AI8053, A64973, Y17793, | |
| | | | | | AR031566, I00682, A86792, AI1245, AI1624, AI1623, E00609, AI1178, E01007, I13349, | |
| | | | | | AI0361, I08396, AR043601, I03331, A93916, A85395, A70872, A85476, I44681, X83865, | |
| | | | | | I19525, A84772, A84776, A84773, A84775, A84774, AR067731, AR037157, AR054109, | |
| | | | | | AR067732, A58522, A91750, AR063812, M28262, I15718, AF149828, I05845, Y14219, I15717, | |
| | | | | | S60422, I01995, E12615, A02710, AR035193, A92133, E14304, A07700, AI3393, AI3392, | |
| | | | | | AR031488, I13521, I52048, A27396, I25027, AR027100, I49890, I44531, I28266, I21869, | |
| | | | | | I26929, I44515, I26928, I26930, I26927, A91965, I44516, A70040, E16678, A82653, I08051, | |
| | | | | | P16636, AF019249, A24783, A24782, A95117, AJ230935, AJ230972, A06631, A85203, | |
| | | | | | A81671, A22734, AJ231028, I08395, A93931, A16035, I66495, I66494, I60241, I60242, I66498, | |
| | | | | | I66497, I66496, I66486, I66487, AJ244007, AJ230902, AJ230845, I03669, AL133076, I03668, | |
| | | | | | AR051957, AJ230951, A20699, P00696, P00697, P03813, I66482, AR009151, I66485, I66483, | |
| | | | | | I66484, AR038066, AR027099, AJ231009, AJ230867, I33632, AR051651, AR051652, | |
| | | | | | AR035975, AR035974, AR035977, AR035976, AR035978, E03654, AL133082, AR008429, | |
| | | | | | AL133068, AR054723, A22739, AJ230996, A05993, A05991, and AL133020. | |
| HCDMB08 | 2585 | 958542 | 1-255 | 15-269 | AA719107. | |
| HCDMB03 | 2586 | 923316 | 1-375 | 15-389 | AL119691, AI305766, AW103758, AI284640, AI247199, AA634889, AA679532, AI345681, | |
| | | | | | AI345675, AA584167, AA551552, AI345157, AI344812, AI473475, AW274346, AA747070, | |
| | | | | | AW021207, AW072923, AL043009, AW069769, AI696962, AA515909, AA613203, AA551503, | |
| | | | | | AW419262, AW264934, AI801482, AW265385, AI754336, AW088846, AA167055, AA580808, | |
| | | | | | AI133164, AI334464, AW440545, AI754253, AI469968, AA493975, AL045526, AA683258, | |
| | | | | | AA812281, AW193265, AI345418, AI457397, AW302903, H70994, AI888752, AA478355, | |
| | | | | | AI687343, AA630362, AL038072, AW302013, AA521323, AA490183, AI350211, AW438643, | |
| | | | | | AI872020, AA521399, AI859438, AI334443, N35896, AA303007, AA662225, AA515549, | |
| | | | | | AL138396, AI270117, AA502860, AA483771, AA806796, AI471543, AA083046, AA526787, | |
| | | | | | AW301554, AA831375, AI860013, AL134972, AL038474, AL046409, AW103509, AI634384, | |
| | | | | | AA482768, AW131249, AI262909, AA661921, AW020340, AA220943, AI754658, AW276817, | |
| | | | | | AA525824, AL120775, AA829223, AI554718, AA878438, AA603185, AL037040, AA514854, | |
| | | | | | AW276827, AI698447, AI053672, AA577906, AA533725, AI245679, AI688846, AA459749, | |
| | | | | | AA503258, AA507824, AI254913, AA244357, AA501821, AA722372, AI613280, F27407, | |
| | | | | | AA483936, AA372481, AC006128, AC008372, AL023575, AL023880, X54181, AC006323, | |
| | | | | | U04355, X54180, X55926, U18391, AL031734, U18395, AL132766, U57005, U18394, Z82976, | |
| | | | | | AL035079, U18387, U57009, AC005932, U18398, X55929, U18396, X55927, U57008, | |
| | | | | | AC009509, X55925, AL023284, AC000115, AL021395, U18392, AC005756, X54178, X55931, | |
| | | | | | X54175, X55932, U18388, AC005409, AC005821, U57006, X54179, AC006441, X55933, | |
| | | | | | U18399, AC000353, AL021154, Z85986, AC006077, AL021394, AL021877, U67831, | |
| | | | | | AC004859, L47228, Z99128, AC002312, AC005291, Z82198, AL050306, AC005702, X55922, | |
| | | | | | Z95113, AL109657, AC007386, AC000379, AC005520, U67825, AL109985, X55924, | |
| | | | | | AP000501, AC005251, AC005971, AP000230, AC002300, AL049759, AP000144, AL078593, | |
| | | | | | I51997, AC006045, AL034350, AC006101, AF008191, U40455, AL133243, AP000509, | |
| | | | | | AC005159, AL049830, AC012627, AC004678, AL021546, AC007690, AL050332, AL035414, | |
| | | | | | AC005193, AC006965, X54177, Z84482, AL031597, AL035420, AC007751, AL109967, | |
| | | | | | AC007688, AC002395, AC005998, D84394, AC005037, AC018769, AL035703, AL136295, | |
| | | | | | AC003029, AC005212, AC005683, AL049636, AC003030, U67826, AL008719, AL031276, | |
| | | | | | AC002470, AC002115, AC006978, AL080239, AL031577, AL034421, AC005288, U63630, | |
| | | | | | Z84488, AL136504, AC006468, Z97632, AC007917, AC006019, AC006959, AC004598, | |
| | | | | | AC004841, AL035458, AP000154, AJ133269, AC007216, AL050348, AC006292, AC004991, | |
| | | | | | AC007066, AL031664, AC002472, AC005226, AC003982, AC003037, AC004383, AL050337, | |
| | | | | | AC004999, AC002365, AC005695, AC002418, AL109963, AC006060, AC005406, AL035587, | |
| | | | | | AC002310, AC005255, AC005535, AC005229, AC007041, AL121769, AF029308, AC005274, | |
| | | | | | AC008055, AC005844, AC007277, AC002543, AC005772, AC004381, AC000080, AC005300, | |
| | | | | | AF077058, AL031229, Z86061, AC004966, AL049845, AC004751, Z95116, AC005041, | |
| | | | | | AL034375, AC005341, AC004690, AC000120, AC005204, D83989, AC004020, AC004854, | |
| | | | | | AL022477, AC005839, AL135744, L44140, AC006254, AC008044, U35114, AC005915, | |
| | | | | | AC007225, AL033523, Z98200, AC009399, AL035071, AC002385, AC006023, AF015151, | |
| | | | | | AC005886, AP000946, AC005593, AC005944, AJ246003, Z93020, AF130343, AC004990, | |
| | | | | | AL109847, Z98050, AC005261, Z85987, AC016831, Z93929, AC004152, AC002550, U07562, | |
| | | | | | AC005182, AC002369, AC007666, AC005154, AC007899, AC004894, AC003689, AC007371, | |
| | | | | | AL121655, Z97635, AC004972, AC005256, and AC005779. | |
| HCDMA20 | 2587 | 669201 | 1-331 | 15-345 | N62789, N62508, AI289289, N62494, AA936576, R52810, N49008, Z39305, R17666, F02223, | |
| | | | | | H11727, R51380, N93902, and AL119444. | |
| HCBND03 | 2588 | 922388 | 1-864 | 15-878 | AI702961, AI630765, AW341780, AA931671, AW452292, and U46356. | |
| HCBMZ07 | 2589 | 951788 | 1-345 | 15-359 | N30431, AA579184, AI791610, AA176605, F19258, AW438916, AA015691, AW265654, | |
| | | | | | AI305766, AW157005, AI028510, AI620585, AI565245, AI783911, AA772016, AA879053, | |
| | | | | | AA992126, H79308, AA904137, W21392, AA128757, AA947837, AA077817, AA657835, | |
| | | | | | AA230143, AA743811, AI090334, AI051037, AI982634, T40612, F29989, AL043098, | |
| | | | | | AA865262, AL039309, AI244254, AI709174, AI358071, AW274197, AI821467, AA054106, | |
| | | | | | AA300061, AI951436, AI499094, F31654, AI358229, AA226584, AW406755, H72688, | |
| | | | | | AI365988, N52796, AA747243, R85717, AW339687, AW069807, AA629702, AI635272, | |
| | | | | | AA743956, AL049610, AC002350, AC009396, AP001138, AF067846, AL049633, Z83819, | |
| | | | | | Z98051, AC002418, AC005412, AL031774, AL031393, Z72521, AP000691, M87914, | |
| | | | | | AC002369, AL031846, AC007304, AC005164, AL033381, AC006160, AC004651, AL109627, | |
| | | | | | AL022313, AP000011, AP000152, AF140763, AL009172, AL021918, AC004904, AC005940, | |
| | | | | | AC001066, AC006254, AC004386, L81893, AC004381, AC004231, AC002425, AC005736, | |
| | | | | | AP000348, AC006539, AP000045, AC007736, AL050333, Z83843, AP000114, AC005971, | |
| | | | | | AP000503, AC008134, L35681, AF001552, AL049856, AL121655, AC004019, AC002316, | |
| | | | | | AC005832, AL133245, AL008731, AC004983, AC007226, AC004882, AC007055, AC005914, | |
| | | | | | AC005390, AC007450, AB023052, AL031673, AC002059, AC004388, AL031053, AF148319, | |
| | | | | | AC005578, AC004167, AC009510, AC005003, Z84480, AP000047, AC006409, AP000557, | |
| | | | | | AL109980, AF196779, AC009516, AC003101, AL109628, AL096791, Z83840, AC002558, | |
| | | | | | AL022578, AC004253, AC006381, AF091512, AC006037, Z85987, AC005062, AL021392, | |
| | | | | | AF053356, AC004594, AC005365, AC006077, AL031005, AL096699, AL031391, U91321, | |
| | | | | | AC005796, AL050307, AP000556, AP000513, AP000115, AL031662, AC012099, AF061325, | |
| | | | | | AC005703, AC007514, AC001530, AC005484, AP000356, U14702, AC012384, AC005907, | |
| | | | | | AL022143, AP000308, AP000048, AC004699, AL049745, AC002295, AL080317, AC006552, | |
| | | | | | AC004027, AC003982, AF147277, AC002565, AL033518, AC012627, AL021395, AC006948, | |
| | | | | | AC005838, AC005212, AC006011, AC004087, AL031770, AC000041, AC020663, AL137434, | |
| | | | | | AP000690, AJ003147, AC004678, AL049588, AC007263, AL096701, AC005785, AC004134, | |
| | | | | | AC002487, U63834, AP000502, AP000517, AP000032, AL049694, AL121825, AL109799, | |
| | | | | | AC005837, Z84572, AC004460, AL021878, AC005089, AC004453, Z70289, AC005406, | |
| | | | | | AC008394, AC007676, Z85999, AC006057, AC005972, AC007041, AC004963, AC003037, | |
| | | | | | AC007536, AC007308, AF106656, AC004988, AC004805, AC003954, AC005399, Z85996, | |
| | | | | | AC005366, AC002470, AC005839, Z81369, AC005808, AC004832, AC004263, AB023054, | |
| | | | | | AL049828, AL035422, AC005071, AC005523, and AC006166. | |
| HCBMY10 | 2590 | 961718 | 1-478 | 15-492 | T53770, AW069769, AA487272, AI612070, AA582073, AA832175, AI611533, AA760808, | |
| | | | | | AA508359, AL037771, T11828, AI252274, AI732378, AA559241, AA503475, AA527602, | |
| | | | | | AA531079, AA493708, C18840, AA469451, AI133297, AA828802, AA828781, AW021583, | |
| | | | | | AA640685, AI439910, AI270117, AA527727, AW276935, AW023990, AI382825, AL038705, | |
| | | | | | AI561060, AI282479, T29611, AA601642, AA602954, AA809546, AA283730, AL036037, | |
| | | | | | AI687343, AI434695, AA477122, AI754955, AA515905, C18521, AI950671, AA955031, | |
| | | | | | AW021917, AA503258, D82454, AA458703, AA908285, T07039, AW022834, AI933714, | |
| | | | | | AA846935, AA569471, AA548058, AI732151, AA587516, AA502155, D83989, AL135744, | |
| | | | | | X54171, AC008015, AC002091, AC004263, AC005412, X54175, AC004859, AC002302, | |
| | | | | | AC005387, AL022326, M37551, AP000512, AL109798, AC006509, X55926, AL035658, | |
| | | | | | AC004900, U67829, AC005619, AC005399, AC004883, AC004837, AC004893, AC005736, | |
| | | | | | AC006036, AC005971, AL034420, AL031311, AC002352, AC005914, X54178, AC007395, | |
| | | | | | AC004231, Z93241, AP000349, AC006468, AC006023, AC005480, X54181, AL096763, | |
| | | | | | X55933, Z84719, U18399, AL079304, AL022726, AC006115, AC004149, AC004821, X75335, | |
| | | | | | AC005296, U18394, AC004963, AC006285, AC005303, AC007731, AC005500, AC004999, | |
| | | | | | AC000134, U66059, AL031279, AL031680, AC004386, AL034582, AC007199, AC007263, | |
| | | | | | AC006530, AC006539, Z84480, Z83844, U18391, U18395, Z82173, U95743, AP000334, | |
| | | | | | AC007386, AL096776, AC004230, AC005568, AC005184, AC004655, AC005057, AC005484, | |
| | | | | | AL022165, AJ239321, AL031683, U18396, AC005368, AC004474, AC007226, AC002312, | |
| | | | | | AL033525, AC004659, AC007193, AL035695, AC006040, AC007041, AL034553, AC006144, | |
| | | | | | AC004531, AL035461, AC004794, AC002059, Z82203, AC006139, X55924, X55925, | |
| | | | | | AL121588, AP000514, AL022313, AC005772, Z94802, AL021878, AL023494, AF053356, | |
| | | | | | AL023553, U57005, U80017, AC002400, AP000173, Z82178, AC006556, AP000275, | |
| | | | | | AC004019, Z98752, AL035457, U57007, AC006552, AC005944, AP000105, AP000037, | |
| | | | | | AC005753, AC004485, AC007917, AC005004, Z79997, Z81370, AC003982, AP000172, | |
| | | | | | AP000065, AF100617, AC004033, AF067844, X55923, AP000057, AP001054, Z83838, | |
| | | | | | X55929, AC007631, AC005291, AC004972, X54180, AC005372, AP000125, AC004895, | |
| | | | | | AL109627, AC005510, AC002565, AL133245, AL023807, AP000355, AC002375, AL049795, | |
| | | | | | U18392, Z95152, X54179, AC000353, AC005243, AL121603, AL078611, AP000557, | |
| | | | | | AC007371, AC004841, Z97053, AL023694, AC002476, L78833, AF196779, AC004388, | |
| | | | | | AP000031, AL121655, AC005225, AC005544, AC007842, Z84466, AB023048, AC005738, | |
| | | | | | AC005488, AL096791, AC005725, AP000114, AP000046, AP000511, AC003108, L78810, | |
| | | | | | AL035086, AC005326, AC005520, AL035415, AC002430, AC005218, AC004049, AC004209, | |
| | | | | | AC005251, AL049570, AB023049, AC004675, AC005102, AC003070, AL035555, AC008038, | |
| | | | | | AC006195, AC003029, AC007384, AP000113, AP000045, AC002460, Z99128, U57006, | |
| | | | | | AF165138, AP000135, AC005778, AC005031, AL078639, AC006261, AC002082, AC005899, | |
| | | | | | and AF111168. | |
| HCBMG11 | 2591 | 965394 | 1-685 | 15-699 | AI680459, AI022295, R25336, AI917581, N76313, and AA478089. | |
| HBZ5K04 | 2592 | 926407 | 1-65 | 15-79 | | |
| HBZ5G02 | 2593 | 920249 | 1-414 | 15-428 | AI733802, AI733182, AA948110, and AI261960. | |
| HBZ5D32 | 2594 | 699335 | 1-415 | 15-429 | | |
| HBZAJ73 | 2595 | 764479 | 1-489 | 15-503 | R84573, R88849, H50890, and X69908. | |
| HBZAJ26 | 2596 | 681879 | 1-640 | 15-654 | W93922, and AF080623. | |
| HBZAJ39 | 2597 | 847621 | 1-1325 | 15-1339 | T56623, T57310, AI499938, AA601218, AI679782, AI284640, AL043009, AL046409, | |
| | | | | | AI963720, AI334443, AA610491, AW303196, AL079645, AI431303, AW301350, C75026, | |
| | | | | | AW193265, AA630362, AI471534, AI270117, AW406755, AA521323, AA631507, AI471543, | |
| | | | | | AW327868, AA669840, AW274349, AI350211, AW419262, AI860020, AI345681, AI345675, | |
| | | | | | AA394271, AL119691, AI567076, AI912322, AI613280, AI732120, AI206785, AI683577, | |
| | | | | | AI569086, AW243960, AW088846, AI143242, AI469624, AI005388, AL042856, AI312309, | |
| | | | | | AI358229, AI262909, AA680243, AW338086, AA521399, AW131249, AW439558, AW276827, | |
| | | | | | AW408717, AL048925, AI469968, AA584752, AW069481, AI061334, AI471481, AW270270, | |
| | | | | | AA682912, AL042420, AL138455, AI537955, AI561060, AI281881, AA491814, AI371070, | |
| | | | | | AI571512, AA127353, AL042753, AI298710, AI345654, AI937850, AA569471, AI151261, | |
| | | | | | AI619997, AI623898, AI688846, F36273, AI336660, AI085719, AW167267, AI049634, | |
| | | | | | AI053672, AW167372, AW193432, AI365988, AI079910, AI286356, AL044940, AW406162, | |
| | | | | | AL041706, AA133986, AW407578, AI148277, AL138265, AW023672, AI375710, AL037683, | |
| | | | | | AI110844, AI670124, AI865905, N35896, AI357551, AI954260, AA074130, AI110770, | |
| | | | | | AI754658, AA649642, AI635818, AI282832, AA490183, AW162489, AA714453, AW406659, | |
| | | | | | AI110760, AI434695, AA780515, AI246119, AI287651, AI435544, AI344844, AA350859, | |
| | | | | | AI801591, AI053786, AL043719, AW276817, AI305547, AA226153, AI744995, AI859742, | |
| | | | | | H71429, W79504, AA192740, AW410400, AI951863, AW073470, AL119984, AW247819, | |
| | | | | | AL041690, AI610920, AW276435, AI640702, AW021917, AI888752, AA178953, AI610159, | |
| | | | | | AI279165, AI358343, AI038833, AI761471, F29989, AW339568, AW302013, AA587256, | |
| | | | | | AA713815, AL120687, AI590689, AI590958, AI355224, AI499503, AA226715, U95742, | |
| | | | | | AC007216, AC006948, AC007066, AC007055, AC002115, AC007387, AL022323, Z94721, | |
| | | | | | AP000135, AL023284, AJ003147, AC004463, AC005620, AL022237, AC007664, AL049569, | |
| | | | | | AC005041, AP000031, AC005696, AC002472, AC002375, AC012384, AC005488, AF067844, | |
| | | | | | AC006014, AL034423, Z82244, AC003689, AL049780, AC007242, AC004974, AL031680, | |
| | | | | | AC005104, AC002119, AL031311, AP000044, AP000112, AC005914, AC005971, U47924, | |
| | | | | | AF196779, AC005182, AC010349, AJ246003, AC005217, AC003101, AL035417, AC006064, | |
| | | | | | AC007279, AC005527, AC005412, AL121603, Z84488, AC005043, AL121655, AC004000, | |
| | | | | | AC006251, AC005902, Z74617, Y07848, AC006271, AC008009, L78810, AC004967, | |
| | | | | | AL049709, AC002565, AL133382, AC002059, AC005619, AC004125, AL110502, AC004491, | |
| | | | | | AL031075, AC005932, AC005529, AL121658, AF049895, AC004776, AC004686, AC004061, | |
| | | | | | Z68276, AL031668, AC005399, AL021707, AL021546, AC004858, AC000026, AC005356, | |
| | | | | | AL031673, AC015853, AC007011, AC005280, AL022322, AC005786, AC007240, AL133445, | |
| | | | | | AC004963, AC005076, AL132985, AC005300, AC006449, AF002223, AC006019, AC018633, | |
| | | | | | AC007546, AL008715, Z49236, AF135028, AC002316, AC008372, AC005531, AC000025, | |
| | | | | | Z97989, AC006480, AL096791, AC002301, AF217403, AC004526, AC004020, AC005231, | |
| | | | | | AL132712, AC005520, AC004703, AC006030, AC005330, AC008044, AC004841, AL035079, | |
| | | | | | AC005832, AL035685, AP000503, AL031733, AC000159, AC005486, AC005618, AC008115, | |
| | | | | | AC003003, AL133353, Z97054, AL035422, AC004539, AC005291, AC000052, AL133245, | |
| | | | | | Z81450, AC007192, AC004652, AF129756, Z82202, U78027, AC005202, Z86061, AL109798, | |
| | | | | | AL031588, AC004382, AC004585, AC006112, AF109907, AL034429, AC006130, AC004019, | |
| | | | | | AC005015, AC004659, AF107885, AL078477, AC007040, AF165926, AC004876, AC004181, | |
| | | | | | AJ251973, Z85987, AL121652, AL031255, AL021391, AC005740, AC004236, AC004990, | |
| | | | | | AL133371, AC006441, AL022328, AC008014, AC002045, AC005071, AC006160, AC005764, | |
| | | | | | AL008718, AL035072, AC002364, AP000477, AC004816, X60459, AP000297, AP001172, | |
| | | | | | AL035587, AC003678, AC004883, AL031848, AC004030, Y14768, AF134726, AL050306, | |
| | | | | | AL020993, AC002425, AC005784, AC005480, AL031602, AC004217, AC006965, AC005355, | |
| | | | | | AL034452, AP000692, AL009179, AC005057, AC005899, AC00810I, AC000072, AC005664, | |
| | | | | | AC005778, Z83822, AC004517, AL031277, AC005803, AC002350, U07563, AL049872, | |
| | | | | | AC007684, AC006116, AL022329, AC006953, AC004408, AF190465, AC006544, AJ006996, | |
| | | | | | AC002492, AL049845, AF108083, AC002126, AL008582, Z83845, Z95114, AC005200, | |
| | | | | | AC004087, AC003684, AP000506, AP000505, AC004865, AC000353, and AC004859. | |
| HBZAJ14 | 2598 | 847620 | 1-512 | 15-526 | | |
| HBZAB15 | 2599 | 660348 | 1-413 | 15-427 | AA079443. | |
| HBZAB08 | 2600 | 959560 | 1-449 | 15-463 | AI806340, AI347581, AW058265, AI149706, AA858304, AA416860, AA910678, AA470052, | |
| | | | | | AI674598, and AA887474. | |
| HBNBQ50 | 2601 | 887096 | 1-604 | 15-618 | AA481928, AW370602, AA130551, AA410947, H02520, AA477170, AW362159, AW362184, | |
| | | | | | AI683337, AI151512, AW362163, AW024950, AW362162, AA295138, AW364082, AA434486, | |
| | | | | | AI346658, AI247124, AA434390, AI560635, AI922390, AW193870, AW261977, AI813439, | |
| | | | | | AW050855, AW272323, AI889939, AI633003, AA913117, AI917569, AA862055, AI819001, | |
| | | | | | AA559250, AI589941, AI356811, R72882, AW304202, AI627873, N94336, AA480065, | |
| | | | | | AW130311, AI889450, AW083447, AI631391, AI081435, R93337, AW074375, AW027034, | |
| | | | | | AA527492, W49844, T40555, AI673235, AA010655, H00902, AA211365, AI824358, R66066, | |
| | | | | | AW297543, AA863216, AA568472, AA872583, AA740278, R16077, AW070819, AA877152, | |
| | | | | | AA130587, R72869, AI349088, R72008, AI682945, AI922396, AI682950, AA533970, | |
| | | | | | AA047596, H00901, AA010656, R72471, R15713, R67665, R73357, AI890961, AI801834, | |
| | | | | | AA745829, R73342, AW337286, AW384044, X14856, and A08001. | |
| HBNB030 | 2602 | 430360 | 1-442 | 15-456 | H41301, R36910, AA894644, R87213, H15246, T23507, AI222616, and AB002320. | |
| HBNBL29 | 2603 | 703113 | 1-397 | 15-411 | R18010, AI680708, and AI635217. | |
| HBNBJ29 | 2604 | 907015 | 1-320 | 15-334 | AA935421. | |
| HBNBJ06 | 2605 | 960664 | 1-284 | 15-298 | AI369384, and AA719568. | |
| HBNBB41 | 2606 | 712676 | 1-601 | 15-615 | H95264, AI680749, AI672415, AI492506, AI633630, AI628076, AA699651, AI090129, N73745, | |
| | | | | | AI434427, AI480111, AW088604, AA988606, AA917930, AA236877, AW300229, AI942393, | |
| | | | | | AJ271713, AI627960, AA701995, AI911527, AI693888, AI765976, AA424737, AI984791, | |
| | | | | | AI672498, N38876, AW300532, N66066, W86671, AI478472, AW271444, AI540292, | |
| | | | | | AI350589, AA505970, AA724554, AA905114, AI141611, AA625745, AI623282, AA677788, | |
| | | | | | AI758154, AA553728, AW243369, AI915897, H39811, AI038544, AA904754, F28995, | |
| | | | | | AA953543, H78001, T69270, T67436, H24986, AA235920, Z19235, AI927054, R08315, | |
| | | | | | H81259, T99814, H26910, AI341446, R05488, R05808, C21030, and H39812. | |
| HBNBB27 | 2607 | 600905 | 1-130 | 15-144 | | |
| HBNBB09 | 2608 | 868924 | 1-360 | 15-374 | R42401, H17978, AA412292, AA470014, AA632915, AI147693, AI347038, AI308941, | |
| | | | | | AA135185, AA583432, AA836857, AA018749, AA299011, AA528216, AA516435, AA916348, | |
| | | | | | AA514541, N62509, AI350971, AA494556, and AF184971. | |
| HBNAW73 | 2609 | 764716 | 1-285 | 15-299 | AI190941, R86172, H25501, and Z99289. | |
| HBNAC74 | 2610 | 586797 | 1-140 | 15-154 | AA318750, AA482345, AA281903, AA305550, AA975640, AW411095, AJ130978, and | |
| | | | | | AF099149. | |
| HBNAC71 | 2611 | 525831 | 1-305 | 15-319 | | |
| HBNAC48 | 2612 | 721983 | 1-338 | 15-352 | AA078532, AC006014, AC005488, AC005049, and AL009172. | |
| HBNAC42 | 2613 | 714263 | 1-408 | 15-422 | AA190822. | |
| HBNAC32 | 2614 | 526549 | 1-206 | 15-220 | C14348, AI074047, AF007887, AI078283, C14340, N63997, N62637, AI457357, C14382, | |
| | | | | | AI299045, D25956, AW339264, AI347344, AW135793, AI952780, AI337314, AW166959, | |
| | | | | | AL080011, R81679, AW089495, AI440133, AI521589, AA581403, AI634350, AA836392, | |
| | | | | | AI671661, AI281867, AL046227, AW073858, AI832245, AI636588, AL037582, AL037602, | |
| | | | | | AW022682, AI610362, AI817545, AI824746, AI613038, AI583578, AI612913, AI249946, | |
| | | | | | AW023338, AI860897, AW007555, AW161202, AL039730, AI470293, AW087199, AI305745, | |
| | | | | | AI635892, AW132034, AI434969, AI245008, AI628325, AI817373, AI440284, AI289310, | |
| | | | | | AI682891, AI687568, AI432570, AI288285, AW327527, AI538850, AI277008, AI690813, | |
| | | | | | AI285514, AI471898, AI918634, AI933992, AW088944, AI452560, AW265004, AW198112, | |
| | | | | | AW020358, AI491904, AI621341, AI631107, AI699211, AI623941, AL043089, AI954080, | |
| | | | | | AI889148, AL038529, AI587302, AW150308, AI679550, AI678688, AI287446, AW090387, | |
| | | | | | AW058233, AI862135, AL119457, AW264727, AI587156,AI926041, AJ005511, AI682968, | |
| | | | | | AI921633,AW166870, AI476109, AI912434, AW411043, AI934011, AI890051, AI446511, | |
| | | | | | N25033, AW085709, AA814990, AI241741, AW167157, AW366372, AI758988, AI783569, | |
| | | | | | AW194014, AI885999, AI922315, AW161098, AW167926, AI635016, AW026905, AI270039, | |
| | | | | | AI862139, AI929108, AI885982, AW089233, AL121041, AI918408, AI696846, AI537076, | |
| | | | | | AI584130, AI469516, AI698391, AI250627, AI623682, AI683634, AI680498, AI961589, | |
| | | | | | AI828568, AI493567, AI963191, AA848053, AI620639, AI589428, AA693314, AA514684, | |
| | | | | | AI933001, AI890391, AI818562, AI683497, AI269580, AW089387, AI624548, AI927233, | |
| | | | | | AA856697, AW084151, AI697372, AW169234, Z98519, AL048644, AI537187, AI828734, | |
| | | | | | AI361701, AI435253, AW079432, AI918554, AI457188, AI609556, AL120987, AA760655, | |
| | | | | | AI499621, AI884459, AW080076, AI701975, AW268122, AI924686, AI687168, AW118414, | |
| | | | | | AI280561, AA768369, AI363957, AI572017, AI783504, AI282669, AW075608, AI922689, | |
| | | | | | AI374987, AI633061, AI554344, AI802542, AI571529, AI702527, AF113694, AL035458, | |
| | | | | | AL021393, AL035587, AC005091, AC004383, AC004987, AL034400, AL031346, AC007358, | |
| | | | | | AL031984, AC004822, AL137705, AC002287, AL049761, AC004797, AC004943, AC005291, | |
| | | | | | Z99297, AC005225, AF042090, AP000697, AL121603, AC007390, AC007172, AP000514, | |
| | | | | | Z82206, AC005876, AC005250, AC002471, AC005374, AC000053, AP000340, Z49258, | |
| | | | | | Z83840, AC006313, L78810, AL049776, AC004470, AC002467, AC006501, AF095901, | |
| | | | | | AC004686, AP000250, AP000133, AP000211, AP000030, AL034417, AC004213, AC002060, | |
| | | | | | Z98949, AL022165, AC004227, AC007384, AC006039, AL009179, Z83844, and AL035407. | |
| HBNAC28 | 2615 | 525832 | 1-307 | 15-321 | AC007539. | |
| HBNAC25 | 2616 | 525834 | 1-132 | 15-146 | | |
| HBNAC09 | 2617 | 525833 | 1-63 | 15-77 | AA604441, AI690219, AI693458, AA508848, AA447094, AA830582, AI703075, AW003969, | |
| | | | | | AW189292, AW014124, AA831149, AI278956, AI922983, AA908927, AI703009, AA455884, | |
| | | | | | AI870286, AI160778, AI873461, AI636871, AJ245433, AP000504, and AF129756. | |
| HBNAC02 | 2618 | 921187 | 1-187 | 15-201 | | |
| HBGTT76 | 2619 | 903653 | 1-819 | 15-833 | H62649, AA584581,AA059154, AL043721, AA098922, AA593060, AA443390, AA329321, | |
| | | | | | C18357, C18360, M77895, AA115968, AA365302, AA658235, AW088224, AI921188, | |
| | | | | | AA601270, N43757, AA634855, AI286356, AL138455, AL043756, AA515224, AW117750, | |
| | | | | | AI357551, AI307201, AA630352, AA084070, AI921649, AI929531, AI064952, AI376100, | |
| | | | | | AW162049, F13749, AA665293, N25303, AA655002, AA641103, AL009179, AL096775, | |
| | | | | | Z70688, AL022324, AL034419, AL022318, AL078581, AC005962, D87717, AL035696, | |
| | | | | | U95742, AL049829, AC007068, AC005664, AC000052, AC004019, AF190465, AC004712, | |
| | | | | | AL023494, AL109627, AL035460, AP000512, AC007022, Z82208, AL122020, AC004797, | |
| | | | | | AC004622, AC006332, AC004477, AL031005, AL008582, AL008721, AC004859, M87923, | |
| | | | | | AC005663, AB023051, AC007686, S42659, AC007225, AC004933, AC005406, AC002287, | |
| | | | | | AC005783, Z95114, AL049776, AL035681, AC006138, AC002119, AC005618, AC004027, | |
| | | | | | AC006596, AL034548, AL049875, AC005358, AC005911, AF111168, AC005725, AC005288, | |
| | | | | | AC007546, AC006576, AP000513, AC004526, AC004671, AF072099, L27148, AC004695, | |
| | | | | | Z82188, AP000270, AC000087, AC004972, AC004927, AP000351, AP000131, AP000209, | |
| | | | | | U66059, AL031848, AC004638, AC000120, AL078477, AL008629, AC016026, AP000248, | |
| | | | | | Z98036, AL031782, AC006480, AL133448, AB016897, AL117258, AL023807, AP000032, | |
| | | | | | AC007690, AC004517, AL031296, AC005324, AC005696, AC006211, AP000349, AC007845, | |
| | | | | | AC005081, AL022163, AC004035, AL034420, AC005362, AP000049, Z82178, AP000134, | |
| | | | | | AP000212, AL031291, AP000311, AC007283, AC005808, AL023553, AL031591, AP000080, | |
| | | | | | AL031846, AC006409, AL109628, AC004522, AC007676, AC004890, AC005104, Z85996, | |
| | | | | | AC002115, AL022311, AC006132, AF165926, Z97205, AC006285, AC005342, and AF196969. | |
| HBGTE11 | 2620 | 965121 | 1-313 | 15-327 | AW015800, AA251013, and AF037222. | |
| HBGQS88 | 2621 | 886650 | 1-436 | 15-450 | AW304683, and AC004152. | |
| HBGNL85 | 2622 | 848179 | 1-692 | 15-706 | AW104050, AA738352, AI953035, AI341184, AA995803, and AA911220. | |
| HBGND04 | 2623 | 926973 | 1-582 | 15-596 | AI057634, AW182951, AI655334, AA854636, AI218588, AI457916, AA961245, and | |
| | | | | | AA953084. | |
| HBGMT82 | 2624 | 954374 | 1-495 | 15-509 | AW007399, AA782657, AI673493, AW104963, AI539419, AI970048, AW272491, AI827847, | |
| | | | | | AI707847, AI201450, AI160580, AI149344, AI719374, AI870582, AW068652, AW131835, | |
| | | | | | AA022523, AI142042, AA689495, AI394166, AI197831, AI452812, AA536006, AA483525, | |
| | | | | | N24911, AI220974, AA994188, AA687451, AA745895, AI808412, AI475847, AA687509, | |
| | | | | | AA733114, AA480131, N78953, AA380438, AW246627, AI749023, AI382254, AA524482, | |
| | | | | | F22287, AA053148, AA689552, AA405870, AI190107, W17347, AI245397, AA482098, | |
| | | | | | AA622680, AI458806, AI143698, AW084279, AA113160, AW304748, AA977756, AI589259, | |
| | | | | | AJ917965, AI061434, AA576098, AF096303, and AF024631. | |
| HBGM569 | 2625 | 754392 | 1-438 | 15-452 | N78741. | |
| HBGM078 | 2626 | 773043 | 1-474 | 15-488 | AA417275, AA421555, AI863143, AA460243, AI491842, AI540501, AA831948, AI082645, | |
| | | | | | AI969655, AI864102, AI355990, AI923989, AI564629, AL036705, AI924051, AA642437, | |
| | | | | | AA804776, AI567883, AF070643, U02475, AL137258, and AL137254. | |
| HBGMG81 | 2627 | 880276 | 1-678 | 15-692 | AA974503, AI986165, AL079812, AA287570, AA255853, AA129446, AL043009, AA866015, | |
| | | | | | AW237905, AA653154, AF039185, AI755214, H96249, AI754105, AI754567, AI656840, | |
| | | | | | AL079734, AI476049, AA488903, H07953, AA521399, AA521323, AI369580, AA013168, | |
| | | | | | AA054085, AI380617, AW419389, AW265385, T74524, AA019973, AW069769, A1110844, | |
| | | | | | AA443390, AL043718, AI431303, AA442528, AI358712, AW419262, AA167792, AA489204, | |
| | | | | | AA613203, AI733856, AA833875, AW023111, AA833896, AA826669, AA491284, AI675615, | |
| | | | | | AI821714, AI792133, AI791913, AA665330, AI815210, AI612142, AI609972, AW271904, | |
| | | | | | AI150401, AI923052, AA769402, AW327868, AW003886, AL118991, R43310, AL119838, | |
| | | | | | AW245747, AI436433, AA719073, AA191418, AA847499, AA682912, AI917132, AI696878, | |
| | | | | | AI792521, AA410788, AA613232, AW021917, AA630362, AI582769, AA563733, AI247101, | |
| | | | | | AI821785, AI732151, AI583252, AW303196, AI687343, AI610941, AL044940, AA480772, | |
| | | | | | AI003972, AA502532, AW026305, AI421950, AI345654, AA669840, AA530958, AW408717, | |
| | | | | | AW270385, AI419337, AW270771, AI963720, AW193265, AI754653, AI056177, AA613227, | |
| | | | | | AA829036, AW020088, AW301350, AA659324, AA581903, H73550, AW265688, AW020150, | |
| | | | | | AL046205, AL042756, AL038705, AA569667, AA714110, AA579179, AA128592, AI345157, | |
| | | | | | AA714011, AI270117, AA468022, AA631507, AI879951, AC007349, AC004913, AL023803, | |
| | | | | | AP000088, AL121603, U85195, AC005291, AC005527, AC007687, AP000557, AE000658, | |
| | | | | | AC005529, AC005694, AC000052, AC007488, AL078593, AL021155, AP000355, AC000025, | |
| | | | | | AL132712, AC005411, AJ010770, AC004167, AP0G0501, AF088219, AC004686, AP000503, | |
| | | | | | AL008627, AL031255, AC000353, AC004019, AC004638, AL078463, AC005355, AC002369, | |
| | | | | | AL096774, AC005225, U96629, AC006480, AC004812, AC020663, AL021918, AL133448, | |
| | | | | | AP0G0505, U91319, AL031659, AC004228, AL133243, AC007536, AC002350, AC002565, | |
| | | | | | AC002347, AC002045, AC006965, AC006285, AC006064, AC005015, AL035089, AP000044, | |
| | | | | | AP000112, AL009181, AC005274, AC006211, AL008718, AF196779, AL023807, AC008040, | |
| | | | | | AF045555, AP000114, AP000046, AL022323, AC005778, AC005488, AC005531, AC004941, | |
| | | | | | AL121652, AC002470, AL031311, AC006126, AC005799, AL035072, AL022326, AL034549, | |
| | | | | | AP001051, AC005859, AL022322, AC007664, AL031668, AC003684, AC005899, Z95152, | |
| | | | | | AL031283, AC007225, AC006449, AL050318, AL121655, AC005996, AC005318, AC005378, | |
| | | | | | U80017, AC005231, AC003101, AC005900, U95742, AL031848, AC006511, L78833, Y14768, | |
| | | | | | Z99716, Z81314, AC002395, AC002316, AF139813, AC002314, AC005295, AL109628, | |
| | | | | | AC005086, AC005701, AC007216, AC006388, AC007308, AC006000, AF001549, AC005519, | |
| | | | | | AC005988, AC005837, AC005756, AC002549, AL023553, AC006111, AC002301, AC004815, | |
| | | | | | AC005207, D88270, AP000245, AC005031, AC005747, AC005088, AC011311, AF030453, | |
| | | | | | AC007731, AC007666, AJ246003, AC007686, AC007384, AL133244, AC002310, AC009247, | |
| | | | | | AC007919, AC007227, AC006130, AC005914, AL078623, AC004797, AC005911, AC005280, | |
| | | | | | AC007395, AL021707, AC005500, Z99128, AC005324, AC007546, AL031427, AL049759, | |
| | | | | | AL034420, AC009516, AC005562, AC006057, AC004526, AC003029, AL050341, AL049748, | |
| | | | | | AC005154, AL096791, AC006213, AC005250, AL049869, AF129756, Z83838, AC002504, | |
| | | | | | AL020997, AC006312, AC004675, U62317, AC006277, AC005399, AC006468, AL109865, | |
| | | | | | AL031662, AL021368, AC004990, AL109827, AP000031, AC002429, AL035417, AC003983, | |
| | | | | | AL024474, AC005206, AC005393, AC003080, AC004878, AC004805, AL035455, U47924, | |
| | | | | | AC007262, AP000504, AC005874, AF134471, AC006252, AC004020, Y07848, AC003006, | |
| | | | | | U91321, AC006023, AC005412, AC005043, AL022312, AC004106, AC004883, AP000692, | |
| | | | | | AC006236, Z98742, AC004659, AC000026, AC007066, AC005783, AC007637, AL035681, | |
| | | | | | Z83844, AL050312, AC007450, AC005184, AC007242, AC005696, AL109984, AC005484, | |
| | | | | | AC007993, AP001037, AC005520, AL121653, AC005011, AC004033, AC005667, AC004584, | |
| | | | | | AC004988, AL121658, AP000553, AL031670, AC006430, and Z85986. | |
| HBGF588 | 2628 | 914032 | 1-628 | 15-642 | AA778429, AI563955, AA928041, AA626794, AI871136, W44486, AA071274, AA126250, | |
| | | | | | AA902119, AA029458, AI814680, N70230, AI340231, N67040, AW074273, AI417119, | |
| | | | | | AI027942, AI343619, AA644262, AI080252, AI804089, AA865354, AI186469, AA496355, | |
| | | | | | AI753118, AI868721, N63928, N71035, AI336036, AA861853, AW262673, AA205643, | |
| | | | | | D60248, AI524080, AI969141, AI755095, AW249740, AI955645, D60466, C00015, N98454, | |
| | | | | | AA496405, D60550, AI659597, AI383091, N79606, AI187029, AA128493, D60009, AA512988, | |
| | | | | | AA128352, H94297, AA626779, AI357512, H95828, C14688, T70086, AA649543, AA595243, | |
| | | | | | AI368586, AW022016, T47633, AI672897, AA029523, R73069, AA693672, AA991733, | |
| | | | | | R94710, T83736, AI418701, AW028373, R23240, AI538371, AI954235, AI623761, D81788, | |
| | | | | | AA205642, W01019, AI954237, H94191, AI382863, R33837, AA364340, AA094118, R94790, | |
| | | | | | D81287, W44485, R23316, W19084, N41706, D60973, T70157, R81247, T83907, AI910652, | |
| | | | | | D60249, D81466, AA093704, D60551, AA354560, R33836, R81248, W01933, AI683085, | |
| | | | | | AA383533, T47632, AA093663, H57883, AI355051, and AC005369. | |
| HBGFG53 | 2629 | 727748 | 1-461 | 15-475 | AA419551, AW292148, AI791628, AI821482, and AL137722. | |
| HBGDH33 | 2630 | 702854 | 1-458 | 15-472 | AI399653, AA453794, R44976, H06251, R60067, AI278851, AA528243, AA973793, | |
| | | | | | AA453879, R44717, and Z40655. | |
| HBGDF39 | 2631 | 861602 | 1-341 | 15-355 | D59582, and D59820. | |
| HBGDA74 | 2632 | 832888 | 1-474 | 15-488 | AI565755, AI342368, W76561, AA780301, AI200880, AW195697, AA451937, W23209, | |
| | | | | | AA364898, AI050849, H39591, AI028147, AW293972, AI474504, AA324713, AI628717, | |
| | | | | | AA961641, N24530, AF071749, AF136279, AF071748, AF132894, AF088886, AR016587, | |
| | | | | | AL137742, AJ007331, and E15813. | |
| HBGBG69 | 2633 | 802090 | 1-43 | 15-57 | | |
| HBGBG67 | 2634 | 588263 | 1-192 | 15-206 | R60478, R11939, AI140927, AW166520, AI097082, AI378818, AW070736, AA022937, | |
| | | | | | AI417973, AI278239, AA813598, AW024249, AI143513, R02801, AW024258, AI097158, | |
| | | | | | AI217615, AA128646, AI831140, AA151765, AI348969, AW058275, AI273856, AI537960, | |
| | | | | | AI310767, AA012905, AL048340, AI952433, AI348854, N22406, AI335235, N20984, | |
| | | | | | AA808904, AI860833, R49697, AI673140, AI810317, AW075382, AL047422, AI288076, | |
| | | | | | AI499104, AI539690, AI473554, AL117403, AF115410, U58996, U68233, I92592, AC005902, | |
| | | | | | AR068751, AF100781, AF213396, Y10080, AL117583, AC004227, AC006288, AF013249, | |
| | | | | | AL133081, AF026124, AF181849, AF181850, AI5345, AL080124, AC005221, AR066486, | |
| | | | | | A70386, AF161699, AF082526, AL049300, I80064, D44497, I08608, AF000301, AF137367, | |
| | | | | | AR023871, AL050310, X56530, and AL110222. | |
| HBGBG52 | 2635 | 522424 | 1-245 | 15-259 | T71030, AA747777, AA381858, AA668902, AA558060, T90248, AA934680, AA059235, | |
| | | | | | T70174, AA678436, H86264, AC006001, AC002350, AL021546, AC006449, AC006026, | |
| | | | | | AC003102, AC004895, U18671, AC005387, AL133246, AC022517, AC005696, AL021939, | |
| | | | | | AL035072, AC005089, AC005694, AL050333, AC005565, AL121603, AL135744, AC005839, | |
| | | | | | AL008582, AC006960, U95742, AC006277, AC006071, AL022302, AC006241, AL031681, | |
| | | | | | AC005295, AC005004, AC005899, AC002312, AC005785, AL049776, AC002310, AC004253, | |
| | | | | | AC007666, AC006530, AC004859, AC000353, AJ003147, AC004858, AC005081, AC002126, | |
| | | | | | AF196969, AC005231, AC004966, AL035587, AF109907, AC002470, AC005015, AP000688, | |
| | | | | | AC005829, AC004383, AC005529, AC005940, AC004491, AL022322, AC007216, AC004019, | |
| | | | | | AC006064, AC004030, AC007055, AL034420, AC005288, Z83840, D00591, AC007308, | |
| | | | | | AL023803, AC005011, AL049757, AC005776, AC005102, AC007021, AL034423, AP000692, | |
| | | | | | AL109847, AF017104, AP000503, AC002347, AL035659, S77605, Z99716, AP000556, | |
| | | | | | AL031005, AC002369, AL079340, AC007917, AL049780, AC004228, AC005944, AC005971, | |
| | | | | | AC004770, AC004804, AC006312, Z98950, AC002128, AC005527, AC002073, U91326, | |
| | | | | | AC007193, AC002116, AL008718, AC007421, AC002477, AC007637, AF001549, AC002072, | |
| | | | | | AF003626, AC005218, AL121655, AC005500, AL035071, AC003689, AC005622, AL022318, | |
| | | | | | AL050318, AB003151, AL096707, D26535, AL096701, AL022323, AL034350, AC005535, | |
| | | | | | AC004876, Z83820, AC007066, AC007283, AP000115, AL133371, L78810, AC009516, and | |
| | | | | | AC002316. | |
| HBGBG38 | 2636 | 525837 | 1-137 | 15-151 | | |
| HBGBE12 | 2637 | 971466 | 1-94 | 15-108 | | |
| HBGBB78 | 2638 | 773930 | 1-329 | 15-343 | H51141, and D37934. | |
| HBCPV80 | 2639 | 932817 | 1-390 | 15-404 | AI306162, AI492835, AC002359, and AC002365. | |
| HBCPO75 | 2640 | 927520 | 1-473 | 15-487 | AI017490, AI221329, AA973064, AA813611, AI688144, AI222206, AW182987, AA883877, | |
| | | | | | W31185, AI208514, AI917508, and AI810095. | |
| HBCPK03 | 2641 | 922493 | 1-720 | 15-734 | AA831288. | |
| HBCJP02 | 2642 | 917981 | 1-494 | 15-508 | AI188098, AW304309, AI375434, AI625524, AI016723, AI167974, AI302664, AW001092, | |
| | | | | | AI246687, AI572643, AI201622, AW151711, AW167729, AI609516, AI687735, AI191064, | |
| | | | | | AI289182, AI191358, AI024836, AA632308, AI831665, AI084459, AI088322, AA242818, | |
| | | | | | AA580006, AI888580, AA011305, AI870130, AW168685, AA010915, AW078807, AI372084, | |
| | | | | | AI217609, AI200991, AW237859, AI263564, AA629134, AI720347, AA862783, AI880912, | |
| | | | | | AA564376, AI879913, AI367291, N74110, Z21520, AA028965, AI349340, AA298576, and | |
| | | | | | AI582057. | |
| HBCJG07 | 2643 | 951898 | 1-375 | 15-389 | R82747, R30969, and T87286. | |
| HAUCC58 | 2644 | 764851 | 1-390 | 15-404 | AA235095, W63805, W07740, AA302624, AA293831, AA315199, R53208, AI568567, | |
| | | | | | AI992241, AI086596, AW151172, AA309877, AI080304, AA401651, AW090277, AA150647, | |
| | | | | | AA708776, AA142944, AI826693, AA843315, N77987, AW051448, AA527053, N92512, | |
| | | | | | R87425, AI129519, AI031868, AI083531, AI335895, AI039605, AI299184, AI200329, | |
| | | | | | AI148099, AA788733, AA115544, AA389673, AW337779, AA588191, AI141373, H66602, | |
| | | | | | AI192219, AA708520, AA079352, AI076910, AA872411, AA860813, AI160688, AI805893, | |
| | | | | | AA455203, AA769806, AA411491, AA436345, AA493343, AI193844, AI421247, AI167692, | |
| | | | | | AI074899, AI193867, AA249309, F32557, AA722032, N80680, W38964, F24549, T83037, | |
| | | | | | AA402479, AA844466, AI141356, N58395, AA454862, AI161139, AW008542, W93969, | |
| | | | | | W93970, AA336147, R48412, AI378335, T90357, H95941, AA568295, R86694, AA341105, | |
| | | | | | AA228455, AW352337, W30921, AW337638, N74117, AA303783, AA215973, AW009811, | |
| | | | | | R53110, AA558040, AI961636, F24945, AA715148, R49774, F35088, AA228454, AA328964, | |
| | | | | | AA077962, R11503, H87636, AI695590, AA904185, AA398459, AI803601, R86695, | |
| | | | | | AA115055, AA192729, AA889647, and AF151893. | |
| HAUAW51 | 2645 | 577959 | 1-336 | 15-350 | AA214667, and H78996. | |
| HAUA589 | 2646 | 518847 | 1-164 | 15-178 | AA926970, F27522, F30071, AA096277, AA627396, F33364, AA318284, AI283651, F27676, | |
| | | | | | AW015956, AA947143, AA244132, AA327732, AA352731, AA320725, AA089891, AA317435, | |
| | | | | | AA319168, F30100, AA664996, F29754, F27644, F27760, AI832645, F24555, AI560279, | |
| | | | | | AA306681, AI749712, AI289147, AI130748, AA694164, AI023676, AA244131, F26815, | |
| | | | | | AI039009, F33405, AI309287, AA534561, T74859, F35771, F34894, F35313, W78719, F30920, | |
| | | | | | AA694524, AA524049, AI150756, AI344732, D51606, AA903996, AA864997, AC008044, and | |
| | | | | | AC008372. | |
| HAUAQ28 | 2647 | 685374 | 1-520 | 15-534 | AA127594. | |
| HAQCF25 | 2648 | 678235 | 1-513 | 15-527 | T63571, AI832218, T63496, AI004915, AI990727, AW381879, AW381818, AW381815, | |
| | | | | | AI254648, AI917020, and AL137725. | |
| HAQCD07 | 2649 | 958959 | 1-439 | 15-453 | AI142585, AI082139, AW051999, AA833602, AA719280, AA703255, AI870257, AI952791, | |
| | | | | | AA625853, AI125671, AW104742, AA813022, R44512, AA928937, AI826007, AI921451, | |
| | | | | | AI272168, AL120554, AI928736, R48258, AI453416, AW104741, AI933170, AA350537, | |
| | | | | | T98866, AA364915, T40772, AI784134, AA053022, AA740797, AA350621, AA340417, | |
| | | | | | AI240679, AA308837, H16246, AA053159, AA907088, N86840, AW401390, AI939391, | |
| | | | | | AW071136, H30533, R37449, R37338, AC005781, and AC005581. | |
| HACMR08 | 2650 | 955638 | 1-485 | 15-499 | AI292236, AW265393, AI123080, AW069769, AL042373, AW069227, AL038936, AI040051, | |
| | | | | | AW438542, AI216990, AL079734, AA402129, AI887235, AI674946, AA501461, AI733856, | |
| | | | | | AI755214, AW303196, AA469327, AA502532, AW301350, AL120343, AI754105, AA515728, | |
| | | | | | AI754567, AW274349, AI821714, AI792133, AI791913, AW265090, AW270258, AW088846, | |
| | | | | | AW021015, AW237905, AW072923, AW302315, AI354423, AW103509, AW341903, | |
| | | | | | AI859946, AI821785, AA653139, AW270270, AL040054, AA613627, AI696962, AI357823, | |
| | | | | | AL042856, AW407578, AA602906, AI801482, AI267356, AW270619, T67090, AI753488, | |
| | | | | | AI281881, AA582554, AW021917, AA634837, AA715814, AI267450, AI874341, AA704393, | |
| | | | | | AL045709, T74524, AA644090, AI754037, AA584489, AI969436, AA631507, AI282253, | |
| | | | | | AI054333, AW410354, AW277174, AA470344, AA533025, AW117740, AL044858, AA284247, | |
| | | | | | AA595499, AI473943, AI278089, AW302711, AW270768, AA764783, AI889440, AI275982, | |
| | | | | | AI687343, AI081147, AL042756, AI368256, AW190505, AI291037, AW327624, H07953, | |
| | | | | | AI244127, AW263864, AI371249, AA525253, AA613624, AW438539, AI792499, AI017251, | |
| | | | | | AA833875, AA833896, AA192278, AI144081, AI380617, AI369580, AI567076, AL079645, | |
| | | | | | AI291823, AA430137, AI110844, AA634786, AW020992, AI064864, AW021951, AA307598, | |
| | | | | | AW021154, AI917132, AA622801, H73561, AI872216, AL109758, AC002301, AC006077, | |
| | | | | | Z68276, AC005089, AL049872, AC006441, Z82182, AC002306, AC007204, AE205588, | |
| | | | | | AP000251, AC005399, AC006262, AP000212, AP000134, AP000030, AC007371, AC002430, | |
| | | | | | AC005808, AC007384, AC004859, AC006006, AC005632, AP000356, AL022721, AC004257, | |
| | | | | | AC005037, AF053356, AL034417, AC005696, AC002119, AC005261, AL034420, AF196779, | |
| | | | | | AC004515, AC004797, AF111167, AC004878, Z85986, AC005377, AC004253, AC002477, | |
| | | | | | AC005901, AC005519, AC004655, AC002492, AL031433, AL035458, AC006317, AC006966, | |
| | | | | | AC004921, AC004895, AC004477, AL022476, AL133448, AC004858, AC005682, AB023049, | |
| | | | | | AC005060, AC000113, AC005179, AF196972, AC005666, AC008372, AC007055, AL135744, | |
| | | | | | AP000065, AC004967, AL024509, AC007216, AC015853, AC002425, AF109907, AL034429, | |
| | | | | | AC002544, AL121658, AC007684, AC007842, AC002347, AC004106, AC007227, AC006487, | |
| | | | | | AC005332, AC005251, AL031228, AC007226, AC007686, AL136504, AF031078, AC004972, | |
| | | | | | AL079340, AC006430, AL033527, AC005701, AF015262, AF165142, AL050307, AC005694, | |
| | | | | | AL035410, U85195, AL008627, AF030876, AC005200, AJ229043, AC002039, AC005829, | |
| | | | | | AC004098, AC009247, Z98200, AC004686, AL139054, AC004128, AL021918, AC004099, | |
| | | | | | AC004386, AC003101, AC004552, AC005599, AE000658, AF042090, Z84467, AC003093, | |
| | | | | | AC004448, AC007073, AL033525, AC005255, AC004890, AC005324, AC005578, AL031005, | |
| | | | | | AC007225, AF111168, AC005726, AC005821, AL035587, AC005207, AC004408, AL022327, | |
| | | | | | AC005529, U95742, AC006026, AC004236, AC004150, AC005736, AC007052, AF134726, | |
| | | | | | AC000353, AC003108, AF088219, AL022320, AF129756, Z82244, AP000215, AC004263, | |
| | | | | | AC016831, AC008115, AF146191, AC004659, AL035405, AL021393, AC005899, AC002365, | |
| | | | | | AF001549, AC006101, AL021546, AL117344, Z97056, AL133246, AL034548, Y18000, | |
| | | | | | AC003992, AC004707, AF017104, AD000092, AC007899, AC012627, AC005905, AC004590, | |
| | | | | | AP0G0505, AC005874, AF134471, AC004796, AL031117, AL109627, AL049643, AL049748, | |
| | | | | | AC005972, AL049873, AP000252, AL133500, AC004913, AL034555, AC006120, D87675, | |
| | | | | | AL135960, AJ131016, AC007277, AC005378, AC005071, AC003070, AC004841, AC004622, | |
| | | | | | Z97352, AC002350, AC006254, AC006511, Z98742, AL031276, AC003110, D63507, | |
| | | | | | AL096701, AC005216, AC004475, AP000349, Z70288, AL031286, AC005409, AC002073, | |
| | | | | | Y10196, AC005520, AC005057, AF064861, AL049843, AC005102, AC004812, AC002418, | |
| | | | | | AC005295, AC002553, AL110502, AF190465, AL121603, AC000385, AC007546, AL022162, | |
| | | | | | AC005730, AC005484, AC004887, AC004000, AL122023, AC005280, AC003043, AC002504, | |
| | | | | | AL031295, AC007537, Z68269, AF015148, AC008044, AB026898, AL109628, and AI420248. | |

[0128] TABLE 4

| Code | Description | Tissue | Organ | Cell Line | Disease | Vector |
|---|---|---|---|---|---|---|
| AR022 | a_Heart | a_Heart | | | | |
| AR023 | a_Liver | a_Liver | | | | |
| AR024 | a_mammary gland | a_mammary gland | | | | |
| AR025 | a_Prostate | a_Prostate | | | | |
| AR026 | a_small intestine | a_small intestine | | | | |
| AR027 | a_Stomach | a_Stomach | | | | |
| AR028 | Blood B cells | Blood B cells | | | | |
| AR029 | Blood B cells activated | Blood B cells | | | | |
| | | activated | | | | |
| AR030 | Blood B cells resting | Blood B cells | | | | |
| | | resting | | | | |
| AR031 | Blood T cells activated | Blood T cells | | | | |
| | | activated | | | | |
| AR032 | Blood T cells resting | Blood T cells resting | | | | |
| AR033 | brain | brain | | | | |
| AR034 | breast | breast | | | | |
| AR035 | breast cancer | breast cancer | | | | |
| AR036 | Cell Line CAOV3 | Cell Line CAOV3 | | | | |
| AR037 | cell line PA-1 | cell line PA-1 | | | | |
| AR038 | cell line transformed | cell line transformed | | | | |
| AR039 | colon | colon | | | | |
| AR040 | colon (9808co65R) | colon (9808co65R) | | | | |
| AR041 | colon (9809co15) | colon (9809co15) | | | | |
| AR042 | colon cancer | colon cancer | | | | |
| AR043 | colon cancer (9808co64R) | colon cancer | | | | |
| | | (9808co64R) | | | | |
| AR044 | colon cancer 9809co14 | colon cancer | | | | |
| | | 9809co14 | | | | |
| AR045 | corn clone 5 | corn clone 5 | | | | |
| AR046 | corn clone 6 | corn clone 6 | | | | |
| AR047 | corn clone 2 | corn clone 2 | | | | |
| AR048 | corn clone 3 | corn clone 3 | | | | |
| AR049 | Corn Clone 4 | Corn Clone 4 | | | | |
| AR050 | Donor II B Cells 24 hrs | Donor II B Cells | | | | |
| | | 24 hrs | | | | |
| AR051 | Donor II B Cells 72 hrs | Donor II B Cells | | | | |
| | | 72 hrs | | | | |
| AR052 | Donor II B-Cells 24 hrs. | Donor II B-Cells 24 | | | | |
| | | hrs. | | | | |
| AR053 | Donor II B-Cells 72 hrs | Donor II B-Cells | | | | |
| | | 72 hrs | | | | |
| AR054 | Donor II Resting B Cells | Donor II Resting B | | | | |
| | | Cells | | | | |
| AR055 | Heart | Heart | | | | |
| AR056 | Human Lung (clonetech) | Human Lung | | | | |
| | | (clonetech) | | | | |
| AR057 | Human Mammary | Human Mammary | | | | |
| | (clontech) | (clontech) | | | | |
| AR058 | Human Thymus | Human Thymus | | | | |
| | (clonetech) | (clonetech) | | | | |
| AR059 | Jurkat (unstimulated) | Jurkat | | | | |
| | | (unstimulated) | | | | |
| AR060 | Kidney | Kidney | | | | |
| AR061 | Liver | Liver | | | | |
| AR062 | Liver (Clontech) | Liver (Clontech) | | | | |
| AR063 | Lymphocytes chronic | Lymphocytes | | | | |
| | lymphocytic leukaemia | chronic lymphocytic | | | | |
| | | leukaemia | | | | |
| AR064 | Lymphocytes diffuse large | Lymphocytes | | | | |
| | B cell lymphoma | diffuse large B cell | | | | |
| | | lymphoma | | | | |
| AR065 | Lymphocytes follicular | Lymphocytes | | | | |
| | lymphoma | follicular lymphoma | | | | |
| AR066 | normal breast | normal breast | | | | |
| AR067 | Normal Ovarian | Normal Ovarian | | | | |
| | (4004901) | (4004901) | | | | |
| AR068 | Normal Ovary 9508G045 | Normal Ovary | | | | |
| | | 9508G045 | | | | |
| AR069 | Normal Ovary 9701G208 | Normal Ovary | | | | |
| | | 9701G208 | | | | |
| AR070 | Normal Ovary 9806G005 | Normal Ovary | | | | |
| | | 9806G005 | | | | |
| AR071 | Ovarian Cancer | Ovarian Cancer | | | | |
| AR072 | Ovarian Cancer | Ovarian Cancer | | | | |
| | (9702G001) | (9702G001) | | | | |
| AR073 | Ovarian Cancer | Ovarian Cancer | | | | |
| | (9707G029) | (9707G029) | | | | |
| AR074 | Ovarian Cancer | Ovarian Cancer | | | | |
| | (9804G011) | (9804G011) | | | | |
| AR075 | Ovarian Cancer | Ovarian Cancer | | | | |
| | (9806G019) | (9806G019) | | | | |
| AR076 | Ovarian Cancer | Ovarian Cancer | | | | |
| | (9807G017) | (9807G017) | | | | |
| AR077 | Ovarian Cancer | Ovarian Cancer | | | | |
| | (9809G001) | (9809G001) | | | | |
| AR078 | ovarian cancer 15799 | ovarian cancer | | | | |
| | | 15799 | | | | |
| AR079 | Ovarian Cancer | Ovarian Cancer | | | | |
| | 17717AID | 17717AID | | | | |
| AR080 | Ovarian Cancer | Ovarian Cancer | | | | |
| | 4004664B1 | 4004664B1 | | | | |
| AR081 | Ovarian Cancer | Ovarian Cancer | | | | |
| | 4005315A1 | 4005315A1 | | | | |
| AR082 | ovarian cancer 94127303 | ovarian cancer | | | | |
| | | 94127303 | | | | |
| AR083 | Ovarian Cancer 96069304 | Ovarian Cancer | | | | |
| | | 96069304 | | | | |
| AR084 | Ovarian Cancer 9707G029 | Ovarian Cancer | | | | |
| | | 9707G029 | | | | |
| AR085 | Ovarian Cancer 9807G045 | Ovarian Cancer | | | | |
| | | 9807G045 | | | | |
| AR086 | ovarian cancer 9809G001 | ovarian cancer | | | | |
| | | 9809G001 | | | | |
| AR087 | Ovarian Cancer | Ovarian Cancer | | | | |
| | 9905C032RC | 9905C032RC | | | | |
| AR088 | Ovarian cancer 9907 C00 | Ovarian cancer 9907 | | | | |
| | 3rd | C00 3rd | | | | |
| AR089 | Prostate | Prostate | | | | |
| AR090 | Prostate (clonetech) | Prostate (clonetech) | | | | |
| AR091 | prostate cancer | prostate cancer | | | | |
| AR092 | prostate cancer #15176 | prostate cancer | | | | |
| | | #15176 | | | | |
| AR093 | prostate cancer #15509 | prostate cancer | | | | |
| | | #15509 | | | | |
| AR094 | prostate cancer #15673 | prostate cancer | | | | |
| | | #15673 | | | | |
| AR095 | Small Intestine (Clontech) | Small Intestine | | | | |
| | | (Clontech) | | | | |
| AR096 | Spleen | Spleen | | | | |
| AR097 | Thymus T cells activated | Thymus T cells | | | | |
| | | activated | | | | |
| AR098 | Thymus T cells resting | Thymus T cells | | | | |
| | | resting | | | | |
| AR099 | Tonsil | Tonsil | | | | |
| AR100 | Tonsil germinal center | Tonsil germinal | | | | |
| | centroblast | center centroblast | | | | |
| AR101 | Tonsil germinal center B | Tonsil germinal | | | | |
| | cell | center B cell | | | | |
| AR102 | Tonsil lymph node | Tonsil lymph node | | | | |
| AR103 | Tonsil memory B cell | Tonsil memory B | | | | |
| | | cell | | | | |
| AR104 | Whole Brain | Whole Brain | | | | |
| AR105 | Xenograft ES-2 | Xenograft ES-2 | | | | |
| AR106 | Xenograft SW626 | Xenograft SW626 | | | | |
| H0008 | Whole 6 Week Old | | | | | Uni-ZAP XR |
| | Embryo | | | | | |
| H0009 | Human Fetal Brain | | | | | Uni-ZAP XR |
| H0012 | Human Fetal Kidney | Human Fetal Kidney | Kidney | | | Uni-ZAP XR |
| H0013 | Human 8 Week Whole | Human 8 Week Old | Embryo | | | Uni-ZAP XR |
| | Embryo | Embryo | | | | |
| H0028 | Human Old Ovary | Human Old Ovary | Ovary | | | pBluescript |
| H0030 | Human Placenta | | | | | Uni-ZAP XR |
| H0031 | Human Placenta | Human Placenta | Placenta | | | Uni-ZAP XR |
| H0032 | Human Prostate | Human Prostate | Prostate | | | Uni-ZAP XR |
| H0038 | Human Testes | Human Testes | Testis | | | Uni-ZAP XR |
| H0040 | Human Testes Tumor | Human Testes | Testis | | disease | Uni-ZAP XR |
| | | Tumor | | | | |
| H0046 | Human Endometrial | Human Endometrial | Uterus | | disease | Uni-ZAP XR |
| | Tumor | Tumor | | | | |
| H0050 | Human Fetal Heart | Human Fetal Heart | Heart | | | Uni-ZAP XR |
| H0051 | Human Hippocampus | Human | Brain | | | Uni-ZAP XR |
| | | Hippocampus | | | | |
| H0052 | Human Cerebellum | Human Cerebellum | Brain | | | Uni-ZAP XR |
| H0055 | Human Umbilical Vein | Human Umbilical | Umbilical | | | Uni-ZAP XR |
| | | Vein Endothelial | vein | | | |
| | | Cells | | | | |
| H0056 | Human Umbilical Vein, | Human Umbilical | Umbilical | | | Uni-ZAP XR |
| | Endo. remake | Vein Endothelial | vein | | | |
| | | Cells | | | | |
| H0057 | Human Fetal Spleen | | | | | Uni-ZAP XR |
| H0059 | Human Uterine Cancer | Human Uterine | Uterus | | disease | Lambda |
| | | Cancer | | | | ZAP II |
| H0063 | Human Thymus | Human Thymus | Thymus | | | Uni-ZAP XR |
| H0087 | Human Thymus | Human Thymus | | | | pBluescript |
| H0090 | Human T-Cell Lymphoma | T-Cell Lymphoma | T-Cell | | disease | Uni-ZAP XR |
| H0102 | Human Whole 6 Week | Human Whole Six | Embryo | | | pBluescript |
| | Old Embryo (II), subt | Week Old Embryo | | | | |
| H0111 | Human Placenta, | Human Placenta | Placenta | | | pBluescript |
| | subtracted | | | | | |
| H0124 | Human | Human | Sk Muscle | | disease | Uni-ZAP XR |
| | Rhabdomyosarcoma | Rhabdomyosarcoma | | | | |
| H0144 | Nine Week Old Early | 9 Wk Old Early | Embryo | | | Uni-ZAP XR |
| | Stage Human | Stage Human | | | | |
| H0150 | Human Epididymus | Epididymis | Testis | | | Uni-ZAP XR |
| H0156 | Human Adrenal Gland | Human Adrenal | Adrenal | | disease | Uni-ZAP XR |
| | Tumor | Gland Tumor | Gland | | | |
| H0163 | Human Synovium | Human Synovium | Synovium | | | Uni-ZAP XR |
| H0165 | Human Prostate Cancer, | Human Prostate | Prostate | | disease | Uni-ZAP XR |
| | Stage B2 | Cancer, stage B2 | | | | |
| H0166 | Human Prostate Cancer, | Human Prostate | Prostate | | disease | Uni-ZAP XR |
| | Stage B2 fraction | Cancer, stage B2 | | | | |
| H0168 | Human Prostate Cancer, | Human Prostate | Prostate | | disease | Uni-ZAP XR |
| | Stage C | Cancer, stage C | | | | |
| H0169 | Human Prostate Cancer, | Human Prostate | Prostate | | disease | Uni-ZAP XR |
| | Stage C fraction | Cancer, stage C | | | | |
| H0170 | 12 Week Old Early Stage | Twelve Week Old | Embryo | | | Uni-ZAP XR |
| | Human | Early Stage Human | | | | |
| H0171 | 12 Week Old Early Stage | Twelve Week Old | Embryo | | | Uni-ZAP XR |
| | Human, II | Early Stage Human | | | | |
| H0176 | CAMA1Ee Cell Line | CAMA1Ee Cell | Breast | Cell Line | | Uni-ZAP XR |
| | | Line | | | | |
| H0178 | Human Fetal Brain | Human Fetal Brain | Brain | | | Uni-ZAP XR |
| H0179 | Human Neutrophil | Human Neutrophil | Blood | Cell Line | | Uni-ZAP XR |
| H0181 | Human Primary Breast | Human Primary | Breast | | disease | Uni-ZAP XR |
| | Cancer | Breast Cancer | | | | |
| H0182 | Human Primary Breast | Human Primary | Breast | | disease | Uni-ZAP XR |
| | Cancer | Breast Cancer | | | | |
| H0188 | Human Normal Breast | Human Normal | Breast | | | Uni-ZAP XR |
| | | Breast | | | | |
| H0194 | Human Cerebellum, | Human Cerebellum | Brain | | | pBluescript |
| | subtracted | | | | | |
| H0196 | Human Cardiomyopathy, | Human | Heart | | | Uni-ZAP XR |
| | subtracted | Cardiomyopathy | | | | |
| H0211 | Human | Human Prostate | Prostate | | | pBluescript |
| | Prostate, differential | | | | | |
| | expression | | | | | |
| H0212 | Human Prostate, | Human Prostate | Prostate | | | pBluescript |
| | subtracted | | | | | |
| H0244 | Human 8 Week Whole | Human 8 Week Old | Embryo | | | Uni-ZAP XR |
| | Embryo, subtracted | Embryo | | | | |
| H0252 | Human Osteosarcoma | Human | Bone | | disease | Uni-ZAP XR |
| | | Osteosarcoma | | | | |
| H0253 | Human adult testis, large | Human Adult Testis | Testis | | | Uni-ZAP XR |
| | inserts | | | | | |
| H0255 | breast lymph node CDNA | Breast Lymph Node | Lymph Node | | | Lambda |
| | library | | | | | ZAP II |
| H0263 | human colon cancer | Human Colon | Colon | | disease | Lambda |
| | | Cancer | | | | ZAP II |
| H0266 | Human Microvascular | HMEC | Vein | Cell Line | | Lambda |
| | Endothelial Cells, fract. A | | | | | ZAP II |
| H0270 | HPAS (human pancreas, | Human Pancreas | Pancreas | | | Uni-ZAP XR |
| | subtracted) | | | | | |
| H0271 | Human Neutrophil, | Human Neutrophil - | Blood | Cell Line | | Uni-ZAP XR |
| | Activated | Activated | | | | |
| H0294 | Amniotic Cells - TNF | Amniotic Cells - | Placenta | Cell Line | | Uni-ZAP XR |
| | induced | TNF induced | | | | |
| H0295 | Amniotic Cells - Primary | Amniotic Cells - | Placenta | Cell Line | | Uni-ZAP XR |
| | Culture | Primary Culture | | | | |
| H0310 | human caudate nucleus | Brain | Brain | | | Uni-ZAP XR |
| H0316 | HUMAN STOMACH | Human Stomach | Stomach | | | Uni-ZAP XR |
| H0328 | human ovarian cancer | Ovarian Cancer | Ovary | | disease | Uni-ZAP XR |
| H0341 | Bone Marrow Cell Line | Bone Marrow Cell | Bone Marrow | Cell Line | | Uni-ZAP XR |
| | (RS4; 11) | Line RS4; 11 | | | | |
| H0369 | H. Atrophic Endometrium | Atrophic | | | | Uni-ZAP XR |
| | | Endometrium and | | | | |
| | | myometrium | | | | |
| H0372 | Human Testes | Human Testes | Testis | | | pCMVSport |
| | | | | | | 1 |
| H0373 | Human Heart | Human Adult Heart | Heart | | | pCMVSport |
| | | | | | | 1 |
| H0383 | Human Prostate BPH, re- | Human Prostate | | | | Uni-ZAP XR |
| | excision | BPH | | | | |
| H0392 | H. Meningima, M1 | Human Meningima | brain | | | pSport1 |
| H0399 | Human Kidney Cortex, re- | Human Kidney | | | | Lambda |
| | rescue | Cortex | | | | ZAP II |
| H0411 | H Female Bladder, Adult | Human Female | Bladder | | | pSport1 |
| | | Adult Bladder | | | | |
| H0412 | Human umbilical vein | HUVE Cells | Umbilical | Cell Line | | pSport1 |
| | endothelial cells, IL-4 | | vein | | | |
| | induced | | | | | |
| H0414 | Ovarian Tumor I, OV5232 | Ovarian Tumor, | Ovary | | disease | pSport1 |
| | | OV5232 | | | | |
| H0415 | H Ovarian Tumor, II, | Ovarian Tumor, | Ovary | | disease | pCMVSport |
| | OV5232 | OV5232 | | | | 2.0 |
| H0427 | Human Adipose | Human Adipose, left | | | | pSport1 |
| | | hiplipoma | | | | |
| H0428 | Human Ovary | Human Ovary | Ovary | | | pSport1 |
| | | Tumor | | | | |
| H0431 | H. Kidney Medulla, re- | Kidney medulla | Kidney | | | pBluescript |
| | excision | | | | | |
| H0435 | Ovarian Tumor 10-3-95 | Ovarian Tumor, | Ovary | | | pCMVSport |
| | | OV350721 | | | | 2.0 |
| H0436 | Resting T-Cell Library, II | T-Cells | Blood | Cell Line | | pSport1 |
| H0478 | Salivary Gland, Lib 2 | Human Salivary | Salivary | | | pSport1 |
| | | Gland | gland | | | |
| H0483 | Breast Cancer cell line, | Breast Cancer Cell | | | | pSport1 |
| | MDA 36 | line, MDA 36 | | | | |
| H0484 | Breast Cancer Cell line, | Breast Cancer Cell | | | | pSport1 |
| | angiogenic | line, Angiogenic, | | | | |
| | | 36T3 | | | | |
| H0486 | Hodgkin's Lymphoma II | Hodgkin's | | | disease | pCMVSport |
| | | Lymphoma II | | | | 2.0 |
| H0494 | Keratinocyte | Keratinocyte | | | | pCMVSport |
| | | | | | | 2.0 |
| H0520 | NTERA2 + retinoic acid, | NTERA2, | | | | pSport1 |
| | 14 days | Teratocarcinoma | | | | |
| | | cell line | | | | |
| H0521 | Primary Dendritic Cells, | Primary Dendritic | | | | pCMVSport |
| | lib 1 | cells | | | | 3.0 |
| H0533 | Human Stromal | Human Stromal | | | | pSport1 |
| | endometrial fibroblasts, | endometrial | | | | |
| | treated w/estradiol | fibroblasts, treated | | | | |
| | | wit | | | | |
| H0534 | Human Stromal | Human Stromal | | | | pSport1 |
| | endometrial fibroblasts, | endometrial | | | | |
| | treated with progesterone | fibroblasts, treated | | | | |
| | | w/ | | | | |
| H0539 | Pancreas Islet Cell Tumor | Pancreas Islet Cell | Pancreas | | disease | pSport1 |
| | | Tumour | | | | |
| H0543 | T cell helper II | Helper T cell | | | | pCMVSport |
| | | | | | | 3.0 |
| H0544 | Human endometrial | Human endometrial | | | | pCMVSport |
| | stromal cells | stromal cells | | | | 3.0 |
| H0545 | Human endometrial | Human endometrial | | | | pCMVSport |
| | stromal cells-treated with | stromal cells-treated | | | | 3.0 |
| | progesterone | with proge | | | | |
| H0546 | Human endometrial | Human endometrial | | | | pCMVSport |
| | stromal cells-treated with | stromal cells-treated | | | | 3.0 |
| | estradiol | with estra | | | | |
| H0547 | NTERA2 teratocarcinoma | NTERA2, | | | | pSport1 |
| | cell line + retinoic acid (14 | Teratocarcinoma | | | | |
| | days) | cell line | | | | |
| H0549 | H. Epididiymus, caput & | Human | | | | Uni-ZAP XR |
| | corpus | Epididiymus, caput | | | | |
| | | and corpus | | | | |
| H0550 | H. Epididiymus, cauda | Human | | | | Uni-ZAP XR |
| | | Epididiymus, cauda | | | | |
| H0551 | Human Thymus Stromal | Human Thymus | | | | pCMVSport |
| | Cells | Stromal Cells | | | | 3.0 |
| H0553 | Human Placenta | Human Placenta | | | | pCMVSport |
| | | | | | | 3.0 |
| H0555 | Rejected Kidney, lib 4 | Human Rejected | Kidney | | disease | pCMVSport |
| | | Kidney | | | | 3.0 |
| H0560 | KMH2 | KMH2 | | | | pCMVSport |
| | | | | | | 3.0 |
| H0587 | Healing groin wound; 7.5 | Groin-2/19/97 | groin | | disease | pCMVSport |
| | hours post incision | | | | | 3.0 |
| H0592 | Healing groin wound - | HGS wound healing | | | disease | pCMVSport |
| | zero hr post-incision | project; abdomen | | | | 3.0 |
| | (control) | | | | | |
| H0593 | Olfactory | Olfactory epithelium | | | | pCMVSport |
| | epithelium; nasalcavity | from roof of left | | | | 3.0 |
| | | nasal cacit | | | | |
| H0596 | Human Colon Cancer; re- | Human Colon | Colon | | | Lambda |
| | excision | Cancer | | | | ZAP II |
| H0606 | Human Primary Breast | Human Primary | Breast | | disease | Uni-ZAP XR |
| | Cancer; re-excision | Breast Cancer | | | | |
| H0615 | Human Ovarian Cancer | Ovarian Cancer | Ovary | | disease | Uni-ZAP XR |
| | Reexcision | | | | | |
| H0616 | Human Testes, Reexcision | Human Testes | Testis | | | Uni-ZAP XR |
| H0617 | Human Primary Breast | Human Primary | Breast | | disease | Uni-ZAP XR |
| | Cancer Reexcision | Breast Cancer | | | | |
| H0618 | Human Adult Testes, | Human Adult Testis | Testis | | | Uni-ZAP XR |
| | Large Inserts, Reexcision | | | | | |
| H0623 | Human Umbilical Vein; | Human Umbilical | Umbilical | | | Uni-ZAP XR |
| | Reexcision | Vein Endothelial | vein | | | |
| | | Cells | | | | |
| H0632 | Hepatocellular Tumor; re- | Hepatocellular | Liver | | | Lambda |
| | excision | Tumor | | | | ZAP II |
| H0634 | Human Testes Tumor, re- | Human Testes | Testis | | disease | Uni-ZAP XR |
| | excision | Tumor | | | | |
| H0641 | LPS activated derived | LPS activated | | | | pSport1 |
| | dendritic cells | monocyte derived | | | | |
| | | dendritic cells | | | | |
| H0643 | Hep G2 Cells, PCR library | Hep G2 Cells | | | | Other |
| H0644 | Human Placenta (re- | Human Placenta | Placenta | | | Uni-ZAP XR |
| | excision) | | | | | |
| H0646 | Lung, Cancer (4005313 | Metastatic | | | | pSport1 |
| | A3): Invasive Poorly | squamous cell lung | | | | |
| | Differentiated Lung | carcinoma, poorly di | | | | |
| | Adenocarcinoma, | | | | | |
| H0647 | Lung, Cancer (4005163 | Invasive poorly | | | disease | pSport1 |
| | B7): Invasive, Poorly Diff. | differentiated lung | | | | |
| | Adenocarcinoma, | adenocarcinoma | | | | |
| | Metastatic | | | | | |
| H0648 | Ovary, Cancer: (4004562 | Papillary Cstic | | | disease | pSport1 |
| | B6) Papillary Serous | neoplasm of low | | | | |
| | Cystic Neoplasm, Low | malignant potentia | | | | |
| | Malignant Pot | | | | | |
| H0650 | B-Cells | B-Cells | | | | pCMVSport |
| | | | | | | 3.0 |
| H0651 | Ovary, Normal: | Normal Ovary | | | | pSport1 |
| | (9805C040R) | | | | | |
| H0657 | B-cells (stimulated) | B-cells (stimulated) | | | | pSport1 |
| H0658 | Ovary, Cancer | 9809C332- Poorly | Ovary & | | disease | pSport1 |
| | (9809C332): Poorly | differentiate | Fallopian | | | |
| | differentiated | | Tubes | | | |
| | adenocarcinoma | | | | | |
| H0659 | Ovary, Cancer | Grade II Papillary | Ovary | | disease | pSport1 |
| | (15395A1F): Grade II | Carcinoma, Ovary | | | | |
| | Papillary Carcinoma | | | | | |
| H0660 | Ovary, Cancer: | Poorly differentiated | | | disease | pSport1 |
| | (15799A1F) Poorly | carcinoma, ovary | | | | |
| | differentiated carcinoma | | | | | |
| H0661 | Breast, Cancer: (4004943 | Breast cancer | | | disease | pSport1 |
| | A5) | | | | | |
| H0662 | Breast, Normal: | Normal Breast - | Breast | | | pSport1 |
| | (4005522B2) | #4005522 (B2) | | | | |
| H0663 | Breast, Cancer: (4005522 | Breast Cancer - | Breast | | disease | pSport1 |
| | A2) | #4005522 (A2) | | | | |
| H0664 | Breast, Cancer: | Breast Cancer | Breast | | disease | pSport1 |
| | (9806C012R) | | | | | |
| H0666 | Ovary, Cancer: (4004332 | Ovarian Cancer, | | | disease | pSport1 |
| | A2) | Sample | | | | |
| | | #4004332A2 | | | | |
| H0670 | Ovary, Cancer (4004650 | Ovarian Cancer - | | | | pSport1 |
| | A3): Well-Differentiated | 4004650A3 | | | | |
| | Micropapillary Serous | | | | | |
| | Carcinoma | | | | | |
| H0672 | Ovary, Cancer: (4004576 | Ovarian | Ovary | | | pSport1 |
| | A8) | Cancer (4004576A8) | | | | |
| H0673 | Human Prostate Cancer, | Human Prostate | Prostate | | | Uni-ZAP XR |
| | Stage B2; re-excision | Cancer, stage B2 | | | | |
| H0674 | Human Prostate Cancer, | Human Prostate | Prostate | | | Uni-ZAP XR |
| | Stage C; re-excission | Cancer, stage C | | | | |
| H0676 | Colon, Cancer: | Colon Cancer | | | | pCMVSport |
| | (9808C064R)-total RNA | 9808C064R | | | | 3.0 |
| H0678 | screened clones from | Placenta | Placenta | | | Other |
| | placental library | | | | | |
| H0683 | Ovarian Serous Papillary | Serous papillary | | | | pCMVSport |
| | Adenocarcinoma | adenocarcinoma, | | | | 3.0 |
| | | stage 3C (9804G01 | | | | |
| H0685 | Adenocarcinoma of | Adenocarcinoma of | | | | pCMVSport |
| | Ovary, Human Cell Line, | Ovary, Human Cell | | | | 3.0 |
| | # OVCAR-3 | Line, # OVCAR- | | | | |
| H0686 | Adenocarcinoma of | Adenocarcinoma of | | | | pCMVSport |
| | Ovary, Human Cell Line | Ovary, Human Cell | | | | 3.0 |
| | | Line, # SW-626 | | | | |
| H0687 | Human normal | Human normal | Ovary | | | pCMVSport |
| | ovary (#9610G215) | ovary (#9610G215) | | | | 3.0 |
| H0688 | Human Ovarian | Human Ovarian | | | | pCMVSport |
| | Cancer (#9807G017) | cancer (#9807G017), | | | | 3.0 |
| | | mRNA from Maura | | | | |
| | | Ru | | | | |
| H0689 | Ovarian Cancer | Ovarian Cancer, | | | | pCMVSport |
| | | #9806G019 | | | | 3.0 |
| H0690 | Ovarian Cancer, # | Ovarian Cancer, | | | | pCMVSport |
| | 9702G001 | #9702G001 | | | | 3.0 |
| S0004 | Prostate | Prostate BPH | Prostate | | | Lambda |
| | | | | | | ZAP II |
| S0013 | Prostate | Prostate | prostate | | | Uni-ZAP XR |
| S0014 | Kidney Cortex | Kidney cortex | Kidney | | | Uni-ZAP XR |
| S0026 | Stromal cell TF274 | stromal cell | Bone marrow | Cell Line | | Uni-ZAP XR |
| S0028 | Smooth muscle, control | Smooth muscle | Pulmanary | Cell Line | | Uni-ZAP XR |
| | | | artery | | | |
| S0042 | Testes | Human Testes | | | | ZAP Express |
| S0044 | Prostate BPH | prostate BPH | Prostate | | disease | Uni-ZAP XR |
| S0052 | neutrophils control | human neutrophils | blood | Cell Line | | Uni-ZAP XR |
| S0112 | Hypothalamus | | Brain | | | Uni-ZAP XR |
| S0134 | Apoptotic T-cell | apoptotic cells | | Cell Line | | Uni-ZAP XR |
| S0146 | prostate-edited | prostate BPH | Prostate | | | Uni-ZAP XR |
| S0148 | Normal Prostate | Prostate | prostate | | | Uni-ZAP XR |
| S0150 | LNCAP prostate cell line | LNCAP Cell Line | Prostate | Cell Line | | Uni-ZAP XR |
| S0152 | PC3 Prostate cell line | PC3 prostate cell | | | | Uni-ZAP XR |
| | | line | | | | |
| S0168 | Prostate/LNCAP, | PC3 prostate cell | | | | pBluescript |
| | subtraction I | line | | | | |
| S0174 | Prostate-BPH subtracted II | Human Prostate | | | | pBluescript |
| | | BPH | | | | |
| S0176 | Prostate, normal, | Prostate | prostate | | | Uni-ZAP XR |
| | subtraction I | | | | | |
| S0188 | Prostate, BPH, Lib 2 | Human Prostate | | | disease | pSport1 |
| | | BPH | | | | |
| S0190 | Prostate BPH, Lib 2, | Human Prostate | | | | pSport1 |
| | subtracted | BPH | | | | |
| S0212 | Bone Marrow Stromal | Bone Marrow | | | | pSport1 |
| | Cell, untreated | Stromal | | | | |
| | | Cell, untreated | | | | |
| S0222 | H. Frontal | H. Brain, Frontal | Brain | | disease | Uni-ZAP XR |
| | cortex, epileptic; re- | Cortex, Epileptic | | | | |
| | excision | | | | | |
| S0242 | Synovial Fibroblasts | Synovial Fibroblasts | | | | pSport1 |
| | (I11/TNF), subt | | | | | |
| S0274 | PCMIX | PCMIX (Human | Brain | | | PCRII |
| | | Cerebellum) | | | | |
| S0282 | Brain Frontal Cortex, re- | Brain frontal cortex | Brain | | | Lambda |
| | excision | | | | | ZAP II |
| S0284 | 7TMCTT (Testis) | 7TMCTP (Placenta) | Testis | | | PCRII |
| S0286 | 7TMCTP (Placenta) | H7MCTP | Placenta | | | PCRII |
| | | (PLACENTA) | | | | |
| S0294 | Larynx tumor | Larynx tumor | Larynx, vocal | | disease | pSport1 |
| | | | cord | | | |
| S0326 | Mammary Gland | Mammary Gland | Whole | | | pSport1 |
| | | | mammary | | | |
| | | | gland | | | |
| S0328 | Palate carcinoma | Palate carcinoma | Uvula | | disease | pSport1 |
| S0352 | Larynx Carcinoma | Larynx carcinoma | | | disease | pSport1 |
| S0354 | Colon Normal II | Colon Normal | Colon | | | pSport1 |
| S0358 | Colon Normal III | Colon Normal | Colon | | | pSport1 |
| S0360 | Colon Tumor II | Colon Tumor | Colon | | disease | pSport1 |
| S0374 | Normal colon | Normal colon | | | | pSport1 |
| S0380 | Pancreas Tumor PCA4 Tu | Pancreas Tumor | | | disease | pSport1 |
| | | PCA4 Tu | | | | |
| S0396 | Uterus; normal | Uterus; normal | | | | pSport1 |
| S0398 | Testis; normal | Testis; normal | | | | pSport1 |
| S0412 | Temporal cortex- | Temporal cortex, | | | disease | Other |
| | Alzheizmer; subtracted | alzheimer | | | | |
| S0422 | Mo7e Cell Line GM-CSF | Mo7e Cell Line | | | | pCMVSport |
| | treated (1 ng/ml) | GM-CSF treated | | | | 3.0 |
| | | (1 ng/ml) | | | | |
| S0424 | TF-1 Cell Line GM-CSF | TF-1 Cell Line | | | | pSport1 |
| | Treated | GM-CSF Treated | | | | |
| S0442 | Colon Normal | Colon Normal | | | | pSport1 |
| S0444 | Colon Tumor | Colon Tumour | | | disease | pSport1 |
| S0454 | Placenta | Placenta | Placenta | | | pSport1 |
| S0456 | Tongue Normal | Tongue Normal | | | | pSport1 |
| S0460 | Thyroid Tumour | Thyroid Tumour | | | | pSport1 |
| T0010 | Human Infant Brain | Human Infant Brain | | | | Other |
| T0041 | Jurkat T-cell G1 phase | Jurkat T-cell | | | | pBluescript |
| | | | | | | SK− |
| T0068 | Normal Ovary, | Normal Ovary, | | | | pBluescript |
| | Premenopausal | Premenopausal | | | | SK− |
| T0069 | Human Uterus, normal | Human Uterus, | | | | pBluescript |
| | | normal | | | | SK− |
| L0005 | Clontech human aorta | | | | | |
| | polyA+ mRNA (#6572) | | | | | |
| L002l | Human adult (K. Okubo) | | | | | |
| L0023 | human adult testis | | | | | |
| L0040 | Human colon mucosa | | | | | |
| L0041 | Human epidermal | | | | | |
| | keratinocyte | | | | | |
| L0060 | Human thymus NSTH II | | | | | |
| L0070 | Selected chromosome 21 | | | | | |
| | cDNA library | | | | | |
| L0109 | Human brain cDNA | brain | | | | |
| L0142 | Human placenta cDNA | placenta | | | | |
| | (TFujiwara) | | | | | |
| L0143 | Human placenta polyA+ | placenta | | | | |
| | (TFujiwara) | | | | | |
| L0151 | Human testis (C. De | testis | | | | |
| | Smet) | | | | | |
| L0157 | Human fetal brain | | brain | | | |
| | (TFujiwara) | | | | | |
| L0163 | Human heart cDNA | | heart | | | |
| | (YNakamura) | | | | | |
| L0351 | Infant brain, Bento Soares | | | | | BA, M13- |
| | | | | | | derived |
| L0352 | Normalized infant brain, | | | | | BA, M13- |
| | Bento Soares | | | | | derived |
| L0361 | Stratagene ovary | | ovary | | | Bluescript |
| | (#937217) | | | | | SK |
| L0362 | Stratagene ovarian cancer | | | | | Bluescript |
| | (#937219) | | | | | SK− |
| L0363 | NCI_CGAP_GC2 | germ cell tumor | | | | Bluescript |
| | | | | | | SK− |
| L0365 | NCI_CGAP_Phe1 | pheochromocytoma | | | | Bluescript |
| | | | | | | SK− |
| L0366 | Stratagene schizo brain | schizophrenic brain | | | | Bluescript |
| | S11 | S-11 frontal lobe | | | | SK− |
| L0367 | NCI_CGAP_Sch1 | Schwannoma tumor | | | | Bluescript |
| | | | | | | SK− |
| L0369 | NCI_CGAP_AA1 | adrenal adenoma | adrenal gland | | | Bluescnpt |
| | | | | | | SK− |
| L0371 | NCI_CGAP_Br3 | breast tumor | breast | | | Bluescript |
| | | | | | | SK− |
| L0372 | NCI_CGAP_Co12 | colon tumor | colon | | | Bluescript |
| | | | | | | SK− |
| L0373 | NCI_CGAP_Co11 | tumor | colon | | | Bluescript |
| | | | | | | SK− |
| L0374 | NCI_CGAP_Co2 | tumor | colon | | | Bluescript |
| | | | | | | SK− |
| L0375 | NCI_CGAP_Kid6 | kidney tumor | kidney | | | Bluescript |
| | | | | | | SK− |
| L0376 | NCI_CGAP_Lar1 | larynx | larynx | | | Bluescript |
| | | | | | | SK− |
| L0378 | NCI_CGAP_Lu1 | lung tumor | lung | | | Bluescript |
| | | | | | | SK− |
| L0380 | NCI_CGAP_HN1 | squamous cell | lymph node | | | Bluescript |
| | | carcinoma | | | | SK− |
| L0381 | NCI_CGAP_HN4 | squamous cell | pharynx | | | Bluescript |
| | | carcinoma | | | | SK− |
| L0383 | NCI_CGAP_Pr24 | invasive tumor (cell | prostate | | | Bluescript |
| | | line) | | | | SK− |
| L0411 | 1-NIB | | | | | Lafmid BA |
| L0435 | Infant brain, LLNL array | | | | | lafmid BA |
| | of Dr. M. Soares 1NIB | | | | | |
| L0438 | normalized infant brain | total brain | brain | | | lafmid BA |
| | cDNA | | | | | |
| L0439 | Soares infant brain 1NIB | | whole brain | | | Lafmid BA |
| L0441 | 2HB3MK | | | | | Lafmid BK |
| L0455 | Human retina cDNA | retina | eye | | | lambda gt10 |
| | randomly primed | | | | | |
| | sublibrary | | | | | |
| L0462 | WATM1 | | | | | lambda gt11 |
| L0465 | TEST1, Human adult | | | | | lambda |
| | Testis tissue | | | | | nm1149 |
| L0470 | BL29 Burkitt's | | | | | lambda ZAP |
| | lymphoma, Pascalis | | | | | 2 |
| | Sideras | | | | | |
| L0471 | Human fetal heart, | | | | | Lambda |
| | Lambda ZAP Express | | | | | ZAP Express |
| L0475 | KG1-a Lambda Zap | | | KG1-a | | Lambda Zap |
| | Express cDNA library | | | | | Express |
| | | | | | | (Stratagene) |
| L0480 | Stratagene cat #937212 | | | | | Lambda |
| | (1992) | | | | | ZAP, |
| | | | | | | pBluescript |
| | | | | | | SK(−) |
| L0483 | Human pancreatic islet | | | | | Lambda |
| | | | | | | ZAPII |
| L0485 | STRATAGENE Human | skeletal muscle | leg muscle | | | Lambda |
| | skeletal muscle cDNA | | | | | ZAPII |
| | library, cat. #936215. | | | | | |
| L0492 | Human Genomic | | | | | pAMP |
| L0509 | NCI_CGAP_Lu26 | invasive | lung | | | pAMP1 |
| | | adenocarcinoma | | | | |
| L0512 | NCI_CGAP_Ov36 | borderline ovarian | ovary | | | pAMP1 |
| | | carcinoma | | | | |
| L0513 | NCI_CGAP_Ov37 | early stage papillary | ovary | | | pAMP1 |
| | | serous carcinoma | | | | |
| L0515 | NCI_CGAP_Ov32 | papillary serous | ovary | | | pAMP1 |
| | | carcinoma | | | | |
| L0516 | Chromosome 19p12-p13.1 | | | | | pAMP10 |
| | exon | | | | | |
| L0517 | NCI_CGAP_Pr1 | | | | | pAMP10 |
| L0518 | NCI_CGAP_Pr2 | | | | | pAMP10 |
| L0519 | NCI_CGAP_Pr3 | | | | | pAMP10 |
| L0520 | NCI_CGAP_Alv1 | alveolar | | | | pAMP10 |
| | | rhabdomyosarcoma | | | | |
| L0521 | NCI_CGAP_Ew1 | Ewing's sarcoma | | | | pAMP10 |
| L0522 | NCI_CGAP_Kid1 | kidney | | | | pAMP10 |
| L0523 | NCI_CGAP_Lip2 | liposarcoma | | | | pAMP10 |
| L0524 | NCI_CGAP_Li1 | liver | | | | pAMP10 |
| L0526 | NCI_CGAP_Pr12 | metastatic prostate | | | | pAMP10 |
| | | bone lesion | | | | |
| L0527 | NCI_CGAP_Ov2 | ovary | | | | pAMP10 |
| L0528 | NCI_CGAP_Pr5 | prostate | | | | pAMP10 |
| L0529 | NCI_CGAP_Pr6 | prostate | | | | pAMP10 |
| L0532 | NCI_CGAP_Thy1 | thyroid | | | | pAMP10 |
| L0533 | NCI_CGAP_HSC1 | stem cells | bone marrow | | | pAMP10 |
| L0534 | Chromosome 7 Fetal | brain | brain | | | pAMP10 |
| | Brain cDNA Library | | | | | |
| L0536 | NCI_CGAP_Br4 | normal ductal tissue | breast | | | pAMP10 |
| L0539 | Chromosome 7 Placental | | placenta | | | pAMP10 |
| | cDNA Library | | | | | |
| L0542 | NCI_CGAP_Pr11 | normal prostatic | prostate | | | pAMP10 |
| | | epithelial cells | | | | |
| L0547 | NCI_CGAP_Pr16 | tumor | prostate | | | pAMP10 |
| L0558 | NCI_CGAP_Ov40 | endometrioid | ovary | | | pAMP10 |
| | | ovarian metastasis | | | | |
| L0565 | Normal Human | Bone | Hip | | | pBluescript |
| | Trabecular Bone Cells | | | | | |
| L0581 | Stratagene liver (#937224) | | liver | | | pBluescript |
| | | | | | | SK |
| L0586 | HTCDL1 | | | | | pBluescript |
| | | | | | | SK(−) |
| L0587 | Stratagene colon HT29 | | | | | pBluescript |
| | (#937221) | | | | | SK− |
| L0588 | Stratagene endothelial cell | | | | | pBluescript |
| | 937223 | | | | | SK− |
| L0589 | Stratagene fetal retina | | | | | pBluescript |
| | 937202 | | | | | SK− |
| L0590 | Stratagene fibroblast | | | | | pBluescript |
| | (#937212) | | | | | SK− |
| L0591 | Stratagene HeLa cell s3 | | | | | pBluescript |
| | 937216 | | | | | SK− |
| L0592 | Stratagene hNT neuron | | | | | pBluescript |
| | (#937233) | | | | | SK− |
| L0593 | Stratagene | | | | | pBluescript |
| | neuroepithelium | | | | | SK− |
| | (#937231) | | | | | |
| L0594 | Stratagene | | | | | pBluescript |
| | neuroepithelium | | | | | SK− |
| | NT2RAMI 937234 | | | | | |
| L0595 | Stratagene NT2 neuronal | neuroepithelial cells | brain | | | pBluescript |
| | precursor 937230 | | | | | SK− |
| L0596 | Stratagene colon | | colon | | | pBluescript |
| | (#937204) | | | | | SK− |
| L0597 | Stratagene corneal stroma | | cornea | | | pBluescript |
| | (#937222) | | | | | SK− |
| L0598 | Morton Fetal Cochlea | cochlea | ear | | | pBluescript |
| | | | | | | SK− |
| L0599 | Stratagene lung (#937210) | | lung | | | pBluescript |
| | | | | | | SK− |
| L0600 | Weizmann Olfactory | olfactory epithelium | nose | | | pBluescript |
| | Epithelium | | | | | SK− |
| L0601 | Stratagene pancreas | | pancreas | | | pBluescript |
| | (#937208) | | | | | SK− |
| L0602 | Pancreatic Islet | pancreatic islet | pancreas | | | pBluescript |
| | | | | | | SK− |
| L0603 | Stratagene placenta | | placenta | | | pBluescript |
| | (#937225) | | | | | SK− |
| L0604 | Stratagene muscle 937209 | muscle | skeletal | | | pBluescript |
| | | | muscle | | | SK− |
| L0605 | Stratagene fetal spleen | fetal spleen | spleen | | | pBluescript |
| | (#937205) | | | | | SK− |
| L0606 | NCI_CGAP_Lym5 | follicular lymphoma | lymph node | | | pBluescript |
| | | | | | | SK− |
| L0608 | Stratagene lung carcinoma | lung carcinoma | lung | NCI-H69 | | pBluescript |
| | 937218 | | | | | SK− |
| L0612 | Schiller | oligodendroglioma | brain | | | pBluescript |
| | oligodendroglioma | | | | | SK− |
| | | | | | | (Stratagene) |
| L0617 | Chromosome 22 exon | | | | | pBluescriptII |
| | | | | | | KS+ |
| L0618 | Chromosome 9 exon | | | | | pBluescriptII |
| | | | | | | KS+ |
| L0623 | HM3 | pectoral muscle | | | | pcDNAII |
| | | (after mastectomy) | | | | (Invitrogen) |
| L0626 | NCI_CGAP_GC1 | bulk germ cell | | | | pCMV- |
| | | seminoma | | | | SPORT2 |
| L0635 | NCI_CGAP_PNS1 | dorsal root ganglion | peripheral | | | pCMV- |
| | | | nervous | | | SPORT4 |
| | | | system | | | |
| L0637 | NCI_CGAP_Brn53 | three pooled | brain | | | pCMV- |
| | | meningiomas | | | | SPORT6 |
| L0638 | NCI_CGAP_Brn35 | tumor, 5 pooled (see | brain | | | pCMV- |
| | | description) | | | | SPORT6 |
| L0639 | NCI_CGAP_Brn52 | tumor, 5 pooled (see | brain | | | pCMV- |
| | | description) | | | | SPORT6 |
| L0642 | NCI_CGAP_Co18 | moderately | colon | | | pCMV- |
| | | differentiated | | | | SPORT6 |
| | | adenocarcinoma | | | | |
| L0646 | NCI_CGAP_Co14 | moderately- | colon | | | pCMV- |
| | | differentiated | | | | SPORT6 |
| | | adenocarcinoma | | | | |
| L0647 | NCI_CGAP_Sar4 | five pooled | connective | | | pCMV- |
| | | sarcomas, including | tissue | | | SPORT6 |
| | | myxoid liposarcoma | | | | |
| L0649 | NCI_CGAP_GU1 | 2 pooled high-grade | genitourinary | | | pCMV- |
| | | transitional cell | tract | | | SPORT6 |
| | | tumors | | | | |
| L0655 | NCI_CGAP_Lym12 | lymphoma, | lymph node | | | pCMV- |
| | | follicular mixed | | | | SPORT6 |
| | | small and large cell | | | | |
| L0656 | NCI_CGAP_Ov38 | normal epithelium | ovary | | | pCMV- |
| | | | | | | SPORT6 |
| L0657 | NCI_CGAP_Ov23 | tumor, 5 pooled (see | ovary | | | pCMV- |
| | | description) | | | | SPORT6 |
| L0658 | NCI_CGAP_Ov35 | tumor, 5 pooled (see | ovary | | | pCMV- |
| | | description) | | | | SPORT6 |
| L0659 | NCI_CGAP_Pan1 | adenocarcinoma | pancreas | | | pCMV- |
| | | | | | | SPORT6 |
| L0661 | NCI_CGAP_Mel15 | malignant | skin | | | pCMV- |
| | | melanoma, | | | | SPORT6 |
| | | metastatic to lymph | | | | |
| | | node | | | | |
| L0662 | NCI_CGAP_Gas4 | poorly differentiated | stomach | | | pCMV- |
| | | adenocarcinoma | | | | SPORT6 |
| | | with signet r | | | | |
| L0663 | NCI_CGAP_Ut2 | moderately- | uterus | | | pCMV- |
| | | differentiated | | | | SPORT6 |
| | | endometrial | | | | |
| | | adenocarcino | | | | |
| L0664 | NCI_CGAP_Ut3 | poorly-differentiated | uterus | | | pCMV- |
| | | endometrial | | | | SPORT6 |
| | | adenocarcinoma, | | | | |
| L0665 | NCI_CGAP_Ut4 | serous papillary | uterus | | | pCMV- |
| | | carcinoma, high | | | | SPORT6 |
| | | grade, 2 pooled t | | | | |
| L0666 | NCI_CGAP_Ut1 | well-differentiated | utereus | | | pCMV- |
| | | endometrial | | | | SPORT6 |
| | | adenocarcinoma, 7 | | | | |
| L0667 | NCI_CGAP_CML1 | myeloid cells, 18 | whole blood | | | pCMV- |
| | | pooled CML cases, | | | | SPORT6 |
| | | BCR/ABL rearra | | | | |
| L0686 | Stanley Frontal SN pool 2 | frontal lobe (see | brain | | | pCR2.1- |
| | | description) | | | | TOPO |
| | | | | | | (Invitrogen) |
| L0697 | Testis 1 | | | | | PGEM |
| | | | | | | 5zf (+) |
| L0698 | Testis 2 | | | | | PGEM |
| | | | | | | 5zf (+) |
| L0700 | Outward Alu-primed | | | | | pGEM-3Z |
| | hncDNA library | | | | | |
| L0717 | Gessler Wilms tumor | | | | | pSPORT1 |
| L0731 | Soares_pregnant_uterus_{—} | | uterus | | | pT7T3-Pac |
| | NbHPU | | | | | |
| L0738 | Human colorectal cancer | | | | | pT7T3D |
| L0740 | Soares melanocyte | melanocyte | | | | pT7T3D |
| | 2NbHM | | | | | (Pharmacia) |
| | | | | | | with a |
| | | | | | | modified |
| | | | | | | polylinker |
| L0741 | Soares adult brain | | brain | | | pT7T3D |
| | N2b4HB55Y | | | | | (Pharmacia) |
| | | | | | | with a |
| | | | | | | modified |
| | | | | | | polylinker |
| L0742 | Soares adult brain | | brain | | | pT7T3D |
| | N2b5HB55Y | | | | | (Pharmacia) |
| | | | | | | with a |
| | | | | | | modified |
| | | | | | | polylinker |
| L0743 | Soares breast 2NbHBst | | breast | | | pT7T3D |
| | | | | | | (Pharmacia) |
| | | | | | | with a |
| | | | | | | modified |
| | | | | | | polylinker |
| L0744 | Soares breast 3NbHBst | | breast | | | pT7T3D |
| | | | | | | (Pharmacia) |
| | | | | | | with a |
| | | | | | | modified |
| | | | | | | polylinker |
| L0745 | Soares retina N2b4HR | retina | eye | | | pT7T3D |
| | | | | | | (Pharmacia) |
| | | | | | | with a |
| | | | | | | modified |
| | | | | | | polylinker |
| L0746 | Soares retina N2b5HR | retina | eye | | | pT7T3D |
| | | | | | | (Pharmacia) |
| | | | | | | with a |
| | | | | | | modified |
| | | | | | | polylinker |
| L0747 | Soares_fetal_heart_NbHH | | heart | | | pT7T3D |
| | 19W | | | | | (Pharmacia) |
| | | | | | | with a |
| | | | | | | modified |
| | | | | | | polylinker |
| L0748 | Soares fetal liver spleen | | Liver and | | | pT7T3D |
| | 1NFLS | | Spleen | | | (Pharmacia) |
| | | | | | | with a |
| | | | | | | modified |
| | | | | | | polylinker |
| L0749 | Soares_fetal_liver_spleen | | Liver and | | | pT7T3D |
| | _1NFLS_S1 | | Spleen | | | (Pharmacia) |
| | | | | | | with a |
| | | | | | | modified |
| | | | | | | polylinker |
| L0750 | Soares_fetal_lung_NbHL1 | | lung | | | pT7T3D |
| | 9W | | | | | (Pharmacia) |
| | | | | | | with a |
| | | | | | | modified |
| | | | | | | polylinker |
| L0751 | Soares ovary tumor | ovarian tumor | ovary | | | pT7T3D |
| | NbHOT | | | | | (Pharmacia) |
| | | | | | | with a |
| | | | | | | modified |
| | | | | | | polylinker |
| L0752 | Soares_parathyroid_tumor | parathyroid tumor | parathyroid | | | pT7T3D |
| | _NbHPA | | gland | | | (Pharmacia) |
| | | | | | | with a |
| | | | | | | modified |
| | | | | | | polylinker |
| L0753 | Soares_pineal_gland_N3H | | pineal gland | | | pT7T3D |
| | PG | | | | | (Pharmacia) |
| | | | | | | with a |
| | | | | | | modified |
| | | | | | | polylinker |
| L0754 | Soares placenta Nb2HP | | placenta | | | pT7T3D |
| | | | | | | (Pharmacia) |
| | | | | | | with a |
| | | | | | | modified |
| | | | | | | polylinker |
| L0755 | Soares_placenta_8to9wee | | placenta | | | pT7T3D |
| | ks_2NbHP8to9W | | | | | (Pharmacia) |
| | | | | | | with a |
| | | | | | | modified |
| | | | | | | polylinker |
| L0756 | Soares_multiple_sclerosis | multiple sclerosis | | | | pT7T3D |
| | _2NbHMSP | lesions | | | | (Pharmacia) |
| | | | | | | with a |
| | | | | | | modified |
| | | | | | | polylinker |
| | | | | | | V_TYPE |
| L0757 | Soares_senescent_fibrobla | senescent fibroblast | | | | pT7T3D |
| | sts_NbHSF | | | | | (Pharmacia) |
| | | | | | | with a |
| | | | | | | modified |
| | | | | | | polylinker |
| | | | | | | V_TYPE |
| L0758 | Soares_testis_NHT | | | | | pT7T3D-Pac |
| | | | | | | (Pharmacia) |
| | | | | | | with a |
| | | | | | | modified |
| | | | | | | polylinker |
| L0759 | Soares_total_fetus_Nb2H | | | | | pT7T3D-Pac |
| | F8_9w | | | | | (Pharmacia) |
| | | | | | | with a |
| | | | | | | modified |
| | | | | | | polylinker |
| L0761 | NCI_CGAP_CLL1 | B-cell, chronic | | | | pT7T3D-Pac |
| | | lymphotic leukemia | | | | (Pharmacia) |
| | | | | | | with a |
| | | | | | | modified |
| | | | | | | polylinker |
| L0762 | NCI_CGAP_Br1.1 | breast | | | | pT7T3D-Pac |
| | | | | | | (Pharmacia) |
| | | | | | | with a |
| | | | | | | modified |
| | | | | | | polylinker |
| L0763 | NCI_CGAP_Br2 | breast | | | | pT7T3D-Pac |
| | | | | | | (Pharmacia) |
| | | | | | | with a |
| | | | | | | modified |
| | | | | | | polylinker |
| L0764 | NCI_CGAP_Co3 | colon | | | | pT7T3D-Pac |
| | | | | | | (Pharmacia) |
| | | | | | | with a |
| | | | | | | modified |
| | | | | | | polylinker |
| L0765 | NCI_CGAP_Co4 | colon | | | | pT7T3D-Pac |
| | | | | | | (Pharmacia) |
| | | | | | | with a |
| | | | | | | modified |
| | | | | | | polylinker |
| L0766 | NCI_CGAP_GCB1 | germinal center B | | | | pT7T3D-Pac |
| | | cell | | | | (Pharmacia) |
| | | | | | | with a |
| | | | | | | modified |
| | | | | | | polylinker |
| L0767 | NCI_CGAP_GC3 | pooled germ cell | | | | pT7T3D-Pac |
| | | tumors | | | | (Pharmacia) |
| | | | | | | with a |
| | | | | | | modified |
| | | | | | | polylinker |
| L0768 | NCI_CGAP_GC4 | pooled germ cell | | | | pT7T3D-Pac |
| | | tumors | | | | (Pharmacia) |
| | | | | | | with a |
| | | | | | | modified |
| | | | | | | polylinker |
| L0769 | NCI_CGAP_Brn25 | anaplastic | brain | | | pT7T3D-Pac |
| | | oligodendroglioma | | | | (Pharmacia) |
| | | | | | | with a |
| | | | | | | modified |
| | | | | | | polylinker |
| L0770 | NCI_CGAP_Brn23 | glioblastoma | brain | | | pT7T3D-Pac |
| | | (pooled) | | | | (Pharmacia) |
| | | | | | | with a |
| | | | | | | modified |
| | | | | | | polylinker |
| L0771 | NCI_CGAP_Co8 | adenocarcinoma | colon | | | pT7T3D-Pac |
| | | | | | | (Pharmacia) |
| | | | | | | with a |
| | | | | | | modified |
| | | | | | | polylinker |
| L0772 | NCI_CGAP_Co10 | colon tumor RER− | colon | | | pT7T3D-Pac |
| | | | | | | (Pharmacia) |
| | | | | | | with a |
| | | | | | | modified |
| | | | | | | polylinker |
| L0773 | NCI_CGAP_Co9 | colon tumor RER+ | colon | | | pT7T3D-Pac |
| | | | | | | (Pharmacia) |
| | | | | | | with a |
| | | | | | | modified |
| | | | | | | polylinker |
| L0774 | NCI_CGAP_Kid3 | | kidney | | | pT7T3D-Pac |
| | | | | | | (Pharmacia) |
| | | | | | | with a |
| | | | | | | modified |
| | | | | | | polylinker |
| L0775 | NCI_CGAP_Kid5 | 2 pooled tumors | kidney | | | pT7T3D-Pac |
| | | (clear cell type) | | | | (Pharmacia) |
| | | | | | | with a |
| | | | | | | modified |
| | | | | | | polylinker |
| L0776 | NCI_CGAP_Lu5 | carcinoid | lung | | | pT7T3D-Pac |
| | | | | | | (Pharmacia) |
| | | | | | | with a |
| | | | | | | modified |
| | | | | | | polylinker |
| L0777 | Soares_NhHMPu_S1 | Pooled human | mixed (see | | | pT7T3D-Pac |
| | | melanocyte, fetal | below) | | | (Pharmacia) |
| | | heart, and pregnant | | | | with a |
| | | | | | | modified |
| | | | | | | polylinker |
| L0779 | Soares_NFL_T_GBC_S1 | | pooled | | | p7P7T3D-Pac |
| | | | | | | (Pharmacia) |
| | | | | | | with a |
| | | | | | | modified |
| | | | | | | polylinker |
| L0780 | Soares_NSF_F8_9W_OT | | pooled | | | pT7T3D-Pac |
| | _PA_P_S1 | | | | | (Pharmacia) |
| | | | | | | with a |
| | | | | | | modified |
| | | | | | | polylinker |
| L0782 | NCI_CGAP_Pr21 | normal prostate | prostate | | | pT7T3D-Pac |
| | | | | | | (Pharmacia) |
| | | | | | | with a |
| | | | | | | modified |
| | | | | | | polylinker |
| L0783 | NCI_CGAP_Pr22 | normal prostate | prostate | | | pT7T3D-Pac |
| | | | | | | (Pharmacia) |
| | | | | | | with a |
| | | | | | | modified |
| | | | | | | polylinker |
| L0786 | Soares_NbHFB | | whole brain | | | pT7T3D-Pac |
| | | | | | | (Pharmacia) |
| | | | | | | with a |
| | | | | | | modified |
| | | | | | | polylinker |
| L0787 | NCI_CGAP_Sub1 | | | | | pT7T3D-Pac |
| | | | | | | (Pharmacia) |
| | | | | | | with a |
| | | | | | | modified |
| | | | | | | polylinker |
| L0788 | NCI_CGAP_Sub2 | | | | | pT7T3D-Pac |
| | | | | | | (Pharmacia) |
| | | | | | | with a |
| | | | | | | modified |
| | | | | | | polylinker |
| L0789 | NCI_CGAP_Sub3 | | | | | pT7T3D-Pac |
| | | | | | | (Pharmacia) |
| | | | | | | with a |
| | | | | | | modified |
| | | | | | | polylinker |
| L0790 | NCI_CGAP_Sub4 | | | | | pT7T3D-Pac |
| | | | | | | (Pharmacia) |
| | | | | | | with a |
| | | | | | | modified |
| | | | | | | polylinker |
| L0791 | NCI_CGAP_Sub5 | | | | | pT7T3D-Pac |
| | | | | | | (Pharmacia) |
| | | | | | | with a |
| | | | | | | modified |
| | | | | | | polylinker |
| L0792 | NCI_CGAP_Sub6 | | | | | pT7T3D-Pac |
| | | | | | | (Pharmacia) |
| | | | | | | with a |
| | | | | | | modified |
| | | | | | | polylinker |
| L0794 | NCI_CGAP_GC6 | pooled germ cell | | | | pT7T3D-Pac |
| | | tumors | | | | (Pharmacia) |
| | | | | | | with a |
| | | | | | | modified |
| | | | | | | polylinker |
| L0796 | NCI_CGAP_Brn50 | medulloblastoma | brain | | | pT7T3D-Pac |
| | | | | | | (Pharmacia) |
| | | | | | | with a |
| | | | | | | modified |
| | | | | | | polylinker |
| L0800 | NCI_CGAP_Co16 | colon tumor, RER+ | colon | | | pT7T3D-Pac |
| | | | | | | (Pharmacia) |
| | | | | | | with a |
| | | | | | | modified |
| | | | | | | polylinker |
| L0803 | NCI_CGAP_Kid11 | | kidney | | | pT7T3D-Pac |
| | | | | | | (Pharmacia) |
| | | | | | | with a |
| | | | | | | modified |
| | | | | | | polylinker |
| L0804 | NCI_CGAP_Kid12 | 2 pooled tumors | kidney | | | pT7T3D-Pac |
| | | (clear cell type) | | | | (Pharmacia) |
| | | | | | | with a |
| | | | | | | modified |
| | | | | | | polylinker |
| L0805 | NCI_CGAP_Lu24 | carcinoid | lung | | | pT7T3D-Pac |
| | | | | | | (Pharmacia) |
| | | | | | | with a |
| | | | | | | modified |
| | | | | | | polylinker |
| L0806 | NCI_CGAP_Lu19 | squamous cell | lung | | | pT7T3D-Pac |
| | | carcinoma, poorly | | | | (Pharmacia) |
| | | differentiated (4 | | | | with a |
| | | | | | | modified |
| | | | | | | polylinker |
| L0807 | NCI_CGAP_Ov18 | fibrotheoma | ovary | | | pT7T3D-Pac |
| | | | | | | (Pharmacia) |
| | | | | | | with a |
| | | | | | | modified |
| | | | | | | polylinker |
| L0809 | NCI_CGAP_Pr28 | | prostate | | | pT7T3D-Pac |
| | | | | | | (Pharmacia) |
| | | | | | | with a |
| | | | | | | modified |
| | | | | | | polylinker |

[0129] TABLE 5

| OMIM | |
|---|---|
| Reference | Description |
| 102200 | Somatotrophinoma |
| 102480 | Male infertility due to acrosin deficiency |
| 102770 | Myoadenylate deaminase deficiency |
| 103050 | Autism, succinylpurinemic |
| 103050 | Adenylosuccinase deficiency |
| 104770 | Amyloidosis, secondary, susceptibility to |
| 106100 | Angioedema, hereditary |
| 106150 | Hypertension, essential, susceptibility to |
| 106150 | Preeclampsia, susceptibility to |
| 106300 | Ankylosing spondylitis |
| 107670 | Apolipoprotein A-II deficiency |
| 107741 | Hyperlipoproteinemia, type III |
| 107910 | Virilization, maternal and fetal, from placental aromatase |
| | deficiency |
| 107910 | Gynecomastia, familial, due to increased aromatase activity |
| 108725 | Atherosclerosis, susceptibility to |
| 108800 | Atrial septal defect, secundum type |
| 108962 | Hypertension, salt-resistant |
| 109270 | Renal tubular acidosis, distal, 179800 |
| 109270 | Spherocytosis, hereditary |
| 109270 | [Acanthocytosis, one form] |
| 109270 | [Elliptocytosis, Malaysian-Melanesian type] |
| 109270 | Hemolytic anemia due to band 3 defect |
| 109400 | Basal cell nevus syndrome |
| 109700 | Hemodialysis-related amyloidosis |
| 110700 | Vivax malaria, susceptibility to |
| 113100 | Brachydactyly, type C |
| 113705 | Ovarian cancer |
| 113705 | Breast cancer-1 |
| 113721 | Breast cancer |
| 113900 | Heart block, progressive familial, type I |
| 114240 | Muscular dystrophy, limb-girdle, type 2A, 253600 |
| 116806 | Colorectal cancer |
| 118485 | Polycystic ovary syndrome with hyperandrogenemia |
| 118504 | Epilepsy, benign neonatal, type 1, 121200 |
| 118504 | Epilepsy, nocturnal frontal lobe, 600513 |
| 118800 | Choreoathetosis, familial paroxysmal |
| 120110 | Metaphyseal chondrodysplasia, Schmid type |
| 120120 | Epidermolysis bullosa dystrophica, dominant, 131750 |
| 120120 | Epidermolysis bullosa dystrophica, recessive, 226600 |
| 120120 | Epidermolysis bullosa, pretibial, 131850 |
| 120215 | Ehlers-Danlos syndrome, type I, 130000 |
| 120215 | Ehlers-Danlos syndrome, type II, 130010 |
| 120280 | Stickler syndrome, type III |
| 120280 | Marshall syndrome, 154780 |
| 120290 | OSMED syndrome, 215150 |
| 120290 | Stickler syndrome, type II, 184840 |
| 120435 | Muir-Torre syndrome, 158320 |
| 120435 | Colorectal cancer, hereditary, nonpolyposis, type 1 Ovarian |
| | cancer |
| 120436 | Muir-Torre family cancer syndrome, 158320 |
| 120436 | Turcot syndrome with glioblastoma, 276300 |
| 120436 | Colorectal cancer, hereditary nonpolyposis, type 2 |
| 120700 | C3 deficiency |
| 120810 | C4 deficiency |
| 120820 | C4 deficiency |
| 120940 | C9 deficiency |
| 121011 | Deafness, autosomal dominant 3, 601544 |
| 121011 | Deafness, autosomal recessive 1, 220290 |
| 121014 | Heterotaxia, visceroatrial, autosomal recessive |
| 122720 | Nicotine addiction, protection from |
| 122720 | Coumarin resistance, 122700 |
| 123620 | Cataract, cerulean, type 2, 601547 |
| 123660 | Cataract, Coppock-like |
| 124030 | Parkinsonism, susceptibility to |
| 124030 | Debrisoquine sensitivity |
| 124200 | Darier disease (keratosis follicularis) |
| 125270 | Porphyria, acute hepatic |
| 125270 | Lead poisoning, susceptibility to |
| 125660 | Myopathy, desminopathic |
| 125660 | Cardiomyopathy |
| 125852 | Insulin-dependent diabetes mellitus-2 |
| 126340 | Xeroderma pigmentosum, group D, 278730 |
| 126391 | DNA ligase I deficiency |
| 126452 | Autonomic nervous system dysfunction |
| 126452 | [Novelty seeking personality] |
| 126600 | Drusen, radial, autosomal dominant |
| 126650 | Chloride diarrhea, congenital, Finnish type, 214700 |
| 126650 | Colon cancer |
| 128100 | Dystonia-1, torsion |
| 129500 | Ectodermal dysplasia, hidrotic |
| 130410 | Glutaricaciduria, type IIB |
| 131100 | Multiple endocrine neoplasia I |
| 131100 | Prolactinoma, hyperparathyroidism, carcinoid syndrome |
| 131100 | Carcinoid tumor of lung |
| 131242 | Shah-Waardenburg syndrome, 277580 |
| 132800 | Basal cell carcinoma |
| 132800 | Epithelioma, self-healing, squamous 1, Ferguson-Smith type |
| 133171 | [Erythrocytosis, familial], 133100 |
| 133450 | Neuroepithelioma |
| 133450 | Ewing sarcoma |
| 133701 | Exostoses, multiple, type 2 |
| 133780 | Vitreoretinopathy, exudative, familial |
| 134580 | Factor XIIIB deficiency |
| 134790 | Hyperferritinemia-cataract syndrome, 600886 |
| 134797 | Shprintzen-Goldberg syndrome, 182212 |
| 134797 | Ectopia lentis, isolated |
| 134797 | Marfan syndrome, 154700 |
| 135300 | Fibromatosis, gingival |
| 135940 | Ichthyosis vulgaris, 146700 |
| 136350 | Pfeiffer syndrome, 101600 |
| 136435 | Ovarian dysgenesis, hypergonadotropic, with normal |
| | karyotype, 233300 |
| 136550 | Macular dystrophy, North Carolina type |
| 136836 | Fucosyltransferase-6 deficiency |
| 137350 | Amyloidosis, Finnish type, 105120 |
| 138079 | Hyperinsulinism, familial, 602485 |
| 138079 | MODY, type 2, 125851 |
| 138320 | Hemolytic anemia due to glutathione peroxidase deficiency |
| 138570 | Non-insulin dependent diabetes mellitus, susceptibility to |
| 138720 | Bernard-Soulier syndrome, type B |
| 138981 | Pulmonary alveolar proteinosis, 265120 |
| 139191 | Growth hormone deficient dwarfism |
| 139320 | Pituitary ACTH secreting adenoma |
| 139320 | Pseudohypoparathyroidism, type Ia, 103580 |
| 139320 | Somatotrophinoma |
| 139320 | McCune-Albright polyostotic fibrous dysplasia, 174800 |
| 141750 | Alpha-thalassemia/mental retardation syndrome, type 1 |
| 141800 | Methemoglobinemias, alpha- |
| 141800 | Thalassemias, alpha- |
| 141800 | Erythremias, alpha- |
| 141800 | Heinz body anemias, alpha- |
| 141850 | Thalassemia, alpha- |
| 141850 | Erythrocytosis |
| 141850 | Heinz body anemia |
| 141850 | Hemoglobin H disease |
| 141850 | Hypochromic microcytic anemia |
| 141900 | Methemoglobinemias, beta- |
| 141900 | Sickle cell anemia |
| 141900 | Thalassemias, beta- |
| 141900 | Erythremias, beta- |
| 141900 | HPFH, deletion type |
| 141900 | Heinz body anemias, beta- |
| 142000 | Thalassemia due to Hb Lepore |
| 142000 | Thalassemia, delta- |
| 142200 | HPFH, nondeletion type A |
| 142250 | HPFH, nondeletion type G |
| 142270 | Hereditary persistence of fetal hemoglobin |
| 142470 | [Hereditary persistence of fetal hemoglobin, heterocellular] |
| 142857 | Pemphigoid, susceptibility to |
| 142858 | Beryllium disease, chronic, susceptibility to |
| 142959 | Hand-foot-uterus syndrome, 140000 |
| 143890 | Hypercholesterolemia, familial |
| 144200 | Epidermolytic palmoplantar keratoderma |
| 145001 | Hyperparathyroidism-jaw tumor syndrome |
| 145260 | Pseudohypoaldosteronism, type II |
| 145410 | Opitz G syndrome, type II |
| 145981 | Hypocalciuric hypercalcemia, type II |
| 146760 | [IgG receptor I, phagocytic, familial deficiency of] |
| 146790 | Lupus nephritis, susceptibility to |
| 147050 | Atopy |
| 147141 | Leukemia, acute lymphoblastic |
| 147200 | [Kappa light chain deficiency] |
| 147440 | Growth retardation with deafness and mental retardation |
| 147670 | Rabson-Mendenhall syndrome |
| 147670 | Diabetes mellitus, insulin-resistant, with acanthosis nigricans |
| 147670 | Leprechaunism |
| 148065 | White sponge nevus, 193900 |
| 148066 | Epidermolysis bullosa simplex, Koebner, Dowling-Meara, and |
| | Weber-Cockayne types, 131900, 131760, 131800 |
| 148066 | Epidermolysis bullosa simplex, recessive, 601001 |
| 148067 | Nonepidermolytic palmoplantar keratoderma, 600962 |
| 148067 | Pachyonychia congenita, Jadassohn-Lewandowsky type, |
| | 167200 |
| 148069 | Pachyonychia congenita, Jackson-Lawler type, 167210 |
| 148080 | Epidermolytic hyperkeratosis, 113800 |
| 150270 | Laryngeal adductor paralysis |
| 151400 | Leukemia/lymphoma, B-cell, 1 |
| 151440 | Leukemia, T-cell acute lymphoblastoid |
| 151670 | Hepatic lipase deficiency |
| 152200 | Coronary artery disease, susceptibility to |
| 152445 | Vohwinkel syndrome, 124500 |
| 152445 | Erythrokeratoderma, progressive symmetric, 602036 |
| 152760 | Hypogonadotropic hypogonadism due to GNRH deficiency, |
| | 227200 |
| 152790 | Precocious puberty, male, 176410 |
| 152790 | Leydig cell hypoplasia |
| 153700 | Macular dystrophy, vitelliform type |
| 153880 | Macular dystrophy, dominant cystoid |
| 154275 | Malignant hyperthermia susceptibility 2 |
| 154276 | Malignant hyperthermia susceptibility 3 |
| 155555 | [Red hair/fair skin] |
| 155555 | UV-induced skin damage, vulnerability to |
| 156225 | Muscular dystrophy, congenital merosin-deficient |
| 156850 | Cataract, congenital, with microphthalmia |
| 157170 | Holoprosencephaly-2 |
| 158590 | Spinal muscular atrophy-4 |
| 159001 | Muscular dystrophy, limb-girdle, type 1B |
| 160781 | Cardiomyopathy, hypertrophic, mid-left ventricular chamber |
| | type |
| 160900 | Myotonic dystrophy |
| 161015 | Mitochondrial complex I deficiency, 252010 |
| 163950 | Noonan syndrome-1 |
| 163950 | Cardiofaciocutaneous syndrome, 115150 |
| 164009 | Leukemia, acute promyelocytic, NUMA/RARA type |
| 164200 | Oculodentodigital dysplasia |
| 164200 | Syndactyly, type III, 186100 |
| 164731 | Ovarian carcinoma, 167000 |
| 164953 | Liposarcoma |
| 166600 | Osteopetrosis, AD, type II |
| 167000 | Ovarian cancer, serous |
| 167250 | Paget disease of bone |
| 168461 | Multiple myeloma, 254250 |
| 168461 | Parathyroid adenomatosis 1 |
| 168461 | Centrocytic lymphoma |
| 168468 | Metaphyseal chondrodysplasia, Murk Jansen type, 156400 |
| 168500 | Parietal foramina |
| 168610 | Parkinsonism-dementia with pallidopontonigral degeneration |
| 170261 | Bare lymphocyte syndrome, type I, due to TAP2 deficiency |
| 170995 | Zellweger syndrome-2 |
| 171190 | Hypertension, essential, 145500 |
| 171650 | Lysosomal acid phosphatase deficiency |
| 172400 | Hemolytic anemia due to glucosephosphate isomerase |
| | deficiency |
| 172400 | Hydrops fetalis, one form |
| 173360 | Thrombophilia due to excessive plasminogen activator |
| | inhibitor |
| 173360 | Hemorrhagic diathesis due to PAI1 deficiency |
| 173370 | Plasminogen activator deficiency |
| 173850 | Polio, susceptibility to |
| 173870 | Xeroderma pigmentosum |
| 173870 | Fanconi anemia |
| 174000 | Medullary cystic kidney disease, AD |
| 176705 | Breast cancer, sporadic |
| 176730 | Diabetes mellitus, rare form |
| 176730 | Hyperproinsulinemia, familial |
| 176730 | MODY, one form |
| 176930 | Dysprothrombinemia |
| 176930 | Hypoprothrombinemia |
| 177900 | Psoriasis susceptibility-1 |
| 178640 | Pulmonary alveolar proteinosis, congenital, 265120 |
| 179450 | Ragweed sensitivity |
| 179605 | Retinitis pigmentosa, digenic |
| 179605 | Retinitis pigmentosa-7, peripherin-related |
| 179605 | Retinitis punctata albescens |
| 179605 | Butterfly dystrophy, retinal |
| 179605 | Macular dystrophy |
| 179755 | Renal cell carcinoma, papillary, 1 |
| 180020 | Retinal cone dystrophy-1 |
| 180100 | Retinitis pigmentosa-1 |
| 180104 | Retinitis pigmentosa-9 |
| 180297 | Anemia, hemolytic, Rh-null, suppressor type, 268150 |
| 180721 | Retinitis pigmentosa, digenic |
| 180840 | Susceptibility to IDDM |
| 180901 | Malignant hyperthermia susceptibility 1, 145600 |
| 180901 | Central core disease, 117000 |
| 181430 | Scapuloperoneal syndrome, myopathic type |
| 182280 | Small-cell cancer of lung |
| 182380 | Glucose/galactose malabsorption |
| 182601 | Spastic paraplegia-4 |
| 182860 | Pyropoikilocytosis |
| 182860 | Spherocytosis, recessive |
| 182860 | Elliptocytosis-2 |
| 182900 | Spherocytosis-2 |
| 185430 | Atherosclerosis, susceptibility to |
| 185800 | Symphalangism, proximal |
| 186580 | Arthrocutaneouveal granulomatosis |
| 186855 | Leukemia-2, T-cell acute lymphoblastic |
| 188070 | Bleeding disorder due to defective thromboxane A2 receptor |
| 188540 | Hypothyroidism, nongoitrous |
| 188826 | Sorsby fundus dystrophy, 136900 |
| 189800 | Preeclampsia/eclampsia |
| 190020 | Bladder cancer, 109800 |
| 190040 | Dermatofibrosarcoma protuberans |
| 190040 | Giant-cell fibroblastoma |
| 190040 | Meningioma, SIS-related |
| 190182 | Colon cancer |
| 190182 | Colorectal cancer, familial nonpolyposis, type 6 |
| 190198 | Leukemia, T-cell acute lymphoblastic |
| 191092 | Tuberous sclerosis-2 |
| 191100 | Tuberous sclerosis-1 |
| 191170 | Colorectal cancer, 114500 |
| 191170 | Li-Fraumeni syndrome |
| 191181 | Cervical carcinoma |
| 191290 | Segawa syndrome, recessive |
| 191315 | Insensitivity to pain, congenital, with anhidrosis, 256800 |
| 192500 | Jervell and Lange-Nielsen syndrome, 220400 |
| 192500 | Long QT syndrome-1 |
| 193235 | Vitreoretinopathy, neovascular inflammatory |
| 193500 | Rhabdomyosarcoma, alveolar, 268220 |
| 193500 | Waardenburg syndrome, type I |
| 193500 | Waardenburg syndrome, type III, 148820 |
| 193500 | Craniofacial-deafness-hand syndrome, 122880 |
| 194071 | Wilms tumor, type 2 |
| 194071 | Adrenocortical carcinoma, hereditary, 202300 |
| 200350 | Acetyl-CoA carboxylase deficiency |
| 201460 | Acyl-CoA dehydrogenase, long chain, deficiency of |
| 201910 | Adrenal hyperplasia, congenital, due to 21-hydroxylase |
| | deficiency |
| 204500 | Ceroid-lipofuscinosis, neuronal 2, classic late infantile |
| 205100 | Amyotrophic lateral sclerosis, juvenile |
| 207750 | Hyperlipoproteinemia, type Ib |
| 209901 | Bardet-Biedl syndrome 1 |
| 215700 | Citrullinemia |
| 216900 | Achromatopsia |
| 217000 | C2 deficiency |
| 217050 | C6 deficiency |
| 217050 | Combined C6/C7 deficiency |
| 217070 | C7 deficiency |
| 221770 | Polycystic lipomembranous osteodysplasia with sclerosing |
| | leukencephalopathy |
| 221820 | Gliosis, familial progressive subcortical |
| 222100 | Diabetes mellitus, insulin-dependent-1 |
| 223360 | Dopamine-beta-hydroxylase deficiency |
| 223900 | Dysautonomia, familial |
| 227646 | Fanconi anemia, type D |
| 227650 | Fanconi anemia, type A |
| 230400 | Galactosemia |
| 230450 | Hemolytic anemia due to gamma-glutamylcysteine synthetase |
| | deficiency |
| 230800 | Gaucher disease |
| 230800 | Gaucher disease with cardiovascular calcification |
| 231670 | Glutaricaciduria, type I |
| 231680 | Glutaricaciduria, type IIA |
| 231950 | Glutathioninuria |
| 232200 | Glycogen storage disease I |
| 232400 | Glycogen storage disease IIIa |
| 232400 | Glycogen storage disease IIIb |
| 232600 | McArdle disease |
| 232800 | Glycogen storage disease VII |
| 233100 | [Renal glucosuria] |
| 235200 | Hemochromatosis |
| 237300 | Carbamoylphosphate synthetase I deficiency |
| 239500 | Hyperprolinemia, type I |
| 245050 | Ketoacidosis due to SCOT deficiency |
| 247200 | Miller-Dieker lissencephaly syndrome |
| 248600 | Maple syrup urine disease, type Ia |
| 248611 | Maple syrup urine disease, type Ib |
| 249000 | Meckel syndrome |
| 250250 | Cartilage-hair hypoplasia |
| 251170 | Mevalonicaciduria |
| 252920 | Sanfilippo syndrome, type B |
| 253000 | Mucopolysaccharidosis IVA |
| 253250 | Mulibrey nanism |
| 253700 | Muscular dystrophy, limb-girdle, type 2C |
| 253800 | Walker-Warburg syndrome, 236670 |
| 253800 | Fukuyama type congenital muscular dystrophy |
| 256540 | Galactosialidosis |
| 256550 | Sialidosis, type I |
| 256550 | Sialidosis, type II |
| 256850 | Giant axonal neuropathy-1 |
| 258501 | 3-methylglutaconicaciduria, type III |
| 259700 | Osteopetrosis, recessive |
| 259770 | Osteoporosis-pseudoglioma syndrome |
| 261510 | Pseudo-Zellweger syndrome |
| 262000 | Bjornstad syndrome |
| 263200 | Polycystic kidney disease, autosomal recessive |
| 266200 | Anemia, hemolytic, due to PK deficiency |
| 268900 | [Sarcosinemia] |
| 270800 | Spastic paraplegia-5A |
| 272800 | Tay-Sachs disease |
| 272800 | [Hex A pseudodeficiency] |
| 272800 | GM2-gangliosidosis, juvenile, adult |
| 275350 | Transcobalamin II deficiency |
| 276700 | Tyrosinemia, type I |
| 276710 | Tyrosinemia, type III |
| 277700 | Werner syndrome |
| 278300 | Xanthinuria, type I |
| 278700 | Xeroderma pigmentosum, group A |
| 300000 | Opitz G syndrome, type I |
| 300066 | Deafness, X-linked 6, sensorineural |
| 300067 | Subcortical laminar heterotopia, X-linked dominant |
| 300067 | Lissencephaly, X-linked |
| 300077 | Mental retardation, X-linked 29 |
| 300121 | Subcortical laminal heteropia, X-linked, 300067 |
| 300121 | Lissencephaly, X-linked, 300067 |
| 300123 | Mental retardation with isolated growth hormone deficiency |
| 300310 | Agammaglobulinemia, type 2, X-linked |
| 300500 | Ocular albinism, Nettleship-Falls type |
| 300650 | Ocular albinism with sensorineural deafness |
| 301200 | Amelogenesis imperfecta |
| 301201 | Amelogenesis imperfecta-3, hypoplastic type |
| 301220 | Partington syndrome II |
| 301835 | Arts syndrome |
| 301845 | Bazex syndrome |
| 301900 | Borjeson-Forssman-Lehmann syndrome |
| 302350 | Nance-Horan syndrome |
| 302950 | Chondrodysplasia punctata, X-linked recessive, 302940 |
| 304050 | Aicardi syndrome |
| 304110 | Craniofrontonasal dysplasia |
| 304340 | Mental retardation, X-linked, syndromic-5, with Dandy- |
| | Walker malformation, basal ganglia disease, and |
| | seizures |
| 306100 | Gonadal dysgenesis, XY female type |
| 307150 | Hypertrichosis, congenital generalized |
| 307700 | Hypoparathyroidism, X-linked |
| 308000 | HPRT-related gout |
| 308000 | Lesch-Nyhan syndrome |
| 308700 | Kallmann syndrome |
| 309000 | Lowe syndrome |
| 309530 | Mental retardation, X-linked 1, non-dysmorphic |
| 309585 | Mental retardation, X-linked, syndromic-6, with gynecomastia |
| | and obesity |
| 310490 | Cowchock syndrome |
| 311200 | Oral-facial-digital syndrome 1 |
| 311850 | Phosphoribosyl pyrophosphate synthetase-related gout |
| 312040 | N syndrome, 310465 |
| 313850 | Thoracoabdominal syndrome |
| 600040 | Colorectal cancer |
| 600045 | Xeroderma pigmentosum, group E, subtype 2 |
| 600059 | Retinitis pigmentosa-13 |
| 600105 | Retinitis pigmentosa-12, autosomal recessive |
| 600119 | Muscular dystrophy, Duchenne-like, type 2 |
| 600119 | Adhalinopathy, primary |
| 600140 | Rubenstein-Taybi syndrome, 180849 |
| 600163 | Long QT syndrome-3 |
| 600175 | Spinal muscular atrophy, congenital nonprogressive, of lower |
| | limbs |
| 600202 | Dyslexia, specific, 2 |
| 600234 | HMG-CoA synthease-2 deficiency |
| 600261 | Ehlers-Danlos-like syndrome |
| 600266 | Resistance/susceptibility to TB, etc. |
| 600273 | Polycystic kidney disease, infantile severe, with tuberous |
| | sclerosis |
| 600276 | Cerebral arteriopathy with subcortical infarcts and |
| | leukoencephalopathy, 125310 |
| 600281 | Non-insulin-dependent diabetes mellitus, 125853 |
| 600281 | MODY, type 1, 125850 |
| 600309 | Atrioventricular canal defect-1 |
| 600319 | Diabetes mellitus, insulin-dependent, 4 |
| 600320 | Insulin-dependent diabetes mellitus-5 |
| 600364 | Cone dystrophy-3, 602093 |
| 600374 | Bardet-Biedl syndrome 4 |
| 600528 | CPT deficiency, hepatic, type I, 255120 |
| 600617 | Lipoid adrenal hyperplasia, 201710 |
| 600623 | Prostate cancer, 176807 |
| 600759 | Alzheimer disease-4 |
| 600808 | Enuresis, nocturnal, 2 |
| 600811 | Xeroderma pigmentosum, group E, DDB-negative subtype, |
| | 278740 |
| 600837 | Hirschsprung disease, 142623 |
| 600839 | Bartter syndrome, 241200 |
| 600850 | Schizophrenia disorder-4 |
| 600856 | Beckwith-Wiedemann syndrome, 130650 |
| 600883 | Diabetes mellitus, insulin-dependent, 8 |
| 600897 | Cataract, zonular pulverulent-1, 116200 |
| 600918 | Cystinuria, type III |
| 600946 | Short stature, autosomal dominant, with normal serum growth |
| | hormone binding protein |
| 600946 | Short stature, idiopathic |
| 600946 | Laron dwarfism, 262500 |
| 600957 | Persistent Mullerian duct syndrome, type I, 261550 |
| 600958 | Cardiomyopathy, familial hypertrophic, 4, 115197 |
| 600964 | Refsum disease, adult, with increased pipecolicacidemia |
| 600983 | Pseudohypoaldosteronism type I, autosomal dominant, 177735 |
| 600994 | Deafness, autosomal dominant 5 |
| 600996 | Arrhythmogenic right ventricular dysplasia-2 |
| 601071 | Deafness, autosomal recessive 9 |
| 601105 | Pycnodysostosis, 265800 |
| 601154 | Cardiomyopathy, dilated, 1E |
| 601238 | Cerebellar ataxia, Cayman type |
| 601277 | Ichthyosis, lamellar, type 2 |
| 601284 | Hereditary hemorrhagic telangiectasia-2, 600376 |
| 601313 | Polycystic kidney disease, adult type I, 173900 |
| 601316 | Deafness, autosomal dominant 10 |
| 601362 | DiGeorge syndrome/velocardiofacial syndrome complex-2 |
| 601363 | Wilms tumor, type 4 |
| 601410 | Diabetes mellitus, transient neonatal |
| 601412 | Deafness, autosomal dominant 7 |
| 601414 | Retinitis pigmentosa-18 |
| 601498 | Peroxisomal biogenesis disorder, complementation group 4 |
| 601517 | Spinocerebellar ataxia-2, 183090 |
| 601545 | Lissencephaly-1 |
| 601649 | Blepharophimosis, epicanthus inversus, and ptosis, type 2 |
| 601652 | Glaucoma 1A, primary open angle, juvenile-onset, 137750 |
| 601666 | Insulin-dependent diabetes mellitus-15 |
| 601669 | Hirschsprung disease, one form |
| 601680 | Distal arthrogryposis, type 2B |
| 601690 | Platelet-activating factor acetylhydrolase deficiency |
| 601691 | Retinitis pigmentosa-19, 601718 |
| 601691 | Stargardt disease-1, 248200 |
| 601691 | Cone-rod dystrophy 3 |
| 601691 | Fundus flavimaculatus with macular dystrophy, 248200 |
| 601718 | Retinitis pigmentosa-19 |
| 601744 | Systemic lupus erythematosus, susceptibility to, 1 |
| 601757 | Rhizomelic chondrodysplasia punctata, type 1, 215100 |
| 601769 | Osteoporosis, involutional |
| 601769 | Rickets, vitamin D-resistant, 277440 |
| 601771 | Glaucoma 3A, primary infantile, 231300 |
| 601780 | Ceroid-lipofuscinosis, neuronal-6, variant late infantile |
| 601785 | Carbohydrate-deficient glycoprotein syndrome, type I, 212065 |
| 601843 | Hypothyroidism, congenital, 274400 |
| 601844 | Pseudohypoaldosteronism type II |
| 601846 | Muscular dystrophy with rimmed vacuoles |
| 601850 | Retinitis pigmentosa-deafness syndrome |
| 601863 | Bare lymphocyte syndrome, complementation group C |
| 601868 | Deafness, autosomal dominant 13 |
| 601884 | [High bone mass] |
| 601885 | Cataract, zonular pulverulent-2 |
| 601975 | Ectodermal dysplasia/skin fragility syndrome |
| 602025 | Obesity/hyperinsulinism, susceptibility to |
| 602026 | Refsum disease, 266500 |
| 602078 | Fibrosis of extraocular muscles, congenital, 2 |
| 602088 | Nephronophthisis, infantile |
| 602094 | Lipodystrophy, familial partial |
| 602099 | Amytrophic lateral sclerosis-5 |
| 602116 | Glioma |
| 602134 | Tremor, familial essential, 2 |
| 602136 | Refsum disease, infantile, 266510 |
| 602136 | Zellweger syndrome-1, 214100 |
| 602136 | Adrenoleukodystrophy, neonatal, 202370 |
| 602216 | Peutz-Jeghers syndrome, 175200 |
| 602221 | Stem-cell leukemia/lymphoma syndrome |
| 602225 | Cone-rod retinal dystrophy-2, 120970 |
| 602225 | Leber congenital amaurosis, type III |
| 602229 | Waardenburg-Shah syndrome, 277580 |
| 602235 | Epilepsy, benign, neonatal, type 1, 121200 |
| 602280 | Retinitis pigmentosa-14, 600132 |
| 602447 | Coronary artery disease, susceptibility to |
| 602475 | Ossification of posterior longitudinal ligament of spine |
| 602477 | Febrile convulsions, familial, 2 |
| 602491 | Hyperlipidemia, familial combined, 1 |
| 602544 | Parkinson disease, juvenile, type 2, 600116 |
| 602631 | Rhabdomyosarcoma, 268210 |
| 602631 | Breast Cancer |
| 602716 | Nephrosis-1, congenital, Finnish type, 256300 |
| 602772 | Retinitis pitmentosa-24 |
| 602782 | Faisalabad histiocytosis |
| 602783 | Spastic paraplegia-7 |

[0130] Polynucleotide and Polypeptide Variants

[0131] The present invention is also directed to variants of the reproductive system associted polynucleotide sequence disclosed in SEQ ID NO: X or the complementary strand thereto, nucleotide sequences encoding the polypeptide of SEQ ID NO: Y, the nucleotide sequence of SEQ ID NO: X encoding the polypeptide sequence as defined in column 6 of Table 1A, nucleotide sequences encoding the polypeptide as defined in column 6 of Table 1A, the nucleotide sequence as defined in columns 8 and 9 of Table 2, nucleotide sequences encoding the polypeptide encoded by the nucleotide sequence as defined in columns 8 and 9 of Table 2, the nucleotide sequence as defined in column 6 of Table 1B, nucleotide sequences encoding the polypeptide encoded by the nucleotide sequence as defined in column 6 of Table 1B, the cDNA sequence contained in Clone ID NO: Z, and/or nucleotide sequences encoding a polypeptide encoded by the cDNA sequence contained in Clone ID NO :Z.

[0132] The present invention also encompasses variants of the polypeptide sequence disclosed in SEQ ID NO: Y, a polypeptide sequence as defined in column 6 of Table 1A, a polypeptide sequence encoded by the polynucleotide sequence in SEQ ID NO: X, a polypeptide sequence encoded by the nucleotide sequence as defined in columns 8 and 9 of Table 2, a polypeptide sequence encoded by the nucleotide sequence as defined in column 6 of Table 1B, a polypeptide sequence encoded by the complement of the polynucleotide sequence in SEQ ID NO: X, and/or a polypeptide sequence encoded by the cDNA sequence contained in Clone ID NO: Z.

[0133] “Variant” refers to a polynucleotide or polypeptide differing from the polynucleotide or polypeptide of the present invention, but retaining essential properties thereof. Generally, variants are overall closely similar, and, in many regions, identical to the polynucleotide or polypeptide of the present invention.

[0134] Thus, one aspect of the invention provides an isolated nucleic acid molecule comprising, or alternatively consisting of, a polynucleotide having a nucleotide sequence selected from the group consisting of: (a) a nucleotide sequence described in SEQ ID NO: X or contained in the cDNA sequence of Clone ID NO: Z; (b) a nucleotide sequence in SEQ ID NO: X or the cDNA in Clone ID NO: Z which encodes a mature reproductive system associated polypeptide; (c) a nucleotide sequence in SEQ ID NO: X or the cDNA sequence of Clone ID NO: Z, which encodes a biologically active fragment of a reproductive system associated polypeptide; (d) a nucleotide sequence in SEQ ID NO: X or the cDNA sequence of Clone ID NO: Z, which encodes an antigenic fragment of a reproductive system associated polypeptide; (e) a nucleotide sequence encoding a reproductive system associated polypeptide having the complete amino acid sequence of SEQ ID NO: Y or the complete amino acid sequence encoded by the cDNA in Clone ID NO: Z; (f) a nucleotide sequence encoding a mature reproductive system associated polypeptide of the amino acid sequence of SEQ ID NO: Y or the amino acid sequence encoded by the cDNA in Clone ID NO: Z; (g) a nucleotide sequence encoding a biologically active fragment of a reproductive system associated polypeptide having the complete amino acid sequence of SEQ ID NO: Y or the complete amino acid sequence encoded by the cDNA in Clone ID NO: Z; (h) a nucleotide sequence encoding an antigenic fragment of a reproductive system associated polypeptide having the complete amino acid sequence of SEQ ID NO: Y or the complete amino acid sequence encoded by the cDNA in Clone ID NO: Z; and (i) a nucleotide sequence complementary to any of the nucleotide sequences in (a), (b), (c), (d), (e), (f), (g), or (h), above.

[0135] The present invention is also directed to nucleic acid molecules which comprise, or alternatively consist of, a nucleotide sequence which is at least 80%, 85%, 90%, 95%, 96%, 97%, 98%, 99% or 100%, identical to, for example, any of the nucleotide sequences in (a), (b), (c), (d), (e), (f), (g), (h), or (i) above, the nucleotide coding sequence in SEQ ID NO: X or the complementary strand thereto, the nucleotide coding sequence of the cDNA contained in Clone ID NO: Z or the complementary strand thereto, a nucleotide sequence encoding the polypeptide of SEQ ID NO: Y, a nucleotide sequence encoding a polypeptide sequence encoded by the nucleotide sequence in SEQ ID NO: X, a polypeptide sequence encoded by the complement of the polynucleotide sequence in SEQ ID NO: X, a nucleotide sequence encoding the polypeptide encoded by the cDNA contained in Clone ID NO: Z, the nucleotide coding sequence in SEQ ID NO: X as defined in columns 8 and 9 of Table 2 or the complementary strand thereto, a nucleotide sequence encoding the polypeptide encoded by the nucleotide sequence in SEQ ID NO: X as defined in columns 8 and 9 of Table 2 or the complementary strand thereto, the nucleotide coding sequence in SEQ ID NO: B as defined in column 6 of Table 1B or the complementary strand thereto, a nucleotide sequence encoding the polypeptide encoded by the nucleotide sequence in SEQ ID NO: B as defined in column 6 of Table 1B or the complementary strand thereto, the nucleotide sequence in SEQ ID NO: X encoding the polypeptide sequence as defined in column 6 of Table 1A or the complementary strand thereto, nucleotide sequences encoding a polypeptide as defined in column 6 of Table 1A or the complementary strand thereto, and/or polynucleotide fragments of any of these nucleic acid molecules (e.g., those fragments described herein). Polynucleotides which hybridize to the complement of these nucleic acid molecules under stringent hybridization conditions or alternatively, under lower stringency conditions, are also encompassed by the invention, as are polypeptides encoded by these polynucleotides and nucleic acids.

[0136] In a preferred embodiment, the invention encompasses nucleic acid molecules which comprise, or alternatively, consist of a polynucleotide which hybridizes under stringent hybridization conditions, or alternatively, under lower stringency conditions, to a polynucleotide in (a), (b), (c), (d), (e), (f), (g), (h), or (i) above, as are polypeptides encoded by these polynucleotides. In another preferred embodiment, polynucleotides which hybridize to the complement of these nucleic acid molecules under stringent hybridization conditions or alternatively, under lower stringency conditions, are also encompassed by the invention, as are polypeptides encoded by these polynucleotides.

[0137] In another embodiment, the invention provides a purified protein comprising, or alternatively consisting of, a polypeptide having an amino acid sequence selected from the group consisting of: (a) the complete amino acid sequence of SEQ ID NO: Y or the complete amino acid sequence encoded by the cDNA in Clone ID NO: Z; (b) the amino acid sequence of a mature reproductive system associated polypeptide having the amino acid sequence of SEQ ID NO: Y or the amino acid sequence encoded by the cDNA in Clone ID NO: Z; (c) the amino acid sequence of a biologically active fragment of a reproductive system associated polypeptide having the complete amino acid sequence of SEQ ID NO: Y or the complete amino acid sequence encoded by the cDNA in Clone ID NO: Z; and (d) the amino acid sequence of an antigenic fragment of a reproductive system associated polypeptide having the complete amino acid sequence of SEQ ID NO: Y or the complete amino acid sequence encoded by the cDNA in Clone ID NO: Z.

[0138] The present invention is also directed to proteins which comprise, or alternatively consist of, an amino acid sequence which is at least 80%, 85%, 90%, 95%, 96%, 97%, 98%, 99% or 100%, identical to, for example, any of the amino acid sequences in (a), (b), (c), or (d), above, the amino acid sequence shown in SEQ ID NO: Y, the amino acid sequence encoded by the cDNA contained in Clone ID NO: Z, the amino acid sequence of the polypeptide encoded by the nucleotide sequence in SEQ ID NO: X as defined in columns 8 and 9 of Table 2, the amino acid sequence of the polypeptide encoded by the nucleotide sequence in SEQ ID NO: B as defined in column 6 of Table 1B, the amino acid sequence as defined in column 6 of Table 1A, an amino acid sequence encoded by the nucleotide sequence in SEQ ID NO: X, and an amino acid sequence encoded by the complement of the polynucleotide sequence in SEQ ID NO: X. Fragments of these polypeptides are also provided (e.g., those fragments described herein). Further proteins encoded by polynucleotides which hybridize to the complement of the nucleic acid molecules encoding these amino acid sequences under stringent hybridization conditions or alternatively, under lower stringency conditions, are also encompassed by the invention, as are the polynucleotides encoding these proteins.

[0139] By a nucleic acid having a nucleotide sequence at least, for example, 95% “identical” to a reference nucleotide sequence of the present invention, it is intended that the nucleotide sequence of the nucleic acid is identical to the reference sequence except that the nucleotide sequence may include up to five point mutations per each 100 nucleotides of the reference nucleotide sequence encoding the polypeptide. In other words, to obtain a nucleic acid having a nucleotide sequence at least 95% identical to a reference nucleotide sequence, up to 5% of the nucleotides in the reference sequence may be deleted or substituted with another nucleotide, or a number of nucleotides up to 5% of the total nucleotides in the reference sequence may be inserted into the reference sequence. The query sequence may be an entire sequence referred to in Table 1A or 2 as the ORF (open reading frame), or any fragment specified, as described herein.

[0140] As a practical matter, whether any particular nucleic acid molecule or polypeptide is at least 80%, 85%, 90%, 95%, 96%, 97%, 98% or 99% identical to a nucleotide sequence of the present invention can be determined conventionally using known computer programs. A preferred method for determining the best overall match between a query sequence (a sequence of the present invention) and a subject sequence, also referred to as a global sequence alignment, can be determined using the FASTDB computer program based on the algorithm of Brutlag et al. (Comp. App. Biosci. 6:237-245 (1990)). In a sequence alignment the query and subject sequences are both DNA sequences. An RNA sequence can be compared by converting U's to T's. The result of said global sequence alignment is expressed as percent identity. Preferred parameters used in a FASTDB alignment of DNA sequences to calculate percent identity are: Matrix=Unitary, k-tuple=4, Mismatch Penalty=1, Joining Penalty=30, Randomization Group Length=0, Cutoff Score=1, Gap Penalty=5, Gap Size Penalty 0.05, Window Size=500 or the length of the subject nucleotide sequence, whichever is shorter.

[0141] If the subject sequence is shorter than the query sequence because of 5′ or 3′ deletions, not because of internal deletions, a manual correction must be made to the results. This is because the FASTDB program does not account for 5′ and 3′ truncations of the subject sequence when calculating percent identity. For subject sequences truncated at the 5′ or 3′ ends, relative to the query sequence, the percent identity is corrected by calculating the number of bases of the query sequence that are 5′ and 3′ of the subject sequence, which are not matched/aligned, as a percent of the total bases of the query sequence. Whether a nucleotide is matched/aligned is determined by results of the FASTDB sequence alignment. This percentage is then subtracted from the percent identity, calculated by the above FASTDB program using the specified parameters, to arrive at a final percent identity score. This corrected score is what is used for the purposes of the present invention. Only bases outside the 5′ and 3′ bases of the subject sequence, as displayed by the FASTDB alignment, which are not matched/aligned with the query sequence, are calculated for the purposes of manually adjusting the percent identity score.

[0142] For example, a 90 base subject sequence is aligned to a 100 base query sequence to determine percent identity. The deletions occur at the 5′ end of the subject sequence and therefore, the FASTDB alignment does not show a matched/alignment of the first 10 bases at 5′ end. The 10 unpaired bases represent 10% of the sequence (number of bases at the 5′ and 3′ ends not matched/total number of bases in the query sequence) so 10% is subtracted from the percent identity score calculated by the FASTDB program. If the remaining 90 bases were perfectly matched the final percent identity would be 90%. In another example, a 90 base subject sequence is compared with a 100 base query sequence. This time the deletions are internal deletions so that there are no bases on the 5′ or 3′ of the subject sequence which are not matched/aligned with the query. In this case the percent identity calculated by FASTDB is not manually corrected. Once again, only bases 5′ and 3′ of the subject sequence which are not matched/aligned with the query sequence are manually corrected for. No other manual corrections are to be made for the purposes of the present invention.

[0143] By a polypeptide having an amino acid sequence at least, for example, 95% “identical” to a query amino acid sequence of the present invention, it is intended that the amino acid sequence of the subject polypeptide is identical to the query sequence except that the subject polypeptide sequence may include up to five amino acid alterations per each 100 amino acids of the query amino acid sequence. In other words, to obtain a polypeptide having an amino acid sequence at least 95% identical to a query amino acid sequence, up to 5% of the amino acid residues in the subject sequence may be inserted, deleted, (indels) or substituted with another amino acid. These alterations of the reference sequence may occur at the amino or carboxy terminal positions of the reference amino acid sequence or anywhere between those terminal positions, interspersed either individually among residues in the reference sequence or in one or more contiguous groups within the reference sequence.

[0144] As a practical matter, whether any particular polypeptide is at least 80%, 85%, 90%, 95%, 96%, 97%, 98% or 99% identical to, for instance, the amino acid sequence of a polypeptide referred to in Table 1A (e.g., an amino acid sequence identified in columns 5 or 6) or Table 2 (e.g., the amino acid sequence of the polypeptide encoded by the polynucleotide sequence defined in columns 8 and 9 of Table 2) or a fragment thereof, the amino acid sequence of the polypeptide encoded by the polynucleotide sequence in SEQ ID NO: B as defined in column 6 of Table 1B or a fragment thereof, the amino acid sequence of the polypeptide encoded by the nucleotide sequence in SEQ ID NO: X or a fragment thereof, or an amino acid sequence of the polypeptide encoded by cDNA contained in Clone ID NO: Z, or a fragment thereof, can be determined conventionally using known computer programs. A preferred method for determining the best overall match between a query sequence (a sequence of the present invention) and a subject sequence, also referred to as a global sequence alignment, can be determined using the FASTDB computer program based on the algorithm of Brutlag et al. (Comp. App. Biosci.6:237-245 (1990)). In a sequence alignment the query and subject sequences are either both nucleotide sequences or both amino acid sequences. The result of said global sequence alignment is expressed as percent identity. Preferred parameters used in a FASTDB amino acid alignment are: Matrix=PAM 0, k-tuple=2, Mismatch Penalty=1, Joining Penalty=20, Randomization Group Length=0, Cutoff Score=1, Window Size=sequence length, Gap Penalty=5, Gap Size Penalty=0.05, Window Size=500 or the length of the subject amino acid sequence, whichever is shorter.

[0145] If the subject sequence is shorter than the query sequence due to N- or C-terminal deletions, not because of internal deletions, a manual correction must be made to the results. This is because the FASTDB program does not account for N- and C-terminal truncations of the subject sequence when calculating global percent identity. For subject sequences truncated at the N- and C-termini, relative to the query sequence, the percent identity is corrected by calculating the number of residues of the query sequence that are N- and C-terminal of the subject sequence, which are not matched/aligned with a corresponding subject residue, as a percent of the total bases of the query sequence. Whether a residue is matched/aligned is determined by results of the FASTDB sequence alignment. This percentage is then subtracted from the percent identity, calculated by the above FASTDB program using the specified parameters, to arrive at a final percent identity score. This final percent identity score is what is used for the purposes of the present invention. Only residues to the N- and C-termini of the subject sequence, which are not matched/aligned with the query sequence, are considered for the purposes of manually adjusting the percent identity score. That is, only query residue positions outside the farthest N- and C-terminal residues of the subject sequence.

[0146] For example, a 90 amino acid residue subject sequence is aligned with a 100 residue query sequence to determine percent identity. The deletion occurs at the N-terminus of the subject sequence and therefore, the FASTDB alignment does not show a matching/alignment of the first 10 residues at the N-terminus. The 10 unpaired residues represent 10% of the sequence (number of residues at the N- and C-termini not matched/total number of residues in the query sequence) so 10% is subtracted from the percent identity score calculated by the FASTDB program. If the remaining 90 residues were perfectly matched the final percent identity would be 90%. In another example, a 90 residue subject sequence is compared with a 100 residue query sequence. This time the deletions are internal deletions so there are no residues at the N- or C-termini of the subject sequence which are not matched/aligned with the query. In this case the percent identity calculated by FASTDB is not manually corrected. Once again, only residue positions outside the N- and C-terminal ends of the subject sequence, as displayed in the FASTDB alignment, which are not matched/aligned with the query sequence are manually corrected for. No other manual corrections are to be made for the purposes of the present invention.

[0147] The polynucleotide variants of the invention may contain alterations in the coding regions, non-coding regions, or both. Especially preferred are polynucleotide variants containing alterations which produce silent substitutions, additions, or deletions, but do not alter the properties or activities of the encoded polypeptide. Nucleotide variants produced by silent substitutions due to the degeneracy of the genetic code are preferred. Moreover, polypeptide variants in which less than 50, less than 40, less than 30, less than 20, less than 10, or 5-50, 5-25, 5-10, 1-5, or 1-2 amino acids are substituted, deleted, or added in any combination are also preferred. Polynucleotide variants can be produced for a variety of reasons, e.g., to optimize codon expression for a particular host (change codons in the human MRNA to those preferred by a bacterial host such as E. coli).

[0148] Naturally occurring variants are called “allelic variants,” and refer to one of several alternate forms of a gene occupying a given locus on a chromosome of an organism. (Genes II, Lewin, B., ed., John Wiley & Sons, New York (1985).) These allelic variants can vary at either the polynucleotide and/or polypeptide level and are included in the present invention. Alternatively, non-naturally occurring variants may be produced by mutagenesis techniques or by direct synthesis.

[0149] Using known methods of protein engineering and recombinant DNA technology, variants may be generated to improve or alter the characteristics of the polypeptides of the present invention. For instance, one or more amino acids can be deleted from the N-terminus or C-terminus of the polypeptides of the present invention without substantial loss of biological function. As an example, the authors of Ron et al., J. Biol. Chem. 268: 2984-2988 (1993), reported variant KGF proteins having heparin binding activity even after deleting 3, 8, or 27 amino-terminal amino acid residues. Similarly, Interferon gamma exhibited up to ten times higher activity after deleting 8-10 amino acid residues from the carboxy terminus of this protein. (Dobeli et al., J. Biotechnology 7:199-216 (1988).)

[0150] Moreover, ample evidence demonstrates that variants often retain a biological activity similar to that of the naturally occurring protein. For example, Gayle and coworkers (J. Biol. Chem. 268:22105-22111 (1993)) conducted extensive mutational analysis of human cytokine IL-1a. They used random mutagenesis to generate over 3,500 individual IL-1a mutants that averaged 2.5 amino acid changes per variant over the entire length of the molecule. Multiple mutations were examined at every possible amino acid position. The investigators found that “[m]ost of the molecule could be altered with little effect on either [binding or biological activity].” in fact, only 23 unique amino acid sequences, out of more than 3,500 nucleotide sequences examined, produced a protein that significantly differed in activity from wild-type.

[0151] Furthermore, even if deleting one or more amino acids from the N-terminus or C-terminus of a polypeptide results in modification or loss of one or more biological functions, other biological activities may still be retained. For example, the ability of a deletion variant to induce and/or to bind antibodies which recognize the secreted form will likely be retained when less than the majority of the residues of the secreted form are removed from the N-terminus or C-terminus. Whether a particular polypeptide lacking N- or C-terminal residues of a protein retains such immunogenic activities can readily be determined by routine methods described herein and otherwise known in the art.

[0152] Thus, the invention further includes polypeptide variants which show a functional activity (e.g., biological activity) of the polypeptides of the invention. Such variants include deletions, insertions, inversions, repeats, and substitutions selected according to general rules known in the art so as have little effect on activity.

[0153] The present application is directed to nucleic acid molecules at least 80%, 85%, 90%, 95%, 96%, 97%, 98%, 99% or 100% identical to the nucleic acid sequences disclosed herein, (e.g., encoding a polypeptide having the amino acid sequence of an N and/or C terminal deletion), irrespective of whether they encode a polypeptide having functional activity. This is because even where a particular nucleic acid molecule does not encode a polypeptide having functional activity, one of skill in the art would still know how to use the nucleic acid molecule, for instance, as a hybridization probe or a polymerase chain reaction (PCR) primer. Uses of the nucleic acid molecules of the present invention that do not encode a polypeptide having functional activity include, inter alia, (1) isolating a gene or allelic or splice variants thereof in a cDNA library; (2) in situ hybridization (e.g., “FISH”) to metaphase chromosomal spreads to provide precise chromosomal location of the gene, as described in Verma et al., Human Chromosomes: A Manual of Basic Techniques, Pergamon Press, New York (1988); (3) Northern Blot analysis for detecting mRNA expression in specific tissues (e.g., normal reproductive system tissues or diseased reproductive system tissues); and (4) in situ hybridization (e.g., histochemistry) for detecting mRNA expression in specific tissues (e.g., normal reproductive system tissues or diseased reproductive system tissues).

[0154] Preferred, however, are nucleic acid molecules having sequences at least 80%, 85%, 90%, 95%, 96%, 97%, 98%, 99% or 100% identical to the nucleic acid sequences disclosed herein, which do, in fact, encode a polypeptide having functional activity. By a polypeptide having “functional activity” is meant, a polypeptide capable of displaying one or more known functional activities associated with a full-length (complete) protein of the invention. Such functional activities include, but are not limited to, biological activity, antigenicity [ability to bind (or compete with a polypeptide of the invention for binding) to an anti-polypeptide of the invention antibody], immunogenicity (ability to generate antibody which binds to a specific polypeptide of the invention), ability to form multimers with polypeptides of the invention, and ability to bind to a receptor or ligand for a polypeptide of the invention.

[0155] The functional activity of the polypeptides, and fragments, variants and derivatives of the invention, can be assayed by various methods.

[0156] For example, in one embodiment where one is assaying for the ability to bind or compete with full-length polypeptide of the present invention for binding to an anti-polypeptide of the invention antibody, various immunoassays known in the art can be used, including but not limited to, competitive and non-competitive assay systems using techniques such as radioimmunoassays, ELISA (enzyme linked immunosorbent assay), “sandwich” immunoassays, immunoradiometric assays, gel diffusion precipitation reactions, immunodiffusion assays, in situ immunoassays (using colloidal gold, enzyme or radioisotope labels, for example), western blots, precipitation reactions, agglutination assays (e.g., gel agglutination assays, hemagglutination assays), complement fixation assays, immunofluorescence assays, protein A assays, and immunoelectrophoresis assays, etc. In one embodiment, antibody binding is detected by detecting a label on the primary antibody. In another embodiment, the primary antibody is detected by detecting binding of a secondary antibody or reagent to the primary antibody. In a further embodiment, the secondary antibody is labeled. Many means are known in the art for detecting binding in an immunoassay and are within the scope of the present invention.

[0157] In another embodiment, where a ligand is identified, or the ability of a polypeptide fragment, variant or derivative of the invention to multimerize is being evaluated, binding can be assayed, e.g., by means well-known in the art, such as, for example, reducing and non-reducing gel chromatography, protein affinity chromatography, and affinity blotting. See generally, Phizicky et al., Microbiol. Rev. 59:94-123 (1995). In another embodiment, the ability of physiological correlates of a polypeptide of the present invention to bind to a substrate(s) of the polypeptide of the invention can be routinely assayed using techniques known in the art.

[0158] In addition, assays described herein (see Examples) and otherwise known in the art may routinely be applied to measure the ability of polypeptides of the present invention and fragments, variants and derivatives thereof to elicit polypeptide related biological activity (either in vitro or in vivo). Other methods will be known to the skilled artisan and are within the scope of the invention.

[0159] Of course, due to the degeneracy of the genetic code, one of ordinary skill in the art will immediately recognize that a large number of the nucleic acid molecules having a sequence at least 80%, 85%, 90%, 95%, 96%, 97%, 98%, 99%, or 100% identical to, for example, the nucleic acid sequence of the cDNA contained in Clone ID NO: Z, a nucleic acid sequence referred to in Table 1A (e.g., SEQ ID NO: X), a nucleic acid sequence disclosed in Table 2 (e.g., the nucleic acid sequence delineated in columns 8 and 9) or fragments thereof, will encode polypeptides “having functional activity.” In fact, since degenerate variants of any of these nucleotide sequences all encode the same polypeptide, in many instances, this will be clear to the skilled artisan even without performing the above described comparison assay. It will be further recognized in the art that, for such nucleic acid molecules that are not degenerate variants, a reasonable number will also encode a polypeptide having functional activity. This is because the skilled artisan is fully aware of amino acid substitutions that are either less likely or not likely to significantly effect protein function (e.g., replacing one aliphatic amino acid with a second aliphatic amino acid), as further described below.

[0160] For example, guidance concerning how to make phenotypically silent amino acid substitutions is provided in Bowie et al., “Deciphering the Message in Protein Sequences: Tolerance to Amino Acid Substitutions,” Science 247:1306-1310 (1990), wherein the authors indicate that there are two main strategies for studying the tolerance of an amino acid sequence to change.

[0161] The first strategy exploits the tolerance of amino acid substitutions by natural selection during the process of evolution. By comparing amino acid sequences in different species, conserved amino acids can be identified. These conserved amino acids are likely important for protein function. In contrast, the amino acid positions where substitutions have been tolerated by natural selection indicates that these positions are not critical for protein function. Thus, positions tolerating amino acid substitution could be modified while still maintaining biological activity of the protein.

[0162] The second strategy uses genetic engineering to introduce amino acid changes at specific positions of a cloned gene to identify regions critical for protein function. For example, site directed mutagenesis or alanine-scanning mutagenesis (introduction of single alanine mutations at every residue in the molecule) can be used. See Cunningham et al., Science 244:1081-1085 (1989). The resulting mutant molecules can then be tested for biological activity.

[0163] As the authors state, these two strategies have revealed that proteins are surprisingly tolerant of amino acid substitutions. The authors further indicate which amino acid changes are likely to be permissive at certain amino acid positions in the protein. For example, most buried (within the tertiary structure of the protein) amino acid residues require nonpolar side chains, whereas few features of surface side chains are generally conserved. Moreover, tolerated conservative amino acid substitutions involve replacement of the aliphatic or hydrophobic amino acids Ala, Val, Leu and Ile; replacement of the hydroxyl residues Ser and Thr; replacement of the acidic residues Asp and Glu; replacement of the amide residues Asn and Gln, replacement of the basic residues Lys, Arg, and His; replacement of the aromatic residues Phe, Tyr, and Trp, and replacement of the small-sized amino acids Ala, Ser, Thr, Met, and Gly. Besides conservative amino acid substitutions, variants of the present invention include (i) substitutions with one or more of the non-conserved amino acid residues, where the substituted amino acid residues may or may not be one encoded by the genetic code, or (ii) substitutions with one or more of the amino acid residues having a substituent group, or (iii) fusion of the mature polypeptide with another compound, such as a compound to increase the stability and/or solubility of the polypeptide (for example, polyethylene glycol), or (iv) fusion of the polypeptide with additional amino acids, such as, for example, an IgG Fe fusion region peptide, serum albumin (preferably human serum albumin) or a fragment or variant thereof, or leader or secretory sequence, or a sequence facilitating purification. Such variant polypeptides are deemed to be within the scope of those skilled in the art from the teachings herein.

[0164] For example, polypeptide variants containing amino acid substitutions of charged amino acids with other charged or neutral amino acids may produce proteins with improved characteristics, such as less aggregation. Aggregation of pharmaceutical formulations both reduces activity and increases clearance due to the aggregate's immunogenic activity. See Pinckard et al., Clin. Exp. Immunol. 2:331-340 (1967); Robbins et al., Diabetes 36: 838-845 (1987); Cleland et al., Crit. Rev. Therapeutic Drug Carrier Systems 10:307-377 (1993).

[0165] A further embodiment of the invention relates to polypeptides which comprise the amino acid sequence of a polypeptide having an amino acid sequence which contains at least one amino acid substitution, but not more than 50 amino acid substitutions, even more preferably, not more than 40 amino acid substitutions, still more preferably, not more than 30 amino acid substitutions, and still even more preferably, not more than 20 amino acid substitutions from a polypeptide sequence disclosed herein. Of course it is highly preferable for a polypeptide to have an amino acid sequence which comprises the amino acid sequence of a polypeptide of SEQ ID NO: Y, an amino acid sequence encoded by SEQ ID NO: X, an amino acid sequence encoded by the portion of SEQ ID NO: X as defined in columns 8 and 9 of Table 2, an amino acid sequence encoded by the complement of SEQ ID NO: X, and/or the amino acid sequence encoded by cDNA contained in Clone ID NO: Z which contains, in order of ever-increasing preference, at least one, but not more than 10, 9, 8, 7, 6, 5, 4, 3, 2 or 1 amino acid substitutions.

[0166] In specific embodiments, the polypeptides of the invention comprise, or alternatively, consist of, fragments or variants of a reference amino acid sequence selected from: (a) the amino acid sequence of SEQ ID NO: Y or fragments thereof (e.g., the mature form and/or other fragments described herein); (b) the amino acid sequence encoded by SEQ ID NO: X or fragments thereof; (c) the amino acid sequence encoded by the complement of SEQ ID NO: X or fragments thereof; (d) the amino acid sequence encoded by the portion of SEQ ID NO: X as defined in columns 8 and 9 of Table 2 or fragments thereof; and (e) the amino acid sequence encoded by cDNA contained in Clone ID NO: Z or fragments thereof; wherein the fragments or variants have 1-5, 5-10, 5-25, 5-50, 10-50 or 50-150, amino acid residue additions, substitutions, and/or deletions when compared to the reference amino acid sequence. In preferred embodiments, the amino acid substitutions are conservative. Polynucleotides encoding these polypeptides are also encompassed by the invention.

[0167] Polynucleotide and Polypeptide Fragments

[0168] The present invention is also directed to polynucleotide fragments of the polynucleotides (nucleic acids) of the invention. In the present invention, a “polynucleotide fragment” refers to a polynucleotide having a nucleic acid sequence which, for example: is a portion of the cDNA contained in Clone ID NO: Z or the complementary strand thereto; is a portion of the polynucleotide sequence encoding the polypeptide encoded by the cDNA contained in Clone ID NO: Z or the complementary strand thereto; is a portion of a polynucleotide sequence encoding the amino acid sequence encoded by the region of SEQ ID NO: X as defined in columns 8 and 9 of Table 2 or the complementary strand thereto; is a portion of the polynucleotide sequence of SEQ ID NO: X as defined in columns 8 and 9 of Table 2 or the complementary strand thereto; is a portion of the polynucleotide sequence in SEQ ID NO: X or the complementary strand thereto; is a polynucleotide sequence encoding a portion of the polypeptide of SEQ ID NO: Y; is a polynucleotide sequence encoding a portion of a polypeptide encoded by SEQ ID NO: X; is a polynucleotide sequence encoding a portion of a polypeptide encoded by the complement of the polynucleotide sequence in SEQ ID NO: X; is a portion of a polynucleotide sequence encoding the amino acid sequence encoded by the region of SEQ ID NO: B as defined in column 6 of Table 1B or the complementary strand thereto; or is a portion of the polynucleotide sequence of SEQ ID NO: B as defined in column 6 of Table 1B or the complementary strand thereto.

[0169] The polynucleotide fragments of the invention are preferably at least about 15 nt, and more preferably at least about 20 nt, still more preferably at least about 30 nt, and even more preferably, at least about 40 nt, at least about 50 nt, at least about 75 nt, or at least about 150 nt in length. A fragment “at least 20 nt in length,” for example, is intended to include 20 or more contiguous bases from the cDNA sequence contained in Clone ID NO: Z, or the nucleotide sequence shown in SEQ ID NO: X or the complementary stand thereto. In this context “about” includes the particularly recited value or a value larger or smaller by several (5, 4, 3, 2, or 1) nucleotides, at either terminus or at both termini These nucleotide fragments have uses that include, but are not limited to, as diagnostic probes and primers as discussed herein. Of course, larger fragments (e.g., at least 160, 170, 180, 190, 200, 250, 500, 600, 1000, or 2000 nucleotides in length) are also encompassed by the invention.

[0170] Moreover, representative examples of polynucleotide fragments of the invention, comprise, or alternatively consist of, a sequence from about nucleotide number 1-50, 51-100, 101-150, 151-200, 201-250, 251-300, 301-350, 351-400, 401-450, 451-500, 501-550, 551-600, 651-700, 701-750, 751-800, 800-850, 851-900, 901-950, 951-1000, 1001-1050, 1051-1100, 1101-1150, 1151-1200, 1201-1250, 1251-1300, 1301-1350, 1351-1400, 1401-1450, 1451-1500, 1501-1550, 1551-1600, 1601-1650, 1651-1700, 1701-1750, 1751-1800, 1801-1850, 1851-1900, 1901-1950, 1951-2000, 2001-2050, 2051-2100, 2101-2150, 2151-2200, 2201-2250, 2251-2300, 2301-2350, 2351-2400, 2401-2450, 2451-2500, 2501-2550, 2551-2600, 2601-2650, 2651-2700, 2701-2750, 2751-2800, 2801-2850, 2851-2900, 2901-2950, 2951-3000, 3001-3050, 3051-3100, 3101-3150, 3151-3200, 3201-3250, 3251-3300, 3301-3350, 3351-3400, 3401-3450, 3451-3500, 3501-3550, 3551-3600, 3601-3650, 3651-3700, 3701-3750, 3751-3800, 3801-3850, 3851-3900, 3901-3950, 3951-4000, 4001-4050, 4051-4100, 4101-4150, 4151-4200, 4201-4250, 4251-4300, 4301-4350, 4351-4400, 4401-4450, 4451-4500, 4501-4550, 4551-4600, 4601-4650, 4651-4700, 4701-4750, 4751-4800, 4801-4850, 4851-4900, 4901-4950, 4951-5000, 5001-5050, 5051-5100, 5101-5150, 5151-5200, 5201-5250, 5251-5300, 5301-5350, 5351-5400, 5401-5450, 5451-5500, 5501-5550, 5551-5600, 5601-5650, 5651-5700, 5701-5750, 5751-5800, 5801-5850, 5851-5900, 5901-5950, 5951-6000, 6001-6050, 6051-6100, 6101-6150, 6151-6200, 6201-6250, 6251-6300, 6301-6350, 6351-6400, 6401-6450, 6451-6500, 6501-6550, 6551-6600, 6601-6650, 6651-6700, 6701-6750, 6751-6800, 6801-6850, 6851-6900, 6901-6950, 6951-7000, 7001-7050, 7051-7100, 7101-7150, 7151-7200, 7201-7250, 7251-7300 or 7301 to the end of SEQ ID NO: X, or the complementary strand thereto. In this context “about” includes the particularly recited range or a range larger or smaller by several (5, 4, 3, 2, or 1) nucleotides, at either terminus or at both termini. Preferably, these fragments encode a polypeptide which has a functional activity (e.g., biological activity). More preferably, these polynucleotides can be used as probes or primers as discussed herein. Polynucleotides which hybridize to one or more of these polynucleotides under stringent hybridization conditions or alternatively, under lower stringency conditions are also encompassed by the invention, as are polypeptides encoded by these polynucleotides.

[0171] Further representative examples of polynucleotide fragments of the invention, comprise, or alternatively consist of, a sequence from about nucleotide number 1-50, 51-100, 101-150, 151-200, 201-250, 251-300, 301-350, 351-400, 401-450, 451-500, 501-550, 551-600, 651-700, 701-750, 751-800, 800-850, 851-900, 901-950, 951-1000, 1001-1050, 1051-1100, 1101-1150, 1151-1200, 1201-1250, 1251-1300, 1301-1350, 1351-1400, 1401-1450, 1451-1500, 1501-1550, 1551-1600, 1601-1650, 1651-1700, 1701-1750, 1751-1800, 1801-1850, 1851-1900, 1901-1950, 1951-2000, 2001-2050, 2051-2100, 2101-2150, 2151-2200, 2201-2250, 2251-2300, 2301-2350, 2351-2400, 2401-2450, 2451-2500, 2501-2550, 2551-2600, 2601-2650, 2651-2700, 2701-2750, 2751-2800, 2801-2850, 2851-2900, 2901-2950, 2951-3000, 3001-3050, 3051-3100, 3101-3150, 3151-3200, 3201-3250, 3251-3300, 3301-3350, 3351-3400, 3401-3450, 3451-3500, 3501-3550, 3551-3600, 3601-3650, 3651-3700, 3701-3750, 3751-3800, 3801-3850, 3851-3900, 3901-3950, 3951-4000, 4001-4050, 4051-4100, 4101-4150, 4151-4200, 4201-4250, 4251-4300, 4301-4350, 4351-4400, 4401-4450, 4451-4500, 4501-4550, 4551-4600, 4601-4650, 4651-4700, 4701-4750, 4751-4800, 4801-4850, 4851-4900, 4901-4950, 4951-5000, 5001-5050, 5051-5100, 5101-5150, 5151-5200, 5201-5250, 5251-5300, 5301-5350, 5351-5400, 5401-5450, 5451-5500, 5501-5550, 5551-5600, 5601-5650, 5651-5700, 5701-5750, 5751-5800, 5801-5850, 5851-5900, 5901-5950, 5951-6000, 6001-6050, 6051-6100, 6101-6150, 6151-6200, 6201-6250, 6251-6300, 6301-6350, 6351-6400, 6401-6450, 6451-6500, 6501-6550, 6551-6600, 6601-6650, 6651-6700, 6701-6750, 6751-6800, 6801-6850, 6851-6900, 6901-6950, 6951-7000, 7001-7050, 7051-7100, 7101-7150, 7151-7200, 7201-7250, 7251-7300 or 7301 to the end of the cDNA sequence contained in Clone ID NO: Z, or the complementary strand thereto. In this context “about” includes the particularly recited range or a range larger or smaller by several (5, 4, 3, 2, or 1) nucleotides, at either terminus or at both termini. Preferably, these fragments encode a polypeptide which has a functional activity (e.g., biological activity). More preferably, these polynucleotides can be used as probes or primers as discussed herein. Polynucleotides which hybridize to one or more of these polynucleotides under stringent hybridization conditions or alternatively, under lower stringency conditions are also encompassed by the invention, as are polypeptides encoded by these polynucleotides.

[0172] Moreover, representative examples of polynucleotide fragments of the invention comprise, or alternatively consist of, a nucleic acid sequence comprising one, two, three, four, five, six, seven, eight, nine, ten, or more of the above described polynucleotide fragments of the invention in combination with a polynucleotide sequence delineated in Table 1B column 6. Additional, representative examples of polynucleotide fragments of the invention comprise, or alternatively consist of, a nucleic acid sequence comprising one, two, three, four, five, six, seven, eight, nine, ten, or more of the above described polynucleotide fragments of the invention in combination with a polynucleotide sequence that is the complementary strand of a sequence delineated in column 6 of Table 1B. In further embodiments, the above-described polynucleotide fragments of the invention comprise, or alternatively consist of, sequences delineated in Table 1B, column 6, and have a nucleic acid sequence which is different from that of the BAC fragment having the sequence disclosed in SEQ ID NO: B (see Table 1B, column 5). In additional embodiments, the above-described polynucleotide fragments of the invention comprise, or alternatively consist of, sequences delineated in Table 1B, column 6, and have a nucleic acid sequence which is different from that published for the BAC clone identified as BAC ID NO: A (see Table 1B, column 4). In additional embodiments, the above-described polynucleotides of the invention comprise, or alternatively consist of, sequences delineated Table 1B, column 6, and have a nucleic acid sequence which is different from that contained in the BAC clone identified as BAC ID NO: A (see Table 1B, column 4). Polypeptides encoded by these polynucleotides, other polynucleotides that encode these polypeptides, and antibodies that bind these polypeptides are also encompassed by the invention. Additionally, fragments and variants of the above-described polynucleotides and polypeptides are also encompassed by the invention.

[0173] In additional specific embodiments, polynucleotides of the invention comprise, or alternatively consist of, one, two, three, four, five, six, seven, eight, nine, ten, or more fragments of the sequences delineated in column 6 of Table 1B, and the polynucleotide sequence of SEQ ID NO: X (e.g., as defined in Table 1B, column 2) or fragments or variants thereof Polypeptides encoded by these polynucleotides, other polynucleotides that encode these polypeptides, and antibodies that bind these polypeptides are also encompassed by the invention.

[0174] In additional specific embodiments, polynucleotides of the invention comprise, or alternatively consist of, one, two, three, four, five, six, seven, eight, nine, ten, or more fragments of the sequences delineated in column 6 of Table 1B which correspond to the same Clone ID NO: Z (see Table 1B, column 1), and the polynucleotide sequence of SEQ ID NO: X (e.g., as defined in Table 1A or 1B) or fragments or variants thereof. Polypeptides encoded by these polynucleotides, other polynucleotides that encode these polypeptides, and antibodies that bind these polypeptides are also encompassed by the invention.

[0175] In further specific embodiments, polynucleotides of the invention comprise, or alternatively consist of, one, two, three, four, five, six, seven, eight, nine, ten, or more fragments of the sequences delineated in the same row of column 6 of Table 1B, and the polynucleotide sequence of SEQ ID NO: X (e.g., as defined in Table 1A or 1B) or fragments or variants thereof. Polypeptides encoded by these polynucleotides, other polynucleotides that encode these polypeptides, and antibodies that bind these polypeptides are also encompassed by the invention.

[0176] In additional specific embodiments, polynucleotides of the invention comprise, or alternatively consist of a polynucleotide sequence in which the 3′ 10 polynucleotides of one of the sequences delineated in column 6 of Table 1B and the 5′ 10 polynucleotides of the sequence of SEQ ID NO: X are directly contiguous. Nucleic acids which hybridize to the complement of these 20 contiguous polynucleotides under stringent hybridization conditions or alternatively, under lower stringency conditions, are also encompassed by the invention. Polypeptides encoded by these polynucleotides and/or nucleic acids, other polynucleotides and/or nucleic acids that encode these polypeptides, and antibodies that bind these polypeptides are also encompassed by the invention. Additionally, fragments and variants of the above-described polynucleotides, nucleic acids, and polypeptides are also encompassed by the invention.

[0177] In additional specific embodiments, polynucleotides of the invention comprise, or alternatively consist of a polynucleotide sequence in which the 3′ 10 polynucleotides of one of the sequences delineated in column 6 of Table 1B and the 5′ 10 polynucleotides of a fragment or variant of the sequence of SEQ ID NO: X (e.g., as described herein) are directly contiguous Nucleic acids which hybridize to the complement of these 20 contiguous polynucleotides under stringent hybridization conditions or alternatively, under lower stringency conditions, are also encompassed by the invention. Polypeptides encoded by these polynucleotides and/or nucleic acids, other polynucleotides and/or nucleic acids encoding these polypeptides, and antibodies that bind these polypeptides are also encompassed by the invention. Additionally, fragments and variants of the above-described polynucleotides, nucleic acids, and polypeptides are also encompassed by the invention.

[0178] In further specific embodiments, polynucleotides of the invention comprise, or alternatively consist of a polynucleotide sequence in which the 3′ 10 polynucleotides of a fragment or variant of the sequence of SEQ ID NO: X and the 5′ 10 polynucleotides of the sequence of one of the sequences delineated in column 6 of Table 1B are directly contiguous. Nucleic acids which hybridize to the complement of these 20 contiguous polynucleotides under stringent hybridization conditions or alternatively, under lower stringency conditions, are also encompassed by the invention. Polypeptides encoded by these polynucleotides and/or nucleic acids, other polynucleotides and/or nucleic acids encoding these polypeptides, and antibodies that bind these polypeptides are also encompassed by the invention. Additionally, fragments and variants of the above-described polynucleotides, nucleic acids, and polypeptides are also encompassed by the invention.

[0179] In specific embodiments, polynucleotides of the invention comprise, or alternatively consist of a polynucleotide sequence in which the 3′ 10 polynucleotides of one of the sequences delineated in column 6 of Table 1B and the 5′ 10 polynucleotides of another sequence in column 6 are directly contiguous. In preferred embodiments, the 3′ 10 polynucleotides of one of the sequences delineated in column 6 of Table 1B is directly contiguous with the 5′ 10 polynucleotides of the next sequential exon delineated in Table 1B, column 6. Nucleic acids which hybridize to the complement of these 20 contiguous polynucleotides under stringent hybridization conditions or alternatively, under lower stringency conditions, are also encompassed by the invention. Polypeptides encoded by these polynucleotides and/or nucleic acids, other polynucleotides and/or nucleic acids encoding these polypeptides, and antibodies that bind these polypeptides are also encompassed by the invention. Additionally, fragments and variants of the above-described polynucleotides, nucleic acids, and polypeptides are also encompassed by the invention.

[0180] In the present invention, a “polypeptide fragment” refers to an amino acid sequence which is a portion of that contained in SEQ ID NO: Y, a portion of an amino acid sequence encoded by the portion of SEQ ID NO: X as defined in columns 8 and 9 of Table 2, a portion of an amino acid sequence encoded by the polynucleotide sequence of SEQ ID NO: X, a portion of an amino acid sequence encoded by the complement of the polynucleotide sequence in SEQ ID NO: X, and/or a portion of an amino acid sequence encoded by the cDNA contained in Clone ID NO: Z. Protein (polypeptide) fragments may be “free-standing,” or comprised within a larger polypeptide of which the fragment forms a part or region, most preferably as a single continuous region. Representative examples of polypeptide fragments of the invention, include, for example, fragments comprising, or alternatively consisting of, from about amino acid number 1-20, 21-40, 41-60, 61-80, 81-100, 102-120, 121-140, 141-160, 161-180, 181-200, 201-220, 221-240, 241-260, 261-280, 281-300, 301-320, 321-340, 341-360, 361-380, 381-400, 401-420, 421-440, 441-460, 461-480, 481-500, 501-520, 521-540, 541-560, 561-580, 581-600, 601-620, 621-640, 641-660, 661-680, 681-700, 701-720, 721-740, 741-760, 761-780, 781-800, 801-820, 821-840, 841-860, 861-880, 881-900, 901-920, 921-940, 941-960, 961-980, 981-1000, 1001-1020, 1021-1040, 1041-1060, 1061-1080, 1081-1100, 1101-1120, 1121-1140, 1141-1160, 1161-1180, 1181-1200, 1201-1220, 1221-1240, 1241-1260, 1261-1280, 1281-1300, 1301-1320, 1321-1340, 1341-1360, 1361-1380, 1381-1400, 1401-1420, 1421-1440, or 1441 to the end of the coding region. In a preferred embodiment, polypeptide fragments of the invention include, for example, fragments comprising, or alternatively consisting of, from about amino acid number 1-20, 21-40, 41-60, 61-80, 81-100, 102-120, 121-140, 141-160, 161-180, 181-200, 201-220, 221-240, 241-260, 261-280, 281-300, 301-320, 321-340, 341-360, 361-380, 381-400, 401-420, 421-440, 441-460, 461-480, 481-500, 501-520, 521-540, 541-560, 561-580, 581-600, 601-620, 621-640, 641-660, 661-680, 681-700, 701-720, 721-740, 741-760, 761-780, 781-800, 801-820, 821-840, 841-860, 861-880, 881-900, 901-920, 921-940, 941-960, 961-980, 981-1000, 1001-1020, 1021-1040, 1041-1060, 1061-1080, 1081-1100, 1101-1120, 1121-1140, 1141-1160, 1161-1180, 1181-1200, 1201-1220, 1221-1240, 1241-1260, 1261-1280, 1281-1300, 1301-1320, 1321-1340, 1341-1360, 1361-1380, 1381-1400, 1401-1420, 1421-1440, or 1441 to the end of the coding region of SEQ ID NO: Y. Moreover, polypeptide fragments of the invention may be at least about 10, 15, 20, 25, 30, 35, 40, 45, 50, 55, 60, 65, 70, 75, 80, 85, 90, 100, 110, 120, 130, 140, or 150 amino acids in length. In this context “about” includes the particularly recited ranges or values, or ranges or values larger or smaller by several (5, 4, 3, 2, or 1) amino acids, at either extreme or at both extremes. Polynucleotides encoding these polypeptide fragments are also encompassed by the invention.

[0181] Even if deletion of one or more amino acids from the N-terminus of a protein results in modification of loss of one or more biological functions of the protein, other functional activities (e.g., biological activities, ability to multimerize, ability to bind a ligand) may still be retained. For example, the ability of shortened muteins to induce and/or bind to antibodies which recognize the complete or mature forms of the polypeptides generally will be retained when less than the majority of the residues of the complete or mature polypeptide are removed from the N-terminus. Whether a particular polypeptide lacking N-terminal residues of a complete polypeptide retains such immunologic activities can readily be determined by routine methods described herein and otherwise known in the art. It is not unlikely that a mutein with a large number of deleted N-terminal amino acid residues may retain some biological or immunogenic activities. In fact, peptides composed of as few as six amino acid residues may often evoke an immune response.

[0182] Accordingly, polypeptide fragments include the secreted protein as well as the mature form. Further preferred polypeptide fragments include the secreted protein or the mature form having a continuous series of deleted residues from the amino or the carboxy terminus, or both. For example, any number of amino acids, ranging from 1-60, can be deleted from the amino terminus of either the secreted polypeptide or the mature form. Similarly, any number of amino acids, ranging from 1-30, can be deleted from the carboxy terminus of the secreted protein or mature form. Furthermore, any combination of the above amino and carboxy terminus deletions is preferred. Similarly, polynucleotides encoding these polypeptide fragments are also preferred.

[0183] The present invention further provides polypeptides having one or more residues deleted from the amino terminus of the amino acid sequence of a polypeptide disclosed herein (e.g., a polypeptide of SEQ ID NO: Y, a polypeptide encoded by the polynucleotide sequence contained in SEQ ID NO: X or the complement thereof, a polypeptide encoded by the portion of SEQ ID NO: X as defined in columns 8 and 9 of Table 2, a polypeptide encoded by the portion of SEQ ID NO: B as defined in column 6 of Table 1B, and/or a polypeptide encoded by the cDNA contained in Clone ID NO: Z). In particular, N-terminal deletions may be described by the general formula m−q, where q is a whole integer representing the total number of amino acid residues in a polypeptide of the invention (e.g., the polypeptide disclosed in SEQ ID NO: Y, or the polypeptide encoded by the portion of SEQ ID NO: X as defined in columns 8 and 9 of Table 2), and m is defined as any integer ranging from 2 to q−6. Polynucleotides encoding these polypeptides are also encompassed by the invention.

[0184] The present invention further provides polypeptides having one or more residues from the carboxy terminus of the amino acid sequence of a polypeptide disclosed herein (e.g., a polypeptide of SEQ ID NO: Y, a polypeptide encoded by the polynucleotide sequence contained in SEQ ID NO: X, a polypeptide encoded by the portion of SEQ ID NO: X as defined in columns 8 and 9 of Table 2, and/or a polypeptide encoded by the cDNA contained in Clone ID NO: Z). In particular, C-terminal deletions may be described by the general formula 1−n, where n is any whole integer ranging from 6 to q−1, and where n corresponds to the position of amino acid residue in a polypeptide of the invention. Polynucleotides encoding these polypeptides are also encompassed by the invention.

[0185] In addition, any of the above described N- or C-terminal deletions can be combined to produce a N- and C-terminal deleted polypeptide. The invention also provides polypeptides having one or more amino acids deleted from both the amino and the carboxyl termini, which may be described generally as having residues m−n of a polypeptide encoded by SEQ ID NO: X (e.g., including, but not limited to, the preferred polypeptide disclosed as SEQ ID NO: Y and the polypeptide encoded by the portion of SEQ ID NO: X as defined in columns 8 and 9 of Table 2), the cDNA contained in Clone ID NO: Z, and/or the complement thereof, where n and m are integers as described above. Polynucleotides encoding these polypeptides are also encompassed by the invention.

[0186] Also as mentioned above, even if deletion of one or more amino acids from the C-terminus of a protein results in modification of loss of one or more biological functions of the protein, other functional activities (e.g., biological activities, ability to multimerize, ability to bind a ligand) may still be retained. For example the ability of the shortened mutein to induce and/or bind to antibodies which recognize the complete or mature forms of the polypeptide generally will be retained when less than the majority of the residues of the complete or mature polypeptide are removed from the C-terminus. Whether a particular polypeptide lacking C-terminal residues of a complete polypeptide retains such immunologic activities can readily be determined by routine methods described herein and otherwise known in the art. It is not unlikely that a mutein with a large number of deleted C-terminal amino acid residues may retain some biological or immunogenic activities. In fact, peptides composed of as few as six amino acid residues may often evoke an immune response.

[0187] The present application is also directed to proteins containing polypeptides at least 80%, 85%, 90%, 95%, 96%, 97%, 98% or 99% identical to a polypeptide sequence set forth herein. In preferred embodiments, the application is directed to proteins containing polypeptides at least 80%, 85%, 90%, 95%, 96%, 97%, 98% or 99% identical to polypeptides having the amino acid sequence of the specific N- and C-terminal deletions. Polynucleotides encoding these polypeptides are also encompassed by the invention.

[0188] Any polypeptide sequence encoded by, for example, the polynucleotide sequences set forth as SEQ ID NO: X or the complement thereof, (presented, for example, in Tables 1A and 2), the cDNA contained in Clone ID NO: Z, or the polynucleotide sequence as defined in column 6 of Table 1B, may be analyzed to determine certain preferred regions of the polypeptide. For example, the amino acid sequence of a polypeptide encoded by a polynucleotide sequence of SEQ ID NO: X (e.g., the polypeptide of SEQ ID NO: Y and the polypeptide encoded by the portion of SEQ ID NO: X as defined in columns 8 and 9 of Table 2) or the cDNA contained in Clone ID NO: Z may be analyzed using the default parameters of the DNASTAR computer algorithm (DNASTAR, Inc., 1228 S. Park St., Madison, Wis. 53715 USA; http://www.dnastar.com/).

[0189] Polypeptide regions that may be routinely obtained using the DNASTAR computer algorithm include, but are not limited to, Garnier-Robson alpha-regions, beta-regions, turn-regions, and coil-regions; Chou-Fasman alpha-regions, beta-regions, and turn-regions; Kyte-Doolittle hydrophilic regions and hydrophobic regions; Eisenberg alpha- and beta-amphipathic regions; Karplus-Schulz flexible regions; Emini surface-forming regions; and Jameson-Wolf regions of high antigenic index. Among highly preferred polynucleotides of the invention in this regard are those that encode polypeptides comprising regions that combine several structural features, such as several (e.g., 1, 2, 3 or 4) of the features set out above.

[0190] Additionally, Kyte-Doolittle hydrophilic regions and hydrophobic regions, Emini surface-forming regions, and Jameson-Wolf regions of high antigenic index (i.e., containing four or more contiguous amino acids having an antigenic index of greater than or equal to 1.5, as identified using the default parameters of the Jameson-Wolf program) can routinely be used to determine polypeptide regions that exhibit a high degree of potential for antigenicity. Regions of high antigenicity are determined from data by DNASTAR analysis by choosing values which represent regions of the polypeptide which are likely to be exposed on the surface of the polypeptide in an environment in which antigen recognition may occur in the process of initiation of an immune response.

[0191] Preferred polypeptide fragments of the invention are fragments comprising, or alternatively, consisting of, an amino acid sequence that displays a functional activity (e.g. biological activity) of the polypeptide sequence of which the amino acid sequence is a fragment. By a polypeptide displaying a “functional activity” is meant a polypeptide capable of one or more known functional activities associated with a full-length protein, such as, for example, biological activity, antigenicity, immunogenicity, and/or multimerization, as described herein.

[0192] Other preferred polypeptide fragments are biologically active fragments. Biologically active fragments are those exhibiting activity similar, but not necessarily identical, to an activity of the polypeptide of the present invention. The biological activity of the fragments may include an improved desired activity, or a decreased undesirable activity.

[0193] In preferred embodiments, polypeptides of the invention comprise, or alternatively consist of, one, two, three, four, five or more of the antigenic fragments of the polypeptide of SEQ ID NO: Y, or portions thereof. Polynucleotides encoding these polypeptides are also encompassed by the invention.

[0194] The present invention encompasses polypeptides comprising, or alternatively consisting of, an epitope of: the polypeptide sequence shown in SEQ ID NO: Y; a polypeptide sequence encoded by SEQ ID NO: X or the complementary strand thereto; the polypeptide sequence encoded by the portion of SEQ ID NO: X as defined in columns 8 and 9 of Table 2; the polypeptide sequence encoded by the portion of SEQ ID NO: B as defined in column 6 of Table 1B or the complement thereto; the polypeptide sequence encoded by the cDNA contained in Clone ID NO: Z; or the polypeptide sequence encoded by a polynucleotide that hybridizes to the sequence of SEQ ID NO: X, the complement of the sequence of SEQ ID NO: X, the complement of a portion of SEQ ID NO: X as defined in columns 8 and 9 of Table 2, or the cDNA sequence contained in Clone ID NO: Z under stringent hybridization conditions or alternatively, under lower stringency hybridization as defined supra. The present invention further encompasses polynucleotide sequences encoding an epitope of a polypeptide sequence of the invention (such as, for example, the sequence disclosed in SEQ ID NO: X, or a fragment thereof), polynucleotide sequences of the complementary strand of a polynucleotide sequence encoding an epitope of the invention, and polynucleotide sequences which hybridize to the complementary strand under stringent hybridization conditions or alternatively, under lower stringency hybridization conditions defined supra.

[0195] The term “epitopes,” as used herein, refers to portions of a polypeptide having antigenic or immunogenic activity in an animal, preferably a mammal, and most preferably in a human. In a preferred embodiment, the present invention encompasses a polypeptide comprising an epitope, as well as the polynucleotide encoding this polypeptide. An “immunogenic epitope,” as used herein, is defined as a portion of a protein that elicits an antibody response in an animal, as determined by any method known in the art, for example, by the methods for generating antibodies described infra. (See, for example, Geysen et al., Proc. Natl. Acad. Sci. USA 81:3998-4002 (1983)). The term “antigenic epitope,” as used herein, is defined as a portion of a protein to which an antibody can immunospecifically bind its antigen as determined by any method well known in the art, for example, by the immunoassays described herein. Immunospecific binding excludes non-specific binding but does not necessarily exclude cross-reactivity with other antigens. Antigenic epitopes need not necessarily be immunogenic.

[0196] Fragments which function as epitopes may be produced by any conventional means. (See, e.g., Houghten, R. A., Proc. Natl. Acad. Sci. USA 82:5131-5135 (1985) further described in U.S. Patent No. 4,631,211.) 101781 In the present invention, antigenic epitopes preferably contain a sequence of at least 4, at least 5, at least 6, at least 7, more preferably at least 8, at least 9, at least 10, at least 11, at least 12, at least 13, at least 14, at least 15, at least 20, at least 25, at least 30, at least 40, at least 50, and, most preferably, between about 15 to about 30 amino acids. Preferred polypeptides comprising immunogenic or antigenic epitopes are at least 10, 15, 20, 25, 30, 35, 40, 45, 50, 55, 60, 65, 70, 75, 80, 85, 90, 95, or 100 amino acid residues in length. Additional non-exclusive preferred antigenic epitopes include the antigenic epitopes disclosed herein, as well as portions thereof. Antigenic epitopes are useful, for example, to raise antibodies, including monoclonal antibodies, that specifically bind the epitope. Preferred antigenic epitopes include the antigenic epitopes disclosed herein, as well as any combination of two, three, four, five or more of these antigenic epitopes. Antigenic epitopes can be used as the target molecules in immunoassays. (See, for instance, Wilson et al., Cell 37:767-778 (1984); Sutcliffe et al., Science 219:660-666 (1983)).

[0197] Non-limiting examples of epitopes of polypeptides that can be used to generate antibodies of the invention include a polypeptide comprising, or alternatively consisting of, at least one, two, three, four, five, six or more of the portion(s) of SEQ ID NO: Y specified in column 6 of Table 1A. These polypeptide fragments have been determined to bear antigenic epitopes of the proteins of the invention by the analysis of the Jameson-Wolf antigenic index which is included in the DNAStar suite of computer programs. By “comprise” it is intended that a polypeptide contains at least one, two, three, four, five, six or more of the portion(s) of SEQ ID NO: Y shown in column 6 of Table 1A, but it may contain additional flanking residues on either the amino or carboxyl termini of the recited portion. Such additional flanking sequences are preferably sequences naturally found adjacent to the portion; i.e., contiguous sequence shown in SEQ ID NO: Y. The flanking sequence may, however, be sequences from a heterologous polypeptide, such as from another protein described herein or from a heterologous polypeptide not described herein. In particular embodiments, epitope portions of a polypeptide of the invention comprise one, two, three, or more of the portions of SEQ ID NO: Y shown in column 6 of Table 1A. Polynucleotides encoding these polypeptides are also encompassed by the invention.

[0198] Similarly, immunogenic epitopes can be used, for example, to induce antibodies according to methods well known in the art. See, for instance, Sutcliffe et al., supra; Wilson et al., supra; Chow et al., Proc. Natl. Acad. Sci. USA 82:910-914; and Bittle et al., J. Gen. Virol. 66:2347-2354 (1985). Preferred immunogenic epitopes include the immunogenic epitopes disclosed herein, as well as any combination of two, three, four, five or more of these immunogenic epitopes. The polypeptides comprising one or more immunogenic epitopes may be presented for eliciting an antibody response together with a carrier protein, such as an albumin, to an animal system (such as rabbit or mouse), or, if the polypeptide is of sufficient length (at least about 25 amino acids), the polypeptide may be presented without a carrier. However, immunogenic epitopes comprising as few as 8 to 10 amino acids have been shown to be sufficient to raise antibodies capable of binding to, at the very least, linear epitopes in a denatured polypeptide (e.g., in Western blotting).

[0199] Epitope-bearing polypeptides of the present invention may be used to induce antibodies according to methods well known in the art including, but not limited to, in vivo immunization, in vitro immunization, and phage display methods. See, e.g., Sutcliffe et al., supra; Wilson et al., supra, and Bittle et al., J. Gen. Virol., 66:2347-2354 (1985). If in vivo immunization is used, animals may be immunized with free peptide; however, anti-peptide antibody titer may be boosted by coupling the peptide to a macromolecular carrier, such as keyhole limpet hemacyanin (KLH) or tetanus toxoid. For instance, peptides containing cysteine residues may be coupled to a carrier using a linker such as maleimidobenzoyl- N-hydroxysuccinimide ester (MBS), while other peptides may be coupled to carriers using a more general linking agent such as glutaraldehyde. Animals such as rabbits, rats and mice are immunized with either free or carrier- coupled peptides, for instance, by intraperitoneal and/or intradermal injection of emulsions containing about 100 μg of peptide or carrier protein and Freund's adjuvant or any other adjuvant known for stimulating an immune response. Several booster injections may be needed, for instance, at intervals of about two weeks, to provide a useful titer of anti-peptide antibody which can be detected, for example, by ELISA assay using free peptide adsorbed to a solid surface. The titer of anti-peptide antibodies in serum from an immunized animal may be increased by selection of anti-peptide antibodies, for instance, by adsorption to the peptide on a solid support and elution of the selected antibodies according to methods well known in the art.

[0200] As one of skill in the art will appreciate, and as discussed above, the polypeptides of the present invention (e.g., those comprising an immunogenic or antigenic epitope) can be fused to heterologous polypeptide sequences. For example, polypeptides of the present invention (including fragments or variants thereof), may be fused with the constant domain of immunoglobulins (IgA, IgE, IgG, IgM), or portions thereof (CH1, CH2, CH3, or any combination thereof and portions thereof, resulting in chimeric polypeptides. By way of another non-limiting example, polypeptides and/or antibodies of the present invention (including fragments or variants thereof) may be fused with albumin (including but not limited to recombinant human serum albumin or fragments or variants thereof (see, e.g., U.S. Pat. No. 5,876,969, issued Mar. 2, 1999, EP Patent 0 413 622, and U.S. Pat. No. 5,766,883, issued Jun. 16, 1998, herein incorporated by reference in their entirety)). In a preferred embodiment, polypeptides and/or antibodies of the present invention (including fragments or variants thereof) are fused with the mature form of human serum albumin (i.e., amino acids 1-585 of human serum albumin as shown in FIGS. 1 and 2 of EP Patent 0 322 094) which is herein incorporated by reference in its entirety. In another preferred embodiment, polypeptides and/or antibodies of the present invention (including fragments or variants thereof) are fused with polypeptide fragments comprising, or alternatively consisting of, amino acid residues 1-z of human serum albumin, where z is an integer from 369 to 419, as described in U.S. Pat. No. 5,766,883 herein incorporated by reference in its entirety. Polypeptides and/or antibodies of the present invention (including fragments or variants thereof) may be fused to either the N- or C-terminal end of the heterologous protein (e.g., immunoglobulin Fc polypeptide or human serum albumin polypeptide). Polynucleotides encoding fusion proteins of the invention are also encompassed by the invention.

[0201] Such fusion proteins as those described above may facilitate purification and may increase half-life in vivo. This has been shown for chimeric proteins consisting of the first two domains of the human CD4-polypeptide and various domains of the constant regions of the heavy or light chains of mammalian immunoglobulins. See, e.g., EP 394,827; Traunecker et al., Nature, 331:84-86 (1988). Enhanced delivery of an antigen across the epithelial barrier to the immune system has been demonstrated for antigens (e.g., insulin) conjugated to an FcRn binding partner such as IgG or Fc fragments (see, e.g., PCT Publications WO 96/22024 and WO 99/04813). IgG Fusion proteins that have a disulfide-linked dimeric structure due to the IgG portion desulfide bonds have also been found to be more efficient in binding and neutralizing other molecules than monomeric polypeptides or fragments thereof alone. See, e.g., Fountoulakis et al., J. Biochem., 270:3958-3964 (1995). Nucleic acids encoding the above epitopes can also be recombined with a gene of interest as an epitope tag (e.g., the hemagglutinin (íHAî) tag or flag tag) to aid in detection and purification of the expressed polypeptide. For example, a system described by Janknecht et al. allows for the ready purification of non-denatured fusion proteins expressed in human cell lines (Janknecht et al., 1991, Proc. Natl. Acad. Sci. USA 88:8972-897). In this system, the gene of interest is subcloned into a vaccinia recombination plasmid such that the open reading frame of the gene is translationally fused to an amino-terminal tag consisting of six histidine residues. The tag serves as a matrix binding domain for the fusion protein. Extracts from cells infected with the recombinant vaccinia virus are loaded onto Ni2+ nitriloacetic acid-agarose column and histidine-tagged proteins can be selectively eluted with imidazole-containing buffers.

[0202] Fusion Proteins

[0203] Any polypeptide of the present invention can be used to generate fusion proteins. For example, the polypeptide of the present invention, when fused to a second protein, can be used as an antigenic tag. Antibodies raised against the polypeptide of the present invention can be used to indirectly detect the second protein by binding to the polypeptide. Moreover, because secreted proteins target cellular locations based on trafficking signals, polypeptides of the present invention which are shown to be secreted can be used as targeting molecules once fused to other proteins.

[0204] Examples of domains that can be fused to polypeptides of the present invention include not only heterologous signal sequences, but also other heterologous functional regions. The fusion does not necessarily need to be direct, but may occur through linker sequences.

[0205] In certain preferred embodiments, proteins of the invention are fusion proteins comprising an amino acid sequence that is an N and/or C-terminal deletion of a polypeptide of the invention. In preferred embodiments, the invention is directed to a fusion protein comprising an amino acid sequence that is at least 80%, 85%, 90%, 95%, 96%, 97%, 98% or 99% identical to a polypeptide sequence of the invention. Polynucleotides encoding these proteins are also encompassed by the invention.

[0206] Moreover, fusion proteins may also be engineered to improve characteristics of the polypeptide of the present invention. For instance, a region of additional amino acids, particularly charged amino acids, may be added to the N-terminus of the polypeptide to improve stability and persistence during purification from the host cell or subsequent handling and storage. Also, peptide moieties may be added to the polypeptide to facilitate purification. Such regions may be removed prior to final preparation of the polypeptide. The addition of peptide moieties to facilitate handling of polypeptides are familiar and routine techniques in the art.

[0207] As one of skill in the art will appreciate that, as discussed above, polypeptides of the present invention, and epitope-bearing fragments thereof, can be combined with heterologous polypeptide sequences. For example, the polypeptides of the present invention may be fused with heterologous polypeptide sequences, for example, the polypeptides of the present invention may be fused with the constant domain of immunoglobulins (IgA, IgE, IgG, IgM) or portions thereof (CH1, CH2, CH3, and any combination thereof, including both entire domains and portions thereof), or albumin (including, but not limited to, native or recombinant human albumin or fragments or variants thereof (see, e.g., U.S. Pat. No. 5,876,969, issued Mar. 2, 1999, EP Patent 0 413 622, and U.S. Pat. No. 5,766,883, issued Jun. 16, 1998, herein incorporated by reference in their entirety)), resulting in chimeric polypeptides. For example, EP-A-0 464 533 (Canadian counterpart 2045869) discloses fusion proteins comprising various portions of constant region of immunoglobulin molecules together with another human protein or part thereof. In many cases, the Fe part in a fusion protein is beneficial in therapy and diagnosis, and thus can result in, for example, improved pharmacokinetic properties (EP-A 0232 262). Alternatively, deleting the Fe part after the fusion protein has been expressed, detected, and purified, would be desired. For example, the Fe portion may hinder therapy and diagnosis if the fusion protein is used as an antigen for immunizations. In drug discovery, for example, human proteins, such as hIL-5, have been fused with Fe portions for the purpose of high-throughput screening assays to identify antagonists of hIL-5. See, D. Bennett et al., J. Molecular Recognition 8:52-58 (1995); K. Johanson et al., J. Biol. Chem. 270:9459-9471 (1995).

[0208] Moreover, the polypeptides of the present invention can be fused to marker sequences, such as a polypeptide which facilitates purification of the fused polypeptide. In preferred embodiments, the marker amino acid sequence is a hexa-histidine peptide, such as the tag provided in a pQE vector (QIAGEN, Inc., 9259 Eton Avenue, Chatsworth, Calif., 91311), among others, many of which are commercially available. As described in Gentz et al., Proc. Natl. Acad. Sci. USA 86:821-824 (1989), for instance, hexa-histidine provides for convenient purification of the fusion protein. Another peptide tag useful for purification, the “HA” tag, corresponds to an epitope derived from the influenza hemagglutinin protein (Wilson et al., Cell 37:767 (1984).)

[0209] Additional fusion proteins of the invention may be generated through the techniques of gene-shuffling, motif-shuffling, exon-shuffling, and/or codon-shuffling (collectively referred to as “DNA shuffling”), briefly described below, and further described herein. DNA shuffling may be employed to modulate the activities of polypeptides of the invention, such methods can be used to generate polypeptides with altered activity, as well as agonists and antagonists of the polypeptides. See, generally, U.S. Pat. Nos. 5,605,793; 5,811,238; 5,830,721; 5,834,252; and 5,837,458, and Patten et al., Curr. Opinion Biotechnol. 8:724-33 (1997); Harayama, Trends Biotechnol. 16(2):76-82 (1998); Hansson et al., J. Mol. Biol. 287:265-76 (1999); and Lorenzo and Blasco, Biotechniques 24(2):308-13 (1998); each of these patents and publications are hereby incorporated by reference in its entirety). In a preferred embodiment, one or more components, motifs, sections, parts, domains, fragments, etc., of a polynucleotide encoding a polypeptide of the invention may be recombined with one or more components, motifs, sections, parts, domains, fragments, etc., of one or more heterologous molecules encoding a heterologous polypeptide.

[0210] Thus, any of these above fusions can be engineered using the polynucleotides or the polypeptides of the present invention.

[0211] Recombinant and Synthetic Production of Polypeptides of the Invention

[0212] The present invention also relates to vectors containing the polynucleotide of the present invention, host cells, and the production of polypeptides by synthetic and recombinant techniques. The vector may be, for example, a phage, plasmid, viral, or retroviral vector. Retroviral vectors may be replication competent or replication defective. In the latter case, viral propagation generally will occur only in complementing host cells.

[0213] The polynucleotides of the invention may be joined to a vector containing a selectable marker for propagation in a host. Generally, a plasmid vector is introduced in a precipitate, such as a calcium phosphate precipitate, or in a complex with a charged lipid. If the vector is a virus, it may be packaged in vitro using an appropriate packaging cell line and then transduced into host cells.

[0214] The polynucleotide insert should be operatively linked to an appropriate promoter, such as the phage lambda PL promoter, the E. coli lac, trp, phoA and tac promoters, the SV40 early and late promoters and promoters of retroviral LTRs, to name a few. Other suitable promoters will be known to the skilled artisan. The expression constructs will further contain sites for transcription initiation, termination, and, in the transcribed region, a ribosome binding site for translation. The coding portion of the transcripts expressed by the constructs will preferably include a translation initiating codon at the beginning and a termination codon (UAA, UGA or UAG) appropriately positioned at the end of the polypeptide to be translated.

[0215] As indicated, the expression vectors will preferably include at least one selectable marker. Such markers include dihydrofolate reductase, G418 or neomycin resistance, glutamine synthase, for eukaryotic cell culture and tetracycline, kanamycin or ampicillin resistance genes for culturing in E. coli and other bacteria. Representative examples of appropriate hosts include, but are not limited to, bacterial cells, such as E. coli, Streptomyces and Salmonella typhimurium cells; fungal cells, such as yeast cells (e.g., Saccharomyces cerevisiae or Pichia pastoris (ATCC Accession No. 201178)); insect cells such as Drosophila S2 and Spodoptera Sf9 cells; animal cells such as CHO, COS, 293, NSO and Bowes melanoma cells; and plant cells. Appropriate culture mediums and conditions for the above-described host cells are known in the art.

[0216] Among vectors preferred for use in bacteria include pQE70, pQE60 and pQE-9, available from QIAGEN, Inc.; pBluescript vectors, Phagescript vectors, pNH8A, pNHl6a, pNH18A, pNH46A, available from Stratagene Cloning Systems, Inc.; and ptrc99a, pKK223-3, pKK233-3, pDR540, pRIT5 available from Pharmacia Biotech, Inc. Among preferred eukaryotic vectors are pWLNEO, pSV2CAT, pOG44, pXT1 and pSG available from Stratagene; and pSVK3, pBPV, pMSG and pSVL available from Pharmacia. Preferred expression vectors for use in yeast systems include, but are not limited to pYES2, pYD1, pTEF1/Zeo, pYES2/GS, pPICZ, pGAPZ, pGAPZalph, pPIC9, pPIC3.5, pHIL-D2, pHIL-SI, pPIC3.5K, pPIC9K, and PAO815 (all available from Invitrogen, Carlsbad, Calif.). Other suitable vectors will be readily apparent to the skilled artisan.

[0217] Vectors which use glutamine synthase (GS) or DHFR as the selectable markers can be amplified in the presence of the drugs methionine sulphoximine or methotrexate, respectively. An advantage of glutamine synthase based vectors is the availabilty of cell lines (e.g., the murine myeloma cell line, NSO) which are glutamine synthase negative. Glutamine synthase expression systems can also function in glutamine synthase expressing cells (e.g., Chinese Hamster Ovary (CHO) cells) by providing additional inhibitor to prevent the functioning of the endogenous gene. A glutamine synthase expression system and components thereof are detailed in PCT publications: WO87/04462; WO86/05807; WO89/01036; WO89/10404; and WO91/06657 which are hereby incorporated in their entireties by reference herein. Additionally, glutamine synthase expression vectors can be obtained from Lonza Biologics, Inc. (Portsmouth, N.H.). Expression and production of monoclonal antibodies using a GS expression system in murine myeloma cells is described in Bebbington et al., Bio/technology 10:169(1992) and in Biblia and Robinson Biotechnol. Prog. 11:1 (1995) which are herein incorporated by reference.

[0218] The present invention also relates to host cells containing the above-described vector constructs described herein, and additionally encompasses host cells containing nucleotide sequences of the invention that are operably associated with one or more heterologous control regions (e.g., promoter and/or enhancer) using techniques known of in the art. The host cell can be a higher eukaryotic cell, such as a mammalian cell (e.g., a human derived cell), or a lower eukaryotic cell, such as a yeast cell, or the host cell can be a prokaryotic cell, such as a bacterial cell. A host strain may be chosen which modulates the expression of the inserted gene sequences, or modifies and processes the gene product in the specific fashion desired. Expression from certain promoters can be elevated in the presence of certain inducers; thus expression of the genetically engineered polypeptide may be controlled. Furthermore, different host cells have characteristics and specific mechanisms for the translational and post-translational processing and modification (e.g., phosphorylation, cleavage) of proteins. Appropriate cell lines can be chosen to ensure the desired modifications and processing of the foreign protein expressed.

[0219] Introduction of the nucleic acids and nucleic acid constructs of the invention into the host cell can be effected by calcium phosphate transfection, DEAE-dextran mediated transfection, cationic lipid-mediated transfection, electroporation, transduction, infection, or other methods. Such methods are described in many standard laboratory manuals, such as Davis et al., Basic Methods In Molecular Biology (1986). It is specifically contemplated that the polypeptides of the present invention may in fact be expressed by a host cell lacking a recombinant vector.

[0220] In addition to encompassing host cells containing the vector constructs discussed herein, the invention also encompasses primary, secondary, and immortalized host cells of vertebrate origin, particularly mammalian origin, that have been engineered to delete or replace endogenous genetic material (e.g., reproductive system antigen coding sequence), and/or to include genetic material (e.g., heterologous polynucleotide sequences) that is operably associated with reproductive system associated polynucleotides of the invention, and which activates, alters, and/or amplifies endogenous reproductive system associated polynucleotides. For example, techniques known in the art may be used to operably associate heterologous control regions (e.g., promoter and/or enhancer) and endogenous reproductive system associated polynucleotide sequences via homologous recombination (see, e.g., U.S. Pat. No. 5,641,670, issued Jun. 24, 1997; International Publication Number WO 96/29411; International Publication Number WO 94/12650; Koller et al., Proc. Natl. Acad. Sci. USA 86:8932-8935 (1989); and Zijlstra et al., Nature 342:435-438 (1989), the disclosures of each of which are incorporated by reference in their entireties).

[0221] Polypeptides of the present invention can also be recovered from: products purified from natural sources, including bodily fluids, tissues and cells, whether directly isolated or cultured; products of chemical synthetic procedures; and products produced by recombinant techniques from a prokaryotic or eukaryotic host, including, for example, bacterial, yeast, higher plant, insect, and mammalian cells. Depending upon the host employed in a recombinant production procedure, the polypeptides of the present invention may be glycosylated or may be non-glycosylated. In addition, polypeptides of the invention may also include an initial modified methionine residue, in some cases as a result of host-mediated processes. Thus, it is well known in the art that the N-terminal methionine encoded by the translation initiation codon generally is removed with high efficiency from any protein after translation in all eukaryotic cells. While the N-terminal methionine on most proteins also is efficiently removed in most prokaryotes, for some proteins, this prokaryotic removal process is inefficient, depending on the nature of the amino acid to which the N-terminal methionine is covalently linked.

[0222] In one embodiment, the yeast Pichia pastoris is used to express polypeptides of the invention in a eukaryotic system. Pichia pastoris is a methylotrophic yeast which can metabolize methanol as its sole carbon source. A main step in the methanol metabolization pathway is the oxidation of methanol to formaldehyde using O₂. This reaction is catalyzed by the enzyme alcohol oxidase. In order to metabolize methanol as its sole carbon source, Pichia pastoris must generate high levels of alcohol oxidase due, in part, to the relatively low affinity of alcohol oxidase for O₂. Consequently, in a growth medium depending on methanol as a main carbon source, the promoter region of one of the two alcohol oxidase genes (AOX1) is highly active. In the presence of methanol, alcohol oxidase produced from the AOX1 gene comprises up to approximately 30% of the total soluble protein in Pichia pastoris. See, Ellis, S. B., et al., Mol. Cell. Biol. 5:1111-21 (1985); Koutz, P. J, et al., Yeast 5:167-77 (1989); Tschopp, J. F., et al., Nucl. Acids Res. 15:3859-76 (1987). Thus, a heterologous coding sequence, such as, for example, a polynucleotide of the present invention, under the transcriptional regulation of all or part of the AOX1 regulatory sequence is expressed at exceptionally high levels in Pichia yeast grown in the presence of methanol.

[0223] In one example, the plasmid vector pPIC9K is used to express DNA encoding a polypeptide of the invention, as set forth herein, in a Pichea yeast system essentially as described in “Pichia Protocols: Methods in Molecular Biology,” D.R. Higgins and J. Cregg, eds. The Humana Press, Totowa, N.J., 1998. This expression vector allows expression and secretion of a polypeptide of the invention by virtue of the strong AOX1 promoter linked to the Pichia pastoris alkaline phosphatase (PHO) secretory signal peptide (i.e., leader) located upstream of a multiple cloning site.

[0224] Many other yeast vectors could be used in place of pPIC9K, such as, pYES2, pYD1, pTEF1/Zeo, pYES2/GS, pPICZ, pGAPZ, pGAPZalpha, pPIC9, pPIC3.5, pHIL-D2, pHIL-S1, pPIC3.5K, and PAO815, as one skilled in the art would readily appreciate, as long as the proposed expression construct provides appropriately located signals for transcription, translation, secretion (if desired), and the like, including an in-frame AUG as required.

[0225] In another embodiment, high-level expression of a heterologous coding sequence, such as, for example, a polynucleotide of the present invention, may be achieved by cloning the heterologous polynucleotide of the invention into an expression vector such as, for example, pGAPZ or pGAPZalpha, and growing the yeast culture in the absence of methanol.

[0226] In addition to encompassing host cells containing the vector constructs discussed herein, the invention also encompasses primary, secondary, and immortalized host cells of vertebrate origin, particularly mammalian origin, that have been engineered to delete or replace endogenous genetic material (e.g., coding sequence), and/or to include genetic material (e.g., heterologous polynucleotide sequences) that is operably associated with polynucleotides of the invention, and which activates, alters, and/or amplifies endogenous polynucleotides. For example, techniques known in the art may be used to operably associate heterologous control regions (e.g., promoter and/or enhancer) and endogenous polynucleotide sequences via homologous recombination (see, e.g., U.S. Pat. No. 5,641,670, issued Jun. 24, 1997; International Publication No. WO 96/29411, published Sep. 26, 1996; International Publication No. WO 94/12650, published August 4, 1994; Koller et al., Proc. Natl. Acad. Sci. USA 86:8932-8935 (1989); and Zijlstra et al., Nature 342:435-438 (1989), the disclosures of each of which are incorporated by reference in their entireties).

[0227] In addition, polypeptides of the invention can be chemically synthesized using techniques known in the art (e.g., see Creighton, 1983, Proteins: Structures and Molecular Principles, W. H. Freeman & Co., N.Y., and Hunkapiller et al., Nature, 310:105-111 (1984)). For example, a polypeptide corresponding to a fragment of a polypeptide can be synthesized by use of a peptide synthesizer. Furthermore, if desired, nonclassical amino acids or chemical amino acid analogs can be introduced as a substitution or addition into the polypeptide sequence. Non-classical amino acids include, but are not limited to, to the D-isomers of the common amino acids, 2,4-diaminobutyric acid, a-amino isobutyric acid, 4-aminobutyric acid, Abu, 2-amino butyric acid, g-Abu, e-Ahx, 6-amino hexanoic acid, Aib, 2-amino isobutyric acid, 3-amino propionic acid, omithine, norleucine, norvaline, hydroxyproline, sarcosine, citrulline, homocitrulline, cysteic acid, t-butylglycine, t-butylalanine, phenylglycine, cyclohexylalanine, b-alanine, fluoro-amino acids, designer amino acids such as b-methyl amino acids, Ca-methyl amino acids, Na-methyl amino acids, and amino acid analogs in general. Furthermore, the amino acid can be D (dextrorotary) or L (levorotary).

[0228] The invention encompasses polypeptides of the present invention which are differentially modified during or after translation, e.g., by glycosylation, acetylation, phosphorylation, amidation, derivatization by known protecting/blocking groups, proteolytic cleavage, linkage to an antibody molecule or other cellular ligand, etc. Any of numerous chemical modifications may be carried out by known techniques, including but not limited, to specific chemical cleavage by cyanogen bromide, trypsin, chymotrypsin, papain, V8 protease, NaBH₄; acetylation, formylation, oxidation, reduction; metabolic synthesis in the presence of tunicamycin; etc.

[0229] Additional post-translational modifications encompassed by the invention include, for example, e.g., N-linked or O-linked carbohydrate chains, processing of N-terminal or C-terminal ends), attachment of chemical moieties to the amino acid backbone, chemical modifications of N-linked or O-linked carbohydrate chains, and addition or deletion of an N-terminal methionine residue as a result of procaryotic host cell expression. The polypeptides may also be modified with a detectable label, such as an enzymatic, fluorescent, isotopic or affinity label to allow for detection and isolation of the protein.

[0230] Examples of suitable enzymes include horseradish peroxidase, alkaline phosphatase, beta-galactosidase, or acetylcholinesterase; examples of suitable prosthetic group complexes include streptavidin/biotin and avidin/biotin; examples of suitable fluorescent materials include umbelliferone, fluorescein, fluorescein isothiocyanate, rhodamine, dichlorotriazinylamine fluorescein, dansyl chloride or phycoerythrin; an example of a luminescent material includes luminol; examples of bioluminescent materials include luciferase, luciferin, and aequorin; and examples of suitable radioactive material include iodine (¹²¹I, ¹²³I, ¹²⁵I, ¹³¹I), carbon (¹⁴C), sulfur (³⁵S), tritium (³H), indium (¹¹¹In, ¹¹²In, ^{113m}In, ^{115m}In), technetium (⁹⁹Tc,^{99M}Tc), thallium (²⁰¹Ti), gallium (⁶⁸Ga, ⁶⁷Ga), palladium (¹⁰³Pd), molybdenum (⁹⁹Mo), xenon (¹³³ Xe), fluorine (¹⁸F), ¹⁵³Sm, ¹⁷⁷Lu, ¹⁵⁹Gd, ¹⁴⁹Pm, ¹⁴⁰La, ¹⁷⁵Yb, ¹⁶⁶Ho, ⁹⁰Y, ⁴⁷Sc, ¹⁸⁶Re, ¹⁸⁸Re, ¹⁴²Pr ¹⁰⁵Rh, and ⁹⁷Ru.

[0231] In specific embodiments, a polypeptide of the present invention or fragment or variant thereof is attached to macrocyclic chelators that associate with radiometal ions, including but not limited to, ¹⁷⁷Lu, ⁹⁰y, ¹⁶⁶Ho, and ¹⁵³Sm, to polypeptides. In a preferred embodiment, the radiometal ion associated with the macrocyclic chelators is 111In. In another preferred embodiment, the radiometal ion associated with the macrocyclic chelator is ⁹⁰Y. In specific embodiments, the macrocyclic chelator is 1,4,7,10-tetraazacyclododecane-N,N′,N″,N′″-tetraacetic acid (DOTA). In other specific embodiments, DOTA is attached to an antibody of the invention or fragment thereof via a linker molecule. Examples of linker molecules useful for conjugating DOTA to a polypeptide are commonly known in the art—see, for example, DeNardo et al., Clin Cancer Res. 4(10):2483-90 (1998); Peterson et al., Bioconjug. Chem. 10(4):553-7 (1999); and Zimmerman et al, Nucl. Med. Biol. 26(8):943-50 (1999); which are hereby incorporated by reference in their entirety.

[0232] As mentioned, the reproductive system associated proteins of the invention may be modified by either natural processes, such as posttranslational processing, or by chemical modification techniques which are well known in the art. It will be appreciated that the same type of modification may be present in the same or varying degrees at several sites in a given reproductive system associated polypeptide. Reproductive system associated polypeptides may be branched, for example, as a result of ubiquitination, and they may be cyclic, with or without branching. Cyclic, branched, and branched cyclic reproductive system associated polypeptides may result from posttranslation natural processes or may be made by synthetic methods. Modifications include acetylation, acylation, ADP-ribosylation, amidation, covalent attachment of flavin, covalent attachment of a heme moiety, covalent attachment of a nucleotide or nucleotide derivative, covalent attachment of a lipid or lipid derivative, covalent attachment of phosphotidylinositol, cross-linking, cyclization, disulfide bond formation, demethylation, formation of covalent cross-links, formation of cysteine, formation of pyroglutamate, formylation, gamma-carboxylation, glycosylation, GPI anchor formation, hydroxylation, iodination, methylation, myristoylation, oxidation, pegylation, proteolytic processing, phosphorylation, prenylation, racemization, selenoylation, sulfation, transfer-RNA mediated addition of amino acids to proteins such as arginylation, and ubiquitination. (See, for instance, PROTEINS—STRUCTURE AND MOLECULAR PROPERTIES, 2nd Ed., T. E. Creighton, W. H. Freeman and Company, New York (1993); POSTTRANSLATIONAL COVALENT MODIFICATION OF PROTEINS, B. C. Johnson, Ed., Academic Press, New York, pgs. 1-12 (1983); Seifter et al., Meth. Enzymol. 182:626-646 (1990); Rattan et al., Ann. N.Y. Acad. Sci. 663:48-62 (1992)).

[0233] Also provided by the invention are chemically modified derivatives of the polypeptides of the invention which may provide additional advantages such as increased solubility, stability and circulating time of the polypeptide, or decreased immunogenicity (see U.S. Pat. No. 4,179,337). The chemical moieties for derivitization may be selected from water soluble polymers such as polyethylene glycol, ethylene glycol/propylene glycol copolymers, carboxymethylcellulose, dextran, polyvinyl alcohol and the like. The polypeptides may be modified at random positions within the molecule, or at predetermined positions within the molecule and may include one, two, three or more attached chemical moieties.

[0234] The polymer may be of any molecular weight, and may be branched or unbranched. For polyethylene glycol, the preferred molecular weight is between about 1 kDa and about 100 kDa (the term “about” indicating that in preparations of polyethylene glycol, some molecules will weigh more, some less, than the stated molecular weight) for ease in handling and manufacturing. Other sizes may be used, depending on the desired therapeutic profile (e.g., the duration of sustained release desired, the effects, if any on biological activity, the ease in handling, the degree or lack of antigenicity and other known effects of the polyethylene glycol to a therapeutic protein or analog). For example, the polyethylene glycol may have an average molecular weight of about 200, 500, 1000, 1500, 2000, 2500, 3000, 3500, 4000, 4500, 5000, 5500, 6000, 6500, 7000, 7500, 8000, 8500, 9000, 9500, 10,000, 10,500, 11,000, 11,500, 12,000, 12,500, 13,000, 13,500, 14,000, 14,500, 15,000, 15,500, 16,000, 16,500, 17,000, 17,500, 18,000, 18,500, 19,000, 19,500, 20,000, 25,000, 30,000, 35,000, 40,000, 50,000, 55,000, 60,000, 65,000, 70,000, 75,000, 80,000, 85,000, 90,000, 95,000, or 100,000 kDa.

[0235] As noted above, the polyethylene glycol may have a branched structure. Branched polyethylene glycols are described, for example, in U.S. Pat. No. 5,643,575; Morpurgo et al., Appl. Biochem. Biotechnol. 56:59-72 (1996); Vorobjev et al., Nucleosides Nucleotides 18:2745-2750 (1999); and Caliceti et al., Bioconjug. Chem. 10:638-646 (1999), the disclosures of each of which are incorporated herein by reference.

[0236] The polyethylene glycol molecules (or other chemical moieties) should be attached to the protein with consideration of effects on functional or antigenic domains of the protein. There are a number of attachment methods available to those skilled in the art, such as, for example, the method disclosed in EP 0 401 384 (coupling PEG to G-CSF), herein incorporated by reference; see also Malik et al., Exp. Hematol. 20:1028-1035 (1992), reporting pegylation of GM-CSF using tresyl chloride. For example, polyethylene glycol may be covalently bound through amino acid residues via a reactive group, such as a free amino or carboxyl group. Reactive groups are those to which an activated polyethylene glycol molecule may be bound. The amino acid residues having a free amino group may include lysine residues and the N-terminal amino acid residues; those having a free carboxyl group may include aspartic acid residues glutamic acid residues and the C-terminal amino acid residue. Sulfhydryl groups may also be used as a reactive group for attaching the polyethylene glycol molecules. Preferred for therapeutic purposes is attachment at an amino group, such as attachment at the N-terminus or lysine group.

[0237] As suggested above, polyethylene glycol may be attached to proteins via linkage to any of a number of amino acid residues. For example, polyethylene glycol can be linked to proteins via covalent bonds to lysine, histidine, aspartic acid, glutamic acid, or cysteine residues. One or more reaction chemistries may be employed to attach polyethylene glycol to specific amino acid residues (e.g., lysine, histidine, aspartic acid, glutamic acid, or cysteine) of the protein or to more than one type of amino acid residue (e.g., lysine, histidine, aspartic acid, glutamic acid, cysteine and combinations thereof) of the protein.

[0238] One may specifically desire proteins chemically modified at the N-terminus. Using polyethylene glycol as an illustration of the present composition, one may select from a variety of polyethylene glycol molecules (by molecular weight, branching, etc.), the proportion of polyethylene glycol molecules to protein (polypeptide) molecules in the reaction mix, the type of pegylation reaction to be performed, and the method of obtaining the selected N-terminally pegylated protein. The method of obtaining the N-terminally pegylated preparation (i.e., separating this moiety from other monopegylated moieties if necessary) may be by purification of the N-terminally pegylated material from a population of pegylated protein molecules. Selective proteins chemically modified at the N-terminus modification may be accomplished by reductive alkylation which exploits differential reactivity of different types of primary amino groups (lysine versus the N-terminal) available for derivatization in a particular protein. Under the appropriate reaction conditions, substantially selective derivatization of the protein at the N-terminus with a carbonyl group containing polymer is achieved.

[0239] As indicated above, pegylation of the proteins of the invention may be accomplished by any number of means. For example, polyethylene glycol may be attached to the protein either directly or by an intervening linker. Linkerless systems for attaching polyethylene glycol to proteins are described in Delgado et al., Crit. Rev. Thera. Drug Carrier Sys. 9:249-304 (1992); Francis et al., Intern. J. of Hematol. 68:1-18 (1998); U.S. Pat. No. 4,002,531; U.S. Pat. No. 5,349,052; WO 95/06058; and WO 98/32466, the disclosures of each of which are incorporated herein by reference.

[0240] One system for attaching polyethylene glycol directly to amino acid residues of proteins without an intervening linker employs tresylated MPEG, which is produced by the modification of monmethoxy polyethylene glycol (MPEG) using tresylchloride (ClSO₂CH₂CF₃). Upon reaction of protein with tresylated MPEG, polyethylene glycol is directly attached to amine groups of the protein. Thus, the invention includes protein-polyethylene glycol conjugates produced by reacting proteins of the invention with a polyethylene glycol molecule having a 2,2,2-trifluoreothane sulphonyl group.

[0241] Polyethylene glycol can also be attached to proteins using a number of different intervening linkers. For example, U.S. Pat. No. 5,612,460, the entire disclosure of which is incorporated herein by reference, discloses urethane linkers for connecting polyethylene glycol to proteins. Protein-polyethylene glycol conjugates wherein the polyethylene glycol is attached to the protein by a linker can also be produced by reaction of proteins with compounds such as MPEG-succinimidylsuccinate, MPEG activated with 1,1′-carbonyldiimidazole, MPEG-2,4,5-trichloropenylcarbonate, MPEG-p-nitrophenolcarbonate, and various MPEG-succinate derivatives. A number of additional polyethylene glycol derivatives and reaction chemistries for attaching polyethylene glycol to proteins are described in International Publication No. WO 98/32466, the entire disclosure of which is incorporated herein by reference. Pegylated protein products produced using the reaction chemistries set out herein are included within the scope of the invention.

[0242] The number of polyethylene glycol moieties attached to each protein of the invention (i.e., the degree of substitution) may also vary. For example, the pegylated proteins of the invention may be linked, on average, to 1, 2, 3, 4, 5, 6, 7, 8, 9, 10, 12, 15, 17, 20, or more polyethylene glycol molecules. Similarly, the average degree of substitution within ranges such as 1-3, 2-4, 3-5, 4-6, 5-7, 6-8, 7-9, 8-10, 9-11, 10-12, 11-13, 12-14, 13-15, 14-16, 15-17, 16-18, 17-19, or 18-20 polyethylene glycol moieties per protein molecule. Methods for determining the degree of substitution are discussed, for example, in Delgado et al., Crit. Rev. Thera. Drug Carrier Sys. 9:249-304 (1992).

[0243] The reproductive system associated polypeptides of the invention can be recovered and purified from chemical synthesis and recombinant cell cultures by standard methods which include, but are not limited to, ammonium sulfate or ethanol precipitation, acid extraction, anion or cation exchange chromatography, phosphocellulose chromatography, hydrophobic interaction chromatography, affinity chromatography, hydroxylapatite chromatography and lectin chromatography. Most preferably, high performance liquid chromatography (“HPLC”) is employed for purification. Well known techniques for refolding protein may be employed to regenerate active conformation when the polypeptide is denatured during isolation and/or purification.

[0244] Reproductive system associated polynucleotides and polypeptides may be used in accordance with the present invention for a variety of applications, particularly those that make use of the chemical and biological properties of reproductive system associated antigens. Among these are applications in the detection, prevention, diagnosis and/or treatment of diseases associated with the reproductive system, such as e.g., cancers of the reproductive system, tumors, injuries and trauma, infections, congenital defects, and diseases or disorders which result in infertility, complications with pregnancy, labor, or parturition, postpartum difficulties, and as listed below in the section entitled “Reproductive System Disorders”. Additional applications relate to diagnosis and to treatment of disorders of cells, tissues and organisms. These aspects of the invention are discussed further below.

[0245] In a preferred embodiment, polynucleotides expressed in a particular tissue type (see, e.g., Table 1A, column 7) are used to detect, diagnose, treat, prevent and/or prognose disorders associated with the tissue type.

[0246] The polypeptides of the invention may be in monomers or multimers (i.e., dimers, trimers, tetramers and higher multimers). Accordingly, the present invention relates to monomers and multimers of the polypeptides of the invention, their preparation, and compositions (preferably, Therapeutics) containing them. In specific embodiments, the polypeptides of the invention are monomers, dimers, trimers or tetramers. In additional embodiments, the multimers of the invention are at least dimers, at least trimers, or at least tetramers.

[0247] Multimers encompassed by the invention may be homomers or heteromers. As used herein, the term homomer refers to a multimer containing only polypeptides corresponding to a protein of the invention (e.g., the amino acid sequence of SEQ ID NO: Y, an amino acid sequence encoded by SEQ ID NO: X or the complement of SEQ ID NO: X, the amino acid sequence encoded by the portion of SEQ ID NO: X as defined in columns 8 and 9 of Table 2, and/or an amino acid sequence encoded by cDNA contained in Clone ID NO: Z (including fragments, variants, splice variants, and fusion proteins, corresponding to these as described herein)). These homomers may contain polypeptides having identical or different amino acid sequences. In a specific embodiment, a homomer of the invention is a multimer containing only polypeptides having an identical amino acid sequence. In another specific embodiment, a homomer of the invention is a multimer containing polypeptides having different amino acid sequences. In specific embodiments, the multimer of the invention is a homodimer (e.g., containing two polypeptides having identical or different amino acid sequences) or a homotrimer (e.g., containing three polypeptides having identical and/or different amino acid sequences). In additional embodiments, the homomeric multimer of the invention is at least a homodimer, at least a homotrimer, or at least a homotetramer.

[0248] As used herein, the term heteromer refers to a multimer containing two or more heterologous polypeptides (i.e., polypeptides of different proteins) in addition to the polypeptides of the invention. In a specific embodiment, the multimer of the invention is a heterodimer, a heterotrimer, or a heterotetramer. In additional embodiments, the heteromeric multimer of the invention is at least a heterodimer, at least a heterotrimer, or at least a heterotetramer.

[0249] Multimers of the invention may be the result of hydrophobic, hydrophilic, ionic and/or covalent associations and/or may be indirectly linked by, for example, liposome formation. Thus, in one embodiment, multimers of the invention, such as, for example, homodimers or homotrimers, are formed when polypeptides of the invention contact one another in solution. In another embodiment, heteromultimers of the invention, such as, for example, heterotrimers or heterotetramers, are formed when polypeptides of the invention contact antibodies to the polypeptides of the invention (including antibodies to the heterologous polypeptide sequence in a fusion protein of the invention) in solution. In other embodiments, multimers of the invention are formed by covalent associations with and/or between the polypeptides of the invention. Such covalent associations may involve one or more amino acid residues contained in the polypeptide sequence (e.g., that recited in SEQ ID NO: Y, encoded by the portion of SEQ ID NO: X as defined in columns 8 and 9 of Table 2, and/or encoded by the cDNA contained in Clone ID NO: Z). In one instance, the covalent associations are cross-linking between cysteine residues located within the polypeptide sequences which interact in the native (i.e., naturally occurring) polypeptide. In another instance, the covalent associations are the consequence of chemical or recombinant manipulation. Alternatively, such covalent associations may involve one or more amino acid residues contained in the heterologous polypeptide sequence in a fusion protein. In one example, covalent associations are between the heterologous sequence contained in a fusion protein of the invention (see, e.g., U.S. Pat. No. 5,478,925). In a specific example, the covalent associations are between the heterologous sequence contained in a Fc fusion protein of the invention (as described herein). In another specific example, covalent associations of fusion proteins of the invention are between heterologous polypeptide sequence from another protein that is capable of forming covalently associated multimers, such as for example, osteoprotegerin (see, e.g., International Publication NO: WO 98/49305, the contents of which are herein incorporated by reference in its entirety). In another embodiment, two or more polypeptides of the invention are joined through peptide linkers. Examples include those peptide linkers described in U.S. Pat. No. 5,073,627 (hereby incorporated by reference). Proteins comprising multiple polypeptides of the invention separated by peptide linkers may be produced using conventional recombinant DNA technology.

[0250] Another method for preparing multimer polypeptides of the invention involves use of polypeptides of the invention fused to a leucine zipper or isoleucine zipper polypeptide sequence. Leucine zipper and isoleucine zipper domains are polypeptides that promote multimerization of the proteins in which they are found. Leucine zippers were originally identified in several DNA-binding proteins (Landschulz et al., Science 240:1759, (1988)), and have since been found in a variety of different proteins. Among the known leucine zippers are naturally occurring peptides and derivatives thereof that dimerize or trimerize. Examples of leucine zipper domains suitable for producing soluble multimeric proteins of the invention are those described in PCT application WO 94/10308, hereby incorporated by reference. Recombinant fusion proteins comprising a polypeptide of the invention fused to a polypeptide sequence that dimerizes or trimerizes in solution are expressed in suitable host cells, and the resulting soluble multimeric fusion protein is recovered from the culture supernatant using techniques known in the art.

[0251] Trimeric polypeptides of the invention may offer the advantage of enhanced biological activity. Preferred leucine zipper moieties and isoleucine moieties are those that preferentially form trimers. One example is a leucine zipper derived from lung surfactant protein D (SPD), as described in Hoppe et al. (FEBS Letters 344:191, (1994)) and in U.S. patent application Ser. No. 08/446,922, hereby incorporated by reference. Other peptides derived from naturally occurring trimeric proteins may be employed in preparing trimeric polypeptides of the invention.

[0252] In another example, proteins of the invention are associated by interactions between Flag® polypeptide sequence contained in fusion proteins of the invention containing Flag® polypeptide sequence. In a further embodiment, proteins of the invention are associated by interactions between heterologous polypeptide sequence contained in Flag® fusion proteins of the invention and anti-Flag® antibody.

[0253] The multimers of the invention may be generated using chemical techniques known in the art. For example, polypeptides desired to be contained in the multimers of the invention may be chemically cross-linked using linker molecules and linker molecule length optimization techniques known in the art (see, e.g., U.S. Pat. No. 5,478,925, which is herein incorporated by reference in its entirety). Additionally, multimers of the invention may be generated using techniques known in the art to form one or more inter-molecule cross-links between the cysteine residues located within the sequence of the polypeptides desired to be contained in the multimer (see, e.g., U.S. Pat. No. 5,478,925, which is herein incorporated by reference in its entirety). Further, polypeptides of the invention may be routinely modified by the addition of cysteine or biotin to the C-terminus or N-terminus of the polypeptide and techniques known in the art may be applied to generate multimers containing one or more of these modified polypeptides (see, e.g., U.S. Pat. No. 5,478,925, which is herein incorporated by reference in its entirety). Additionally, techniques known in the art may be applied to generate liposomes containing the polypeptide components desired to be contained in the multimer of the invention (see, e.g., U.S. Pat. No. 5,478,925, which is herein incorporated by reference in its entirety).

[0254] Alternatively, multimers of the invention may be generated using genetic engineering techniques known in the art. In one embodiment, polypeptides contained in multimers of the invention are produced recombinantly using fusion protein technology described herein or otherwise known in the art (see, e.g., U.S. Pat. No. 5,478,925, which is herein incorporated by reference in its entirety). In a specific embodiment, polynucleotides coding for a homodimer of the invention are generated by ligating a polynucleotide sequence encoding a polypeptide of the invention to a sequence encoding a linker polypeptide and then further to a synthetic polynucleotide encoding the translated product of the polypeptide in the reverse orientation from the original C-terminus to the N-terminus (lacking the leader sequence) (see, e.g., U.S. Pat. No. 5,478,925, which is herein incorporated by reference in its entirety). In another embodiment, recombinant techniques described herein or otherwise known in the art are applied to generate recombinant polypeptides of the invention which contain a transmembrane domain (or hydrophobic or signal peptide) and which can be incorporated by membrane reconstitution techniques into liposomes (see, e.g., U.S. Pat. No. 5,478,925, which is herein incorporated by reference in its entirety).

[0255] Antibodies

[0256] Further polypeptides of the invention relate to antibodies and T-cell antigen receptors (TCR) which immunospecifically bind a polypeptide, polypeptide fragment, or variant of the invention (e.g., a polypeptide or fragment or variant of the amino acid sequence of SEQ ID NO: Y or a polypeptide encoded by the cDNA contained in Clone ID NO: Z, and/or an epitope, of the present invention) as determined by immunoassays well known in the art for assaying specific antibody-antigen binding. Antibodies of the invention include, but are not limited to, polyclonal, monoclonal, multispecific, human, humanized or chimeric antibodies, single chain antibodies, Fab fragments, F(ab′) fragments, fragments produced by a Fab expression library, anti-idiotypic (anti-Id) antibodies (including, e.g., anti-Id antibodies to antibodies of the invention), intracellularly-made antibodies (i.e., intrabodies), and epitope-binding fragments of any of the above. The term “antibody,” as used herein, refers to immunoglobulin molecules and immunologically active portions of immunoglobulin molecules, i.e., molecules that contain an antigen binding site that immunospecifically binds an antigen. The immunoglobulin molecules of the invention can be of any type (e.g., IgG, IgE, IgM, IgD, IgA and IgY), class (e.g., IgG1, IgG2, IgG3, IgG4, IgA1 and IgA2) or subclass of immunoglobulin molecule. In preferred embodiments, the immunoglobulin molecules of the invention are IgG1. In other preferred embodiments, the immunoglobulin molecules of the invention are IgG4.

[0257] Most preferably the antibodies are human antigen-binding antibody fragments of the present invention and include, but are not limited to, Fab, Fab′ and F(ab′)2, Fd, single-chain Fvs (scFv), single-chain antibodies, disulfide-linked Fvs (sdFv) and fragments comprising either a VL or VH domain. Antigen-binding antibody fragments, including single-chain antibodies, may comprise the variable region(s) alone or in combination with the entirety or a portion of the following: hinge region, CH1, CH2, and CH3 domains. Also included in the invention are antigen-binding fragments also comprising any combination of variable region(s) with a hinge region, CH1, CH2, and CH3 domains. The antibodies of the invention may be from any animal origin including birds and mammals. Preferably, the antibodies are human, murine (e.g., mouse and rat), donkey, ship rabbit, goat, guinea pig, camel, horse, or chicken. As used herein, “human” antibodies include antibodies having the amino acid sequence of a human immunoglobulin and include antibodies isolated from human immunoglobulin libraries or from animals transgenic for one or more human immunoglobulin and that do not express endogenous immunoglobulins, as described infra and, for example in, U.S. Pat. No. 5,939,598 by Kucherlapati et al.

[0258] The antibodies of the present invention may be monospecific, bispecific, trispecific or of greater multispecificity. Multispecific antibodies may be specific for different epitopes of a polypeptide of the present invention or may be specific for both a polypeptide of the present invention as well as for a heterologous epitope, such as a heterologous polypeptide or solid support material. See, e.g., PCT publications WO 93/17715; WO 92/08802; WO 91/00360; WO 92/05793; Tutt, et al., J. Immunol. 147:60-69 (1991); U.S. Pat. Nos. 4,474,893; 4,714,681; 4,925,648; 5,573,920; 5,601,819; Kostelny et al., J. Immunol. 148:1547-1553 (1992).

[0259] Antibodies of the present invention may be described or specified in terms of the epitope(s) or portion(s) of a polypeptide of the present invention which they recognize or specifically bind. The epitope(s) or polypeptide portion(s) may be specified as described herein, e.g., by N-terminal and C-terminal positions, or by size in contiguous amino acid residues, or listed in the Tables and Figures. Preferred epitopes of the invention include those shown in column 6 of Table 1A, as well as polynucleotides that encode these epitopes. Antibodies which specifically bind any epitope or polypeptide of the present invention may also be excluded. Therefore, the present invention includes antibodies that specifically bind polypeptides of the present invention, and allows for the exclusion of the same.

[0260] Antibodies of the present invention may also be described or specified in terms of their cross-reactivity. Antibodies that do not bind any other analog, ortholog, or homolog of a polypeptide of the present invention are included. Antibodies that bind polypeptides with at least 95%, at least 90%, at least 85%, at least 80%, at least 75%, at least 70%, at least 65%, at least 60%, at least 55%, and at least 50% identity (as calculated using methods known in the art and described herein) to a polypeptide of the present invention are also included in the present invention. In specific embodiments, antibodies of the present invention cross-react with murine, rat and/or rabbit homologs of human proteins and the corresponding epitopes thereof. Antibodies that do not bind polypeptides with less than 95%, less than 90%, less than 85%, less than 80%, less than 75%, less than 70%, less than 65%, less than 60%, less than 55%, and less than 50% identity (as calculated using methods known in the art and described herein) to a polypeptide of the present invention are also included in the present invention. In a specific embodiment, the above-described cross-reactivity is with respect to any single specific antigenic or immunogenic polypeptide, or combination(s) of 2, 3, 4, 5, or more of the specific antigenic and/or immunogenic polypeptides disclosed herein. Further included in the present invention are antibodies which bind polypeptides encoded by polynucleotides which hybridize to a polynucleotide of the present invention under stringent hybridization conditions (as described herein). Antibodies of the present invention may also be described or specified in terms of their binding affinity to a polypeptide of the invention. Preferred binding affinities include those with a dissociation constant or Kd less than 5×10⁻² M, 10⁻² M, 5×10⁻³ M, 10⁻³ M, 5×10⁻⁴ M, 10⁻⁴ M, 5×10⁻⁵ M, 10⁻⁵ M, 5×10⁻⁶ M, 10⁻⁶ M, 5×10⁻⁷ M, 10⁷ M, 5×10⁻⁸ M, 10⁻⁸ M, 5×10⁻⁹ M, 10⁻⁹ M, 5×10⁻¹⁰ M, 10⁻¹⁰ M 5×10⁻¹¹ M, 10⁻¹¹ M, 5×10⁻¹² M, 10⁻¹²M, 5×10⁻¹³ M, 10⁻¹³ M 5×10⁻¹⁴ M, 10⁻¹⁴ M, 5×10⁻¹⁵ M, 10⁻¹⁵ M.

[0261] The invention also provides antibodies that competitively inhibit binding of an antibody to an epitope of the invention as determined by any method known in the art for determining competitive binding, for example, the immunoassays described herei-n. In preferred embodiments, the antibody competitively inhibits binding to the epitope by at least 95%, at least 90%, at least 85%, at least 80%, at least 75%, at least 70%, at least 60%, or at least 50%.

[0262] Antibodies of the present invention may act as agonists or antagonists of the polypeptides of the present invention. For example, the present invention includes antibodies which disrupt the receptor/ligand interactions with the polypeptides of the invention either partially or fully. Preferably, antibodies of the present invention bind an antigenic epitope disclosed herein, or a portion thereof. The invention features both receptor-specific antibodies and ligand-specific antibodies. The invention also features receptor-specific antibodies which do not prevent ligand binding but prevent receptor activation. Receptor activation (i.e., signaling) may be determined by techniques described herein or otherwise known in the art. For example, receptor activation can be determined by detecting the phosphorylation (e.g., tyrosine or serine/threonine) of the receptor or its substrate by immunoprecipitation followed by western blot analysis (for example, as described supra). In specific embodiments, antibodies are provided that inhibit ligand activity or receptor activity by at least 95%, at least 90%, at least 85%, at least 80%, at least 75%, at least 70%, at least 60%, or at least 50% of the activity in absence of the antibody.

[0263] The invention also features receptor-specific antibodies which both prevent ligand binding and receptor activation as well as antibodies that recognize the receptor-ligand complex, and, preferably, do not specifically recognize the unbound receptor or the unbound ligand. Likewise, included in the invention are neutralizing antibodies which bind the ligand and prevent binding of the ligand to the receptor, as well as antibodies which bind the ligand, thereby preventing receptor activation, but do not prevent the ligand from binding the receptor. Further included in the invention are antibodies which activate the receptor. These antibodies may act as receptor agonists, i.e., potentiate or activate either all or a subset of the biological activities of the ligand-mediated receptor activation, for example, by inducing dimerization of the receptor. The antibodies may be specified as agonists, antagonists or inverse agonists for biological activities comprising the specific biological activities of the peptides of the invention disclosed herein. The above antibody agonists can be made using methods known in the art. See, e.g., PCT publication WO 96/40281; U.S. Pat. No. 5,811,097; Deng et al., Blood 92(6):1981-1988 (1998); Chen et al., Cancer Res. 58(16):3668-3678 (1998); Harrop et al., J. Immunol. 161(4):1786-1794 (1998); Zhu et al., Cancer Res. 58(15):3209-3214 (1998); Yoon et al., J. Immunol. 160(7):3170-3179 (1998); Prat et al., J. Cell. Sci. 111(Pt2):237-247 (1998); Pitard et al., J. Immunol. Methods 205(2):177-190 (1997); Liautard et al., Cytokine 9(4):233-241 (1997); Carlson et al., J. Biol. Chem. 272(17):11295-11301 (1997); Taryman et al., Neuron 14(4):755-762 (1995); Muller et al., Structure 6(9):1153-1167 (1998); Bartunek et al., Cytokine 8(1):14-20 (1996) (which are all incorporated by reference herein in their entireties).

[0264] Antibodies of the present invention may be used, for example, to purify, detect, and target the polypeptides of the present invention, including both in vitro and in vivo diagnostic and therapeutic methods. For example, the antibodies have utility in immunoassays for qualitatively and quantitatively measuring levels of the polypeptides of the present invention in biological samples. See, e.g., Harlow et al., Antibodies: A Laboratory Manual, (Cold Spring Harbor Laboratory Press, 2nd ed. 1988); incorporated by reference herein in its entirety.

[0265] As discussed in more detail below, the antibodies of the present invention may be used either alone or in combination with other compositions. The antibodies may further be recombinantly fused to a heterologous polypeptide at the N- or C-terminus or chemically conjugated (including covalent and non-covalent conjugations) to polypeptides or other compositions. For example, antibodies of the present invention may be recombinantly fused or conjugated to molecules useful as labels in detection assays and effector molecules such as heterologous polypeptides, drugs, radionuclides, or toxins. See, e.g., PCT publications WO 92/08495; WO 91/14438; WO 89/12624; U.S. Pat. No. 5,314,995; and EP 396,387; the disclosures of which are incorporated herein by reference in their entireties.

[0266] The antibodies of the invention include derivatives that are modified, i.e., by the covalent attachment of any type of molecule to the antibody such that covalent attachment does not prevent the antibody from generating an anti-idiotypic response. For example, but not by way of limitation, the antibody derivatives include antibodies that have been modified, e.g., by glycosylation, acetylation, pegylation, phosphylation, amidation, derivatization by known protecting/blocking groups, proteolytic cleavage, linkage to a cellular ligand or other protein, etc. Any of numerous chemical modifications may be carried out by known techniques, including, but not limited to specific chemical cleavage, acetylation, formylation, metabolic synthesis of tunicamycin, etc. Additionally, the derivative may contain one or more non-classical amino acids.

[0267] The antibodies of the present invention may be generated by any suitable method known in the art. Polyclonal antibodies to an antigen-of-interest can be produced by various procedures well known in the art. For example, a polypeptide of the invention can be administered to various host animals including, but not limited to, rabbits, mice, rats, etc. to induce the production of sera containing polyclonal antibodies specific for the antigen. Various adjuvants may be used to increase the immunological response, depending on the host species, and include but are not limited to, Freund's (complete and incomplete), mineral gels such as aluminum hydroxide, surface active substances such as lysolecithin, pluronic polyols, polyanions, peptides, oil emulsions, keyhole limpet hemocyanins, dinitrophenol, and potentially useful human adjuvants such as BCG (bacille Calmette-Guerin) and corynebacterium parvum. Such adjuvants are also well known in the art.

[0268] Monoclonal antibodies can be prepared using a wide variety of techniques known in the art including the use of hybridoma, recombinant, and phage display technologies, or a combination thereof. For example, monoclonal antibodies can be produced using hybridoma techniques including those known in the art and taught, for example, in Harlow et al., Antibodies: A Laboratory Manual, (Cold Spring Harbor Laboratory Press, 2nd ed. 1988); Hammerling, et al., in: Monoclonal Antibodies and T-Cell Hybridomas 563-681 (Elsevier, N.Y., 1981) (said references incorporated by reference in their entireties). The term “monoclonal antibody” as used herein is not limited to antibodies produced through hybridoma technology. The term “monoclonal antibody” refers to an antibody that is derived from a single clone, including any eukaryotic, prokaryotic, or phage clone, and not the method by which it is produced.

[0269] Methods for producing and screening for specific antibodies using hybridoma technology are routine and well known in the art and are discussed in detail in the Examples. In a non-limiting example, mice can be immunized with a polypeptide of the invention or a cell expressing such peptide. Once an immune response is detected, e.g., antibodies specific for the antigen are detected in the mouse serum, the mouse spleen is harvested and splenocytes isolated. The splenocytes are then fused by well known techniques to any suitable myeloma cells, for example cells from cell line SP20 available from the ATCC. Hybridomas are selected and cloned by limited dilution. The hybridoma clones are then assayed by methods known in the art for cells that secrete antibodies capable of binding a polypeptide of the invention. Ascites fluid, which generally contains high levels of antibodies, can be generated by immunizing mice with positive hybridoma clones.

[0270] Accordingly, the present invention provides methods of generating monoclonal antibodies as well as antibodies produced by the method comprising culturing a hybridoma cell secreting an antibody of the invention wherein, preferably, the hybridoma is generated by fusing splenocytes isolated from a mouse immunized with an antigen of the invention with myeloma cells and then screening the hybridomas resulting from the fusion for hybridoma clones that secrete an antibody able to bind a polypeptide of the invention.

[0271] Another well known method for producing both polyclonal and monoclonal human B cell lines is transformation using Epstein Barr Virus (EBV). Protocols for generating EBV-transformed B cell lines are commonly known in the art, such as, for example, the protocol outlined in Chapter 7.22 of Current Protocols in Immunology, Coligan et al., Eds., 1994, John Wiley & Sons, NY, which is hereby incorporated in its entirety by reference herein. The source of B cells for transformation is commonly human peripheral blood, but B cells for transformation may also be derived from other sources including, but not limited to, lymph nodes, tonsil, spleen, tumor tissue, and infected tissues. Tissues are generally made into single cell suspensions prior to EBV transformation. Additionally, steps may be taken to either physically remove or inactivate T cells (e.g., by treatment with cyclosporin A) in B cell-containing samples, because T cells from individuals seropositive for anti-EBV antibodies can suppress B cell immortalization by EBV.

[0272] In general, the sample containing human B cells is innoculated with EBV, and cultured for 3-4 weeks. A typical source of EBV is the culture supernatant of the B95-8 cell line (ATCC #VR-1492). Physical signs of EBV transformation can generally be seen towards the end of the 3-4 week culture period. By phase-contrast microscopy, transformed cells may appear large, clear, hairy and tend to aggregate in tight clusters of cells. Initially, EBV lines are generally polyclonal. However, over prolonged periods of cell cultures, EBV lines may become monoclonal or polyclonal as a result of the selective outgrowth of particular B cell clones. Alternatively, polyclonal EBV transformed lines may be subcloned (e.g., by limiting dilution culture) or fused with a suitable fusion partner and plated at limiting dilution to obtain monoclonal B cell lines. Suitable fusion partners for EBV transformed cell lines include mouse myeloma cell lines (e.g., SP2/0, X63-Ag8.653), heteromyeloma cell lines (human x mouse; e.g, SPAM-8, SBC-H20, and CB-F7), and human cell lines (e.g., GM 1500, SKO-007, RPMI 8226, and KR-4). Thus, the present invention also provides a method of generating polyclonal or monoclonal human antibodies against polypeptides of the invention or fragments thereof, comprising EBV-transformation of human B cells.

[0273] Antibody fragments which recognize specific epitopes may be generated by known techniques. For example, Fab and F(ab′)2 fragments of the invention may be produced by proteolytic cleavage of immunoglobulin molecules, using enzymes such as papain (to produce Fab fragments) or pepsin (to produce F(ab′)2 fragments). F(ab′)2 fragments contain the variable region, the light chain constant region and the CHI domain of the heavy chain. For example, the antibodies of the present invention can also be generated using various phage display methods known in the art and as discussed in detail in the Examples (e.g., Example 10). In phage display methods, functional antibody domains are displayed on the surface of phage particles which carry the polynucleotide sequences encoding them. In a particular embodiment, such phage can be utilized to display antigen binding domains expressed from a repertoire or combinatorial antibody library (e.g., human or murine). Phage expressing an antigen binding domain that binds the antigen of interest can be selected or identified with antigen, e.g., using labeled antigen or antigen bound or captured to a solid surface or bead. Phage used in these methods are typically filamentous phage including fd and M13 binding domains expressed from phage with Fab, Fv or disulfide stabilized Fv antibody domains recombinantly fused to either the phage gene III or gene VIII protein. Examples of phage display methods that can be used to make the antibodies of the present invention include those disclosed in Brinkman et al., J. Imnunol. Methods 182:41-50 (1995); Ames et al., J. Immunol. Methods 184:177-186 (1995); Kettleborough et al., Eur. J. Immunol. 24:952-958 (1994); Persic et al., Gene 187 9-18 (1997); Burton et al., Advances in Immunology 57:191-280 (1994); PCT application No. PCT/GB91/01134; PCT publications WO 90/02809; WO 91/10737; WO 92/01047; WO 92/18619; WO 93/11236; WO 95/15982; WO 95/20401; and U.S. Pat. Nos. 5,698,426; 5,223,409; 5,403,484; 5,580,717; 5,427,908; 5,750,753; 5,821,047; 5,571,698; 5,427,908; 5,516,637; 5,780,225; 5,658,727; 5,733,743 and 5,969,108; each of which is incorporated herein by reference in its entirety.

[0274] As described in the above references, after phage selection, the antibody coding regions from the phage can be isolated and used to generate whole antibodies, including human antibodies, or any other desired antigen binding fragment, and expressed in any desired host, including mammalian cells, insect cells, plant cells, yeast, and bacteria, e.g., as described in detail below. For example, techniques to recombinantly produce Fab, Fab′ and F(ab′)2 fragments can also be employed using methods known in the art such as those disclosed in PCT publication WO 92/22324; Mullinax et al., BioTechniques 12(6):864-869 (1992); and Sawai et al., AJRI 34:26-34 (1995); and Better et al., Science 240:1041-1043 (1988) (said references incorporated by reference in their entireties).

[0275] Examples of techniques which can be used to produce single-chain Fvs and antibodies include those described in U.S. Patents 4,946,778 and 5,258,498; Huston et al., Methods in Enzymology 203:46-88 (1991); Shu et al., PNAS 90:7995-7999 (1993); and Skerra et al., Science 240:1038-1040 (1988). For some uses, including in vivo use of antibodies in humans and in vitro detection assays, it may be preferable to use chimeric, humanized, or human antibodies. A chimeric antibody is a molecule in which different portions of the antibody are derived from different animal species, such as antibodies having a variable region derived from a murine monoclonal antibody and a human immunoglobulin constant region. Methods for producing chimeric antibodies are known in the art. See e.g., Morrison, Science 229:1202 (1985); Oi et al., BioTechniques 4:214 (1986); Gillies et al., (1989) J. Immunol. Methods 125:191-202; U.S. Pat. Nos. 5,807,715; 4,816,567; and 4,816397, which are incorporated herein by reference in their entirety. Humanized antibodies are antibody molecules from non-human species antibody that binds the desired antigen having one or more complementarity determining regions (CDRs) from the non-human species and a framework regions from a human immunoglobulin molecule. Often, framework residues in the human framework regions will be substituted with the corresponding residue from the CDR donor antibody to alter, preferably improve, antigen binding. These framework substitutions are identified by methods well known in the art, e.g., by modeling of the interactions of the CDR and framework residues to identify framework residues important for antigen binding and sequence comparison to identify unusual framework residues at particular positions. (See, e.g., Queen et al., U.S. Pat. No. 5,585,089; Riechmann et al., Nature 332:323 (1988), which are incorporated herein by reference in their entireties.) Antibodies can be humanized using a variety of techniques known in the art including, for example, CDR-grafting (EP 239,400; PCT publication WO 91/09967; U.S. Pat. Nos. 5,225,539; 5,530,101; and 5,585,089), veneering or resurfacing (EP 592,106; EP 519,596; Padlan, Molecular Immunology 28(4/5):489-498 (1991); Studnicka et al., Protein Engineering 7(6):805-814 (1994); Roguska. et al., PNAS 91:969-973 (1994)), and chain shuffling (U.S. Pat. No. 5,565,332).

[0276] Completely human antibodies are particularly desirable for therapeutic treatment of human patients. Human antibodies can be made by a variety of methods known in the art including phage display methods described above using antibody libraries derived from human immunoglobulin sequences. See also, U.S. Pat. Nos. 4,444,887 and 4,716,111; and PCT publications WO 98/46645, WO 98/50433, WO 98/24893, WO 98/16654, WO 96/34096, WO 96/33735, and WO 91/10741; each of which is incorporated herein by reference in its entirety.

[0277] Human antibodies can also be produced using transgenic mice which are incapable of expressing functional endogenous immunoglobulins, but which can express human immunoglobulin genes. For example, the human heavy and light chain immunoglobulin gene complexes may be introduced randomly or by homologous recombination into mouse embryonic stem cells. Alternatively, the human variable region, constant region, and diversity region may be introduced into mouse embryonic stem cells in addition to the human heavy and light chain genes. The mouse heavy and light chain immunoglobulin genes may be rendered non-functional separately or simultaneously with the introduction of human immunoglobulin loci by homologous recombination. In particular, homozygous deletion of the JH region prevents endogenous antibody production. The modified embryonic stem cells are expanded and microinjected into blastocysts to produce chimeric mice. The chimeric mice are then bred to produce homozygous offspring which express human antibodies. The transgenic mice are immunized in the normal fashion with a selected antigen, e.g., all or a portion of a polypeptide of the invention. Monoclonal antibodies directed against the antigen can be obtained from the immunized, transgenic mice using conventional hybridoma technology. The human immunoglobulin transgenes harbored by the transgenic mice rearrange during B cell differentiation, and subsequently undergo class switching and somatic mutation. Thus, using such a technique, it is possible to produce therapeutically useful IgG, IgA, IgM and IgE antibodies. For an overview of this technology for producing human antibodies, see Lonberg and Huszar, Int. Rev. Immunol. 13:65-93 (1995). For a detailed discussion of this technology for producing human antibodies and human monoclonal antibodies and protocols for producing such antibodies, see, e.g., PCT publications WO 98/24893; WO 92/01047; WO 96/34096; WO 96/33735; European Patent No. 0 598 877; U.S. Pat. Nos. 5,413,923; 5,625,126; 5,633,425; 5,569,825; 5,661,016; 5,545,806; 5,814,318; 5,885,793; 5,916,771; 5,939,598; 6,075,181 and 6,114,598, which are incorporated by reference herein in their entirety. In addition, companies such as Abgenix, Inc. (Freemont, Calif.) and Genpharm (San Jose, Calif.) can be engaged to provide human antibodies directed against a selected antigen using technology similar to that described above.

[0278] Completely human antibodies which recognize a selected epitope can be generated using a technique referred to as “guided selection.” In this approach a selected non-human monoclonal antibody, e.g., a mouse antibody, is used to guide the selection of a completely human antibody recognizing the same epitope. (Jespers et al., Bio/technology 12:899-903 (1988)).

[0279] Further, antibodies to the polypeptides of the invention can, in turn, be utilized to generate anti-idiotype antibodies that “mimic” polypeptides of the invention using techniques well known to those skilled in the art. (See, e.g., Greenspan & Bona, FASEB J. 7(5):437-444; (1989) and Nissinoff, J. Immunol. 147(8):2429-2438 (1991)). For example, antibodies which bind to and competitively inhibit polypeptide multimerization and/or binding of a polypeptide of the invention to a ligand can be used to generate anti-idiotypes that “mimic” the polypeptide multimerization and/or binding domain and, as a consequence, bind to and neutralize polypeptide and/or its ligand. Such neutralizing anti-idiotypes or Fab fragments of such anti-idiotypes can be used in therapeutic regimens to neutralize polypeptide ligand/receptor. For example, such anti-idiotypic antibodies can be used to bind a polypeptide of the invention and/or to bind its ligand(s)/receptor(s), and thereby block its biological activity. Alternatively, antibodies which bind to and enhance polypeptide multimerization and/or binding, and/or receptor/ligand multimerization, binding and/or signaling can be used to generate anti-idiotypes that function as agonists of a polypeptide of the invention and/or its ligand/receptor. Such agonistic anti-idiotypes or Fab fragments of such anti-idiotypes can be used in therapeutic regimens as agonists of the polypeptides of the invention or its ligand(s)/receptor(s). For example, such anti-idiotypic antibodies can be used to bind a polypeptide of the invention and/or to bind its ligand(s)/receptor(s), and thereby promote or enhance its biological activity.

[0280] Intrabodies of the invention can be produced using methods known in the art, such as those disclosed and reviewed in Chen et al., Hum. Gene Ther. 5:595-601 (1994); Marasco, W. A., Gene Ther. 4:11-15 (1997); Rondon and Marasco, Annu. Rev. Microbiol. 51:257-283 (1997); Proba et al., J. Mol. Biol. 275:245-253 (1998); Cohen et al., Oncogene 17:2445-2456 (1998); Ohage and Steipe, J. Mol. Biol. 291:1119-1128 (1999); Ohage et al., J. Mol. Biol. 291:1129-1134 (1999); Wirtz and Steipe, Protein Sci. 8:2245-2250 (1999); Zhu et al., J. Immunol. Methods 231:207-222 (1999); and references cited therein.

[0281] Polynucleotides Encoding Antibodies

[0282] The invention further provides polynucleotides comprising a nucleotide sequence encoding an antibody of the invention and fragments thereof. The invention also encompasses polynucleotides that hybridize under stringent or alternatively, under lower stringency hybridization conditions, e.g., as defined supra, to polynucleotides that encode an antibody, preferably, that specifically binds to a polypeptide of the invention, preferably, an antibody that binds to a polypeptide having the amino acid sequence of SEQ ID NO: Y, to a polypeptide encoded by a portion of SEQ ID NO: X as defined in columns 8 and 9 of Table 2, and/or to a polypeptide encoded by the cDNA contained in Clone ID NO: Z.

[0283] The polynucleotides may be obtained, and the nucleotide sequence of the polynucleotides determined, by any method known in the art. For example, if the nucleotide sequence of the antibody is known, a polynucleotide encoding the antibody may be assembled from chemically synthesized oligonucleotides (e.g., as described in Kutmeier et al., BioTechniques 17:242 (1994)), which, briefly, involves the synthesis of overlapping oligonucleotides containing portions of the sequence encoding the antibody, annealing and ligating of those oligonucleotides, and then amplification of the ligated oligonucleotides by PCR.

[0284] Alternatively, a polynucleotide encoding an antibody may be generated from nucleic acid from a suitable source. If a clone containing a nucleic acid encoding a particular antibody is not available, but the sequence of the antibody molecule is known, a nucleic acid encoding the immunoglobulin may be chemically synthesized or obtained from a suitable source (e.g., an antibody cDNA library, or a cDNA library generated from, or nucleic acid, preferably poly A+ RNA, isolated from, any tissue or cells expressing the antibody, such as hybridoma cells selected to express an antibody of the invention) by PCR amplification using synthetic primers hybridizable to the 3′ and 5′ ends of the sequence or by cloning using an oligonucleotide probe specific for the particular gene sequence to identify, e.g., a cDNA clone from a cDNA library that encodes the antibody. Amplified nucleic acids generated by PCR may then be cloned into replicable cloning vectors using any method well known in the art.

[0285] Once the nucleotide sequence and corresponding amino acid sequence of the antibody is determined, the nucleotide sequence of the antibody may be manipulated using methods well known in the art for the manipulation of nucleotide sequences, e.g., recombinant DNA techniques, site directed mutagenesis, PCR, etc. (see, for example, the techniques described in Sambrook et al., 1990, Molecular Cloning, A Laboratory Manual, 2d Ed., Cold Spring Harbor Laboratory, Cold Spring Harbor, N.Y. and Ausubel et al., eds., 1998, Current Protocols in Molecular Biology, John Wiley & Sons, NY, which are both incorporated by reference herein in their entireties ), to generate antibodies having a different amino acid sequence, for example to create amino acid substitutions, deletions, and/or insertions.

[0286] In a specific embodiment, the amino acid sequence of the heavy and/or light chain variable domains may be inspected to identify the sequences of the complementarity determining regions (CDRs) by methods that are well know in the art, e.g., by comparison to known amino acid sequences of other heavy and light chain variable regions to determine the regions of sequence hypervariability. Using routine recombinant DNA techniques, one or more of the CDRs may be inserted within framework regions, e.g., into human framework regions to humanize a non-human antibody, as described supra. The framework regions may be naturally occurring or consensus framework regions, and preferably human framework regions (see, e.g., Chothia et al., J. Mol. Biol. 278: 457-479 (1998) for a listing of human framework regions). Preferably, the polynucleotide generated by the combination of the framework regions and CDRs encodes an antibody that specifically binds a polypeptide of the invention. Preferably, as discussed supra, one or more amino acid substitutions may be made within the framework regions, and, preferably, the amino acid substitutions improve binding of the antibody to its antigen. Additionally, such methods may be used to make amino acid substitutions or deletions of one or more variable region cysteine residues participating in an intrachain disulfide bond to generate antibody molecules lacking one or more intrachain disulfide bonds. Other alterations to the polynucleotide are encompassed by the present invention and within the skill of the art.

[0287] In addition, techniques developed for the production of “chimeric antibodies” (Morrison et al., Proc. Natl. Acad. Sci. 81:851-855 (1984); Neuberger et al., Nature 312:604-608 (1984); Takeda et al., Nature 314:452-454 (1985)) by splicing genes from a mouse antibody molecule of appropriate antigen specificity together with genes from a human antibody molecule of appropriate biological activity can be used. As described supra, a chimeric antibody is a molecule in which different portions are derived from different animal species, such as those having a variable region derived from a murine mAb and a human immunoglobulin constant region, e.g., humanized antibodies.

[0288] Alternatively, techniques described for the production of single chain antibodies (U.S. Pat. No. 4,946,778; Bird, Science 242:423-42 (1988); Huston et al., Proc. Natl. Acad. Sci. USA 85:5879-5883 (1988); and Ward et al., Nature 334:544-54 (1989)) can be adapted to produce single chain antibodies. Single chain antibodies are formed by linking the heavy and light chain fragments of the Fv region via an amino acid bridge, resulting in a single chain polypeptide. Techniques for the assembly of functional Fv fragments in E. coli may also be used (Skerra et al., Science 242:1038-1041 (1988)).

[0289] Methods of Producing Antibodies

[0290] The antibodies of the invention can be produced by any method known in the art for the synthesis of antibodies, in particular, by chemical synthesis or preferably, by recombinant expression techniques. Methods of producing antibodies include, but are not limited to, hybridoma technology, EBV transformation, and other methods discussed herein as well as through the use recombinant DNA technology, as discussed below.

[0291] Recombinant expression of an antibody of the invention, or fragment, derivative or analog thereof, (e.g., a heavy or light chain of an antibody of the invention or a single chain antibody of the invention), requires construction of an expression vector containing a polynucleotide that encodes the antibody. Once a polynucleotide encoding an antibody molecule or a heavy or light chain of an antibody, or portion thereof (preferably containing the heavy or light chain variable domain), of the invention has been obtained, the vector for the production of the antibody molecule may be produced by recombinant DNA technology using techniques well known in the art. Thus, methods for preparing a protein by expressing a polynucleotide containing an antibody encoding nucleotide sequence are described herein. Methods which are well known to those skilled in the art can be used to construct expression vectors containing antibody coding sequences and appropriate transcriptional and translational control signals. These methods include, for example, in vitro recombinant DNA techniques, synthetic techniques, and in vivo genetic recombination. The invention, thus, provides replicable vectors comprising a nucleotide sequence encoding an antibody molecule of the invention, or a heavy or light chain thereof, or a heavy or light chain variable domain, operably linked to a promoter. Such vectors may include the nucleotide sequence encoding the constant region of the antibody molecule (see, e.g., PCT Publication WO 86/05807; PCT Publication WO 89/01036; and U.S. Pat. No. 5,122,464) and the variable domain of the antibody may be cloned into such a vector for expression of the entire heavy or light chain.

[0292] The expression vector is transferred to a host cell by conventional techniques and the transfected cells are then cultured by conventional techniques to produce an antibody of the invention. Thus, the invention includes host cells containing a polynucleotide encoding an antibody of the invention, or a heavy or light chain thereof, or a single chain antibody of the invention, operably linked to a heterologous promoter. In preferred embodiments for the expression of double-chained antibodies, vectors encoding both the heavy and light chains may be co-expressed in the host cell for expression of the entire immunoglobulin molecule, as detailed below.

[0293] A variety of host-expression vector systems may be utilized to express the antibody molecules of the invention. Such host-expression systems represent vehicles by which the coding sequences of interest may be produced and subsequently purified, but also represent cells which may, when transformed or transfected with the appropriate nucleotide coding sequences, express an antibody molecule of the invention in situ. These include but are not limited to microorganisms such as bacteria (e.g., E. coli, B. subtilis) transformed with recombinant bacteriophage DNA, plasmid DNA or cosmid DNA expression vectors containing antibody coding sequences; yeast (e.g., Saccharomyces, Pichia) transformed with recombinant yeast expression vectors containing antibody coding sequences; insect cell systems infected with recombinant virus expression vectors (e.g., baculovirus) containing antibody coding sequences; plant cell systems infected with recombinant virus expression vectors (e.g., cauliflower mosaic virus, CaMV; tobacco mosaic virus, TMV) or transformed with recombinant plasmid expression vectors (e.g., Ti plasmid) containing antibody coding sequences; or mammalian cell systems (e.g., COS, CHO, BHK, 293, 3T3 cells) harboring recombinant expression constructs containing promoters derived from the genome of mammalian cells (e.g., metallothionein promoter) or from mammalian viruses (e.g., the adenovirus late promoter; the vaccinia virus 7.5K promoter). Preferably, bacterial cells such as Escherichia coli, and more preferably, eukaryotic cells, especially for the expression of whole recombinant antibody molecule, are used for the expression of a recombinant antibody molecule. For example, mammalian cells such as Chinese hamster ovary cells (CHO), in conjunction with a vector such as the major intermediate early gene promoter element from human cytomegalovirus is an effective expression system for antibodies (Foecking et al., Gene 45:101 (1986); Cockett et al., Bio/Technology 8:2 (1990)).

[0294] In bacterial systems, a number of expression vectors may be advantageously selected depending upon the use intended for the antibody molecule being expressed. For example, when a large quantity of such a protein is to be produced, for the generation of pharmaceutical compositions of an antibody molecule, vectors which direct the expression of high levels of fusion protein products that are readily purified may be desirable. Such vectors include, but are not limited, to the E. coli expression vector pUR278 (Ruther et al., EMBO J. 2:1791 (1983)), in which the antibody coding sequence may be ligated individually into the vector in frame with the lac Z coding region so that a fusion protein is produced; pIN vectors (Inouye & Inouye, Nucleic Acids Res. 13:3101-3109 (1985); Van Heeke & Schuster, J. Biol. Chem. 24:5503-5509 (1989)); and the like. pGEX vectors may also be used to express foreign polypeptides as fusion proteins with glutathione S-transferase (GST). In general, such fusion proteins are soluble and can easily be purified from lysed cells by adsorption and binding to matrix glutathione-agarose beads followed by elution in the presence of free glutathione. The pGEX vectors are designed to include thrombin or factor Xa protease cleavage sites so that the cloned target gene product can be released from the GST moiety.

[0295] In an insect system, Autographa californica nuclear polyhedrosis virus (AcNPV) is used as a vector to express foreign genes. The virus grows in Spodoptera frugiperda cells. The antibody coding sequence may be cloned individually into non-essential regions (for example the polyhedrin gene) of the virus and placed under control of an AcNPV promoter (for example the polyhedrin promoter).

[0296] In mammalian host cells, a number of viral-based expression systems may be utilized. In cases where an adenovirus is used as an expression vector, the antibody coding sequence of interest may be ligated to an adenovirus transcription/translation control complex, e.g., the late promoter and tripartite leader sequence. This chimeric gene may then be inserted in the adenovirus genome by in vitro or in vivo recombination. Insertion in a non- essential region of the viral genome (e.g., region E1 or E3) will result in a recombinant virus that is viable and capable of expressing the antibody molecule in infected hosts. (e.g., see Logan & Shenk, Proc. Natl. Acad. Sci. USA 81:355-359 (1984)). Specific initiation signals may also be required for efficient translation of inserted antibody coding sequences. These signals include the ATG initiation codon and adjacent sequences. Furthermore, the initiation codon must be in phase with the reading frame of the desired coding sequence to ensure translation of the entire insert. These exogenous translational control signals and initiation codons can be of a variety of origins, both natural and synthetic. The efficiency of expression may be enhanced by the inclusion of appropriate transcription enhancer elements, transcription terminators, etc. (see Bittner et al., Methods in Enzymol. 153:51-544 (1987)).

[0297] In addition, a host cell strain may be chosen which modulates the expression of the inserted sequences, or modifies and processes the gene product in the specific fashion desired. Such modifications (e.g., glycosylation) and processing (e.g., cleavage) of protein products may be important for the function of the protein. Different host cells have characteristic and specific mechanisms for the post-translational processing and modification of proteins and gene products. Appropriate cell lines or host systems can be chosen to ensure the correct modification and processing of the foreign protein expressed. To this end, eukaryotic host cells which possess the cellular machinery for proper processing of the primary transcript, glycosylation, and phosphorylation of the gene product may be used. Such mammalian host cells include but are not limited to CHO, VERY, BHK, Hela, COS, MDCK, 293, 3T3, W138, and in particular, breast cancer cell lines such as, for example, BT483, Hs578T, HTB2, BT20 and T47D, and normal mammary gland cell line such as, for example, CRL7030 and Hs578Bst.

[0298] For long-term, high-yield production of recombinant proteins, stable expression is preferred. For example, cell lines which stably express the antibody molecule may be engineered. Rather than using expression vectors which contain viral origins of replication, host cells can be transformed with DNA controlled by appropriate expression control elements (e.g., promoter, enhancer, sequences, transcription terminators, polyadenylation sites, etc.), and a selectable marker. Following the introduction of the foreign DNA, engineered cells may be allowed to grow for 1-2 days in an enriched media, and then are switched to a selective media. The selectable marker in the recombinant plasmid confers resistance to the selection and allows cells to stably integrate the plasmid into their chromosomes and grow to form foci which in turn can be cloned and expanded into cell lines. This method may advantageously be used to engineer cell lines which express the antibody molecule. Such engineered cell lines may be particularly useful in screening and evaluation of compounds that interact directly or indirectly with the antibody molecule.

[0299] A number of selection systems may be used, including but not limited to the herpes simplex virus thymidine kinase (Wigler et al., Cell 11:223 (1977)), hypoxanthine-guanine phosphoribosyltransferase (Szybalska & Szybalski, Proc. Natl. Acad. Sci. USA 48:202 (1992)), and adenine phosphoribosyltransferase (Lowy et al., Cell 22:817 (1980)) genes can be employed in tk-, hgprt- or aprt- cells, respectively. Also, antimetabolite resistance can be used as the basis of selection for the following genes: dhfr, which confers resistance to methotrexate (Wigler et al., Natl. Acad. Sci. USA 77:357 (1980); O'Hare et al., Proc. Natl. Acad. Sci. USA 78:1527 (1981)); gpt, which confers resistance to mycophenolic acid (Mulligan & Berg, Proc. Natl. Acad. Sci. USA 78:2072 (1981)); neo, which confers resistance to the aminoglycoside G-418 Clinical Pharmacy 12:488-505; Wu and Wu, Biotherapy 3:87-95 (1991); Tolstoshev, Ann. Rev. Pharmacol. Toxicol. 32:573-596 (1993); Mulligan, Science 260:926-932 (1993); and Morgan and Anderson, Ann. Rev. Biochem. 62:191-217 (1993); TIB TECH 11(5):155-215 (1993)); and hygro, which confers resistance to hygromycin (Santerre et al., Gene 30:147 (1984)). Methods commonly known in the art of recombinant DNA technology may be routinely applied to select the desired recombinant clone, and such methods are described, for example, in Ausubel et al. (eds.), Current Protocols in Molecular Biology, John Wiley & Sons, NY (1993); Kriegler, Gene Transfer and Expression, A Laboratory Manual, Stockton Press, NY (1990); and in Chapters 12 and 13, Dracopoli et al. (eds), Current Protocols in Human Genetics, John Wiley & Sons, NY (1994); Colberre-Garapin et al., J. Mol. Biol. 150:1 (1981), which are incorporated by reference herein in their entireties.

[0300] The expression levels of an antibody molecule can be increased by vector amplification (for a review, see Bebbington and Hentschel, The use of vectors based on gene amplification for the expression of cloned genes in mammalian cells in DNA cloning, Vol.3. (Academic Press, New York, 1987)). When a marker in the vector system expressing antibody is amplifiable, increase in the level of inhibitor present in culture of host cell will increase the number of copies of the marker gene. Since the amplified region is associated with the antibody gene, production of the antibody will also increase (Crouse et al., Mol. Cell. Biol. 3:257 (1983)).

[0301] Vectors which use glutamine synthase (GS) or DHFR as the selectable markers can be amplified in the presence of the drugs methionine sulphoximine or methotrexate, respectively. An advantage of glutamine synthase based vectors are the availabilty of cell lines (e.g., the murine myeloma cell line, NSO) which are glutamine synthase negative. Glutamine synthase expression systems can also function in glutamine synthase expressing cells (e.g., Chinese Hamster Ovary (CHO) cells) by providing additional inhibitor to prevent the functioning of the endogenous gene. A glutamine synthase expression system and components thereof are detailed in PCT publications: WO87/04462; WO86/05807; WO89/01036; WO89/10404; and WO91/06657 which are incorporated in their entireties by reference herein. Additionally, glutamine synthase expression vectors that may be used according to the present invention are commercially available from suplliers, including, for example Lonza Biologics, Inc. (Portsmouth, N.H.). Expression and production of monoclonal antibodies using a GS expression system in murine myeloma cells is described in Bebbington et al., Bio/technology 10:169(1992) and in Biblia and Robinson Biotechnol. Prog. 11:1 (1995) which are incorporated in their entirities by reference herein.

[0302] The host cell may be co-transfected with two expression vectors of the invention, the first vector encoding a heavy chain derived polypeptide and the second vector encoding a light chain derived polypeptide. The two vectors may contain identical selectable markers which enable equal expression of heavy and light chain polypeptides. Alternatively, a single vector may be used which encodes, and is capable of expressing, both heavy and light chain polypeptides. In such situations, the light chain should be placed before the heavy chain to avoid an excess of toxic free heavy chain (Proudfoot, Nature 322:52 (1986); Kohler, Proc. Natl. Acad. Sci. USA 77:2197 (1980)). The coding sequences for the heavy and light chains may comprise cDNA or genomic DNA.

[0303] Once an antibody molecule of the invention has been produced by an animal, chemically synthesized, or recombinantly expressed, it may be purified by any method known in the art for purification of an immunoglobulin molecule, for example, by chromatography (e.g., ion exchange, affinity, particularly by affinity for the specific antigen after Protein A, and sizing column chromatography), centrifugation, differential solubility, or by any other standard technique for the purification of proteins. In addition, the antibodies of the present invention or fragments thereof can be fused to heterologous polypeptide sequences described herein or otherwise known in the art, to facilitate purification.

[0304] The present invention encompasses antibodies recombinantly fused or chemically conjugated (including both covalently and non-covalently conjugations) to a polypeptide (or portion thereof, preferably at least 10, 20, 30, 40, 50, 60, 70, 80, 90 or 100 amino acids of the polypeptide) of the present invention to generate fusion proteins. The fusion does not necessarily need to be direct, but may occur through linker sequences. The antibodies may be specific for antigens other than polypeptides (or portion thereof, preferably at least 10, 20, 30, 40, 50, 60, 70, 80, 90 or 100 amino acids of the polypeptide) of the present invention. For example, antibodies may be used to target the polypeptides of the present invention to particular cell types, either in vitro or in vivo, by fusing or conjugating the polypeptides of the present invention to antibodies specific for particular cell surface receptors. Antibodies fused or conjugated to the polypeptides of the present invention may also be used in in vitro immunoassays and purification methods using methods known in the art. See e.g., Harbor et al., supra, and PCT publication WO 93/21232; EP 439,095; Naramura et al., Immunol. Lett. 39:91-99 (1994); U.S. Pat. No. 5,474,981; Gillies et al., PNAS 89:1428-1432 (1992); Fell et al., J. Immunol. 146:2446-2452 (1991), which are incorporated by reference in their entireties.

[0305] The present invention further includes compositions comprising the polypeptides of the present invention fused or conjugated to antibody domains other than the variable regions. For example, the polypeptides of the present invention may be fused or conjugated to an antibody Fc region, or portion thereof. The antibody portion fused to a polypeptide of the present invention may comprise the constant region, hinge region, CH1 domain, CH2 domain, and CH3 domain or any combination of whole domains or portions thereof. The polypeptides may also be fused or conjugated to the above antibody portions to form multimers. For example, Fe portions fused to the polypeptides of the present invention can form dimers through disulfide bonding between the Fe portions. Higher multimeric forms can be made by fusing the polypeptides to portions of IgA and IgM. Methods for fusing or conjugating the polypeptides of the present invention to antibody portions are known in the art. See, e.g., U.S. Pat. Nos. 5,336,603; 5,622,929; 5,359,046; 5,349,053; 5,447,851; 5,112,946; EP 307,434; EP 367,166; PCT publications WO 96/04388; WO 91/06570; Ashkenazi et al., Proc. Natl. Acad. Sci. USA 88:10535-10539 (1991); Zheng et al., J. Immunol. 154:5590-5600 (1995); and Vil et al., Proc. Natl. Acad. Sci. USA 89:11337-11341 (1992) (said references incorporated by reference in their entireties).

[0306] As discussed, supra, the polypeptides corresponding to a polypeptide, polypeptide fragment, or a variant of SEQ ID NO: Y may be fused or conjugated to the above antibody portions to increase the in vivo half life of the polypeptides or for use in immunoassays using methods known in the art. Further, the polypeptides corresponding to SEQ ID NO: Y may be fused or conjugated to the above antibody portions to facilitate purification. One reported example describes chimeric proteins consisting of the first two domains of the human CD4-polypeptide and various domains of the constant regions of the heavy or light chains of mammalian immunoglobulins. See EP 394,827; Traunecker et al., Nature 331:84-86 (1988). The polypeptides of the present invention fused or conjugated to an antibody having disulfide-linked dimeric structures (due to the IgG) may also be more efficient in binding and neutralizing other molecules, than the monomeric secreted protein or protein fragment alone. See, for example, Fountoulakis et al., J. Biochem. 270:3958-3964 (1995). In many cases, the Fc part in a fusion protein is beneficial in therapy and diagnosis, and thus can result in, for example, improved pharmacokinetic properties. See, for example, EP A 232,262. Alternatively, deleting the Fc part after the fusion protein has been expressed, detected, and purified, would be desired. For example, the Fc portion may hinder therapy and diagnosis if the fusion protein is used as an antigen for immunizations. In drug discovery, for example, human proteins, such as hIL-5, have been fused with Fc portions for the purpose of high-throughput screening assays to identify antagonists of hIL-5. (See, Bennett et al., J. Molecular Recognition 8:52-58 (1995); Johanson et al., J. Biol. Chem. 270:9459-9471 (1995)).

[0307] Moreover, the antibodies or fragments thereof of the present invention can be fused to marker sequences, such as a peptide to facilitate purification. In preferred embodiments, the marker amino acid sequence is a hexa-histidine peptide, such as the tag provided in a pQE vector (QIAGEN, Inc., 9259 Eton Avenue, Chatsworth, Calif., 91311), among others, many of which are commercially available. As described in Gentz et al., Proc. Natl. Acad. Sci. USA 86:821-824 (1989), for instance, hexa-histidine provides for convenient purification of the fusion protein. Other peptide tags useful for purification include, but are not limited to, the “HA” tag, which corresponds to an epitope derived from the influenza hemagglutinin protein (Wilson et al., Cell 37:767 (1984)) and the “flag” tag.

[0308] The present invention further encompasses antibodies or fragments thereof conjugated to a diagnostic or therapeutic agent. The antibodies can be used diagnostically to, for example, monitor the development or progression of a tumor as part of a clinical testing procedure to, e.g., determine the efficacy of a given treatment regimen. Detection can be facilitated by coupling the antibody to a detectable substance. Examples of detectable substances include various enzymes, prosthetic groups, fluorescent materials, luminescent materials, bioluminescent materials, radioactive materials, positron emitting metals using various positron emission tomographies, and nonradioactive paramagnetic metal ions. The detectable substance may be coupled or conjugated either directly to the antibody (or fragment thereof) or indirectly, through an intermediate (such as, for example, a linker known in the art) using techniques known in the art. See, for example, U.S. Pat. No. 4,741,900 for metal ions which can be conjugated to antibodies for use as diagnostics according to the present invention.

[0309] Further, an antibody or fragment thereof may be conjugated to a therapeutic moiety such as a cytotoxin, e.g., a cytostatic or cytocidal agent, a therapeutic agent or a radioactive metal ion, e.g., alpha-emitters such as, for example, 213Bi. A cytotoxin or cytotoxic agent includes any agent that is detrimental to cells. Examples include paclitaxol, cytochalasin B, gramicidin D, ethidium bromide, emetine, mitomycin, etoposide, tenoposide, vincristine, vinblastine, colchicin, doxorubicin, daunorubicin, dihydroxy anthracin dione, mitoxantrone, mithramycin, actinomycin D, 1-dehydrotestosterone, glucocorticoids, procaine, tetracaine, lidocaine, propranolol, and puromycin and analogs or homologs thereof. Therapeutic agents include, but are not limited to, antimetabolites (e.g., methotrexate, 6-mercaptopurine, 6-thioguanine, cytarabine, 5-fluorouracil decarbazine), alkylating agents (e.g., mechlorethamine, thioepa chlorambucil, melphalan, carmustine (BSNU) and lomustine (CCNU), cyclothosphamide, busulfan, dibromomannitol, streptozotocin, mitomycin C, and cis- dichlorodiamine platinum (II) (DDP) cisplatin), anthracyclines (e.g., daunorubicin (formerly daunomycin) and doxorubicin), antibiotics (e.g., dactinomycin (formerly actinomycin), bleomycin, mithramycin, and anthramycin (AMC)), and anti-mitotic agents (e.g., vincristine and vinblastine).

[0310] The conjugates of the invention can be used for modifying a given biological response, the therapeutic agent or drug moiety is not to be construed as limited to classical chemical therapeutic agents. For example, the drug moiety may be a protein or polypeptide possessing a desired biological activity. Such proteins may include, for example, a toxin such as abrin, ricin A, pseudomonas exotoxin, or diphtheria toxin; a protein such as tumor necrosis factor, α-interferon, δ-interferon, nerve growth factor, platelet derived growth factor, tissue plasminogen activator, an apoptotic agent, e.g., TNF-alpha, TNF-beta, AIM I (See, International Publication No. WO 97/33899), AIM II (See, International Publication No. WO 97/34911), Fas Ligand (Takahashi et al., Int. Immunol., 6:1567-1574 (1994)), VEGI (See, International Publication No. WO 99/23105), a thrombotic agent or an anti- angiogenic agent, e.g., angiostatin or endostatin; or, biological response modifiers such as, for example, lymphokines, interleukin-1 (“IL-1”), interleukin-2 (“IL-2”), interleukin-6 (“IL-6”), granulocyte macrophage colony stimulating factor (“GM-CSF”), granulocyte colony stimulating factor (“G-CSF”), or other growth factors.

[0311] Antibodies may also be attached to solid supports, which are particularly useful for immunoassays or purification of the target antigen. Such solid supports include, but are not limited to, glass, cellulose, polyacrylamide, nylon, polystyrene, polyvinyl chloride or polypropylene.

[0312] Techniques for conjugating such therapeutic moiety to antibodies are well known. See, for example., Arnon et al., “Monoclonal Antibodies For Immunotargeting Of Drugs In Cancer Therapy”, in Monoclonal Antibodies And Cancer Therapy, Reisfeld et al. (eds.), pp. 243-56 (Alan R. Liss, Inc. 1985); Hellstrom et al., “Antibodies For Drug Delivery”, in Controlled Drug Delivery (2nd Ed.), Robinson et al. (eds.), pp. 623-53 (Marcel Dekker, Inc. 1987); Thorpe, “Antibody Carriers Of Cytotoxic Agents In Cancer Therapy: A Review”, in Monoclonal Antibodies '84: Biological And Clinical Applications, Pinchera et al. (eds.), pp. 475-506 (1985); “Analysis, Results, And Future Prospective Of The Therapeutic Use Of Radiolabeled Antibody In Cancer Therapy”, in Monoclonal Antibodies For Cancer Detection And Therapy, Baldwin et al. (eds.), pp. 303-16 (Academic Press 1985), and Thorpe et al., “The Preparation And Cytotoxic Properties Of Antibody-Toxin Conjugates”, Immunol. Rev. 62:119-58 (1982).

[0313] Alternatively, an antibody can be conjugated to a second antibody to form an antibody heteroconjugate as described by Segal in U.S. Pat. No. 4,676,980, which is incorporated herein by reference in its entirety.

[0314] An antibody, with or without a therapeutic moiety conjugated to it, administered alone or in combination with cytotoxic factor(s) and/or cytokine(s) can be used as a therapeutic.

[0315] Immunophenotyping

[0316] The antibodies of the invention may be utilized for immunophenotyping of cell lines and biological samples. Translation products of the genes of the present invention may be useful as cell specific markers, or more specifically as cellular markers that are differentially expressed at various stages of differentiation and/or maturation of particular cell types. Monoclonal antibodies directed against a specific epitope, or combination of epitopes, will allow for the screening of cellular populations expressing the marker. Various techniques can be utilized using monoclonal antibodies to screen for cellular populations expressing the marker(s), and include magnetic separation using antibody-coated magnetic beads, “panning” with antibody attached to a solid matrix (i.e., plate), and flow cytometry (See, e.g., U.S. Pat. No. 5,985,660; and Morrison et al., Cell, 96:737-49 (1999)).

[0317] These techniques allow for the screening of particular populations of cells, such as might be found with hematological malignancies (i.e. minimal residual disease (MRD) in acute leukemic patients) and “non-self” cells in transplantations to prevent Graft-versus-Host Disease (GVHD). Alternatively, these techniques allow for the screening of hematopoietic stem and progenitor cells capable of undergoing proliferation and/or differentiation, as might be found in human umbilical cord blood.

[0318] Assays For Antibody Binding

[0319] The antibodies of the invention may be assayed for immunospecific binding by any method known in the art. The immunoassays which can be used include but are not limited to competitive and non-competitive assay systems using techniques such as western blots, radioimmunoassays, ELISA (enzyme linked immunosorbent assay), “sandwich” immunoassays, immunoprecipitation assays, precipitin reactions, gel diffusion precipitin reactions, immunodiffusion assays, agglutination assays, complement-fixation assays, immunoradiometric assays, fluorescent immunoassays, and protein A immunoassays, to name but a few. Such assays are routine and well known in the art (see, e.g., Ausubel et al, eds, 1994, Current Protocols in Molecular Biology, Vol. 1, John Wiley & Sons, Inc., New York, which is incorporated by reference herein in its entirety). Exemplary immunoassays are described briefly below (but are not intended by way of limitation).

[0320] Immunoprecipitation protocols generally comprise lysing a population of cells in a lysis buffer such as RIPA buffer (1% NP-40 or Triton X-100, 1% sodium deoxycholate, 0.1% SDS, 0.15 M NaCl, 0.01 M sodium phosphate at pH 7.2, 1% Trasylol) supplemented with protein phosphatase and/or protease inhibitors (e.g., EDTA, PMSF, aprotinin, sodium vanadate), adding the antibody of interest to the cell lysate, incubating for a period of time (e.g., 1-4 hours) at 4° C., adding protein A and/or protein G sepharose beads to the cell lysate, incubating for about an hour or more at 4° C., washing the beads in lysis buffer and resuspending the beads in SDS/sample buffer. The ability of the antibody of interest to immunoprecipitate a particular antigen can be assessed by, e.g., western blot analysis. One of skill in the art would be knowledgeable as to the parameters that can be modified to increase the binding of the antibody to an antigen and decrease the background (e.g., pre-clearing the cell lysate with sepharose beads). For further discussion regarding immunoprecipitation protocols see, e.g., Ausubel et al., eds., (1994), Current Protocols in Molecular Biology, Vol. 1, John Wiley & Sons, Inc., New York, section 10.16.1.

[0321] Western blot analysis generally comprises preparing protein samples, electrophoresis of the protein samples in a polyacrylamide gel (e.g., 8%-20% SDS-PAGE depending on the molecular weight of the antigen), transferring the protein sample from the polyacrylamide gel to a membrane such as nitrocellulose, PVDF or nylon, blocking the membrane in blocking solution (e.g., PBS with 3% BSA or non-fat milk), washing the membrane in washing buffer (e.g., PBS-Tween 20), blocking the membrane with primary antibody (the antibody of interest) diluted in blocking buffer, washing the membrane in washing buffer, blocking the membrane with a secondary antibody (which recognizes the primary antibody, e.g., an anti-human antibody) conjugated to an enzymatic substrate (e.g., horseradish peroxidase or alkaline phosphatase) or radioactive molecule (e.g., 32P or 125I) diluted in blocking buffer, washing the membrane in wash buffer, and detecting the presence of the antigen. One of skill in the art would be knowledgeable as to the parameters that can be modified to increase the signal detected and to reduce the background noise. For further discussion regarding western blot protocols see, e.g., Ausubel et al., eds., (1994), Current Protocols in Molecular Biology, Vol. 1, John Wiley & Sons, Inc., New York, section 10.8.1.

[0322] ELISAs comprise preparing antigen, coating the well of a 96 well microtiter plate with the antigen, adding the antibody of interest conjugated to a detectable compound such as an enzymatic substrate (e.g., horseradish peroxidase or alkaline phosphatase) to the well and incubating for a period of time, and detecting the presence of the antigen. In ELISAs the antibody of interest does not have to be conjugated to a detectable compound; instead, a second antibody (which recognizes the antibody of interest) conjugated to a detectable compound may be added to the well. Further, instead of coating the well with the antigen, the antibody may be coated to the well. In this case, a second antibody conjugated to a detectable compound may be added following the addition of the antigen of interest to the coated well. One of skill in the art would be knowledgeable as to the parameters that can be modified to increase the signal detected as well as other variations of ELISAs known in the art. For further discussion regarding ELISAs see, e.g., Ausubel et al., eds., (1994), Current Protocols in Molecular Biology, Vol. 1, John Wiley & Sons, Inc., New York, section 11.2.1.

[0323] The binding affinity of an antibody to an antigen and the off-rate of an antibody-antigen interaction can be determined by competitive binding assays. One example of a competitive binding assay is a radioimmunoassay comprising the incubation of labeled antigen (e.g., 3H or 125I) with the antibody of interest in the presence of increasing amounts of unlabeled antigen, and the detection of the antibody bound to the labeled antigen. The affinity of the antibody of interest for a particular antigen and the binding off-rates can be determined from the data by scatchard plot analysis. Competition with a second antibody can also be determined using radioimmunoassays. In this case, the antigen is incubated with antibody of interest conjugated to a labeled compound (e.g., 3H or 125I) in the presence of increasing amounts of an unlabeled second antibody.

[0324] Antibodies of the invention may be characterized using immunocytochemisty methods on cells (e.g., mammalian cells, such as CHO cells) transfected with a vector enabling the expression of a reproductive system antigen or with vector alone using techniques commonly known in the art. Antibodies that bind reproductive system antigen transfected cells, but not vector-only transfected cells, are reproductive system antigen specific.

[0325] Therapeutic Uses

[0326] The present invention is further directed to antibody-based therapies which involve administering antibodies of the invention to an animal, preferably a mammal, and most preferably a human, patient for treating one or more of the disclosed diseases, disorders, or conditions. Therapeutic compounds of the invention include, but are not limited to, antibodies of the invention (including fragments, analogs and derivatives thereof as described herein) and nucleic acids encoding antibodies of the invention (including fragments, analogs and derivatives thereof and anti-idiotypic antibodies as described herein). The antibodies of the invention can be used to treat, inhibit or prevent diseases, disorders or conditions associated with aberrant expression and/or activity of a polypeptide of the invention, including, but not limited to, any one or more of the diseases, disorders, or conditions described herein. The treatment and/or prevention of diseases, disorders, or conditions associated with aberrant expression and/or activity of a polypeptide of the invention includes, but is not limited to, alleviating symptoms associated with those diseases, disorders or conditions. Antibodies of the invention may be provided in pharmaceutically acceptable compositions as known in the art or as described herein.

[0327] In a specific and preferred embodiment, the present invention is directed to antibody-based therapies which involve administering antibodies of the invention to an animal, preferably a mammal, and most preferably a human, patient for treating one or more of the diseases, disorders, or conditions of the reproductive system, including, but not limited to, injuries and trauma, infections, neoplastic disorders, congenital defects, and diseases or disorders which result in infertility, complications with pregnancy, labor, or parturition, postpartum difficulties,and as listed below in the section entitled “Reproductive System Disorders”. Therapeutic compounds of the invention include, but are not limited to, antibodies of the invention (e.g., antibodies directed to the full length protein expressed on the cell surface of a mammalian cell; antibodies directed to an epitope of a reproductive system associated polypeptide of the invention (such as, a linear epitope (shown in Table 1A, column 6) or a conformational epitope), including fragments, analogs and derivatives thereof as described herein) and nucleic acids encoding antibodies of the invention (including fragments, analogs and derivatives thereof and anti-idiotypic antibodies as described herein). The antibodies of the invention can be used to treat, inhibit or prevent diseases, disorders or conditions associated with aberrant expression and/or activity of a polypeptide of the invention, including, but not limited to, any one or more of the diseases, disorders, or conditions of the reproductive system described herein. The treatment and/or prevention of diseases, disorders, or conditions of the reproductive system associated with aberrant expression and/or activity of a polypeptide of the invention includes, but is not limited to, alleviating symptoms associated with those diseases, disorders or conditions. Antibodies of the invention may be provided in pharmaceutically acceptable compositions as known in the art or as described herein.

[0328] A summary of the ways in which the antibodies of the present invention may be used therapeutically includes binding polynucleotides or polypeptides of the present invention locally or systemically in the body or by direct cytotoxicity of the antibody, e.g. as mediated by complement (CDC) or by effector cells (ADCC). Some of these approaches are described in more detail below. Armed with the teachings provided herein, one of ordinary skill in the art will know how to use the antibodies of the present invention for diagnostic, monitoring or therapeutic purposes without undue experimentation.

[0329] The antibodies of this invention may be advantageously utilized in combination with other monoclonal or chimeric antibodies, or with lymphokines or hematopoietic growth factors (such as, e.g., IL-2, IL-3 and IL-7), for example, which serve to increase the number or activity of effector cells which interact with the antibodies.

[0330] The antibodies of the invention may be administered alone or in combination with other types of treatments (e.g., radiation therapy, chemotherapy, hormonal therapy, immunotherapy and anti-tumor agents). Generally, administration of products of a species origin or species reactivity (in the case of antibodies) that is the same species as that of the patient is preferred. Thus, in a preferred embodiment, human antibodies, fragments derivatives, analogs, or nucleic acids, are administered to a human patient for therapy or prophylaxis.

[0331] It is preferred to use high affinity and/or potent in vivo inhibiting and/or neutralizing antibodies against polypeptides or polynucleotides of the present invention, fragments or regions thereof, for both immunoassays directed to and therapy of disorders related to polynucleotides or polypeptides, including fragments thereof, of the present invention. Such antibodies, fragments, or regions, will preferably have an affinity for polynucleotides or polypeptides of the invention, including fragments thereof. Preferred binding affinities include those with a dissociation constant or Kd less than 5×10⁻² M, 10⁻² M, 5×10⁻³ M, 10⁻³ M, 5×10⁻⁴ M, 10⁻⁴ M, 5×10⁻⁵ M, 10⁻⁵ M, 5×10⁻⁶ M, 10⁻⁶ M, 5×10⁻⁷ M, 10⁻⁷ M, 5×10⁻⁸ M, 10⁻⁸ M, 5×10⁻⁹ M, 10⁻⁹ M, 5×10⁻¹⁰ M, 10⁻¹⁰ M, 5×10⁻¹¹ M, 10⁻¹¹ M, 5×10⁻¹² M, 10^{12 -}M, 5×10⁻¹³ M, 10⁻¹³ M, 5×10⁻¹⁴ M, 10⁻¹⁴ M, 5×10⁻¹⁵ M, and 10⁻¹⁵ M.

[0332] Gene Therapy

[0333] In a specific embodiment, nucleic acids comprising sequences encoding antibodies or functional derivatives thereof, are administered to treat, inhibit or prevent a disease or disorder associated with aberrant expression and/or activity of a polypeptide of the invention, by way of gene therapy. Gene therapy refers to therapy performed by the administration to a subject of an expressed or expressible nucleic acid. In this embodiment of the invention, the nucleic acids produce their encoded protein that mediates a therapeutic effect.

[0334] Any of the methods for gene therapy available in the art can be used according to the present invention. Exemplary methods are described below.

[0335] For general reviews of the methods of gene therapy, see Goldspiel et al., Clinical Pharmacy 12:488-505 (1993); Wu and Wu, Biotherapy 3:87-95 (1991); Tolstoshev, Ann. Rev. Pharmacol. Toxicol. 32:573-596 (1993); Mulligan, Science 260:926-932 (1993); and Morgan and Anderson, Ann. Rev. Biochem. 62:191-217 (1993); May, TIBTECH 11(5):155-215 (1993). Methods commonly known in the art of recombinant DNA technology which can be used are described in Ausubel et al. (eds.), Current Protocols in Molecular Biology, John Wiley & Sons, NY (1993); and Kriegler, Gene Transfer and Expression, A Laboratory Manual, Stockton Press, NY (1990).

[0336] In a preferred embodiment, the compound comprises nucleic acid sequences encoding an antibody, said nucleic acid sequences being part of expression vectors that express the antibody or fragments or chimeric proteins or heavy or light chains thereof in a suitable host. In particular, such nucleic acid sequences have promoters operably linked to the antibody coding region, said promoter being inducible or constitutive, and, optionally, tissue-specific. In another particular embodiment, nucleic acid molecules are used in which the antibody coding sequences and any other desired sequences are flanked by regions that promote homologous recombination at a desired site in the genome, thus providing for intrachromosomal expression of the antibody encoding nucleic acids (Koller and Smithies, Proc. Natl. Acad. Sci. USA 86:8932-8935 (1989); Zijlstra et al., Nature 342:435-438 (1989). In specific embodiments, the expressed antibody molecule is a single chain antibody; alternatively, the nucleic acid sequences include sequences encoding both the heavy and light chains, or fragments thereof, of the antibody.

[0337] Delivery of the nucleic acids into a patient may be either direct, in which case the patient is directly exposed to the nucleic acid or nucleic acid- carrying vectors, or indirect, in which case, cells are first transformed with the nucleic acids in vitro, then transplanted into the patient. These two approaches are known, respectively, as in vivo or ex vivo gene therapy.

[0338] In a specific embodiment, the nucleic acid sequences are directly administered in vivo, where it is expressed to produce the encoded product. This can be accomplished by any of numerous methods known in the art, e.g., by constructing them as part of an appropriate nucleic acid expression vector and administering it so that they become intracellular, e.g., by infection using defective or attenuated retrovirals or other viral vectors (see U.S. Pat. No. 4,980,286), or by direct injection of naked DNA, or by use of microparticle bombardment (e.g., a gene gun; Biolistic, Dupont), or coating with lipids or cell-surface receptors or transfecting agents, encapsulation in liposomes, microparticles, or microcapsules, or by administering them in linkage to a peptide which is known to enter the nucleus, by administering it in linkage to a ligand subject to receptor-mediated endocytosis (see, e.g., Wu and Wu, J. Biol. Chem. 262:4429-4432 (1987)) (which can be used to target cell types specifically expressing the receptors), etc. In another embodiment, nucleic acid-ligand complexes can be formed in which the ligand comprises a fusogenic viral peptide to disrupt endosomes, allowing the nucleic acid to avoid lysosomal degradation. In yet another embodiment, the nucleic acid can be targeted in vivo for cell specific uptake and expression, by targeting a specific receptor (see, e.g., PCT Publications WO 92/06180; WO 92/22635; WO92/20316; WO93/14188, WO 93/20221). Alternatively, the nucleic acid can be introduced intracellularly and incorporated within host cell DNA for expression, by homologous recombination (Koller and Smithies, Proc. Natl. Acad. Sci. USA 86:8932-8935 (1989); Zijlstra et al., Nature 342:435-438 (1989)).

[0339] In a specific embodiment, viral vectors that contains nucleic acid sequences encoding an antibody of the invention are used. For example, a retroviral vector can be used (see Miller et al., Meth. Enzymol. 217:581-599 (1993)). These retroviral vectors contain the components necessary for the correct packaging of the viral genome and integration into the host cell DNA. The nucleic acid sequences encoding the antibody to be used in gene therapy are cloned into one or more vectors, which facilitates delivery of the gene into a patient. More detail about retroviral vectors can be found in Boesen et al., Biotherapy 6:291-302 (1994), which describes the use of a retroviral vector to deliver the mdrl gene to hematopoietic stem cells in order to make the stem cells more resistant to chemotherapy. Other references illustrating the use of retroviral vectors in gene therapy are: Clowes et al., J. Clin. Invest. 93:644-651 (1994); Kiem et al., Blood 83:1467-1473 (1994); Salmons and Gunzberg, Human Gene Therapy 4:129-141 (1993); and Grossman and Wilson, Curr. Opin. in Genetics and Devel. 3:110-114 (1993).

[0340] Adenoviruses are other viral vectors that can be used in gene therapy. Adenoviruses are especially attractive vehicles for delivering genes to respiratory epithelia. Adenoviruses naturally infect respiratory epithelia where they cause a mild disease. Other targets for adenovirus-based delivery systems are liver, the central nervous system, endothelial cells, and muscle. Adenoviruses have the advantage of being capable of infecting non-dividing cells. Kozarsky and Wilson, Current Opinion in Genetics and Development 3:499-503 (1993) present a review of adenovirus-based gene therapy. Bout et al., Human Gene Therapy 5:3-10 (1994) demonstrated the use of adenovirus vectors to transfer genes to the respiratory epithelia of rhesus monkeys. Other instances of the use of adenoviruses in gene therapy can be found in Rosenfeld et al., Science 252:431-434 (1991); Rosenfeld et al., Cell 68:143-155 (1992); Mastrangeli et al., J. Clin. Invest. 91:225-234 (1993); PCT Publication WO94/12649; and Wang, et al., Gene Therapy 2:775-783 (1995). In a preferred embodiment, adenovirus vectors are used.

[0341] Adeno-associated virus (AAV) has also been proposed for use in gene therapy (Walsh et al., Proc. Soc. Exp. Biol. Med. 204:289-300 (1993); U.S. Patent No. 5,436,146).

[0342] Another approach to gene therapy involves transferring a gene to cells in tissue culture by such methods as electroporation, lipofection, calcium phosphate mediated transfection, or viral infection. Usually, the method of transfer includes the transfer of a selectable marker to the cells. The cells are then placed under selection to isolate those cells that have taken up and are expressing the transferred gene. Those cells are then delivered to a patient.

[0343] In this embodiment, the nucleic acid is introduced into a cell prior to administration in vivo of the resulting recombinant cell. Such introduction can be carried out by any method known in the art, including but not limited to transfection, electroporation, microinjection, infection with a viral or bacteriophage vector containing the nucleic acid sequences, cell fusion, chromosome-mediated gene transfer, microcell-mediated gene transfer, spheroplast fusion, etc. Numerous techniques are known in the art for the introduction of foreign genes into cells (see, e.g., Loeffler and Behr, Meth. Enzymol. 217:599-618 (1993); Cohen et al., Meth. Enzymol. 217:618-644 (1993); Cline, Pharmac. Ther. 29:69-92m (1985) and may be used in accordance with the present invention, provided that the necessary developmental and physiological functions of the recipient cells are not disrupted. The technique should provide for the stable transfer of the nucleic acid to the cell, so that the nucleic acid is expressible by the cell and preferably heritable and expressible by its cell progeny.

[0344] The resulting recombinant cells can be delivered to a patient by various methods known in the art. Recombinant blood cells (e.g., hematopoietic stem or progenitor cells) are preferably administered intravenously. The amount of cells envisioned for use depends on the desired effect, patient state, etc., and can be determined by one skilled in the art.

[0345] Cells into which a nucleic acid can be introduced for purposes of gene therapy encompass any desired, available cell type, and include but are not limited to epithelial cells, endothelial cells, keratinocytes, fibroblasts, muscle cells, hepatocytes; blood cells such as T lymphocytes, B lymphocytes, monocytes, macrophages, neutrophils, eosinophils, megakaryocytes, granulocytes; various stem or progenitor cells, in particular hematopoietic stem or progenitor cells, e.g., as obtained from bone marrow, umbilical cord blood, peripheral blood, fetal liver, etc.

[0346] In a preferred embodiment, the cell used for gene therapy is autologous to the patient.

[0347] In an embodiment in which recombinant cells are used in gene therapy, nucleic acid sequences encoding an antibody are introduced into the cells such that they are expressible by the cells or their progeny, and the recombinant cells are then administered in vivo for therapeutic effect. In a specific embodiment, stem or progenitor cells are used. Any stem and/or progenitor cells which can be isolated and maintained in vitro can potentially be used in accordance with this embodiment of the present invention (see e.g. PCT Publication WO 94/08598; Stemple and Anderson, Cell 71:973-985 (1992); Rheinwald, Meth. Cell Bio. 21A:229 (1980); and Pittelkow and Scott, Mayo Clinic Proc. 61:771 (1986)).

[0348] In a specific embodiment, the nucleic acid to be introduced for purposes of gene therapy comprises an inducible promoter operably linked to the coding region, such that expression of the nucleic acid is controllable by the presence or absence of an appropriate inducer of transcription.

[0349] Demonstration of Therapeutic or Prophylactic Activity

[0350] The compounds or pharmaceutical compositions of the invention are preferably tested in vitro, and then in vivo for the desired therapeutic or prophylactic activity, prior to use in humans. For example, in vitro assays to demonstrate the therapeutic or prophylactic utility of a compound or pharmaceutical composition include, the effect of a compound on a cell line or a patient tissue sample. The effect of the compound or composition on the cell line and/or tissue sample can be determined utilizing techniques known to those of skill in the art including, but not limited to, rosette formation assays and cell lysis assays. In accordance with the invention, in vitro assays which can be used to determine whether administration of a specific compound is indicated, include in vitro cell culture assays in which a patient tissue sample is grown in culture, and exposed to or otherwise administered a compound, and the effect of such compound upon the tissue sample is observed.

[0351] Therapeutic/Prophylactic Administration and Composition

[0352] The invention provides methods of treatment, inhibition and prophylaxis by administration to a subject of an effective amount of a compound or pharmaceutical composition of the invention, preferably a polypeptide or antibody of the invention. In a preferred embodiment, the compound is substantially purified (e.g., substantially free from substances that limit its effect or produce undesired side-effects). The subject is preferably an animal, including but not limited to animals such as cows, pigs, horses, chickens, cats, dogs, etc., and is preferably a mammal, and most preferably human.

[0353] Formulations and methods of administration that can be employed when the compound comprises a nucleic acid or an immunoglobulin are described above; additional appropriate formulations and routes of administration can be selected from among those described herein below.

[0354] Various delivery systems are known and can be used to administer a compound of the invention, e.g., encapsulation in liposomes, microparticles, microcapsules, recombinant cells capable of expressing the compound, receptor-mediated endocytosis (see, e.g., Wu and Wu, J. Biol. Chem. 262:4429-4432 (1987)), construction of a nucleic acid as part of a retroviral or other vector, etc. Methods of introduction include but are not limited to intradermal, intramuscular, intraperitoneal, intravenous, subcutaneous, intranasal, epidural, and oral routes. The compounds or compositions may be administered by any convenient route, for example by infusion or bolus injection, by absorption through epithelial or mucocutaneous linings (e.g., oral mucosa, rectal and intestinal mucosa, etc.) and may be administered together with other biologically active agents. Administration can be systemic or local. In addition, it may be desirable to introduce the pharmaceutical compounds or compositions of the invention into the central nervous system by any suitable route, including intraventricular and intrathecal injection; intraventricular injection may be facilitated by an intraventricular catheter, for example, attached to a reservoir, such as an Ommaya reservoir. Pulmonary administration can also be employed, e.g., by use of an inhaler or nebulizer, and formulation with an aerosolizing agent.

[0355] In a specific embodiment, it may be desirable to administer the pharmaceutical compounds or compositions of the invention locally to the area in need of treatment; this may be achieved by, for example, and not by way of limitation, local infusion during surgery, topical application, e.g., in conjunction with a wound dressing after surgery, by injection, by means of a catheter, by means of a suppository, or by means of an implant, said implant being of a porous, non-porous, or gelatinous material, including membranes, such as sialastic membranes, or fibers. Preferably, when administering a protein, including an antibody, of the invention, care must be taken to use materials to which the protein does not absorb.

[0356] In another embodiment, the compound or composition can be delivered in a vesicle, in particular a liposome (see Langer, Science 249:1527-1533 (1990); Treat et al., in Liposomes in the Therapy of Infectious Disease and Cancer, Lopez-Berestein and Fidler (eds.), Liss, New York, pp. 353-365 (1989); Lopez-Berestein, ibid., pp. 317-327; see generally ibid.)

[0357] In yet another embodiment, the compound or composition can be delivered in a controlled release system. In one embodiment, a pump may be used (see Langer, supra; Sefton, CRC Crit. Ref. Biomed. Eng. 14:201 (1987); Buchwald et al., Surgery 88:507 (1980); Saudek et al., N. Engl. J. Med. 321:574 (1989)). In another embodiment, polymeric materials can be used (see Medical Applications of Controlled Release, Langer and Wise (eds.), CRC Pres., Boca Raton, Florida (1974); Controlled Drug Bioavailability, Drug Product Design and Performance, Smolen and Ball (eds.), Wiley, New York (1984); Ranger and Peppas, J., Macromol. Sci. Rev. Macromol. Chem. 23:61 (1983); see also Levy et al., Science 228:190 (1985); During et al., Ann. Neurol. 25:351 (1989); Howard et al., J.Neurosurg. 71:105 (1989)). In yet another embodiment, a controlled release system can be placed in proximity of the therapeutic target, e.g., the brain, thus requiring only a fraction of the systemic dose (see, e.g., Goodson, in Medical Applications of Controlled Release, supra, vol. 2, pp. 115-138 (1984)).

[0358] Other controlled release systems are discussed in the review by Langer (Science 249:1527-1533 (1990)).

[0359] In a specific embodiment where the compound of the invention is a nucleic acid encoding a protein, the nucleic acid can be administered in vivo to promote expression of its encoded protein, by constructing it as part of an appropriate nucleic acid expression vector and administering it so that it becomes intracellular, e.g., by use of a retroviral vector (see U.S. Pat. No. 4,980,286), or by direct injection, or by use of microparticle bombardment (e.g., a gene gun; Biolistic, Dupont), or coating with lipids or cell-surface receptors or transfecting agents, or by administering it in linkage to a homeobox- like peptide which is known to enter the nucleus (see e.g., Joliot et al., Proc. Natl. Acad. Sci. USA 88:1864-1868 (1991)), etc. Alternatively, a nucleic acid can be introduced intracellularly and incorporated within host cell DNA for expression, by homologous recombination.

[0360] The present invention also provides pharmaceutical compositions. Such compositions comprise a therapeutically effective amount of a compound, and a pharmaceutically acceptable carrier. In a specific embodiment, the term “pharmaceutically acceptable” means approved by a regulatory agency of the Federal or a state government or listed in the U.S. Pharmacopeia or other generally recognized pharmacopeia for use in animals, and more particularly in humans. The term “carrier” refers to a diluent, adjuvant, excipient, or vehicle with which the therapeutic is administered. Such pharmaceutical carriers can be sterile liquids, such as water and oils, including those of petroleum, animal, vegetable or synthetic origin, such as peanut oil, soybean oil, mineral oil, sesame oil and the like. Water is a preferred carrier when the pharmaceutical composition is administered intravenously. Saline solutions and aqueous dextrose and glycerol solutions can also be employed as liquid carriers, particularly for injectable solutions. Suitable pharmaceutical excipients include starch, glucose, lactose, sucrose, gelatin, malt, rice, flour, chalk, silica gel, sodium stearate, glycerol monostearate, talc, sodium chloride, dried skim milk, glycerol, propylene, glycol, water, ethanol and the like. The composition, if desired, can also contain minor amounts of wetting or emulsifying agents, or pH buffering agents. These compositions can take the form of solutions, suspensions, emulsion, tablets, pills, capsules, powders, sustained-release formulations and the like. The composition can be formulated as a suppository, with traditional binders and carriers such as triglycerides. Oral formulation can include standard carriers such as pharmaceutical grades of mannitol, lactose, starch, magnesium stearate, sodium saccharine, cellulose, magnesium carbonate, etc. Examples of suitable pharmaceutical carriers are described in “Remington's Pharmaceutical Sciences” by E. W. Martin. Such compositions will contain a therapeutically effective amount of the compound, preferably in purified form, together with a suitable amount of carrier so as to provide the form for proper administration to the patient. The formulation should suit the mode of administration.

[0361] In a preferred embodiment, the composition is formulated in accordance with routine procedures as a pharmaceutical composition adapted for intravenous administration to human beings. Typically, compositions for intravenous administration are solutions in sterile isotonic aqueous buffer. Where necessary, the composition may also include a solubilizing agent and a local anesthetic such as lignocaine to ease pain at the site of the injection. Generally, the ingredients are supplied either separately or mixed together in unit dosage form, for example, as a dry lyophilized powder or water free concentrate in a hermetically sealed container such as an ampoule or sachette indicating the quantity of active agent. Where the composition is to be administered by infusion, it can be dispensed with an infusion bottle containing sterile pharmaceutical grade water or saline. Where the composition is administered by injection, an ampoule of sterile water for injection or saline can be provided so that the ingredients may be mixed prior to administration.

[0362] The compounds of the invention can be formulated as neutral or salt forms. Pharmaceutically acceptable salts include those formed with anions such as those derived from hydrochloric, phosphoric, acetic, oxalic, tartaric acids, etc., and those formed with cations such as those derived from sodium, potassium, ammonium, calcium, ferric hydroxides, isopropylamine, triethylamine, 2-ethylamino ethanol, histidine, procaine, etc.

[0363] The amount of the compound of the invention which will be effective in the treatment, inhibition and prevention of a disease or disorder associated with aberrant expression and/or activity of a polypeptide of the invention can be determined by standard clinical techniques. In addition, in vitro assays may optionally be employed to help identify optimal dosage ranges. The precise dose to be employed in the formulation will also depend on the route of administration, and the seriousness of the disease or disorder, and should be decided according to the judgment of the practitioner and each patient's circumstances. Effective doses may be extrapolated from dose-response curves derived from in vitro or animal model test systems.

[0364] For antibodies, the dosage administered to a patient is typically 0.1 mg/kg to 100 mg/kg of the patient's body weight. Preferably, the dosage administered to a patient is between 0.1 mg/kg and 20 mg/kg of the patient's body weight, more preferably 1 mg/kg to 10 mg/kg of the patient's body weight. Generally, human antibodies have a longer half-life within the human body than antibodies from other species due to the immune response to the foreign polypeptides. Thus, lower dosages of human antibodies and less frequent administration is often possible. Further, the dosage and frequency of administration of antibodies of the invention may be reduced by enhancing uptake and tissue penetration (e.g., into the brain) of the antibodies by modifications such as, for example, lipidation.

[0365] The invention also provides a pharmaceutical pack or kit comprising one or more containers filled with one or more of the ingredients of the pharmaceutical compositions of the invention. Optionally associated with such container(s) can be a notice in the form prescribed by a governmental agency regulating the manufacture, use or sale of pharmaceuticals or biological products, which notice reflects approval by the agency of manufacture, use or sale for human administration.

[0366] Diagnosis and Imaging

[0367] Labeled antibodies, and derivatives and analogs thereof, which specifically bind to a polypeptide of interest can be used for diagnostic purposes to detect, diagnose, or monitor diseases, disorders, and/or conditions associated with the aberrant expression and/or activity of a polypeptide of the invention. The invention provides for the detection of aberrant expression of a polypeptide of interest, comprising (a) assaying the expression of the polypeptide of interest in cells or body fluid of an individual using one or more antibodies specific to the polypeptide interest and (b) comparing the level of gene expression with a standard gene expression level, whereby an increase or decrease in the assayed polypeptide gene expression level compared to the standard expression level is indicative of aberrant expression.

[0368] The invention provides a diagnostic assay for diagnosing a reproductive system disorder, comprising (a) assaying the expression of the polypeptide of interest in cells or body fluid of an individual using one or more antibodies specific to the polypeptide interest and (b) comparing the level of gene expression with a standard gene expression level, whereby an increase or decrease in the assayed polypeptide gene expression level compared to the standard expression level is indicative of a particular disorder. With respect to cancer, the presence of a relatively high amount of transcript in biopsied tissue from an individual may indicate a predisposition for the development of the disease, or may provide a means for detecting the disease prior to the appearance of actual clinical symptoms. A more definitive diagnosis of this type may allow health professionals to employ preventative measures or aggressive treatment earlier thereby preventing the development or further progression of the cancer.

[0369] Antibodies of the invention can be used to assay protein levels in a biological sample using classical immunohistological methods known to those of skill in the art (e.g., see Jalkanen et al., J. Cell. Biol. 101:976-985 (1985); Jalkanen et al., J. Cell. Biol. 105:3087-3096 (1987)). Other antibody-based methods useful for detecting protein gene expression include immunoassays, such as the enzyme linked immunosorbent assay (ELISA) and the radioimmunoassay (RIA). Suitable antibody assay labels are known in the art and include enzyme labels, such as, glucose oxidase; radioisotopes, such as iodine (125I, 121I), carbon (14C), sulfur (35S), tritium (3H), indium (112In), and technetium (99Tc); luminescent labels, such as luminol; and fluorescent labels, such as fluorescein and rhodamine, and biotin.

[0370] One facet of the invention is the detection and diagnosis of a disease or disorder associated with aberrant expression of a polypeptide of interest in an animal, preferably a mammal and most preferably a human. A preferred embodiment of the invention is the detection and diagnosis of a disease or disorder of the reproductive system associated with aberrant expression of a reproductive system antigen in an animal, preferably a mammal and most preferably a human. In one embodiment, diagnosis comprises: a) administering (for example, parenterally, subcutaneously, or intraperitoneally) to a subject an effective amount of a labeled molecule which specifically binds to the polypeptide of interest; b) waiting for a time interval following the administering for permitting the labeled molecule to preferentially concentrate at sites in the subject where the polypeptide is expressed (and for unbound labeled molecule to be cleared to background level); c) determining background level; and d) detecting the labeled molecule in the subject, such that detection of labeled molecule above the background level indicates that the subject has a particular disease or disorder associated with aberrant expression of the polypeptide of interest. Background level can be determined by various methods including, comparing the amount of labeled molecule detected to a standard value previously determined for a particular system.

[0371] It will be understood in the art that the size of the subject and the imaging system used will determine the quantity of imaging moiety needed to produce diagnostic images. In the case of a radioisotope moiety, for a human subject, the quantity of radioactivity injected will normally range from about 5 to 20 millicuries of 99mTc. The labeled antibody or antibody fragment will then preferentially accumulate at the location of cells which contain the specific protein. In vivo tumor imaging is described in S. W. Burchiel et al., “Immunopharmacokinetics of Radiolabeled Antibodies and Their Fragments.” (Chapter 13 in Tumor Imaging: The Radiochemical Detection of Cancer, S. W. Burchiel and B. A. Rhodes, eds., Masson Publishing Inc. (1982)).

[0372] Depending on several variables, including the type of label used and the mode of administration, the time interval following the administration for permitting the labeled molecule to preferentially concentrate at sites in the subject and for unbound labeled molecule to be cleared to background level is 6 to 48 hours or 6 to 24 hours or 6 to 12 hours. In another embodiment the time interval following administration is 5 to 20 days or 5 to 10 days.

[0373] In an embodiment, monitoring of the disease or disorder is carried out by repeating the method for diagnosing the disease or disorder, for example, one month after initial diagnosis, six months after initial diagnosis, one year after initial diagnosis, etc.

[0374] Presence of the labeled molecule can be detected in the patient using methods known in the art for in vivo scanning. These methods depend upon the type of label used. Skilled artisans will be able to determine the appropriate method for detecting a particular label. Methods and devices that may be used in the diagnostic methods of the invention include, but are not limited to, computed tomography (CT), whole body scan such as position emission tomography (PET), magnetic resonance imaging (MRI), and sonography.

[0375] In a specific embodiment, the molecule is labeled with a radioisotope and is detected in the patient using a radiation responsive surgical instrument (Thurston et al., U.S. Pat. No. 5,441,050). In another embodiment, the molecule is labeled with a fluorescent compound and is detected in the patient using a fluorescence responsive scanning instrument. In another embodiment, the molecule is labeled with a positron emitting metal and is detected in the patent using positron emission-tomography. In yet another embodiment, the molecule is labeled with a paramagnetic label and is detected in a patient using magnetic resonance imaging (MRI).

[0376] Kits

[0377] The present invention provides kits that can be used in the above methods. In one embodiment, a kit comprises an antibody of the invention, preferably a purified antibody, in one or more containers. In a specific embodiment, the kits of the present invention contain a substantially isolated polypeptide comprising an epitope which is specifically immunoreactive with an antibody included in the kit. Preferably, the kits of the present invention further comprise a control antibody which does not react with the polypeptide of interest. In another specific embodiment, the kits of the present invention contain a means for detecting the binding of an antibody to a polypeptide of interest (e.g., the antibody may be conjugated to a detectable substrate such as a fluorescent compound, an enzymatic substrate, a radioactive compound or a luminescent compound, or a second antibody which recognizes the first antibody may be conjugated to a detectable substrate).

[0378] In another specific embodiment of the present invention, the kit is a diagnostic kit for use in screening serum containing antibodies specific against proliferative and/or cancerous polynucleotides and polypeptides. Such a kit may include a control antibody that does not react with the polypeptide of interest. Such a kit may include a substantially isolated polypeptide antigen comprising an epitope which is specifically immunoreactive with at least one anti-polypeptide antigen antibody. Further, such a kit includes means for detecting the binding of said antibody to the antigen (e.g., the antibody may be conjugated to a fluorescent compound such as fluorescein or rhodamine which can be detected by flow cytometry). In specific embodiments, the kit may include a recombinantly produced or chemically synthesized polypeptide antigen. The polypeptide antigen of the kit may also be attached to a solid support.

[0379] In a more specific embodiment the detecting means of the above-described kit includes a solid support to which said polypeptide antigen is attached. Such a kit may also include a non-attached reporter-labeled anti-human antibody. In this embodiment, binding of the antibody to the polypeptide antigen can be detected by binding of the said reporter-labeled antibody.

[0380] In an additional embodiment, the invention includes a diagnostic kit for use in screening serum containing antigens of the polypeptide of the invention. The diagnostic kit includes a substantially isolated antibody specifically immunoreactive with polypeptide or polynucleotide antigens, and means for detecting the binding of the polynucleotide or polypeptide antigen to the antibody. In one embodiment, the antibody is attached to a solid support. In a specific embodiment, the antibody may be a monoclonal antibody. The detecting means of the kit may include a second, labeled monoclonal antibody. Alternatively, or in addition, the detecting means may include a labeled, competing antigen.

[0381] In one diagnostic configuration, test serum is reacted with a solid phase reagent having a surface-bound antigen obtained by the methods of the present invention. After binding with specific antigen antibody to the reagent and removing unbound serum components by washing, the reagent is reacted with reporter-labeled anti-human antibody to bind reporter to the reagent in proportion to the amount of bound anti-antigen antibody on the solid support. The reagent is again washed to remove unbound labeled antibody, and the amount of reporter associated with the reagent is determined. Typically, the reporter is an enzyme which is detected by incubating the solid phase in the presence of a suitable fluorometric, luminescent or colorimetric substrate (Sigma, St. Louis, Mo.).

[0382] The solid surface reagent in the above assay is prepared by known techniques for attaching protein material to solid support material, such as polymeric beads, dip sticks, 96-well plate or filter material. These attachment methods generally include non-specific adsorption of the protein to the support or covalent attachment of the protein, typically through a free amine group, to a chemically reactive group on the solid support, such as an activated carboxyl, hydroxyl, or aldehyde group. Alternatively, streptavidin coated plates can be used in conjunction with biotinylated antigen(s).

[0383] Thus, the invention provides an assay system or kit for carrying out this diagnostic method. The kit generally includes a support with surface-bound recombinant antigens, and a reporter-labeled anti-human antibody for detecting surface-bound anti-antigen antibody.

[0384] Uses of the Polynucleotides

[0385] Each of the polynucleotides identified herein can be used in numerous ways as reagents. The following description should be considered exemplary and utilizes known techniques.

[0386] The polynucleotides of the present invention are useful for chromosome identification. There exists an ongoing need to identify new chromosome markers, since few chromosome marking reagents, based on actual sequence data (repeat polymorphisms), are presently available. Each sequence is specifically targeted to and can hybridize with a particular location on an individual human chromosome, thus each polynucleotide of the present invention can routinely be used as a chromosome marker using techniques known in the art. Table 1A, column 8 provides the chromosome location of some of the polynucleotides of the invention.

[0387] Briefly, sequences can be mapped to chromosomes by preparing PCR primers (preferably at least 15 bp (e.g., 15-25 bp) from the sequences shown in SEQ ID NO: X. Primers can optionally be selected using computer analysis so that primers do not span more than one predicted exon in the genomic DNA. These primers are then used for PCR screening of somatic cell hybrids containing individual human chromosomes. Only those hybrids containing the human gene corresponding to SEQ ID NO: X will yield an amplified fragment.

[0388] Similarly, somatic hybrids provide a rapid method of PCR mapping the polynucleotides to particular chromosomes. Three or more clones can be assigned per day using a single thermal cycler. Moreover, sublocalization of the polynucleotides can be achieved with panels of specific chromosome fragments. Other gene mapping strategies that can be used include in situ hybridization, prescreening with labeled flow-sorted chromosomes, preselection by hybridization to construct chromosome specific-cDNA libraries, and computer mapping techniques (See, e.g., Shuler, Trends Biotechnol 16:456-459 (1998) which is hereby incorporated by reference in its entirety).

[0389] Precise chromosomal location of the polynucleotides can also be achieved using fluorescence in situ hybridization (FISH) of a metaphase chromosomal spread. This technique uses polynucleotides as short as 500 or 600 bases; however, polynucleotides 2,000-4,000 bp are preferred. For a review of this technique, see Verma et al., “Human Chromosomes: a Manual of Basic Techniques,” Pergamon Press, New York (1988).

[0390] For chromosome mapping, the polynucleotides can be used individually (to mark a single chromosome or a single site on that chromosome) or in panels (for marking multiple sites and/or multiple chromosomes)

[0391] Thus, the present invention also provides a method for chromosomal localization which involves (a) preparing PCR primers from the polynucleotide sequences in Table 1A and/or Table 2 and SEQ ID NO: X and (b) screening somatic cell hybrids containing individual chromosomes.

[0392] The polynucleotides of the present invention would likewise be useful for radiation hybrid mapping, HAPPY mapping, and long range restriction mapping. For a review of these techniques and others known in the art, see, e.g. Dear, “Genome Mapping: A Practical Approach,” IRL Press at Oxford University Press, London (1997); Aydin, J. Mol. Med. 77:691-694 (1999); Hacia et al., Mol. Psychiatry 3:483-492 (1998); Herrick et al., Chromosome Res. 7:409-423 (1999); Hamilton et al., Methods Cell Biol. 62:265-280 (2000); and/or Ott, J. Hered. 90:68-70 (1999), each of which is hereby incorporated by reference in its entirety.

[0393] Once a polynucleotide has been mapped to a precise chromosomal location, the physical position of the polynucleotide can be used in linkage analysis. Linkage analysis establishes coinheritance between a chromosomal location and presentation of a particular disease. (Disease mapping data are found, for example, in V. McKusick, Mendelian Inheritance in Man (available on line through Johns Hopkins University Welch Medical Library).) Column 9 of Table 1A provides an OMIM reference identification number of diseases associated with the cytologic band disclosed in column 8 of Table 1A, as determined using techniques described herein and by reference to Table 5. Assuming I megabase mapping resolution and one gene per 20 kb, a cDNA precisely localized to a chromosomal region associated with the disease could be one of 50-500 potential causative genes.

[0394] Thus, once coinheritance is established, differences in a polynucleotide of the invention and the corresponding gene between affected and unaffected individuals can be examined. First, visible structural alterations in the chromosomes, such as deletions or translocations, are examined in chromosome spreads or by PCR. If no structural alterations exist, the presence of point mutations are ascertained. Mutations observed in some or all affected individuals, but not in normal individuals, indicates that mutations may cause the disease. However, complete sequencing of the polypeptide and the corresponding gene from several normal individuals is required to distinguish the mutation from a polymorphism. If a new polymorphism is identified, this polymorphic polypeptide can be used for further linkage analysis.

[0395] Furthermore, increased or decreased expression of the gene in affected individuals as compared to unaffected individuals can be assessed using the polynucleotides of the invention. Any of these alterations (altered expression, chromosomal rearrangement, or mutation) can be used as a diagnostic or prognostic marker. Diagnostic and prognostic methods, kits and reagents encompassed by the present invention are briefly described below and more thoroughly elsewhere herein (see e.g., the sections labeled “Antibodies”, “Diagnostic Assays”, and “Methods for Detecting Reproductive System Disease, Including Cancer”).

[0396] Thus, the invention also provides a diagnostic method useful during diagnosis of a disorder, involving measuring the expression level of polynucleotides of the present invention in cells or body fluid from an individual and comparing the measured gene expression level with a standard level of polynucleotide expression level, whereby an increase or decrease in the gene expression level compared to the standard is indicative of a disorder. Additional non-limiting examples of diagnostic methods encompassed by the present invention are more thoroughly described elsewhere herein (see, e.g., Example 12).

[0397] In still another embodiment, the invention includes a kit for analyzing samples for the presence of proliferative and/or cancerous polynucleotides derived from a test subject, as further described herein. In a general embodiment, the kit includes at least one polynucleotide probe containing a nucleotide sequence that will specifically hybridize with a polynucleotide of the invention and a suitable container. In a specific embodiment, the kit includes two polynucleotide probes defining an internal region of the polynucleotide of the invention, where each probe has one strand containing a 31′mer-end internal to the region. In a further embodiment, the probes may be useful as primers for polymerase chain reaction amplification.

[0398] Where a diagnosis of a related disorder, including, for example, diagnosis of a tumor, has already been made according to conventional methods, the present invention is useful as a prognostic indicator, whereby patients exhibiting enhanced or depressed polynucleotide of the invention expression will experience a worse clinical outcome relative to patients expressing the gene at a level nearer the standard level.

[0399] By “measuring the expression level of polynucleotides of the invention” is intended qualitatively or quantitatively measuring or estimating the level of the polypeptide of the invention or the level of the mRNA encoding the polypeptide of the invention in a first biological sample either directly (e.g., by determining or estimating absolute protein level or mRNA level) or relatively (e.g., by comparing to the polypeptide level or mRNA level in a second biological sample). Preferably, the polypeptide level or mRNA level in the first biological sample is measured or estimated and compared to a standard polypeptide level or mRNA level, the standard being taken from a second biological sample obtained from an individual not having the related disorder or being determined by averaging levels from a population of individuals not having a related disorder. As will be appreciated in the art, once a standard polypeptide level or mRNA level is known, it can be used repeatedly as a standard for comparison.

[0400] By “biological sample” is intended any biological sample obtained from an individual, body fluid, cell line, tissue culture, or other source which contains polypeptide of the present invention or the corresponding mRNA. As indicated, biological samples include body fluids (such as semen, lymph, vaginal pool, sera, plasma, urine, synovial fluid and spinal fluid) which contain the polypeptide of the present invention, and tissue sources found to express the polypeptide of the present invention. Methods for obtaining tissue biopsies and body fluids from mammals are well known in the art. Where the biological sample is to include mRNA, a tissue biopsy is the preferred source.

[0401] The method(s) provided above may preferably be applied in a diagnostic method and/or kits in which polynucleotides and/or polypeptides of the invention are attached to a solid support. In one exemplary method, the support may be a “gene chip” or a “biological chip” as described in U.S. Pat. Nos. 5,837,832, 5,874,219, and 5,856,174. Further, such a gene chip with polynucleotides of the invention attached may be used to identify polymorphisms between the isolated polynucleotide sequences of the invention, with polynucleotides isolated from a test subject. The knowledge of such polymorphisms (i.e., their location, as well as, their existence) would be beneficial in identifying disease loci for many disorders, such as for example, in neural disorders, immune system disorders, muscular disorders, reproductive disorders, gastrointestinal disorders, pulmonary disorders, digestive disorders, cardiovascular disorders, renal disorders, proliferative disorders, and/or cancerous diseases and conditions. Such a method is described in U.S. Pat. No. 5,858,659 and 5,856,104. The U.S. Patents referenced supra are hereby incorporated by reference in their entirety herein.

[0402] The present invention encompasses polynucleotides of the present invention that are chemically synthesized, or reproduced as peptide nucleic acids (PNA), or according to other methods known in the art. The use of PNAs would serve as the preferred form if the polynucleotides of the invention are incorporated onto a solid support, or gene chip. For the purposes of the present invention, a peptide nucleic acid (PNA) is a polyamide type of DNA analog and the monomeric units for adenine, guanine, thymine and cytosine are available commercially (Perceptive Biosystems). Certain components of DNA, such as phosphorus, phosphorus oxides, or deoxyribose derivatives, are not present in PNAs. As disclosed by Nielsen et al., Science 254:1497 (1991); and Egholm et al., Nature 365:666 (1993), PNAs bind specifically and tightly to complementary DNA strands and are not degraded by nucleases. In fact, PNA binds more strongly to DNA than DNA itself does. This is probably because there is no electrostatic repulsion between the two strands, and also the polyamide backbone is more flexible. Because of this, PNA/DNA duplexes bind under a wider range of stringency conditions than DNA/DNA duplexes, making it easier to perform multiplex hybridization. Smaller probes can be used than with DNA due to the strong binding. In addition, it is more likely that single base mismatches can be determined with PNA/DNA hybridization because a single mismatch in a PNA/DNA 15-mer lowers the melting point (T.sub.m) by 8°-20° C., vs. 4°-16° C. for the DNA/DNA 15-mer duplex. Also, the absence of charge groups in PNA means that hybridization can be done at low ionic strengths and reduce possible interference by salt during the analysis.

[0403] The compounds of the present invention have uses which include, but are not limited to, detecting cancer in mammals. In particular the invention is useful during diagnosis of pathological cell proliferative neoplasias which include, but are not limited to: acute myelogenous leukemias including acute monocytic leukemia, acute myeloblastic leukemia, acute promyelocytic leukemia, acute myelomonocytic leukemia, acute erythroleukemia, acute megakaryocytic leukemia, and acute undifferentiated leukemia, etc.; and chronic myelogenous leukemias including chronic myelomonocytic leukemia, chronic granulocytic leukemia, etc. Preferred mammals include monkeys, apes, cats, dogs, cows, pigs, horses, rabbits and humans. Particularly preferred are humans.

[0404] The compounds of the present invention have preferred uses which include, but are not limited to, detecting reproductive system cancers in mammals. In particular the invention is useful during diagnosis of pathological cell proliferative neoplasias which include, but are not limited to: testicular cancers (including, for example, teratocarcinoma, embryonal cell carcinoma, yolk sac tumors, Leydig cell tumors, and as listed below in the section entitiled “Reproductive System Disorders”), prostate cancers (e.g., adenocarcinomas, transitional cell carcinomas, ductal carcinomas, squamous cell carcinomas, and as listed below in the section entitled “Reproductive System Disorders”), penile cancers (such as squamous cell carcinoma, verrucous carcinoma, penile urethral carcinoma, and as listed below in the section entitled “Reproductive System Disorders”), cancers of the vagina and vulva (including, for example, basal cell carcinoma, melanomas, cancer of Bartholin's gland, and as listed below in the section entitled “Reproductive System Disorders”), uterine cancers (such as adenocarcinomas, keiomyosarcomas, and as listed below in the section entitled “Reproductive System Disorders”), ovarian cancers (e.g., Sertoli-Leydig tumors, endometriod carcinoma of the ovary, ovarian papollary serous adenocarcinoma, ovarian Krukenberg tumors, and as listed below in the section entitled “Reproductive System Disorders”), and cancers of the cervix (including, for example, squamous metaplasia, columnar cell neoplasia, squamous cell carcinoma, and as listed below in the section entitled “Reproductive System Disorders”). Preferred mammals include monkeys, apes, cats, dogs, cows, pigs, horses, rabbits and humans. Particularly preferred are humans.

[0405] Pathological cell proliferative disorders are often associated with inappropriate activation of proto-oncogenes. (Gelmann, E. P. et al., “The Etiology of Acute Leukemia: Molecular Genetics and Viral Oncology,” in Neoplastic Diseases of the Blood, Vol 1., Wiemik, P. H. et al. eds., 161-182 (1985)). Neoplasias are now believed to result from the qualitative alteration of a normal cellular gene product, or from the quantitative modification of gene expression by insertion into the chromosome of a viral sequence, by chromosomal translocation of a gene to a more actively transcribed region, or by some other mechanism. (Gelmann et al., supra) It is likely that mutated or altered expression of specific genes is involved in the pathogenesis of some leukemias, among other tissues and cell types. (Gelmann et al., supra) Indeed, the human counterparts of the oncogenes involved in some animal neoplasias have been amplified or translocated in some cases of human leukemia and carcinoma. (Gelmann et al., supra)

[0406] For example, c-myc expression is highly amplified in the non-lymphocytic leukemia cell line HL-60. When HL-60 cells are chemically induced to stop proliferation, the level of c-myc is found to be downregulated. (International Publication Number WO 91/15580). However, it has been shown that exposure of HL-60 cells to a DNA construct that is complementary to the 5′ end of c-myc or c-myb blocks translation of the corresponding mRNAs which downregulates expression of the c-myc or c-myb proteins and causes arrest of cell proliferation and differentiation of the treated cells. (International Publication Number WO 91/15580; Wickstrom et al., Proc. Natl. Acad. Sci. 85:1028 (1988); Anfossi et al., Proc. Natl. Acad. Sci. 86:3379 (1989)). However, the skilled artisan would appreciate the present invention's usefulness is not be limited to treatment, prevention, diagnosis and/or prognosis, of proliferative disorders of cells and tissues of hematopoietic origin, in light of the numerous cells and cell types of varying origins which are known to exhibit proliferative phenotypes. In preferred embodiments, the compounds and/or methods of the invention are used to treat, prevent, diagnose, and/or prognose, proliferative disorders of reproductive system cells and tissues.

[0407] In addition to the foregoing, a polynucleotide of the present invention can be used to control gene expression through triple helix formation or through antisense DNA or RNA. Antisense techniques are discussed, for example, in Okano, J. Neurochem. 56: 560 (1991); “Oligodeoxynucleotides as Antisense Inhibitors of Gene Expression, CRC Press, Boca Raton, Fla. (1988). Triple helix formation is discussed in, for instance Lee et al., Nucleic Acids Research 6: 3073 (1979); Cooney et al., Science 241: 456 (1988); and Dervan et al., Science 251: 1360 (1991). Both methods rely on binding of the polynucleotide to a complementary DNA or RNA. For these techniques, preferred polynucleotides are usually oligonucleotides 20 to 40 bases in length and complementary to either the region of the gene involved in transcription (triple helix—see Lee et al., Nucl. Acids Res. 6:3073 (1979); Cooney et al., Science 241:456 (1988); and Dervan et al., Science 251:1360 (1991)) or to the mRNA itself (antisense—Okano, J. Neurochem. 56:560 (1991); Oligodeoxy-nucleotides as Antisense Inhibitors of Gene Expression, CRC Press, Boca Raton, Fla. (1988).) Triple helix formation optimally results in a shut-off of RNA transcription from DNA, while antisense RNA hybridization blocks translation of an mRNA molecule into polypeptide. The oligonucleotide described above can also be delivered to cells such that the antisense RNA or DNA may be expressed in vivo to inhibit production of polypeptide of the present invention antigens. Both techniques are effective in model systems, and the information disclosed herein can be used to design antisense or triple helix polynucleotides in an effort to treat disease, and in particular, for the treatment of proliferative diseases and/or conditions. Non-limiting antisense and triple helix methods encompassed by the present invention are more thoroughly described elsewhere herein (see, e.g., the section labeled “Antisense and Ribozyme (Antagonists)”).

[0408] Polynucleotides of the present invention are also useful in gene therapy. One goal of gene therapy is to insert a normal gene into an organism having a defective gene, in an effort to correct the genetic defect. The polynucleotides disclosed in the present invention offer a means of targeting such genetic defects in a highly accurate manner. Another goal is to insert a new gene that was not present in the host genome, thereby producing a new trait in the host cell. Additional non-limiting examples of gene therapy methods encompassed by the present invention are more thoroughly described elsewhere herein (see, e.g., the sections labeled “Gene Therapy Methods” and Examples 16, 17 and 18).

[0409] The polynucleotides are also useful for identifying individuals from minute biological samples. The United States military, for example, is considering the use of restriction fragment length polymorphism (RFLP) for identification of its personnel. In this technique, an individual's genomic DNA is digested with one or more restriction enzymes, and probed on a Southern blot to yield unique bands for identifying personnel. This method does not suffer from the current limitations of “Dog Tags” which can be lost, switched, or stolen, making positive identification difficult. The polynucleotides of the present invention can be used as additional DNA markers for RFLP.

[0410] The polynucleotides of the present invention can also be used as an alternative to RFLP, by determining the actual base-by-base DNA sequence of selected portions of an individual's genome. These sequences can be used to prepare PCR primers for amplifying and isolating such selected DNA, which can then be sequenced. Using this technique, individuals can be identified because each individual will have a unique set of DNA sequences. Once an unique ID database is established for an individual, positive identification of that individual, living or dead, can be made from extremely small tissue samples.

[0411] Forensic biology also benefits from using DNA-based identification techniques as disclosed herein. DNA sequences taken from very small biological samples such as tissues, e.g., hair or skin, or body fluids, e.g., blood, saliva, semen, synovial fluid, amniotic fluid, breast milk, lymph, pulmonary sputum or surfactant, urine, fecal matter, etc., can be amplified using PCR. In one prior art technique, gene sequences amplified from polymorphic loci, such as DQa class II HLA gene, are used in forensic biology to identify individuals. (Erlich, H., PCR Technology, Freeman and Co. (1992).) Once these specific polymorphic loci are amplified, they are digested with one or more restriction enzymes, yielding an identifying set of bands on a Southern blot probed with DNA corresponding to the DQa class II HLA gene. Similarly, polynucleotides of the present invention can be used as polymorphic markers for forensic purposes.

[0412] There is also a need for reagents capable of identifying the source of a particular tissue. Such need arises, for example, in forensics when presented with tissue of unknown origin. Appropriate reagents can comprise, for example, DNA probes or primers prepared from the sequences of the present invention, specific to tissues, including but not limited to, those sequences referred to in Table 1A. Panels of such reagents, can identify tissue by species and/or by organ type. In a similar fashion, these reagents can be used to screen tissue cultures for contamination. Additional non-limiting examples of such uses are further described herein.

[0413] Because reproductive system antigens are found expressed in reproductive system tissues, the polynucleotides of the present invention are also useful as hybridization probes for differential identification of the tissue(s) or cell type(s) present in a biological sample. Similarly, polypeptides and antibodies directed to polypeptides of the present invention are useful to provide immunological probes for differential identification of the tissue(s) (e.g., immunohistochemistry assays) or cell type(s) (e.g., immunocytochemistry assays). In a specific embodiment, the polynucleotides of the present invention are also useful as hybridization probes for differential identification of reproductive system tissue(s) or cell type(s) present in a biological sample. Similarly, polypeptides and antibodies directed to polypeptides of the present invention are useful to provide immunological probes for differential identification of reproductive system tissue(s) (e.g., immunohistochemistry assays) or cell type(s) (e.g., immunocytochemistry assays). In addition, for a number of disorders of the above tissues or cells, significantly higher or lower levels of gene expression of the polynucleotides/polypeptides of the present invention may be detected in certain tissues (e.g., tissues expressing polypeptides and/or polynucleotides of the present invention, for example, normal reproductive system tissues or diseased reproductive system tissues, and/or those tissues/cells corresponding to the library source relating to a polynucleotide sequence of the invention as disclosed in column 7 of Table 1A, and/or cancerous and/or wounded tissues) or bodily fluids (e.g., semen, lymph, vaginal pool, serum, plasma, urine, synovial fluid or spinal fluid) taken from an individual having such a disorder, relative to a “standard” gene expression level, i.e., the expression level in healthy tissue from an individual not having the disorder.

[0414] Thus, the invention provides a diagnostic method of a disorder, which involves: (a) assaying gene expression level in cells or body fluid of an individual; (b) comparing the gene expression level with a standard gene expression level, whereby an increase or decrease in the assayed gene expression level compared to the standard expression level is indicative of a disorder.

[0415] In the very least, the polynucleotides of the present invention can be used as molecular weight markers on Southern gels, as diagnostic probes for the presence of a specific mRNA in a particular cell type, as a probe to “subtract-out” known sequences in the process of discovering novel polynucleotides, for selecting and making oligomers for attachment to a “gene chip” or other support, to raise anti-DNA antibodies using DNA immunization techniques, and as an antigen to elicit an immune response.

[0416] Uses of the Polypeptides

[0417] Each of the polypeptides identified herein can be used in numerous ways. The following description should be considered exemplary and utilizes known techniques.

[0418] Polypeptides and antibodies directed to polypeptides of the present invention are useful to provide immunological probes for differential identification of the tissue(s) (e.g., immunohistochemistry assays such as, for example, ABC immunoperoxidase (Hsu et al., J. Histochem. Cytochem. 29:577-580 (1981)) or cell type(s) (e.g., immunocytochemistry assays).

[0419] Antibodies can be used to assay levels of polypeptides encoded by polynucleotides of the invention in a biological sample using classical immunohistological methods known to those of skill in the art (see, e.g., Jalkanen, et al., J. Cell. Biol. 101:976-985 (1985); Jalkanen, et al., J. Cell. Biol. 105:3087-3096 (1987)). Other antibody-based methods useful for detecting protein gene expression include immunoassays, such as the enzyme linked immunosorbent assay (ELISA) and the radioimmunoassay (RIA). Suitable antibody assay labels are known in the art and include enzyme labels, such as, glucose oxidase; radioisotopes, such as iodine (¹³¹I, ¹²⁵I, ¹²³I, ¹²¹I), carbon (¹⁴C), sulfur (³⁵S), tritium (³H), indium (^{115m}In, ^{113m}In, ¹¹²In, ¹¹¹In), and technetium (⁹⁹Tc, ^{99m}Tc), thallium (²⁰¹Ti), gallium (⁶⁸Ga, ⁶⁷Ga), palladium (¹⁰³Pd), molybdenum (⁹⁹Mo), xenon (¹³³Xe), fluorine (¹⁸F), ¹⁵³Sm, ¹⁷⁷Lu, ¹⁵⁹Gd, ¹⁴⁹Pm, ¹⁴⁰La, ¹⁷⁵Yb, ¹⁶⁶Ho, ⁹⁰Y, ⁴⁷Sc, ¹⁸⁶Re, ¹⁸⁸Re, ¹⁴²Pr, ¹⁰⁵Rh, ⁹⁷Ru; luminescent labels, such as luminol; and fluorescent labels, such as fluorescein and rhodamine, and biotin.

[0420] In addition to assaying levels of polypeptide of the present invention in a biological sample, proteins can also be detected in vivo by imaging. Antibody labels or markers for in vivo imaging of protein include those detectable by X-radiography, NMR or ESR. For X-radiography, suitable labels include radioisotopes such as barium or cesium, which emit detectable radiation but are not overtly harmful to the subject. Suitable markers for NMR and ESR include those with a detectable characteristic spin, such as deuterium, which may be incorporated into the antibody by labeling of nutrients for the relevant hybridoma.

[0421] A reproductive system antigen-specific antibody or antibody fragment which has been labeled with an appropriate detectable imaging moiety, such as a radioisotope (for example, ¹³¹I, ¹¹²In, ^{99m}Tc, (¹³¹I, ¹²⁵I, ¹²³I, ¹²¹I), carbon (¹⁴C), sulfur (³⁵S), tritium (³H), indium (^{115m}In, ^{113m}In, ¹¹²In, ¹¹¹I), and technetium (⁹⁹Tc, ^{99m}Tc), thallium (²⁰¹Ti), gallium (⁶⁸Ga, ⁶⁷Ga), palladium (¹⁰³Pd), molybdenum (⁹⁹Mo), xenon (¹³³Xe), fluorine (¹⁸F, ¹⁵³Sm, ¹⁷⁷Lu, ¹⁵⁹Gd, ¹⁴⁹Pm, ¹⁴⁰La, ¹⁷⁵Yb, ¹⁶⁶Ho, ⁹⁰Y, ⁴⁷Sc, ¹⁸⁶Re, ¹⁸⁸Re, ¹⁴²Pr, ¹⁰⁵Rh, ⁹⁷Ru), a radio-opaque substance, or a material detectable by nuclear magnetic resonance, is introduced (for example, parenterally, subcutaneously or intraperitoneally) into the mammal to be examined for reproductive system disorder. It will be understood in the art that the size of the subject and the imaging system used will determine the quantity of imaging moiety needed to produce diagnostic images. In the case of a radioisotope moiety, for a human subject, the quantity of radioactivity injected will normally range from about 5 to 20 millicuries of ^{99m}Tc. The labeled antibody or antibody fragment will then preferentially accumulate at the location of cells which express the polypeptide encoded by a polynucleotide of the invention. In vivo tumor imaging is described in S. W. Burchiel et al., “Immunopharmacokinetics of Radiolabeled Antibodies and Their Fragments” (Chapter 13 in Tumor Imaging: The Radiochemical Detection of Cancer, S. W. Burchiel and B. A. Rhodes, eds., Masson Publishing Inc. (1982)).

[0422] In one embodiment, the invention provides a method for the specific delivery of compositions of the invention to cells by administering polypeptides of the invention (e.g., polypeptides encoded by polynucleotides of the invention and/or antibodies) that are associated with heterologous polypeptides or nucleic acids. In one example, the invention provides a method for delivering a therapeutic protein into the targeted cell. In another example, the invention provides a method for delivering a single stranded nucleic acid (e.g., antisense or ribozymes) or double stranded nucleic acid (e.g., DNA that can integrate into the cell's genome or replicate episomally and that can be transcribed) into the targeted cell.

[0423] In another embodiment, the invention provides a method for the specific destruction of cells (e.g., the destruction of tumor cells) by administering polypeptides of the invention in association with toxins or cytotoxic prodrugs.

[0424] In a preferred embodiment, the invention provides a method for the specific destruction of reproductive system cells (e.g., aberrant reproductive system cells, neoplasms of the reproductive system) by administering polypeptides of the invention (e.g., polypeptides encoded by polynucleotides of the invention and/or antibodies) in association with toxins or cytotoxic prodrugs. In another preferred embodiment the invention provides a method for the specific destruction of tissues/cells corresponding to the library source relating to a polynucleotide sequence of the invention as disclosed in column 7 of Table 1A by administering polypeptides of the invention in association with toxins or cytotoxic prodrugs.

[0425] By “toxin” is meant one or more compounds that bind and activate endogenous cytotoxic effector systems, radioisotopes, holotoxins, modified toxins, catalytic subunits of toxins, or any molecules or enzymes not normally present in or on the surface of a cell that under defined conditions cause the cell's death. Toxins that may be used according to the methods of the invention include, but are not limited to, radioisotopes known in the art, compounds such as, for example, antibodies (or complement fixing containing portions thereof) that bind an inherent or induced endogenous cytotoxic effector system, thymidine kinase, endonuclease, RNAse, alpha toxin, ricin, abrin, Pseudomonas exotoxin A, diphtheria toxin, saporin, momordin, gelonin, pokeweed antiviral protein, alpha-sarcin and cholera toxin. “Toxin” also includes a cytostatic or cytocidal agent, a therapeutic agent or a radioactive metal ion, e.g., alpha-emitters such as, for example, ²¹³Bi, or other radioisotopes such as, for example, ¹⁰³Pd, ¹³³Xe, ¹³¹I, ¹¹¹In, ⁶⁸Ge, ⁵⁷Co, ⁶⁵Zn, ⁸⁵Sr, 32P, ³⁵S, ⁹⁰Y, ¹⁵³Sm, ¹⁵³Gd, ¹⁶⁹Yb, ⁵¹Cr, ⁵⁴Mn, ⁷⁵Se, ¹¹³Sn, ⁹⁰Yttrium, ¹¹⁷Tin, ¹⁸⁶Rhenium, ¹⁶⁶Holmium, and ¹⁸⁸Rhenium; luminescent labels, such as luminol; and fluorescent labels, such as fluorescein and rhodamine, and biotin.

[0426] In a specific embodiment, the invention provides a method for the specific destruction of cells (e.g., the destruction of tumor cells) by administering polypeptides of the invention or antibodies of the invention in association with the radioisotope 90Y. In another specific embodiment, the invention provides a method for the specific destruction of cells (e.g., the destruction of tumor cells) by administering polypeptides of the invention or antibodies of the invention in association with the radioisotope ¹¹¹In. In a further specific embodiment, the invention provides a method for the specific destruction of cells (e.g., the destruction of tumor cells) by administering polypeptides of the invention or antibodies of the invention in association with the radioisotope ¹³¹I.

[0427] Techniques known in the art may be applied to label polypeptides of the invention (including antibodies). Such techniques include, but are not limited to, the use of bifunctional conjugating agents (see e.g., U.S. Pat. Nos. 5,756,065; 5,714,631; 5,696,239; 5,652,361; 5,505,931; 5,489,425; 5,435,990; 5,428,139; 5,342,604; 5,274,119; 4,994,560; and 5,808,003; the contents of each of which are hereby incorporated by reference in its entirety).

[0428] Thus, the invention provides a diagnostic method of a disorder, which involves (a) assaying the expression level of a polypeptide of the present invention in cells or body fluid of an individual; and (b) comparing the assayed polypeptide expression level with a standard polypeptide expression level, whereby an increase or decrease in the assayed polypeptide expression level compared to the standard expression level is indicative of a disorder. With respect to cancer, the presence of a relatively high amount of transcript in biopsied tissue from an individual may indicate a predisposition for the development of the disease, or may provide a means for detecting the disease prior to the appearance of actual clinical symptoms. A more definitive diagnosis of this type may allow health professionals to employ preventative measures or aggressive treatment earlier thereby preventing the development or further progression of the cancer.

[0429] Moreover, polypeptides of the present invention can be used to treat or prevent diseases or conditions of the reproductive system such as, for example, reproductive system injury and trauma, infections, neoplastic disorders, congenital defects, and diseases or disorders which result in infertility, complications with pregnancy, labor, or parturition, postpartum difficulties,and as listed below in the section entitled “Reproductive System Disorders”. In preferred embodiments, polynucleotides expressed in a particular tissue type (see, e.g., Table 1A, column 7) are used to diagnose, detect, prevent, treat and/or prognose disorders associated with the tissue type. For example, patients can be administered a polypeptide of the present invention in an effort to replace absent or decreased levels of the polypeptide (e.g., insulin), to supplement absent or decreased levels of a different polypeptide (e.g., hemoglobin S for hemoglobin B, SOD, catalase, DNA repair proteins), to inhibit the activity of a polypeptide (e.g., an oncogene or tumor supressor), to activate the activity of a polypeptide (e.g., by binding to a receptor), to reduce the activity of a membrane bound receptor by competing with it for free ligand (e.g., soluble TNF receptors used in reducing inflammation), or to bring about a desired response (e.g., blood vessel growth inhibition, enhancement of the immune response to proliferative cells or tissues).

[0430] Similarly, antibodies directed to a polypeptide of the present invention can also be used to treat disease (as described supra, and elsewhere herein). For example, administration of an antibody directed to a polypeptide of the present invention can bind, and/or neutralize the polypeptide, and/or reduce overproduction of the polypeptide. Similarly, administration of an antibody can activate the polypeptide, such as by binding to a polypeptide bound to a membrane (receptor).

[0431] At the very least, the polypeptides of the present invention can be used as molecular weight markers on SDS-PAGE gels or on molecular sieve gel filtration columns using methods well known to those of skill in the art. Polypeptides can also be used to raise antibodies, which in turn are used to measure protein expression from a recombinant cell, as a way of assessing transformation of the host cell. Moreover, the polypeptides of the present invention can be used to test the biological activities described herein.

[0432] Diagnostic Asssays

[0433] The compounds of the present invention are useful for diagnosis, treatment, prevention and/or prognosis of various reproductive system related disorders in mammals, preferably humans. Such disorders include, but are not limited to, reproductive system injury and trauma, infections, neoplastic disorders, congenital defects, and diseases or disorders which result in infertility, complications with pregnancy, labor, or parturition, postpartum difficulties, and as listed below in the section entitled “Reproductive System Disorders”. In preferred embodiments, polynucleotides expressed in a particular tissue type (see, e.g., Table 1A, column 7) are used to diagnose, detect, prevent, treat and/or prognose disorders associated with the tissue type.

[0434] Reproductive system antigens are expressed in reproductive system. For a number of reproductive system-related disorders, substantially altered (increased or decreased) levels of reproductive system antigen gene expression can be detected in reproductive system tissue or other cells or bodily fluids (e.g., sera, plasma, urine, semen, synovial fluid or spinal fluid) taken from an individual having such a disorder, relative to a “standard” reproductive system antigen gene expression level, that is, the reproductive system antigen expression level in reproductive system tissues or bodily fluids from an individual not having the reproductive system disorder. Thus, the invention provides a diagnostic method useful during diagnosis of a reproductive system disorder, which involves measuring the expression level of the gene encoding the reproductive system associated polypeptide in reproductive system tissue or other cells or body fluid from an individual and comparing the measured gene expression level with a standard reproductive system antigens gene expression level, whereby an increase or decrease in the gene expression level(s) compared to the standard is indicative of an reproductive system disorder.

[0435] In specific embodiments, the invention provides a diagnostic method useful during diagnosis of a disorder of a normal or diseased tissue/cell source corresponding to column 7 of Table 1A, which involves measuring the expression level of the coding sequence of a polynucleotide sequence associated with this tissue/cell source as disclosed in Table 1A in the tissue/cell source or other cells or body fluid from an individual and comparing the expression level of the coding sequence with a standard expression level of the coding sequence of a polynucleotide sequence, whereby an increase or decrease in the gene expression level(s) compared to the standard is indicative of a disorder of a normal or diseased tissue/cell source corresponding to column 7 of Table 1A.

[0436] In particular, it is believed that certain tissues in mammals with cancer of cells or tissue of the reproductive system express significantly enhanced or reduced levels of normal or altered reproductive system antigen expression and mRNA encoding the reproductive system associated polypeptide when compared to a corresponding “standard” level. Further, it is believed that enhanced or depressed levels of the reproductive system associated polypeptide can be detected in certain body fluids (e.g., sera, plasma, urine, and spinal fluid) or cells or tissue from mammals with such a cancer when compared to sera from mammals of the same species not having the cancer.

[0437] For example, as disclosed herein, reproductive system associated polypeptides of the invention are expressed in tissues of the reproductive system. Accordingly, polynucleotides of the invention (e.g., polynucleotide sequences complementary to all or a portion of a reproductive system antigen mRNA nucleotide sequence of SEQ ID NO: X, nucleotide sequence encoding SEQ ID NO: Y, nucleotide sequence encoding a polypeptide encoded by SEQ ID NO: X and/or a nucleotide sequence delineated by columns 8 and 9 of Table 2) and antibodies (and antibody fragments) directed against the polypeptides of the invention may be used to quantitate or qualitate concentrations of cells of the reproductive system expressing reproductive system antigens, preferrably on their cell surfaces. These polynucleotides and antibodies additionally have diagnostic applications in detecting abnormalities in the level of reproductive system antigens gene expression, or abnormalities in the structure and/or temporal, tissue, cellular, or subcellular location of reproductive system antigens. These diagnostic assays may be performed in vivo or in vitro, such as, for example, on blood samples, biopsy tissue or autopsy tissue. In specific embodiments, polynucleotides and antibodies of the invention are used to quantitate or qualitate tissues/cells corresponding to the library source disclosed in column 7 of Table 1A expressing the corresponding reproductive system sequence disclosed in the same row of Table 1A, preferrably on their cell surface.

[0438] Thus, the invention provides a diagnostic method useful during diagnosis of a reproductive system disorder, including cancers, which involves measuring the expression level of the gene encoding the reproductive system antigen polypeptide in tissues of the reproductive system or other cells or body fluid from an individual and comparing the measured gene expression level with a standard reproductive system antigen gene expression level, whereby an increase or decrease in the gene expression level compared to the standard is indicative of a reproductive system disorder. In specific embodiments, polynucleotides and antibodies of the invention are used to quantitate or qualitate tissues/cells corresponding to the library source disclosed in column 7 of Table 1A expressing the corresponding reproductive system sequence disclosed in the same row of Table 1A, preferrably on their cell surface.

[0439] Where a diagnosis of a disorder in the reproductive system, including diagnosis of a tumor, has already been made according to conventional methods, the present invention is useful as a prognostic indicator, whereby patients exhibiting enhanced or depressed reproductive system antigen gene expression will experience a worse clinical outcome relative to patients expressing the gene at a level nearer the standard level.

[0440] By “assaying the expression level of the gene encoding the reproductive system associated polypeptide” is intended qualitatively or quantitatively measuring or estimating the level of the reproductive system antigen polypeptide or the level of the mRNA encoding the reproductive system antigen polypeptide in a first biological sample either directly (e.g., by determining or estimating absolute protein level or mRNA level) or relatively (e.g., by comparing to the reproductive system associated polypeptide level or mRNA level in a second biological sample). Preferably, the reproductive system antigen polypeptide expression level or mRNA level in the first biological sample is measured or estimated and compared to a standard reproductive system antigen polypeptide level or mRNA level, the standard being taken from a second biological sample obtained from an individual not having the disorder or being determined by averaging levels from a population of individuals not having a disorder of the reproductive system. As will be appreciated in the art, once a standard reproductive system antigen polypeptide level or mRNA level is known, it can be used repeatedly as a standard for comparison.

[0441] By “biological sample” is intended any biological sample obtained from an individual, cell line, tissue culture, or other source containing reproductive system antigen polypeptides (including portions thereof) or mRNA. As indicated, biological samples include body fluids (such as sera, plasma, urine, synovial fluid and spinal fluid) which contain cells expressing reproductive system antigen polypeptides, tissues of the reproductive system, and other tissue sources found to express the full length or fragments thereof of a reproductive system antigen. Methods for obtaining tissue biopsies and body fluids from mammals are well known in the art. Where the biological sample is to include mRNA, a tissue biopsy is the preferred source.

[0442] Total cellular RNA can be isolated from a biological sample using any suitable technique such as the single-step guanidinium-thiocyanate-phenol-chloroform method described in Chomczynski and Sacchi, Anal. Biochem. 162:156-159 (1987). Levels of mRNA encoding the reproductive system antigen polypeptides are then assayed using any appropriate method. These include Northern blot analysis, SI nuclease mapping, the polymerase chain reaction (PCR), reverse transcription in combination with the polymerase chain reaction (RT-PCR), and reverse transcription in combination with the ligase chain reaction (RT-LCR).

[0443] The present invention also relates to diagnostic assays such as quantitative and diagnostic assays for detecting levels of reproductive system antigen polypeptides, in a biological sample (e.g., cells and tissues), including determination of normal and abnormal levels of polypeptides. Thus, for instance, a diagnostic assay in accordance with the invention for detecting over-expression of reproductive system antigens compared to normal control tissue samples may be used to detect the presence of tumors. Assay techniques that can be used to determine levels of a polypeptide, such as a reproductive system antigen polypeptide of the present invention in a sample derived from a host are well-known to those of skill in the art. Such assay methods include radioimmunoassays, competitive-binding assays, Western Blot analysis and ELISA assays. Assaying reproductive system antigen polypeptide levels in a biological sample can occur using any art-known method.

[0444] Assaying reproductive system antigen polypeptide levels in a biological sample can occur using antibody-based techniques. For example, reproductive system antigen polypeptide expression in tissues can be studied with classical immunohistological methods (Jalkanen et al., J. Cell. Biol. 101:976-985 (1985); Jalkanen, M., et al., J. Cell. Biol. 105:3087-3096 (1987)). Other antibody-based methods useful for detecting reproductive system antigen polypeptide gene expression include immunoassays, such as the enzyme linked immunosorbent assay (ELISA) and the radioimmunoassay (RIA). Suitable antibody assay labels are known in the art and include enzyme labels, such as, glucose oxidase, and radioisotopes, such as iodine (¹²⁵I, ¹²¹I, carbon (¹⁴C), sulfur (³⁵S), tritium (³H), indium (¹¹²In), and technetium (^{99m}Tc), and fluorescent labels, such as fluorescein and rhodamine, and biotin.

[0445] The tissue or cell type to be analyzed will generally include those which are known, or suspected, to express the reproductive system related antigen gene (such as, for example, cells of the reproductive system or cancers of the reproductive system). The protein isolation methods employed herein may, for example, be such as those described in Harlow and Lane (Harlow, E. and Lane, D., 1988, “Antibodies: A Laboratory Manual”, Cold Spring Harbor Laboratory Press, Cold Spring Harbor, N.Y.), which is incorporated herein by reference in its entirety. The isolated cells can be derived from cell culture or from a patient. The analysis of cells taken from culture may be a necessary step in the assessment of cells that could be used as part of a cell-based gene therapy technique or, alternatively, to test the effect of compounds on the expression of the reproductive system related antigen gene.

[0446] For example, antibodies, or fragments of antibodies, such as those described herein, may be used to quantitatively or qualitatively detect the presence of reproductive system related antigen gene products or conserved variants or peptide fragments thereof. This can be accomplished, for example, by immunofluorescence techniques employing a fluorescently labeled antibody coupled with light microscopic, flow cytometric, or fluorimetric detection.

[0447] In a preferred embodiment, antibodies, or fragments of antibodies directed to any one or all of the predicted epitope domains of the reproductive system related antigen polypeptides (Shown in Table 1A, column 6) may be used to quantitatively or qualitatively detect the presence of reproductive system related antigen gene products or conserved variants or peptide fragments thereof. This can be accomplished, for example, by immunofluorescence techniques employing a fluorescently labeled antibody coupled with light microscopic, flow cytometric, or fluorimetric detection.

[0448] In an additional preferred embodiment, antibodies, or fragments of antibodies directed to a conformational epitope of a reproductive system related antigen may be used to quantitatively or qualitatively detect the presence of reproductive system related antigen gene products or conserved variants or peptide fragments thereof. This can be accomplished, for example, by immunofluorescence techniques employing a fluorescently labeled antibody coupled with light microscopic, flow cytometric, or fluorimetric detection.

[0449] The antibodies (or fragments thereof), and/or reproductive system related antigen polypeptides of the present invention may, additionally, be employed histologically, as in immunofluorescence, immunoelectron microscopy or non-immunological assays, for in situ detection of reproductive system related antigen gene products or conserved variants or peptide fragments thereof. In situ detection may be accomplished by removing a histological specimen from a patient, and applying thereto a labeled antibody or reproductive system related antigen polypeptide of the present invention. The antibody (or fragment thereof) or reproductive system related antigen polypeptide is preferably applied by overlaying the labeled antibody (or fragment) onto a biological sample. Through the use of such a procedure, it is possible to determine not only the presence of the reproductive system related antigen gene product, or conserved variants or peptide fragments, or reproductive system related antigen polypeptide binding, but also its distribution in the examined tissue. Using the present invention, those of ordinary skill will readily perceive that any of a wide variety of histological methods (such as staining procedures) can be modified in order to achieve such in situ detection.

[0450] Immunoassays and non-immunoassays for reproductive system related antigen gene products or conserved variants or peptide fragments thereof will typically comprise incubating a sample, such as a biological fluid, a tissue extract, freshly harvested cells, or lysates of cells which have been incubated in cell culture, in the presence of a detectably labeled antibody capable of binding reproductive system related antigen gene products or conserved variants or peptide fragments thereof, and detecting the bound antibody by any of a number of techniques well-known in the art.

[0451] The biological sample may be brought in contact with and immobilized onto a solid phase support or carrier such as nitrocellulose, or other solid support which is capable of immobilizing cells, cell particles or soluble proteins. The support may then be washed with suitable buffers followed by treatment with the detectably labeled anti- reproductive system related antigen antibody or detectable reproductive system related antigen polypeptide. The solid phase support may then be washed with the buffer a second time to remove unbound antibody or polypeptide. Optionally the antibody is subsequently labeled. The amount of bound label on solid support may then be detected by conventional means.

[0452] By “solid phase support or carrier” is intended any support capable of binding an antigen or an antibody. Well-known supports or carriers include glass, polystyrene, polypropylene, polyethylene, dextran, nylon, amylases, natural and modified celluloses, polyacrylamides, gabbros, and magnetite. The nature of the carrier can be either soluble to some extent or insoluble for the purposes of the present invention. The support material may have virtually any possible structural configuration so long as the coupled molecule is capable of binding to an antigen or antibody. Thus, the support configuration may be spherical, as in a bead, or cylindrical, as in the inside surface of a test tube, or the external surface of a rod. Alternatively, the surface may be flat such as a sheet, test strip, etc. Preferred supports include polystyrene beads. Those skilled in the art will know many other suitable carriers for binding antibody or antigen, or will be able to ascertain the same by use of routine experimentation.

[0453] The binding activity of a given lot of anti-reproductive system related antigen antibody or reproductive system related antigen polypeptide may be determined according to well known methods. Those skilled in the art will be able to determine operative and optimal assay conditions for each determination by employing routine experimentation.

[0454] In addition to assaying reproductive system related antigen polypeptide levels or polynucleotide levels in a biological sample obtained from an individual, reproductive system related antigen polypeptide or polynucleotide can also be detected in vivo by imaging. For example, in one embodiment of the invention, reproductive system related antigen polypeptide and/or anti-reproductive system related antigen antibodies are used to image reproductive system diseased cells, such as neoplasms. In another embodiment, reproductive system related antigen polynucleotides of the invention (e.g., polynucleotides complementary to all or a portion of reproductive system related antigen mRNA) and/or anti-reproductive system related antigen antibodies (e.g., antibodies directed to any one or a combination of the epitopes of reproductive system related antigens, antibodies directed to a conformational epitope of reproductive system related antigens, antibodies directed to the full length polypeptide expressed on the cell surface of a mammalian cell) are used to image diseased or neoplastic cells of the reproductive system.

[0455] Antibody labels or markers for in vivo imaging of reproductive system related antigen polypeptides include those detectable by X-radiography, NMR, MRI, CAT-scans or ESR. For X-radiography, suitable labels include radioisotopes such as barium or cesium, which emit detectable radiation but are not overtly harmful to the subject. Suitable markers for NMR and ESR include those with a detectable characteristic spin, such as deuterium, which may be incorporated into the antibody by labeling of nutrients for the relevant hybridoma. Where in vivo imaging is used to detect enhanced levels of reproductive system related antigen polypeptides for diagnosis in humans, it may be preferable to use human antibodies or “humanized” chimeric monoclonal antibodies. Such antibodies can be produced using techniques described herein or otherwise known in the art. For example methods for producing chimeric antibodies are known in the art. See, for review, Morrison, Science 229:1202 (1985); Oi et al., BioTechniques 4:214 (1986); Cabilly et al., U.S. Pat. No. 4,816,567; Taniguchi et al., EP 171496; Morrison et al., EP 173494; Neuberger et al., WO 8601533; Robinson et al., WO 8702671; Boulianne et al., Nature 312:643 (1984); Neuberger et al., Nature 314:268 (1985).

[0456] Additionally, any reproductive system related antigen polypeptides whose presence can be detected, can be administered. For example, reproductive system related antigen polypeptides labeled with a radio-opaque or other appropriate compound can be administered and visualized in vivo, as discussed, above for labeled antibodies. Further such reproductive system related antigen polypeptides can be utilized for in vitro diagnostic procedures.

[0457] A reproductive system related antigen polypeptide-specific antibody or antibody fragment which has been labeled with an appropriate detectable imaging moiety, such as a radioisotope (for example, ¹³¹I, ¹¹²In, ^{99m}Tc), a radio-opaque substance, or a material detectable by nuclear magnetic resonance, is introduced (for example, parenterally, subcutaneously or intraperitoneally) into the mammal to be examined for a disorder of the reproductive system. It will be understood in the art that the size of the subject and the imaging system used will determine the quantity of imaging moiety needed to produce diagnostic images. In the case of a radioisotope moiety, for a human subject, the quantity of radioactivity injected will normally range from about 5 to 20 millicuries of ^{99m}Tc. The labeled antibody or antibody fragment will then preferentially accumulate at the location of cells which contain reproductive system related antigen protein. In vivo tumor imaging is described in S. W. Burchiel et al., “Immunopharmacokinetics of Radiolabeled Antibodies and Their Fragments” (Chapter 13 in Tumor Imaging: The Radiochemical Detection of Cancer, S. W. Burchiel and B. A. Rhodes, eds., Masson Publishing Inc. (1982)).

[0458] With respect to antibodies, one of the ways in which the anti-reproductive system related antigen antibody can be detectably labeled is by linking the same to an enzyme and using the linked product in an enzyme immunoassay (EIA) (Voller, A., “The Enzyme Linked Immunosorbent Assay (ELISA)”, 1978, Diagnostic Horizons 2:1-7, Microbiological Associates Quarterly Publication, Walkersville, Md.); Voller et al., J. Clin. Pathol. 31:507-520 (1978); Butler, J. E., Meth. Enzymol. 73:482-523 (1981); Maggio, E. (ed.), 1980, Enzyme Immunoassay, CRC Press, Boca Raton, Fla.,; Ishikawa, E. et al., (eds.), 1981, Enzyme Immunoassay, Kgaku Shoin, Tokyo). The enzyme which is bound to the antibody will react with an appropriate substrate, preferably a chromogenic substrate, in such a manner as to produce a chemical moiety which can be detected, for example, by spectrophotometric, fluorimetric or by visual means. Enzymes which can be used to detectably label the antibody include, but are not limited to, malate dehydrogenase, staphylococcal nuclease, delta-5-steroid isomerase, yeast alcohol dehydrogenase, alpha-glycerophosphate, dehydrogenase, triose phosphate isomerase, horseradish peroxidase, alkaline phosphatase, asparaginase, glucose oxidase, beta-galactosidase, ribonuclease, urease, catalase, glucose-6-phosphate dehydrogenase, glucoamylase and acetylcholinesterase. Additionally, the detection can be accomplished by calorimetric methods which employ a chromogenic substrate for the enzyme. Detection may also be accomplished by visual comparison of the extent of enzymatic reaction of a substrate in comparison with similarly prepared standards.

[0459] Detection may also be accomplished using any of a variety of other immunoassays. For example, by radioactively labeling the antibodies or antibody fragments, it is possible to detect reproductive system related antigens through the use of a radioimmunoassay (RIA) (see, for example, Weintraub, B., Principles of Radioimmunoassays, Seventh Training Course on Radioligand Assay Techniques, The Endocrine Society, March, 1986, which is incorporated by reference herein). The radioactive isotope can be detected by means including, but not limited to, a gamma counter, a scintillation counter, or autoradiography.

[0460] It is also possible to label the antibody with a fluorescent compound. When the fluorescently labeled antibody is exposed to light of the proper wave length, its presence can then be detected due to fluorescence. Among the most commonly used fluorescent labeling compounds are fluorescein isothiocyanate, rhodamine, phycoerythrin, phycocyanin, allophycocyanin, ophthaldehyde and fluorescamine.

[0461] The antibody can also be detectably labeled using fluorescence emitting metals such as ¹⁵²Eu, or others of the lanthanide series. These metals can be attached to the antibody using such metal chelating groups as diethylenetriaminepentacetic acid (DTPA) or ethylenediaminetetraacetic acid (EDTA).

[0462] The antibody also can be detectably labeled by coupling it to a chemiluminescent compound. The presence of the chemiluminescent-tagged antibody is then determined by detecting the presence of luminescence that arises during the course of a chemical reaction. Examples of particularly useful chemiluminescent labeling compounds are luminol, isoluminol, theromatic acridinium ester, imidazole, acridinium salt and oxalate ester.

[0463] Likewise, a bioluminescent compound may be used to label the antibody of the present invention. Bioluminescence is a type of chemiluminescence found in biological systems in, which a catalytic protein increases the efficiency of the chemiluminescent reaction. The presence of a bioluminescent protein is determined by detecting the presence of luminescence. Important bioluminescent compounds for purposes of labeling are luciferin, luciferase and aequorin.

[0464] Methods for Detecting Diseases of the Reproductive Systems Including Cancer

[0465] In general, a disease of the reproductive system or cancer may be detected in a patient based on the presence of one or more reproductive system related antigen proteins of the invention and/or polynucleotides encoding such proteins in a biological sample (for example, blood, sera, urine, and/or tumor biopsies) obtained from the patient. In other words, such proteins and/or polynucleotides may be used as markers to indicate the presence or absence of a reproductive system disease or disorder, including cancer. Cancers that may be diagnosed, and/or prognosed using the compositions of the invention include but are not limited to, cancers of the reproductive system. In addition, such proteins and/or polynucleotidse may be useful for the detection of other diseases and cancers, including cancers of tissues/cells corresponding to the library source disclosed in column 7 of Table 1A expressing the corresponding reproductive system related sequence disclosed in the same row of Table 1A. The binding agents provided herein generally permit detection of the level of antigen that binds to the agent in the biological sample. Polynucleotide primers and probes may be used to detect the level of mRNA encoding reproductive system related antigen polypeptides, which is also indicative of the presence or absence of a reproductive system disease or disorder, including cancer. In general, reproductive system related antigen polypeptides should be present at a level that is at least three fold higher in diseased tissue than in normal tissue.

[0466] There are a variety of assay formats known to those of ordinary skill in the art for using a binding agent to detect polypeptide markers in a sample. See, e.g., Harlow and Lane, supra. In general, the presence or absence of a reproductive system disease in a patient may be determined by (a) contacting a biological sample obtained from a patient with a binding agent; (b) detecting in the sample a level of polypeptide that binds to the binding agent; and (c) comparing the level of polypeptide with a predetermined cut-off value.

[0467] In a preferred embodiment, the assay involves the use of binding agent immobilized on a solid support to bind to and remove the reproductive system related antigen polypeptide of the invention from the remainder of the sample. The bound polypeptide may then be detected using a detection reagent that contains a reporter group and specifically binds to the binding agent/polypeptide complex. Such detection reagents may comprise, for example, a binding agent that specifically binds to the polypeptide or an antibody or other agent that specifically binds to the binding agent, such as an anti-immunoglobulin, protein G, protein A or a lectin. Alternatively, a competitive assay may be utilized, in which a polypeptide is labeled with a reporter group and allowed to bind to the immobilized binding agent after incubation of the binding agent with the sample. The extent to which components of the sample inhibit the binding of the labeled polypeptide to the binding agent is indicative of the reactivity of the sample with the immobilized binding agent. Suitable polypeptides for use within such assays include reproductive system related antigen polypeptides and portions thereof, or antibodies, to which the binding agent binds, as described above.

[0468] The solid support may be any material known to those of skill in the art to which reproductive system related antigen polypeptides of the invention may be attached. For example, the solid support may be a test well in a microtiter plate or a nitrocellulose or other suitable membrane. Alternatively, the support may be a bead or disc, such as glass fiberglass, latex or a plastic material such as polystyrene or polyvinylchloride. The support may also be a magnetic particle or a fiber optic sensor, such as those disclosed, for example, in U.S. Pat. No. 5,359,681. The binding agent may be immobilized on the solid support using a variety of techniques known to those of skill in the art, which are amply described in the patent and scientific literature. In the context of the present invention, the term “immobilization” refers to both noncovalent association, such as adsorption, and covalent attachment (which may be a direct linkage between the agent and functional groups on the support or may be a linkage by way of a cross-linking agent). Immobilization by adsorption to a well in a microtiter plate or to a membrane is preferred. In such cases, adsorption may be achieved by contacting the binding agent, in a suitable buffer, with the solid support for the suitable amount of time. The contact time varies with temperature, but is typically between about 1 hour and about 1 day. In general, contacting a well of plastic microtiter plate (such as polystyrene or polyvinylchloride) with an amount of binding agent ranging from about 10 ng to about 10 ug, and preferably about 100 ng to about 1 ug, is sufficient to immobilize an adequate amount of binding agent.

[0469] Covalent attachment of binding agent to a solid support may generally be achieved by first reacting the support with a bifunctional reagent that will react with both the support and a functional group, such as a hydroxyl or amino group, on the binding agent. For example, the binding agent may be covalently attached to supports having an appropriate polymer coating using benzoquinone or by condensation of an aldehyde group on the support with an amine and an active hydrogen on the binding partner (see, e.g., Pierce Immunotechnology Catalog and Handbook, 1991, at A12-A13).

[0470] Gene Therapy Methods

[0471] Also encompassed by the present invention are gene therapy methods for treating or preventing disorders, diseases and conditions. The gene therapy methods relate to the introduction of nucleic acid (DNA, RNA and antisense DNA or RNA) sequences into an animal to achieve expression of a reproductive system related antigen of the present invention. This method requires a polynucleotide which codes for a polypeptide of the present invention operatively linked to a promoter and any other genetic elements necessary for the expression of the polypeptide by the target tissue. Such gene therapy and delivery techniques are known in the art, see, for example, WO90/11092, which is herein incorporated by reference.

[0472] Thus, for example, cells from a patient may be engineered with a polynucleotide (DNA or RNA) comprising a promoter operably linked to a polynucleotide of the present invention ex vivo, with the engineered cells then being provided to a patient to be treated with the polypeptide of the present invention. Such methods are well-known in the art. For example, see Belldegrun, A., et al., J. Natl. Cancer Inst. 85: 207-216 (1993); Ferrantini, M. et al., Cancer Research 53: 1107-1112 (1993); Ferrantini, M. et al., J. Immunology 153: 4604-4615 (1994); Kaido, T., et al., Int. J. Cancer 60: 221-229 (1995); Ogura, H., et al., Cancer Research 50: 5102-5106 (1990); Santodonato, L., et al., Human Gene Therapy 7:1-10 (1996); Santodonato, L., et al., Gene Therapy 4:1246-1255 (1997); and Zhang, J. F. et al., Cancer Gene Therapy 3: 31-38 (1996)), which are herein incorporated by reference. In one embodiment, the cells which are engineered are arterial cells. The arterial cells may be reintroduced into the patient through direct injection to the artery, the tissues surrounding the artery, or through catheter injection.

[0473] As discussed in more detail below, the polynucleotide constructs can be delivered by any method that delivers injectable materials to the cells of an animal, such as, injection into the interstitial space of tissues (heart, muscle, skin, lung, liver, and the like). The polynucleotide constructs may be delivered in a pharmaceutically acceptable liquid or aqueous carrier.

[0474] In one embodiment, the polynucleotide of the present invention is delivered as a naked polynucleotide. The term “naked” polynucleotide, DNA or RNA refers to sequences that are free from any delivery vehicle that acts to assist, promote or facilitate entry into the cell, including viral sequences, viral particles, liposome formulations, lipofectin or precipitating agents and the like. However, the polynucleotide of the present invention can also be delivered in liposome formulations and lipofectin formulations and the like can be prepared by methods well known to those skilled in the art. Such methods are described, for example, in U.S. Pat. Nos. 5,593,972, 5,589,466, and 5,580,859, which are herein incorporated by reference.

[0475] The polynucleotide vector constructs used in the gene therapy method are preferably constructs that will not integrate into the host genome nor will they contain sequences that allow for replication. Appropriate vectors include pWLNEO, pSV2CAT, pOG44, pXT1 and pSG available from Stratagene; pSVK3, pBPV, pMSG and pSVL available from Pharmacia; and pEF1/V5, pcDNA3.1, and pRc/CMV2 available from Invitrogen. Other suitable vectors will be readily apparent to the skilled artisan.

[0476] Any strong promoter known to those skilled in the art can be used for driving the expression of the polynucleotide sequence. Suitable promoters include adenoviral promoters, such as the adenoviral major late promoter; or heterologous promoters, such as the cytomegalovirus (CMV) promoter; the respiratory syncytial virus (RSV) promoter; inducible promoters, such as the MMT promoter, the metallothionein promoter; heat shock promoters; the albumin promoter; the ApoAI promoter; human globin promoters; viral thymidine kinase promoters, such as the Herpes Simplex thymidine kinase promoter; retroviral LTRs; the b-actin promoter; and human growth hormone promoters. The promoter also may be the native promoter for the polynucleotide of the present invention.

[0477] Unlike other gene therapy techniques, one major advantage of introducing naked nucleic acid sequences into target cells is the transitory nature of the polynucleotide synthesis in the cells. Studies have shown that non-replicating DNA sequences can be introduced into cells to provide production of the desired polypeptide for periods of up to six months.

[0478] The polynucleotide construct can be delivered to the interstitial space of tissues within the an animal, including of muscle, skin, brain, lung, liver, spleen, bone marrow, thymus, heart, lymph, blood, bone, cartilage, pancreas, kidney, gall bladder, stomach, intestine, testis, ovary, uterus, rectum, nervous system, eye, gland, and connective tissue. Interstitial space of the tissues comprises the intercellular, fluid, mucopolysaccharide matrix among the reticular fibers of organ tissues, elastic fibers in the walls of vessels or chambers, collagen fibers of fibrous tissues, or that same matrix within connective tissue ensheathing muscle cells or in the lacunae of bone. It is similarly the space occupied by the plasma of the circulation and the lymph fluid of the lymphatic channels. Delivery to the interstitial space of muscle tissue is preferred for the reasons discussed below. They may be conveniently delivered by injection into the tissues comprising these cells. They are preferably delivered to and expressed in persistent, non-dividing cells which are differentiated, although delivery and expression may be achieved in non-differentiated or less completely differentiated cells, such as, for example, stem cells of blood or skin fibroblasts. In vivo muscle cells are particularly competent in their ability to take up and express polynucleotides.

[0479] For the naked nucleic acid sequence injection, an effective dosage amount of DNA or RNA will be in the range of from about 0.05 mg/kg body weight to about 50 mg/kg body weight. Preferably the dosage will be from about 0.005 mg/kg to about 20 mg/kg and more preferably from about 0.05 mg/kg to about 5 mg/kg. Of course, as the artisan of ordinary skill will appreciate, this dosage will vary according to the tissue site of injection. The appropriate and effective dosage of nucleic acid sequence can readily be determined by those of ordinary skill in the art and may depend on the condition being treated and the route of administration.

[0480] The preferred route of administration is by the parenteral route of injection into the interstitial space of tissues. However, other parenteral routes may also be used, such as, inhalation of an aerosol formulation particularly for delivery to lungs or bronchial tissues, throat or mucous membranes of the nose. In addition, naked DNA constructs can be delivered to arteries during angioplasty by the catheter used in the procedure.

[0481] The naked polynucleotides are delivered by any method known in the art, including, but not limited to, direct needle injection at the delivery site, intravenous injection, topical administration, catheter infusion, and so-called “gene guns”. These delivery methods are known in the art.

[0482] The constructs may also be delivered with delivery vehicles such as viral sequences, viral particles, liposome formulations, lipofectin, precipitating agents, etc. Such methods of delivery are known in the art.

[0483] In certain embodiments, the polynucleotide constructs are complexed in a liposome preparation. Liposomal preparations for use in the instant invention include cationic (positively charged), anionic (negatively charged) and neutral preparations. However, cationic liposomes are particularly preferred because a tight charge complex can be formed between the cationic liposome and the polyanionic nucleic acid. Cationic liposomes have been shown to mediate intracellular delivery of plasmid DNA (Felgner et al., Proc. Natl. Acad. Sci. USA (1987) 84:7413-7416, which is herein incorporated by reference); mRNA (Malone et al., Proc. Natl. Acad. Sci. USA (1989) 86:6077-6081, which is herein incorporated by reference); and purified transcription factors (Debs et al., J. Biol. Chem. (1990) 265:10189-10192, which is herein incorporated by reference), in functional form.

[0484] Cationic liposomes are readily available. For example, N[1-2,3-dioleyloxy)propyl]-N,N,N-triethylammonium (DOTMA) liposomes are particularly useful and are available under the trademark Lipofectin, from GIBCO BRL, Grand Island, N.Y., (see, also, Felgner et al., Proc. Natl Acad. Sci. USA (1987) 84:7413-7416, which is herein incorporated by reference). Other commercially available liposomes include transfectace (DDAB/DOPE) and DOTAP/DOPE (Boehringer).

[0485] Other cationic liposomes can be prepared from readily available materials using techniques well known in the art. See, e.g. PCT Publication No. WO 90/11092 (which is herein incorporated by reference) for a description of the synthesis of DOTAP (1,2-bis(oleoyloxy)-3-(trimethylammonio)propane) liposomes. Preparation of DOTMA liposomes is explained in the literature, see, e.g., P. Felgner et al., Proc. Natl. Acad. Sci. USA 84:7413-7417, which is herein incorporated by reference. Similar methods can be used to prepare liposomes from other cationic lipid materials.

[0486] Similarly, anionic and neutral liposomes are readily available, such as from Avanti Polar Lipids (Birmingham, Ala.), or can be easily prepared using readily available materials. Such materials include phosphatidyl choline, cholesterol, phosphatidyl ethanolamine, dioleoylphosphatidyl choline (DOPC), dioleoylphosphatidyl glycerol (DOPG), dioleoylphoshatidyl ethanolamine (DOPE), among others. These materials can also be mixed with the DOTMA and DOTAP starting materials in appropriate ratios. Methods for making liposomes using these materials are well known in the art.

[0487] For example, commercially dioleoylphosphatidyl choline (DOPC), dioleoylphosphatidyl glycerol (DOPG), and dioleoylphosphatidyl ethanolamine (DOPE) can be used in various combinations to make conventional liposomes, with or without the addition of cholesterol. Thus, for example, DOPG/DOPC vesicles can be prepared by drying 50 mg each of DOPG and DOPC under a stream of nitrogen gas into a sonication vial. The sample is placed under a vacuum pump overnight and is hydrated the following day with deionized water. The sample is then sonicated for 2 hours in a capped vial, using a Heat Systems model 350 sonicator equipped with an inverted cup (bath type) probe at the maximum setting while the bath is circulated at 15EC. Alternatively, negatively charged vesicles can be prepared without sonication to produce multilamellar vesicles or by extrusion through nucleopore membranes to produce unilamellar vesicles of discrete size. Other methods are known and available to those of skill in the art.

[0488] The liposomes can comprise multilamellar vesicles (MLVs), small unilamellar vesicles (SUVs), or large unilamellar vesicles (LUVs), with SUVs being preferred. The various liposome-nucleic acid complexes are prepared using methods well known in the art. See, e.g., Straubinger et al., Methods of Immunology (1983), 101:512-527, which is herein incorporated by reference. For example, MLVs containing nucleic acid can be prepared by depositing a thin film of phospholipid on the walls of a glass tube and subsequently hydrating with a solution of the material to be encapsulated. SUVs are prepared by extended sonication of MLVs to produce a homogeneous population of unilamellar liposomes. The material to be entrapped is added to a suspension of preformed MLVs and then sonicated. When using liposomes containing cationic lipids, the dried lipid film is resuspended in an appropriate solution such as sterile water or an isotonic buffer solution such as 10 mM Tris/NaCl, sonicated, and then the preformed liposomes are mixed directly with the DNA. The liposome and DNA form a very stable complex due to binding of the positively charged liposomes to the cationic DNA. SUVs find use with small nucleic acid fragments. LUVs are prepared by a number of methods, well known in the art. Commonly used methods include Ca²⁻-EDTA chelation (Papahadjopoulos et al., Biochim. Biophys. Acta (1975) 394:483; Wilson et al., Cell 17:77 (1979); ether injection (Deamer, D. and Bangham, A., Biochim. Biophys. Acta 443:629 (1976); Ostro et al., Biochem. Biophys. Res. Commun. 76:836 (1977); Fraley et al., Proc. Natl. Acad. Sci. USA 76:3348 (1979)); detergent dialysis (Enoch, H. and Strittmatter, P., Proc. Natl. Acad. Sci. USA 76:145 (1979)); and reverse-phase evaporation (REV) (Fraley et al., J. Biol. Chem. 255:10431 (1980); Szoka et al., Proc. Natl. Acad. Sci. USA 75:145 (1978); Schaefer-Ridder et al., Science 215:166 (1982)), which are herein incorporated by reference.

[0489] Generally, the ratio of DNA to liposomes will be from about 10:1 to about 1:10. Preferably, the ration will be from about 5:1 to about 1:5. More preferably, the ration will be about 3:1 to about 1:3. Still more preferably, the ratio will be about 1: 1.

[0490] U.S. Pat. No. 5,676,954 (which is herein incorporated by reference) reports on the injection of genetic material, complexed with cationic liposomes carriers, into mice. U.S. Pat. Nos. 4,897,355, 4,946,787, 5,049,386, 5,459,127, 5,589,466, 5,693,622, 5,580,859, 5,703,055, and international publication no. WO 94/9469 (which are herein incorporated by reference) provide cationic lipids for use in transfecting DNA into cells and mammals. U.S. Pat. Nos. 5,589,466, 5,693,622, 5,580,859, 5,703,055, and International Publication No. WO 94/9469 provide methods for delivering DNA-cationic lipid complexes to mammals.

[0491] In certain embodiments, cells are engineered, ex vivo or in vivo, using a retroviral particle containing RNA which comprises a sequence encoding a polypeptide of the present invention. Retroviruses from which the retroviral plasmid vectors may be derived include, but are not limited to, Moloney Murine Leukemia Virus, spleen necrosis virus, Rous sarcoma Virus, Harvey Sarcoma Virus, avian leukosis virus, gibbon ape leukemia virus, human immunodeficiency virus, Myeloproliferative Sarcoma Virus, and mammary tumor virus.

[0492] The retroviral plasmid vector is employed to transduce packaging cell lines to form producer cell lines. Examples of packaging cells which may be transfected include, but are not limited to, the PE501, PA317, R-2, R-AM, PA12, T19-14X, VT-19-17-H2, RCRE, RCRIP, GP+E-86, GP+envAm12, and DAN cell lines as described in Miller, Human Gene Therapy 1:5-14 (1990), which is incorporated herein by reference in its entirety. The vector may transduce the packaging cells through any means known in the art. Such means include, but are not limited to, electroporation, the use of liposomes, and CaPO₄ precipitation. In one alternative, the retroviral plasmid vector may be encapsulated into a liposome, or coupled to a lipid, and then administered to a host.

[0493] The producer cell line generates infectious retroviral vector particles which include polynucleotide encoding a polypeptide of the present invention. Such retroviral vector particles then may be employed, to transduce eukaryotic cells, either in vitro or in vivo. The transduced eukaryotic cells will express a polypeptide of the present invention.

[0494] In certain other embodiments, cells are engineered, ex vivo or in vivo, with polynucleotide contained in an adenovirus vector. Adenovirus can be manipulated such that it encodes and expresses a polypeptide of the present invention, and at the same time is inactivated in terms of its ability to replicate in a normal lytic viral life cycle. Adenovirus expression is achieved without integration of the viral DNA into the host cell chromosome, thereby alleviating concerns about insertional mutagenesis. Furthermore, adenoviruses have been used as live enteric vaccines for many years with an excellent safety profile (Schwartz, et al., Am. Rev. Respir. Dis.109:233-238 (1974)). Finally, adenovirus mediated gene transfer has been demonstrated in a number of instances including transfer of alpha-1-antitrypsin and CFTR to the lungs of cotton rats (Rosenfeld et al., Science 252:431-434 (1991); Rosenfeld et al., Cell 68:143-155 (1991)). Furthermore, extensive studies to attempt to establish adenovirus as a causative agent in human cancer were uniformly negative (Green et al., Proc. Natl. Acad. Sci. USA 76:6606 (1979)).

[0495] Suitable adenoviral vectors useful in the present invention are described, for example, in Kozarsky and Wilson, Curr. Opin. Genet. Devel. 3:499-503 (1993); Rosenfeld et al., Cell 68:143-155 (1992); Engelhardt et al., Human Genet. Ther. 4:759-769 (1993); Yang et al., Nature Genet. 7:362-369 (1994); Wilson et al., Nature 365:691-692 (1993); and U.S. Pat. No. 5,652,224, which are herein incorporated by reference. For example, the adenovirus vector Ad2 is useful and can be grown in human 293 cells. These cells contain the E1 region of adenovirus and constitutively express E1a and E1b, which complement the defective adenoviruses by providing the products of the genes deleted from the vector. In addition to Ad2, other varieties of adenovirus (e.g., Ad3, Ad5, and Ad7) are also useful in the present invention.

[0496] Preferably, the adenoviruses used in the present invention are replication deficient. Replication deficient adenoviruses require the aid of a helper virus and/or packaging cell line to form infectious particles. The resulting virus is capable of infecting cells and can express a polynucleotide of interest which is operably linked to a promoter, but cannot replicate in most cells. Replication deficient adenoviruses may be deleted in one or more of all or a portion of the following genes: E1a, E1b, E3, E4, E2a, or L1 through L5.

[0497] In certain other embodiments, the cells are engineered, ex vivo or in vivo, using an adeno-associated virus (AAV). AAVs are naturally occurring defective viruses that require helper viruses to produce infectious particles (Muzyczka, N., Curr. Topics in Microbiol. Immunol. 158:97 (1992)). It is also one of the few viruses that may integrate its DNA into non-dividing cells. Vectors containing as little as 300 base pairs of AAV can be packaged and can integrate, but space for exogenous DNA is limited to about 4.5 kb. Methods for producing and using such AAVs are known in the art. See, for example, U.S. Pat. Nos. 5,139,941, 5,173,414, 5,354,678, 5,436,146, 5,474,935, 5,478,745, and 5,589,377.

[0498] For example, an appropriate AAV vector for use in the present invention will include all the sequences necessary for DNA replication, encapsidation, and host-cell integration. The polynucleotide construct is inserted into the AAV vector using standard cloning methods, such as those found in Sambrook et al., Molecular Cloning: A Laboratory Manual, Cold Spring Harbor Press (1989). The recombinant AAV vector is then transfected into packaging cells which are infected with a helper virus, using any standard technique, including lipofection, electroporation, calcium phosphate precipitation, etc. Appropriate helper viruses include adenoviruses, cytomegaloviruses, vaccinia viruses, or herpes viruses. Once the packaging cells are transfected and infected, they will produce infectious AAV viral particles which contain the polynucleotide construct. These viral particles are then used to transduce eukaryotic cells, either ex vivo or in vivo. The transduced cells will contain the polynucleotide construct integrated into its genome, and will express a polypeptide of the invention.

[0499] Another method of gene therapy involves operably associating heterologous control regions and endogenous reproductive system related antigen polynucleotide sequences (e.g., encoding a reproductive system related antigen polypeptide of the present invention) via homologous recombination (see, e.g., U.S. Pat. No. 5,641,670, issued Jun. 24, 1997; International Publication No. WO 96/29411, published Sep. 26, 1996; International Publication No. WO 94/12650, published Aug. 4, 1994; Koller et al., Proc. Natl. Acad. Sci. USA 86:8932-8935 (1989); and Zijlstra et al., Nature 342:435-438 (1989), which are herein incorporated by reference. This method involves the activation of a gene which is present in the target cells, but which is not normally expressed in the cells, or is expressed at a lower level than desired.

[0500] Polynucleotide constructs are made, using standard techniques known in the art, which contain the promoter with targeting sequences flanking the promoter. Suitable promoters are described herein. The targeting sequence is sufficiently complementary to an endogenous sequence to permit homologous recombination of the promoter-targeting sequence with the endogenous sequence. The targeting sequence will be sufficiently near the 5′ end of the desired endogenous polynucleotide sequence so the promoter will be operably linked to the endogenous sequence upon homologous recombination.

[0501] The promoter and the targeting sequences can be amplified using PCR. Preferably, the amplified promoter contains distinct restriction enzyme sites on the 5′ and 3′ ends. Preferably, the 3′ end of the first targeting sequence contains the same restriction enzyme site as the 5′ end of the amplified promoter and the 5′ end of the second targeting sequence contains the same restriction site as the 3′ end of the amplified promoter. The amplified promoter and targeting sequences are digested and ligated together.

[0502] The promoter-targeting sequence construct is delivered to the cells, either as naked polynucleotide, or in conjunction with transfection-facilitating agents, such as liposomes, viral sequences, viral particles, whole viruses, lipofection, precipitating agents, etc., described in more detail above. The P promoter-targeting sequence can be delivered by any method, included direct needle injection, intravenous injection, topical administration, catheter infusion, particle accelerators, etc. The methods are described in more detail below.

[0503] The promoter-targeting sequence construct is taken up by cells. Homologous recombination between the construct and the endogenous sequence takes place, such that an endogenous sequence is placed under the control of the promoter. The promoter then drives the expression of the endogenous sequence.

[0504] The polynucleotide encoding a polypeptide of the present invention may contain a secretory signal sequence that facilitates secretion of the protein. Typically, the signal sequence is positioned in the coding region of the polynucleotide to be expressed towards or at the 5′ end of the coding region. The signal sequence may be homologous or heterologous to the reproductive system related antigen polynucleotide of interest and may be homologous or heterologous to the cells to be transfected. Additionally, the signal sequence may be chemically synthesized using methods known in the art.

[0505] Any mode of administration of any of the above-described polynucleotides constructs can be used so long as the mode results in the expression of one or more molecules in an amount sufficient to provide a therapeutic effect. This includes direct needle injection, systemic injection, catheter infusion, biolistic injectors, particle accelerators (i.e., “gene guns”), gelfoam sponge depots, other commercially available depot materials, osmotic pumps (e.g., Alza minipumps), oral or suppositorial solid (tablet or pill) pharmaceutical formulations, and decanting or topical applications during surgery. For example, direct injection of naked calcium phosphate-precipitated plasmid into rat liver and rat spleen or a protein-coated plasmid into the portal vein has resulted in gene expression of the foreign gene in the rat livers (Kaneda et al., Science 243:375 (1989)).

[0506] A preferred method of local administration is by direct injection. Preferably, a recombinant molecule of the present invention complexed with a delivery vehicle is administered by direct injection into or locally within the area of arteries. Administration of a composition locally within the area of arteries refers to injecting the composition centimeters and preferably, millimeters within arteries.

[0507] Another method of local administration is to contact a polynucleotide construct of the present invention in or around a surgical wound. For example, a patient can undergo surgery and the polynucleotide construct can be coated on the surface of tissue inside the wound or the construct can be injected into areas of tissue inside the wound.

[0508] Therapeutic compositions useful in systemic administration, include recombinant molecules of the present invention complexed to a targeted delivery vehicle of the present invention. Suitable delivery vehicles for use with systemic administration comprise liposomes comprising ligands for targeting the vehicle to a particular site. In specific embodiments, suitable delivery vehicles for use with systemic administration comprise liposomes comprising polypeptides of the invention for targeting the vehicle to a particular site.

[0509] Preferred methods of systemic administration, include intravenous injection, aerosol, oral and percutaneous (topical) delivery. Intravenous injections can be performed using methods standard in the art. Aerosol delivery can also be performed using methods standard in the art (see, for example, Stribling et al., Proc. Natl. Acad. Sci. USA 189:11277-11281, 1992, which is incorporated herein by reference). Oral delivery can be performed by complexing a polynucleotide construct of the present invention to a carrier capable of withstanding degradation by digestive enzymes in the gut of an animal. Examples of such carriers, include plastic capsules or tablets, such as those known in the art. Topical delivery can be performed by mixing a polynucleotide construct of the present invention with a lipophilic reagent (e.g., DMSO) that is capable of passing into the skin.

[0510] Determining an effective amount of substance to be delivered can depend upon a number of factors including, for example, the chemical structure and biological activity of the substance, the age and weight of the animal, the precise condition requiring treatment and its severity, and the route of administration. The frequency of treatments depends upon a number of factors, such as the amount of polynucleotide constructs administered per dose, as well as the health and history of the subject. The precise amount, number of doses, and timing of doses will be determined by the attending physician or veterinarian.

[0511] Therapeutic compositions of the present invention can be administered to any animal, preferably to mammals and birds. Preferred mammals include humans, dogs, cats, mice, rats, rabbits sheep, cattle, horses and pigs, with humans being particularly preferred.

[0512] Biological Activities

[0513] Polynucleotides or polypeptides, or agonists or antagonists of the present invention, can be used in assays to test for one or more biological activities. If these polynucleotides or polypeptides, or agonists or antagonists of the present invention, do exhibit activity in a particular assay, it is likely that these molecules may be involved in the diseases associated with the biological activity. Thus, the polynucleotides and polypeptides, and agonists or antagonists could be used to treat, prevent diagnose and/or prognose the associated disease.

[0514] The reproductive system related antigen polynucleotides and polypeptides of the invention are predicted to have predominant expression in tissues of the reproductive system.

[0515] Thus, the reproductive system related antigens of the invention may be useful as therapeutic molecules. Each would be useful for diagnosis, detection, treatment and/or prevention of diseases or disorders of the reproductive system, including, for example, injury and trauma, infections, neoplastic disorders, congenital defects, and diseases or disorders which result in infertility, complications with pregnancy, labor, or parturition, postpartum difficulties, and/or as described below in the section entitled “Reproductive System Disorders”.

[0516] In a preferred embodiment, polynucleotides of the invention (e.g., a nucleic acid sequence of SEQ ID NO: X or the complement thereof, or the cDNA sequence contained in Clone ID NO: Z, or fragments or variants thereof) and/or polypeptides of the invention (e.g., an amino acid sequence contained in SEQ ID NO: Y, an amino acid sequence encoded by SEQ ID NO: X, or the complement threof, an amino acid sequence encoded by the cDNA sequence contained in Clone ID NO: Z and fragments or variants thereof as described herein) are useful for the diagnosis, detection, treatement, and/or prevention of diseases or disorders of the tissues/cells corresponding to the library source disclosed in column 7 of Table 1A expressing the corresponding reproductive system related sequence disclosed in the same row of Table 1A.

[0517] Particularly, the reproductive system related antigens may be a useful therapeutic for cancers of the reproductive system. Treatment, diagnosis, detection, and/or prevention of disorders of the reproductive system could be carried out using a reproductive system related antigen or soluble form of a reproductive system related antigen, a reproductive system related antigen ligand, gene therapy, or ex vivo applications. Moreover, inhibitors of a reproductive system related antigen, either blocking antibodies or mutant forms, could modulate the expression of the reproductive system related antigen. These inhibitors may be useful to treat, diagnose, detect, and/or prevent diseases associated with the misregulation of a reproductive system related antigen.

[0518] In one embodiment, the invention provides a method for the specific delivery of compositions of the invention to cells (e.g., normal or diseased reproductive system cells) by administering polypeptides of the invention (e.g., reproductive system related antigen polypeptides or anti-reproductive system related antigen antibodies) that are associated with heterologous polypeptides or nucleic acids. In one example, the invention provides a method for delivering a therapeutic protein into the targeted cell (e.g., an aberrant reproductive system cell or reproductive system cancer cell). In another example, the invention provides a method for delivering a single stranded nucleic acid (e.g., antisense or ribozymes) or double stranded nucleic acid (e.g., DNA that can integrate into the cell's genome or replicate episomally and that can be transcribed) into the targeted cell.

[0519] In another embodiment, the invention provides a method for the specific destruction of cells (e.g., the destruction of aberrant reproductive system cells, including, but not limited to, reproductive system tumor cells) by administering polypeptides of the invention (e.g., reproductive system related antigen polypeptides or fragments thereof, or anti-reproductive system related antigen antibodies) in association with toxins or cytotoxic prodrugs.

[0520] By “toxin” is meant compounds that bind and activate endogenous cytotoxic effector systems, radioisotopes, holotoxins, modified toxins, catalytic subunits of toxins, cytotoxins (cytotoxic agents), or any molecules or enzymes not normally present in or on the surface of a cell that under defined conditions cause the cell's death. Toxins that may be used according to the methods of the invention include, but are not limited to, radioisotopes known in the art, compounds such as, for example, antibodies (or complement fixing containing portions thereof) that bind an inherent or induced endogenous cytotoxic effector system, thymidine kinase, endonuclease, RNAse, alpha toxin, ricin, abrin, Pseudomonas exotoxin A, diphtheria toxin, saporin, momordin, gelonin, pokeweed antiviral protein, alpha-sarcin and cholera toxin. “Toxin” also includes a cytostatic or cytocidal agent, a therapeutic agent or a radioactive metal ion, e.g., alpha-emitters such as, for example, ²¹³Bi, or other radioisotopes such as, for example, ¹⁰³Pd, ¹³³Xe, ¹³¹I, ⁶⁸Ge, ⁵⁷Co, ⁶⁵Zn, ⁸⁵Sr ³²P, ³⁵S, ⁹⁰Y, ¹⁵³Sm, ¹⁵³Gd, ¹⁶⁹Yb, ⁵¹Cr, ⁵⁴Mn, ⁷⁵Se, ¹¹³Sn, ⁹⁰Yttrium, ¹¹⁷Tin, ¹⁸⁶Rhenium, ¹⁶⁶Hololmium, and ¹⁸⁸Rhenium; luminescent labels, such as luminol; and fluorescent labels, such as fluorescein and rhodamine, and biotin.

[0521] Techniques known in the art may be applied to label antibodies of the invention. Such techniques include, but are not limited to, the use of bifunctional conjugating agents (see e.g., U.S. Pat. Nos. 5,756,065; 5,714,631; 5,696,239; 5,652,361; 5,505,931; 5,489,425; 5,435,990; 5,428,139; 5,342,604; 5,274,119; 4,994,560; and 5,808,003; the contents of each of which are hereby incorporated by reference in its entirety). A cytotoxin or cytotoxic agent includes any agent that is detrimental to cells. Examples include paclitaxol, cytochalasin B, gramicidin D, ethidium bromide, emetine, mitomycin, etoposide, tenoposide, vincristine, vinblastine, colchicin, doxorubicin, daunorubicin, dihydroxy anthracin dione, mitoxantrone, mithramycin, actinomycin D, 1-dehydrotestosterone, glucocorticoids, procaine, tetracaine, lidocaine, propranolol, and puromycin and analogs or homologs thereof. Therapeutic agents include, but are not limited to, antimetabolites (e.g., methotrexate, 6-mercaptopurine, 6-thioguanine, cytarabine, 5-fluorouracil decarbazine), alkylating agents (e.g., mechlorethamine, thioepa chlorambucil, melphalan, carmustine (BSNU) and lomustine (CCNU), cyclothosphamide, busulfan, dibromomannitol, streptozotocin, mitomycin C, and cis-dichlorodiamine platinum (II) (DDP) cisplatin), anthracyclines (e.g., daunorubicin (formerly daunomycin) and doxorubicin), antibiotics (e.g., dactinomycin (formerly actinomycin), bleomycin, mithramycin, and anthramycin (AMC)), and anti-mitotic agents (e.g., vincristine and vinblastine).

[0522] By “cytotoxic prodrug” is meant a non-toxic compound that is converted by an enzyme, normally present in the cell, into a cytotoxic compound. Cytotoxic prodrugs that may be used according to the methods of the invention include, but are not limited to, glutamyl derivatives of benzoic acid mustard alkylating agent, phosphate derivatives of etoposide or mitomycin C, cytosine arabinoside, daunorubisin, and phenoxyacetamide derivatives of doxorubicin.

[0523] It will be appreciated that conditions caused by a decrease in the standard or normal level of a reproductive system related antigen activity in an individual, particularly disorders of the reproductive system, can be treated by administration of a reproductive system related antigen polypeptide (e.g., such as, for example, the complete reproductive system related antigen polypeptide, the soluble form of the extracellular domain of a reproductive system related antigen polypeptide, or cells expressing the complete protein) or agonist. Thus, the invention also provides a method of treatment of an individual in need of an increased level of reproductive system related antigen activity comprising administering to such an individual a pharmaceutical composition comprising an amount of an isolated reproductive system related antigen polypeptide of the invention, or agonist thereof (e.g., an agonistic anti-reproductive system related antigen antibody), effective to increase the reproductive system related antigen activity level in such an individual.

[0524] It will also be appreciated that conditions caused by a increase in the standard or normal level of reproductive system related antigen activity in an individual, particularly disorders of the reproductive system, can be treated by administration of reproductive system related antigen polypeptides (e.g., such as, for example, the complete reproductive system related antigen polypeptide, the soluble form of the extracellular domain of a reproductive system related antigen polypeptide, or cells expressing the complete protein) or antagonist (e.g., an antagonistic reproductive system related antigen antibody). Thus, the invention also provides a method of treatment of an individual in need of an decreased level of reproductive system related antigen activity comprising administering to such an individual a pharmaceutical composition comprising an amount of an isolated reproductive system related antigen polypeptide of the invention, or antagonist thereof (e.g., an antagonistic anti-reproductive system related antigen antibody), effective to decrease the reproductive system related antigen activity level in such an individual.

[0525] In certain embodiments, a polypeptide of the invention, or polynucleotides, antibodies, agonists, or antagonists corresponding to that polypeptide, may be used to diagnose and/or prognose diseases and/or disorders associated with the tissue(s) in which the polypeptide of the invention is expressed, including one, two, three, four, five, or more tissues disclosed in Table 1A, column 7 (Tissue Distribution Library Code).

[0526] More generally, polynucleotides, translation products and antibodies corresponding to this gene may be useful for the diagnosis, prognosis, prevention, and/or treatment of diseases and/or disorders associated with the following systems.

[0527] Reproductive System Disorders

[0528] The polynucleotides or polypeptides, or agonists or antagonists of the invention may be used for the diagnosis, treatment, or prevention of diseases and/or disorders of the reproductive system. Reproductive system disorders that can be treated by the compositions of the invention, include, but are not limited to, reproductive system injuries, infections, neoplastic disorders, congenital defects, and diseases or disorders which result in infertility, complications with pregnancy, labor, or parturition, and postpartum difficulties.

[0529] Reproductive system disorders and/or diseases include diseases and/or disorders of the testes, including, but not limited to, testicular atrophy, testicular feminization, cryptorchism (unilateral and bilateral), anorchia, ectopic testis, epididymitis and orchitis (typically resulting from infections such as, for example, gonorrhea, mumps, tuberculosis, and syphilis), testicular torsion, vasitis nodosa, germ cell tumors (e.g., seminomas, embryonal cell carcinomas, teratocarcinomas, choriocarcinomas, yolk sac tumors, and teratomas), stromal tumors (e.g., Leydig cell tumors), hydrocele, hematocele, varicocele, spermatocele, inguinal hernia, and disorders of sperm production (e.g., immotile cilia syndrome, aspermia, asthenozoospermia, azoospermia, oligospermia, and teratozoospermia).

[0530] Reproductive system disorders also include, but are not limited to, disorders of the prostate gland, such as acute non-bacterial prostatitis, chronic non-bacterial prostatitis, acute bacterial prostatitis, chronic bacterial prostatitis, prostatodystonia, prostatosis, granulomatous prostatitis, malacoplakia, benign prostatic hypertrophy or hyperplasia, and prostate neoplastic disorders, including adenocarcinomas, transitional cell carcinomas, ductal carcinomas, and squamous cell carcinomas.

[0531] Additionally, the compositions of the invention may be useful in the diagnosis, treatment, and/or prevention of disorders or diseases of the penis and urethra, including, but not limited to, inflammatory disorders, such as balanoposthitis, balanitis xerotica obliterans, phimosis, paraphimosis, syphilis, herpes simplex virus, gonorrhea, non-gonococcal urethritis, chlamydia, mycoplasma, trichomonas, HIV, AIDS, Reiter's syndrome, condyloma acuminatum, condyloma latum, and pearly penile papules; urethral abnormalities, such as hypospadias, epispadias, and phimosis; premalignant lesions, including Erythroplasia of Queyrat, Bowen's disease, Bowenoid paplosis, giant condyloma of Buscke-Lowenstein, and varrucous carcinoma; penile cancers, including squamous cell carcinomas, carcinoma in situ, verrucous carcinoma, and disseminated penile carcinoma; urethral neoplastic disorders, including penile urethral carcinoma, bulbomembranous urethral carcinoma, and prostatic urethral carcinoma; and erectile disorders, such as priapism, Peyronie's disease, erectile dysfunction, and impotence.

[0532] Moreover, diseases and/or disorders of the vas deferens include, but are not limited to, vasculititis and CBAVD (congenital bilateral absence of the vas deferens); additionally, the polynucleotides, polypeptides, and agonists or antagonists of the present invention may be used in the diagnosis, treatment, and/or prevention of diseases and/or disorders of the seminal vesicles, including but not limited to, hydatid disease, congenital chloride diarrhea, and polycystic kidney disease.

[0533] Other disorders and/or diseases of the male reproductive system that may be diagnosed, treated, and/or prevented with the compositions of the invention include, but are not limited to, Klinefelter's syndrome, Young's syndrome, premature ejaculation, diabetes mellitus, cystic fibrosis, Kartagener's syndrome, high fever, multiple sclerosis, and gynecomastia.

[0534] Further, the polynucleotides, polypeptides, and agonists or antagonists of the present invention may be used in the diagnosis, treatment, and/or prevention of diseases and/or disorders of the vagina and vulva, including, but not limited to, bacterial vaginosis, candida vaginitis, herpes simplex virus, chancroid, granuloma inguinale, lymphogranuloma venereum, scabies, human papillomavirus, vaginal trauma, vulvar trauma, adenosis, chlamydia vaginitis, gonorrhea, trichomonas vaginitis, condyloma acuminatum, syphilis, molluscum contagiosum, atrophic vaginitis, Paget's disease, lichen sclerosus, lichen planus, vulvodynia, toxic shock syndrome, vaginismus, vulvovaginitis, vulvar vestibulitis, and neoplastic disorders, such as squamous cell hyperplasia, clear cell carcinoma, basal cell carcinoma, melanomas, cancer of Bartholin's gland, and vulvar intraepithelial neoplasia.

[0535] Disorders and/or diseases of the uterus that may be diagnosed, treated, and/or prevented with the compositions of the invention include, but are not limited to, dysmenorrhea, retroverted uterus, endometriosis, fibroids, adenomyosis, anovulatory bleeding, amenorrhea, Cushing's syndrome, hydatidiform moles, Asherman's syndrome, premature menopause, precocious puberty, uterine polyps, dysfunctional uterine bleeding (e.g., due to aberrant hormonal signals), and neoplastic disorders, such as adenocarcinomas, keiomyosarcomas, and sarcomas. Additionally, the polypeptides, polynucleotides, or agonists or antagonists of the invention may be useful as a marker or detector of, as well as in the diagnosis, treatment, and/or prevention of congenital uterine abnormalities, such as bicornuate uterus, septate uterus, simple unicornuate uterus, unicornuate uterus with a noncavitary rudimentary horn, unicornuate uterus with a non-communicating cavitary rudimentary horn, unicornuate uterus with a communicating cavitary horn, arcuate uterus, uterine didelfus, and T-shaped uterus.

[0536] Ovarian diseases and/or disorders that may be diagnosed, treated, and/or prevented with the compositions of the invention include, but are not limited to, anovulation, polycystic ovary syndrome (Stein-Leventhal syndrome), ovarian cysts, ovarian hypofunction, ovarian insensitivity to gonadotropins, ovarian overproduction of androgens, right ovarian vein syndrome, amenorrhea, hirutism, and ovarian cancer (including, but not limited to, primary and secondary cancerous growth, Sertoli-Leydig tumors, endometriod carcinoma of the ovary, ovarian papillary serous adenocarcinoma, ovarian mucinous adenocarcinoma, and Ovarian Krukenberg tumors).

[0537] Cervical diseases and/or disorders that may be diagnosed, treated, and/or prevented with the compositions of the invention include, but are not limited to, cervicitis, chronic cervicitis, mucopurulent cervicitis, cervical dysplasia, cervical polyps, Nabothian cysts, cervical erosion, cervical incompetence, and cervical neoplasms (including, for example, cervical carcinoma, squamous metaplasia, squamous cell carcinoma, adenosquamous cell neoplasia, and columnar cell neoplasia).

[0538] Additionally, diseases and/or disorders of the reproductive system that may be diagnosed, treated, and/or prevented with the compositions of the invention include, but are not limited to, disorders and/or diseases of pregnancy, including miscarriage and stillbirth, such as early abortion, late abortion, spontaneous abortion, induced abortion, therapeutic abortion, threatened abortion, missed abortion, incomplete abortion, complete abortion, habitual abortion, missed abortion, and septic abortion; ectopic pregnancy, anemia, Rh incompatibility, vaginal bleeding during pregnancy, gestational diabetes, intrauterine growth retardation, polyhydramnios, HELLP syndrome, abruptio placentae, placenta previa, hyperemesis, preeclampsia, eclampsia, herpes gestationis, and urticaria of pregnancy. Additionally, the polynucleotides, polypeptides, and agonists or antagonists of the present invention may be used in the diagnosis, treatment, and/or prevention of diseases that can complicate pregnancy, including heart disease, heart failure, rheumatic heart disease, congenital heart disease, mitral valve prolapse, high blood pressure, anemia, kidney disease, infectious disease (e.g., rubella, cytomegalovirus, toxoplasmosis, infectious hepatitis, chlamydia, HIV, AIDS, and genital herpes), diabetes mellitus, Graves' disease, thyroiditis, hypothyroidism, Hashimoto's thyroiditis, chronic active hepatitis, cirrhosis of the liver, primary biliary cirrhosis, asthma, systemic lupus eryematosis, rheumatoid arthritis, myasthenia gravis, idiopathic thrombocytopenic purpura, appendicitis, ovarian cysts, gallbladder disorders,and obstruction of the intestine.

[0539] Complications associated with labor and parturition that may be diagnosed, treated, and/or prevented with the compositions of the invention include, but are not limited to, premature rupture of the membranes, pre-term labor, post-term pregnancy, postmaturity, labor that progresses too slowly, fetal distress (e.g., abnormal heart rate (fetal or maternal), breathing problems, and abnormal fetal position), shoulder dystocia, prolapsed umbilical cord, amniotic fluid embolism, and aberrant uterine bleeding.

[0540] Further, diseases and/or disorders of the postdelivery period, that may be diagnosed, treated, and/or prevented with the compositions of the invention, include, but are not limited to, endometritis, myometritis, parametritis, peritonitis, pelvic thrombophlebitis, pulmonary embolism, endotoxemia, pyelonephritis, saphenous thrombophlebitis, mastitis, cystitis, postpartum hemorrhage, and inverted uterus.

[0541] Other disorders and/or diseases of the female reproductive system that may be diagnosed, treated, and/or prevented by the polynucleotides, polypeptides, and agonists or antagonists of the present invention include, but are not limited to, Turner's syndrome, pseudohermaphroditism, premenstrual syndrome, pelvic inflammatory disease, pelvic congestion (vascular engorgement), frigidity, anorgasmia, dyspareunia, ruptured fallopian tube, and Mittelschmerz.

[0542] Immune Activity

[0543] Polynucleotides, polypeptides, antibodies, and/or agonists or antagonists of the present invention may be useful in treating, preventing, diagnosing and/or prognosing diseases, disorders, and/or conditions of the immune system, by, for example, activating or inhibiting the proliferation, differentiation, or mobilization (chemotaxis) of immune cells. Immune cells develop through a process called hematopoiesis, producing myeloid (platelets, red blood cells, neutrophils, and macrophages) and lymphoid (B and T lymphocytes) cells from pluripotent stem cells. The etiology of these immune diseases, disorders, and/or conditions may be genetic, somatic, such as cancer and some autoimmune diseases, acquired (e.g., by chemotherapy or toxins), or infectious. Moreover, polynucleotides, polypeptides, antibodies, and/or agonists or antagonists of the present invention can be used as a marker or detector of a particular immune system disease or disorder.

[0544] In another embodiment, a polypeptide of the invention, or polynucleotides, antibodies, agonists, or antagonists corresponding to that polypeptide, may be used to treat diseases and disorders of the immune system and/or to inhibit or enhance an immune response generated by cells associated with the tissue(s) in which the polypeptide of the invention is expressed, including one, two, three, four, five, or more tissues disclosed in Table 1A, column 7 (Tissue Distribution Library Code).

[0545] Polynucleotides, polypeptides, antibodies, and/or agonists or antagonists of the present invention may be useful in treating, preventing, diagnosing, and/or prognosing immunodeficiencies, including both congenital and acquired immunodeficiencies. Examples of B cell immunodeficiencies in which immunoglobulin levels B cell function and/or B cell numbers are decreased include: X-linked agammaglobulinemia (Bruton's disease), X-linked infantile agammaglobulinemia, X-linked immunodeficiency with hyper IgM, non X-linked immunodeficiency with hyper IgM, X-linked lymphoproliferative syndrome (XLP), agammaglobulinemia including congenital and acquired agammaglobulinemia, adult onset agammaglobulinemia, late-onset agammaglobulinemia, dysgammaglobulinemia, hypogammaglobulinemia, unspecified hypogammaglobulinemia, recessive agammaglobulinemia (Swiss type), Selective IgM deficiency, selective IgA deficiency, selective IgG subclass deficiencies, IgG subclass deficiency (with or without IgA deficiency), Ig deficiency with increased IgM, IgG and IgA deficiency with increased IgM, antibody deficiency with normal or elevated Igs, Ig heavy chain deletions, kappa chain deficiency, B cell lymphoproliferative disorder (BLPD), common variable immunodeficiency (CVID), common variable immunodeficiency (CVI) (acquired), and transient hypogammaglobulinemia of infancy.

[0546] In specific embodiments, ataxia-telangiectasia or conditions associated with ataxia-telangiectasia are treated, prevented, diagnosed, and/or prognosing using the polypeptides or polynucleotides of the invention, and/or agonists or antagonists thereof.

[0547] Examples of congenital immunodeficiencies in which T cell and/or B cell function and/or number is decreased include, but are not limited to: DiGeorge anomaly, severe combined immunodeficiencies (SCID) (including, but not limited to, X-linked SCID, autosomal recessive SCID, adenosine deaminase deficiency, purine nucleoside phosphorylase (PNP) deficiency, Class II MHC deficiency (Bare lymphocyte syndrome), Wiskott-Aldrich syndrome, and ataxia telangiectasia), thymic hypoplasia, third and fourth pharyngeal pouch syndrome, 22q11.2 deletion, chronic mucocutaneous candidiasis, natural killer cell deficiency (NK), idiopathic CD4+T-lymphocytopenia, immunodeficiency with predominant T cell defect (unspecified), and unspecified immunodeficiency of cell mediated immunity.

[0548] In specific embodiments, DiGeorge anomaly or conditions associated with DiGeorge anomaly are treated, prevented, diagnosed, and/or prognosed using polypeptides or polynucleotides of the invention, or antagonists or agonists thereof.

[0549] Other immunodeficiencies that may be treated, prevented, diagnosed, and/or prognosed using polypeptides or polynucleotides of the invention, and/or agonists or antagonists thereof, include, but are not limited to, chronic granulomatous disease, Chédiak-Higashi syndrome, myeloperoxidase deficiency, leukocyte glucose-6-phosphate dehydrogenase deficiency, X-linked lymphoproliferative syndrome (XLP), leukocyte adhesion deficiency, complement component deficiencies (including C1, C2, C3, C4, C5, C6, C7, C8 and/or C9 deficiencies), reticular dysgenesis, thymic alymphoplasia-aplasia, immunodeficiency with thymoma, severe congenital leukopenia, dysplasia with immunodeficiency, neonatal neutropenia, short limbed dwarfism, and Nezelof syndrome-combined immunodeficiency with Igs.

[0550] In a preferred embodiment, the immunodeficiencies and/or conditions associated with the immunodeficiencies recited above are treated, prevented, diagnosed and/or prognosed using polynucleotides, polypeptides, antibodies, and/or agonists or antagonists of the present invention.

[0551] In a preferred embodiment polynucleotides, polypeptides, antibodies, and/or agonists or antagonists of the present invention could be used as an agent to boost immunoresponsiveness among immunodeficient individuals. In specific embodiments, polynucleotides, polypeptides, antibodies, and/or agonists or antagonists of the present invention could be used as an agent to boost immunoresponsiveness among B cell and/or T cell immunodeficient individuals.

[0552] The polynucleotides, polypeptides, antibodies, and/or agonists or antagonists of the present invention may be useful in treating, preventing, diagnosing and/or prognosing autoimmune disorders. Many autoimmune disorders result from inappropriate recognition of self as foreign material by immune cells. This inappropriate recognition results in an immune response leading to the destruction of the host tissue. Therefore, the administration of polynucleotides and polypeptides of the invention that can inhibit an immune response, particularly the proliferation, differentiation, or chemotaxis of T-cells, may be an effective therapy in preventing autoimmune disorders.

[0553] Autoimmune diseases or disorders that may be treated, prevented, diagnosed and/or prognosed by polynucleotides, polypeptides, antibodies, and/or agonists or antagonists of the present invention include, but are not limited to, one or more of the following: systemic lupus erythematosus, rheumatoid arthritis, ankylosing spondylitis, multiple sclerosis, autoimmune thyroiditis, Hashimoto's thyroiditis, autoimmune hemolytic anemia, hemolytic anemia, thrombocytopenia, autoimmune thrombocytopenia purpura, autoimmune neonatal thrombocytopenia, idiopathic thrombocytopenia purpura, purpura (e.g., Henloch-Scoenlein purpura), autoimmunocytopenia, Goodpasture's syndrome, Pemphigus vulgaris, myasthenia gravis, Grave's disease (hyperthyroidism), and insulin-resistant diabetes mellitus.

[0554] Additional disorders that are likely to have an autoimmune component that may be treated, prevented, and/or diagnosed with the compositions of the invention include, but are not limited to, type II collagen-induced arthritis, antiphospholipid syndrome, dermatitis, allergic encephalomyelitis, myocarditis, relapsing polychondritis, rheumatic heart disease, neuritis, uveitis ophthalmia, polyendocrinopathies, Reiter's Disease, Stiff-Man Syndrome, autoimmune pulmonary inflammation, autism, Guillain-Barre Syndrome, insulin dependent diabetes mellitus, and autoimmune inflammatory eye disorders.

[0555] Additional disorders that are likely to have an autoimmune component that may be treated, prevented, diagnosed and/or prognosed with the compositions of the invention include, but are not limited to, scleroderma with anti-collagen antibodies (often characterized, e.g., by nucleolar and other nuclear antibodies), mixed connective tissue disease (often characterized, e.g., by antibodies to extractable nuclear antigens (e.g., ribonucleoprotein)), polymyositis (often characterized, e.g., by nonhistone ANA), pernicious anemia (often characterized, e.g., by antiparietal cell, microsomes, and intrinsic factor antibodies), idiopathic Addison's disease (often characterized, e.g., by humoral and cell-mediated adrenal cytotoxicity, infertility (often characterized, e.g., by antispermatozoal antibodies), glomerulonephritis (often characterized, e.g., by glomerular basement membrane antibodies or immune complexes), bullous pemphigoid (often characterized, e.g., by IgG and complement in basement membrane), Sjogren's syndrome (often characterized, e.g., by multiple tissue antibodies, and/or a specific nonhistone ANA (SS-B)), diabetes mellitus (often characterized, e.g., by cell-mediated and humoral islet cell antibodies), and adrenergic drug resistance (including adrenergic drug resistance with asthma or cystic fibrosis) (often characterized, e.g., by beta-adrenergic receptor antibodies).

[0556] Additional disorders that may have an autoimmune component that may be treated, prevented, diagnosed and/or prognosed with the compositions of the invention include, but are not limited to, chronic active hepatitis (often characterized, e.g., by smooth muscle antibodies), primary biliary cirrhosis (often characterized, e.g., by mitochondria antibodies), other endocrine gland failure (often characterized, e.g., by specific tissue antibodies in some cases), vitiligo (often characterized, e.g., by melanocyte antibodies), vasculitis (often characterized, e.g., by Ig and complement in vessel walls and/or low serum complement), post-MI (often characterized, e.g., by myocardial antibodies), cardiotomy syndrome (often characterized, e.g., by myocardial antibodies), urticaria (often characterized, e.g., by IgG and IgM antibodies to IgE), atopic dermatitis (often characterized, e.g., by IgG and IgM antibodies to IgE), asthma (often characterized, e.g., by IgG and IgM antibodies to IgE), and many other inflammatory, granulomatous, degenerative, and atrophic disorders.

[0557] In a preferred embodiment, the autoimmune diseases and disorders and/or conditions associated with the diseases and disorders recited above are treated, prevented, diagnosed and/or prognosed using for example, antagonists or agonists, polypeptides or polynucleotides, or antibodies of the present invention. In a specific preferred embodiment, rheumatoid arthritis is treated, prevented, and/or diagnosed using polynucleotides, polypeptides, antibodies, and/or agonists or antagonists of the present invention.

[0558] In another specific preferred embodiment, systemic lupus erythematosus is treated, prevented, and/or diagnosed using polynucleotides, polypeptides, antibodies, and/or agonists or antagonists of the present invention. In another specific preferred embodiment, idiopathic thrombocytopenia purpura is treated, prevented, and/or diagnosed using polynucleotides, polypeptides, antibodies, and/or agonists or antagonists of the present invention.

[0559] In another specific preferred embodiment IgA nephropathy is treated, prevented, and/or diagnosed using polynucleotides, polypeptides, antibodies, and/or agonists or antagonists of the present invention.

[0560] In a preferred embodiment, the autoimmune diseases and disorders and/or conditions associated with the diseases and disorders recited above are treated, prevented, diagnosed and/or prognosed using polynucleotides, polypeptides, antibodies, and/or agonists or antagonists of the present invention.

[0561] In preferred embodiments, polypeptides, antibodies, polynucleotides and/or agonists or antagonists of the present invention are used as a immunosuppressive agent(s).

[0562] Polynucleotides, polypeptides, antibodies, and/or agonists or antagonists of the present invention may be useful in treating, preventing, prognosing, and/or diagnosing diseases, disorders, and/or conditions of hematopoietic cells. Polynucleotides, polypeptides, antibodies, and/or agonists or antagonists of the present invention could be used to increase differentiation and proliferation of hematopoietic cells, including the pluripotent stem cells, in an effort to treat or prevent those diseases, disorders, and/or conditions associated with a decrease in certain (or many) types hematopoietic cells, including but not limited to, leukopenia, neutropenia, anemia, and thrombocytopenia. Alternatively, Polynucleotides, polypeptides, antibodies, and/or agonists or antagonists of the present invention could be used to increase differentiation and proliferation of hematopoietic cells, including the pluripotent stem cells, in an effort to treat or prevent those diseases, disorders, and/or conditions associated with an increase in certain (or many) types of hematopoietic cells, including but not limited to, histiocytosis.

[0563] Allergic reactions and conditions, such as asthma (particularly allergic asthma) or other respiratory problems, may also be treated, prevented, diagnosed and/or prognosed using polypeptides, antibodies, or polynucleotides of the invention, and/or agonists or antagonists thereof. Moreover, these molecules can be used to treat, prevent, prognose, and/or diagnose anaphylaxis, hypersensitivity to an antigenic molecule, or blood group incompatibility.

[0564] Additionally, polypeptides or polynucleotides of the invention, and/or agonists or antagonists thereof, may be used to treat, prevent, diagnose and/or prognose IgE-mediated allergic reactions. Such allergic reactions include, but are not limited to, asthma, rhinitis, and eczema. In specific embodiments, polynucleotides, polypeptides, antibodies, and/or agonists or antagonists of the present invention may be used to modulate IgE concentrations in vitro or in vivo.

[0565] Moreover, polynucleotides, polypeptides, antibodies, and/or agonists or antagonists of the present invention have uses in the diagnosis, prognosis, prevention, and/or treatment of inflammatory conditions. For example, since polypeptides, antibodies, or polynucleotides of the invention, and/or agonists or antagonists of the invention may inhibit the activation, proliferation and/or differentiation of cells involved in an inflammatory response, these molecules can be used to prevent and/or treat chronic and acute inflammatory conditions. Such inflammatory conditions include, but are not limited to, for example, inflammation associated with infection (e.g., septic shock, sepsis, or systemic inflammatory response syndrome), ischemia-reperfusion injury, endotoxin lethality, complement-mediated hyperacute rejection, nephritis, cytokine or chemokine induced lung injury, inflammatory bowel disease, Crohn's disease, over production of cytokines (e.g., TNF or IL-1.), respiratory disorders (e.g., asthma and allergy); gastrointestinal disorders (e.g., inflammatory bowel disease); cancers (e.g., gastric, ovarian, lung, bladder, liver, and breast); CNS disorders (e.g., multiple sclerosis; ischemic brain injury and/or stroke, traumatic brain injury, neurodegenerative disorders (e.g., Parkinson's disease and Alzheimer's disease); AIDS-related dementia; and prion disease); cardiovascular disorders (e.g., atherosclerosis, myocarditis, cardiovascular disease, and cardiopulmonary bypass complications); as well as many additional diseases, conditions, and disorders that are characterized by inflammation (e.g., hepatitis, rheumatoid arthritis, gout, trauma, pancreatitis, sarcoidosis, dermatitis, renal ischemia-reperfusion injury, Grave's disease, systemic lupus erythematosus, diabetes mellitus, and allogenic transplant rejection).

[0566] Because inflammation is a fundamental defense mechanism, inflammatory disorders can effect virtually any tissue of the body. Accordingly, polynucleotides, polypeptides, and antibodies of the invention, as well as agonists or antagonists thereof, have uses in the treatment of tissue-specific inflammatory disorders, including, but not limited to, adrenalitis, alveolitis, angiocholecystitis, appendicitis, balanitis, blepharitis, bronchitis, bursitis, carditis, cellulitis, cervicitis, cholecystitis, chorditis, cochlitis, colitis, conjunctivitis, cystitis, dermatitis, diverticulitis, encephalitis, endocarditis, esophagitis, eustachitis, fibrositis, folliculitis, gastritis, gastroenteritis, gingivitis, glossitis, hepatosplenitis, keratitis, labyrinthitis, laryngitis, lymphangitis, mastitis, media otitis, meningitis, metritis, mucitis, myocarditis, myosititis, myringitis, nephritis, neuritis, orchitis, osteochondritis, otitis, pericarditis, peritendonitis, peritonitis, pharyngitis, phlebitis, poliomyelitis, prostatitis, pulpitis, retinitis, rhinitis, salpingitis, scleritis, sclerochoroiditis, scrotitis, sinusitis, spondylitis, steatitis, stomatitis, synovitis, syringitis, tendonitis, tonsillitis, urethritis, and vaginitis.

[0567] In specific embodiments, polypeptides, antibodies, or polynucleotides of the invention, and/or agonists or antagonists thereof, are useful to diagnose, prognose, prevent, and/or treat organ transplant rejections and graft-versus-host disease. Organ rejection occurs by host immune cell destruction of the transplanted tissue through an immune response. Similarly, an immune response is also involved in GVHD, but, in this case, the foreign transplanted immune cells destroy the host tissues. Polypeptides, antibodies, or polynucleotides of the invention, and/or agonists or antagonists thereof, that inhibit an immune response, particularly the activation, proliferation, differentiation, or chemotaxis of T-cells, may be an effective therapy in preventing organ rejection or GVHD. In specific embodiments, polypeptides, antibodies, or polynucleotides of the invention, and/or agonists or antagonists thereof, that inhibit an immune response, particularly the activation, proliferation, differentiation, or chemotaxis of T-cells, may be an effective therapy in preventing experimental allergic and hyperacute xenograft rejection.

[0568] In other embodiments, polypeptides, antibodies, or polynucleotides of the invention, and/or agonists or antagonists thereof, are useful to diagnose, prognose, prevent, and/or treat immune complex diseases, including, but not limited to, serum sickness, post streptococcal glomerulonephritis, polyarteritis nodosa, and immune complex-induced vasculitis.

[0569] Polypeptides, antibodies, polynucleotides and/or agonists or antagonists of the invention can be used to treat, detect, and/or prevent infectious agents. For example, by increasing the immune response, particularly increasing the proliferation activation and/or differentiation of B and/or T cells, infectious diseases may be treated, detected, and/or prevented. The immune response may be increased by either enhancing an existing immune response, or by initiating a new immune response. Alternatively, polynucleotides, polypeptides, antibodies, and/or agonists or antagonists of the present invention may also directly inhibit the infectious agent (refer to section of application listing infectious agents, etc), without necessarily eliciting an immune response.

[0570] In another embodiment, polypeptides, antibodies, polynucleotides and/or agonists or antagonists of the present invention are used as a vaccine adjuvant that enhances immune responsiveness to an antigen. In a specific embodiment, polypeptides, antibodies, polynucleotides and/or agonists or antagonists of the present invention are used as an adjuvant to enhance tumor-specific immune responses.

[0571] In another specific embodiment, polypeptides, antibodies, polynucleotides and/or agonists or antagonists of the present invention are used as an adjuvant to enhance anti-viral immune responses. Anti-viral immune responses that may be enhanced using the compositions of the invention as an adjuvant, include virus and virus associated diseases or symptoms described herein or otherwise known in the art. In specific embodiments, the compositions of the invention are used as an adjuvant to enhance an immune response to a virus, disease, or symptom selected from the group consisting of: AIDS, meningitis, Dengue, EBV, and hepatitis (e.g., hepatitis B). In another specific embodiment, the compositions of the invention are used as an adjuvant to enhance an immune response to a virus, disease, or symptom selected from the group consisting of: HIV/AIDS, respiratory syncytial virus, Dengue, rotavirus, Japanese B encephalitis, influenza A and B, parainfluenza, measles, cytomegalovirus, rabies, Junin, Chikungunya, Rift Valley Fever, herpes simplex, and yellow fever.

[0572] In another specific embodiment, polypeptides, antibodies, polynucleotides and/or agonists or antagonists of the present invention are used as an adjuvant to enhance anti-bacterial or anti-fungal immune responses. Anti-bacterial or anti-fungal immune responses that may be enhanced using the compositions of the invention as an adjuvant, include bacteria or fungus and bacteria or fungus associated diseases or symptoms described herein or otherwise known in the art. In specific embodiments, the compositions of the invention are used as an adjuvant to enhance an immune response to a bacteria or fungus, disease, or symptom selected from the group consisting of: tetanus, Diphtheria, botulism, and meningitis type B.

[0573] In another specific embodiment, the compositions of the invention are used as an adjuvant to enhance an immune response to a bacteria or fungus, disease, or symptom selected from the group consisting of: Vibrio cholerae, Mycobacterium leprae, Salmonella typhi, Salmonella paratyphi, Meisseria men ingitidis, Streptococcus pneumoniae, Group B streptococcus, Shigella spp., Enterotoxigenic Escherichia coli, Enterohemorrhagic E. coli, and Borrelia burgdorferi.

[0574] In another specific embodiment, polypeptides, antibodies, polynucleotides and/or agonists or antagonists of the present invention are used as an adjuvant to enhance anti-parasitic immune responses. Anti-parasitic immune responses that may be enhanced using the compositions of the invention as an adjuvant, include parasite and parasite associated diseases or symptoms described herein or otherwise known in the art. In specific embodiments, the compositions of the invention are used as an adjuvant to enhance an immune response to a parasite. In another specific embodiment, the compositions of the invention are used as an adjuvant to enhance an immune response to Plasmodium (malaria) or Leishmania.

[0575] In another specific embodiment, polypeptides, antibodies, polynucleotides and/or agonists or antagonists of the present invention may also be employed to treat infectious diseases including silicosis, sarcoidosis, and idiopathic pulmonary fibrosis; for example, by preventing the recruitment and activation of mononuclear phagocytes.

[0576] In another specific embodiment, polypeptides, antibodies, polynucleotides and/or agonists or antagonists of the present invention are used as an antigen for the generation of antibodies to inhibit or enhance immune mediated responses against polypeptides of the invention.

[0577] In one embodiment, polypeptides, antibodies, polynucleotides and/or agonists or antagonists of the present invention are administered to an animal (e.g., mouse, rat, rabbit, hamster, guinea pig, pigs, micro-pig, chicken, camel, goat, horse, cow, sheep, dog, cat, non-human primate, and human, most preferably human) to boost the immune system to produce increased quantities of one or more antibodies (e.g., IgG, IgA, IgM, and IgE), to induce higher affinity antibody production and immunoglobulin class switching (e.g., IgG, IgA, IgM, and IgE), and/or to increase an immune response.

[0578] In another specific embodiment, polypeptides, antibodies, polynucleotides and/or agonists or antagonists of the present invention are used as a stimulator of B cell responsiveness to pathogens.

[0579] In another specific embodiment, polypeptides, antibodies, polynucleotides and/or agonists or antagonists of the present invention are used as an activator of T cells.

[0580] In another specific embodiment, polypeptides, antibodies, polynucleotides and/or agonists or antagonists of the present invention are used as an agent that elevates the immune status of an individual prior to their receipt of immunosuppressive therapies.

[0581] In another specific embodiment, polypeptides, antibodies, polynucleotides and/or agonists or antagonists of the present invention are used as an agent to induce higher affinity antibodies.

[0582] In another specific embodiment, polypeptides, antibodies, polynucleotides and/or agonists or antagonists of the present invention are used as an agent to increase serum immunoglobulin concentrations.

[0583] In another specific embodiment, polypeptides, antibodies, polynucleotides and/or agonists or antagonists of the present invention are used as an agent to accelerate recovery of immunocompromised individuals.

[0584] In another specific embodiment, polypeptides, antibodies, polynucleotides and/or agonists or antagonists of the present invention are used as an agent to boost immunoresponsiveness among aged populations and/or neonates.

[0585] In another specific embodiment, polypeptides, antibodies, polynucleotides and/or agonists or antagonists of the present invention are used as an immune system enhancer prior to, during, or after bone marrow transplant and/or other transplants (e.g., allogeneic or xenogeneic organ transplantation). With respect to transplantation, compositions of the invention may be administered prior to, concomitant with, and/or after transplantation. In a specific embodiment, compositions of the invention are administered after transplantation, prior to the beginning of recovery of T-cell populations. In another specific embodiment, compositions of the invention are first administered after transplantation after the beginning of recovery of T cell populations, but prior to full recovery of B cell populations.

[0586] In another specific embodiment, polypeptides, antibodies, polynucleotides and/or agonists or antagonists of the present invention are used as an agent to boost immunoresponsiveness among individuals having an acquired loss of B cell function. Conditions resulting in an acquired loss of B cell function that may be ameliorated or treated by administering the polypeptides, antibodies, polynucleotides and/or agonists or antagonists thereof, include, but are not limited to, HIV Infection, AIDS, bone marrow transplant, and B cell chronic lymphocytic leukemia (CLL).

[0587] In another specific embodiment, polypeptides, antibodies, polynucleotides and/or agonists or antagonists of the present invention are used as an agent to boost immunoresponsiveness among individuals having a temporary immune deficiency. Conditions resulting in a temporary immune deficiency that may be ameliorated or treated by administering the polypeptides, antibodies, polynucleotides and/or agonists or antagonists thereof, include, but are not limited to, recovery from viral infections (e.g., influenza), conditions associated with malnutrition, recovery from infectious mononucleosis, or conditions associated with stress, recovery from measles, recovery from blood transfusion, and recovery from surgery.

[0588] In another specific embodiment, polypeptides, antibodies, polynucleotides and/or agonists or antagonists of the present invention are used as a regulator of antigen presentation by monocytes, dendritic cells, and/or B-cells. In one embodiment, polynucleotides, polypeptides, antibodies, and/or agonists or antagonists of the present invention enhance antigen presentation or antagonizes antigen presentation in vitro or in vivo. Moreover, in related embodiments, said enhancement or antagonism of antigen presentation may be useful as an anti-tumor treatment or to modulate the immune system.

[0589] In another specific embodiment, polypeptides, antibodies, polynucleotides and/or agonists or antagonists of the present invention are used as an agent to direct an individual's immune system towards development of a humoral response (i.e. TH2) as opposed to a TH1 cellular response.

[0590] In another specific embodiment, polypeptides, antibodies, polynucleotides and/or agonists or antagonists of the present invention are used as a means to induce tumor proliferation and thus make it more susceptible to anti-neoplastic agents. For example, multiple myeloma is a slowly dividing disease and is thus refractory to virtually all anti-neoplastic regimens. If these cells were forced to proliferate more rapidly their susceptibility profile would likely change.

[0591] In another specific embodiment, polypeptides, antibodies, polynucleotides and/or agonists or antagonists of the present invention are used as a stimulator of B cell production in pathologies such as AFDS, chronic lymphocyte disorder and/or Common Variable Immunodificiency.

[0592] In another specific embodiment, polypeptides, antibodies, polynucleotides and/or agonists or antagonists of the present invention are used as a therapy for generation and/or regeneration of lymphoid tissues following surgery, trauma or genetic defect. In another specific embodiment, polypeptides, antibodies, polynucleotides and/or agonists or antagonists of the present invention are used in the pretreatment of bone marrow samples prior to transplant.

[0593] In another specific embodiment, polypeptides, antibodies, polynucleotides and/or agonists or antagonists of the present invention are used as a gene-based therapy for genetically inherited disorders resulting in immuno-incompetence/immunodeficiency such as observed among SCID patients.

[0594] In another specific embodiment, polypeptides, antibodies, polynucleotides and/or agonists or antagonists of the present invention are used as a means of activating monocytes/macrophages to defend against parasitic diseases that effect monocytes such as Leishmania.

[0595] In another specific embodiment, polypeptides, antibodies, polynucleotides and/or agonists or antagonists of the present invention are used as a means of regulating secreted cytokines that are elicited by polypeptides of the invention.

[0596] In another embodiment, polypeptides, antibodies, polynucleotides and/or agonists or antagonists of the present invention are used in one or more of the applications decribed herein, as they may apply to veterinary medicine.

[0597] In another specific embodiment, polypeptides, antibodies, polynucleotides and/or agonists or antagonists of the present invention are used as a means of blocking various aspects of immune responses to foreign agents or self. Examples of diseases or conditions in which blocking of certain aspects of immune responses may be desired include autoimmune disorders such as lupus, and arthritis, as well as immunoresponsiveness to skin allergies, inflammation, bowel disease, injury and diseases/disorders associated with pathogens.

[0598] In another specific embodiment, polypeptides, antibodies, polynucleotides and/or agonists or antagonists of the present invention are used as a therapy for preventing the B cell proliferation and Ig secretion associated with autoimmune diseases such as idiopathic thrombocytopenic purpura, systemic lupus erythematosus and multiple sclerosis.

[0599] In another specific embodiment, polypeptides, antibodies, polynucleotides and/or agonists or antagonists of the present invention are used as a inhibitor of B and/or T cell migration in endothelial cells. This activity disrupts tissue architecture or cognate responses and is useful, for example in disrupting immune responses, and blocking sepsis.

[0600] In another specific embodiment, polypeptides, antibodies, polynucleotides and/or agonists or antagonists of the present invention are used as a therapy for chronic hypergammaglobulinemia evident in such diseases as monoclonal gammopathy of undetermined significance (MGUS), Waldenstrom's disease, related idiopathic monoclonal gammopathies, and plasmacytomas.

[0601] In another specific embodiment, polypeptides, antibodies, polynucleotides and/or agonists or antagonists of the present invention may be employed for instance to inhibit polypeptide chemotaxis and activation of macrophages and their precursors, and of neutrophils, basophils, B lymphocytes and some T-cell subsets, e.g., activated and CD8 cytotoxic T cells and natural killer cells, in certain autoimmune and chronic inflammatory and infective diseases. Examples of autoimmune diseases are described herein and include multiple sclerosis, and insulin-dependent diabetes.

[0602] The polypeptides, antibodies, polynucleotides and/or agonists or antagonists of the present invention may also be employed to treat idiopathic hyper-eosinophilic syndrome by, for example, preventing eosinophil production and migration.

[0603] In another specific embodiment, polypeptides, antibodies, polynucleotides and/or agonists or antagonists of the present invention are used to enhance or inhibit complement mediated cell lysis.

[0604] In another specific embodiment, polypeptides, antibodies, polynucleotides and/or agonists or antagonists of the present invention are used to enhance or inhibit antibody dependent cellular cytotoxicity.

[0605] In another specific embodiment, polypeptides, antibodies, polynucleotides and/or agonists or antagonists of the present invention may also be employed for treating atherosclerosis, for example, by preventing monocyte infiltration in the artery wall.

[0606] In another specific embodiment, polypeptides, antibodies, polynucleotides and/or agonists or antagonists of the present invention may be employed to treat adult respiratory distress syndrome (ARDS).

[0607] In another specific embodiment, polypeptides, antibodies, polynucleotides and/or agonists or antagonists of the present invention may be useful for stimulating wound and tissue repair, stimulating angiogenesis, and/or stimulating the repair of vascular or lymphatic diseases or disorders. Additionally, agonists and antagonists of the invention may be used to stimulate the regeneration of mucosal surfaces.

[0608] In a specific embodiment, polynucleotides or polypeptides, and/or agonists thereof are used to diagnose, prognose, treat, and/or prevent a disorder characterized by primary or acquired immunodeficiency, deficient serum immunoglobulin production, recurrent infections, and/or immune system dysfunction. Moreover, polynucleotides or polypeptides, and/or agonists thereof may be used to treat or prevent infections of the joints, bones, skin, and/or parotid glands, blood-borne infections (e.g., sepsis, meningitis, septic arthritis, and/or osteomyelitis), autoimmune diseases (e.g., those disclosed herein), inflammatory disorders, and malignancies, and/or any disease or disorder or condition associated with these infections, diseases, disorders and/or malignancies) including, but not limited to, CVID, other primary immune deficiencies, HIV disease, CLL, recurrent bronchitis, sinusitis, otitis media, conjunctivitis, pneumonia, hepatitis, meningitis, herpes zoster (e.g., severe herpes zoster), and/or pneumocystis carnii. Other diseases and disorders that may be prevented, diagnosed, prognosed, and/or treated with polynucleotides or polypeptides, and/or agonists of the present invention include, but are not limited to, HIV infection, HTLV-BLV infection, lymphopenia, phagocyte bactericidal dysfunction anemia, thrombocytopenia, and hemoglobinuria.

[0609] In another embodiment, polynucleotides, polypeptides, antibodies, and/or agonists or antagonists of the present invention are used to treat, and/or diagnose an individual having common variable immunodeficiency disease (“CVID”; also known as “acquired agammaglobulinemia” and “acquired hypogammaglobulinemia”) or a subset of this disease.

[0610] In a specific embodiment, polynucleotides, polypeptides, antibodies, and/or agonists or antagonists of the present invention may be used to diagnose, prognose, prevent, and/or treat cancers or neoplasms including immune cell or immune tissue-related cancers or neoplasms. Examples of cancers or neoplasms that may be prevented, diagnosed, or treated by polynucleotides, polypeptides, antibodies, and/or agonists or antagonists of the present invention include, but are not limited to, acute myelogenous leukemia, chronic myelogenous leukemia, Hodgkin's disease, non-Hodgkin's lymphoma, acute lymphocytic anemia (ALL) Chronic lymphocyte leukemia, plasmacytomas, multiple myeloma, Burkitt's lymphoma, EBV-transformed diseases, and/or diseases and disorders described in the section entitled “Hyperproliferative Disorders” elsewhere herein.

[0611] In another specific embodiment, polypeptides, antibodies, polynucleotides and/or agonists or antagonists of the present invention are used as a therapy for decreasing cellular proliferation of Large B-cell Lymphomas.

[0612] In another specific embodiment, polypeptides, antibodies, polynucleotides and/or agonists or antagonists of the present invention are used as a means of decreasing the involvement of B cells and Ig associated with Chronic Myelogenous Leukemia.

[0613] In specific embodiments, the compositions of the invention are used as an agent to boost immunoresponsiveness among B cell immunodeficient individuals, such as, for example, an individual who has undergone a partial or complete splenectomy.

[0614] Antagonists of the invention include, for example, binding and/or inhibitory antibodies, antisense nucleic acids, ribozymes or soluble forms of the polypeptides of the present invention (e.g., Fc fusion protein; see, e.g., Example 9). Agonists of the invention include, for example, binding or stimulatory antibodies, and soluble forms of the polypeptides (e.g., Fc fusion proteins; see, e.g., Example 9). Polypeptides, antibodies, polynucleotides and/or agonists or antagonists of the present invention may be employed in a composition with a pharmaceutically acceptable carrier, e.g., as described herein.

[0615] In another embodiment, polypeptides, antibodies, polynucleotides and/or agonists or antagonists of the present invention are administered to an animal (including, but not limited to, those listed above, and also including transgenic animals) incapable of producing functional endogenous antibody molecules or having an otherwise compromised endogenous immune system, but which is capable of producing human immunoglobulin molecules by means of a reconstituted or partially reconstituted immune system from another animal (see, e.g., published PCT Application Nos. WO98/24893, WO/9634096, WO/9633735, and WO/9110741). Administration of polypeptides, antibodies, polynucleotides and/or agonists or antagonists of the present invention to such animals is useful for the generation of monoclonal antibodies against the polypeptides, antibodies, polynucleotides and/or agonists or antagonists of the present invention.

[0616] Blood-Related Disorders

[0617] The polynucleotides, polypeptides, antibodies, and/or agonists or antagonists of the present invention may be used to modulate hemostatic (the stopping of bleeding) or thrombolytic (clot dissolving) activity. For example, by increasing hemostatic or thrombolytic activity, polynucleotides or polypeptides, and/or agonists or antagonists of the present invention could be used to treat or prevent blood coagulation diseases, disorders, and/or conditions (e.g., afibrinogenemia, factor deficiencies, hemophilia), blood platelet diseases, disorders, and/or conditions (e.g., thrombocytopenia), or wounds resulting from trauma, surgery, or other causes. Alternatively, polynucleotides, polypeptides, antibodies, and/or agonists or antagonists of the present invention that can decrease hemostatic or thrombolytic activity could be used to inhibit or dissolve clotting. These molecules could be important in the treatment or prevention of heart attacks (infarction), strokes, or scarring.

[0618] In specific embodiments, the polynucleotides, polypeptides, antibodies, and/or agonists or antagonists of the present invention may be used to prevent, diagnose, prognose, and/or treat thrombosis, arterial thrombosis, venous thrombosis, thromboembolism, pulmonary embolism, atherosclerosis, myocardial infarction, transient ischemic attack, unstable angina. In specific embodiments, the polynucleotides, polypeptides, antibodies, and/or agonists or antagonists of the present invention may be used for the prevention of occulsion of saphenous grafts, for reducing the risk of periprocedural thrombosis as might accompany angioplasty procedures, for reducing the risk of stroke in patients with atrial fibrillation including nonrheumatic atrial fibrillation, for reducing the risk of embolism associated with mechanical heart valves and or mitral valves disease. Other uses for the polynucleotides, polypeptides, antibodies, and/or agonists or antagonists of the present invention, include, but are not limited to, the prevention of occlusions in extrcorporeal devices (e.g., intravascular canulas, vascular access shunts in hemodialysis patients, hemodialysis machines, and cardiopulmonary bypass machines).

[0619] In another embodiment, a polypeptide of the invention, or polynucleotides, antibodies, agonists, or antagonists corresponding to that polypeptide, may be used to prevent, diagnose, prognose, and/or treat diseases and disorders of the blood and/or blood forming organs associated with the tissue(s) in which the polypeptide of the invention is expressed, including one, two, three, four, five, or more tissues disclosed in Table 1A, column 7 (Tissue Distribution Library Code).

[0620] The polynucleotides, polypeptides, antibodies, and/or agonists or antagonists of the present invention may be used to modulate hematopoietic activity (the formation of blood cells). For example, the polynucleotides, polypeptides, antibodies, and/or agonists or antagonists of the present invention may be used to increase the quantity of all or subsets of blood cells, such as, for example, erythrocytes, lymphocytes (B or T cells), myeloid cells (e.g., basophils, eosinophils, neutrophils, mast cells, macrophages) and platelets. The ability to decrease the quantity of blood cells or subsets of blood cells may be useful in the prevention, detection, diagnosis and/or treatment of anemias and leukopenias described below. Alternatively, the polynucleotides, polypeptides, antibodies, and/or agonists or antagonists of the present invention may be used to decrease the quantity of all or subsets of blood cells, such as, for example, erythrocytes, lymphocytes (B or T cells), myeloid cells (e.g., basophils, cosinophils, neutrophils, mast cells, macrophages) and platelets. The ability to decrease the quantity of blood cells or subsets of blood cells may be useful in the prevention, detection, diagnosis and/or treatment of leukocytoses, such as, for example eosinophilia.

[0621] The polynucleotides, polypeptides, antibodies, and/or agonists or antagonists of the present invention may be used to prevent, treat, or diagnose blood dyscrasia.

[0622] Anemias are conditions in which the number of red blood cells or amount of hemoglobin (the protein that carries oxygen) in them is below normal. Anemia may be caused by excessive bleeding, decreased red blood cell production, or increased red blood cell destruction (hemolysis). The polynucleotides, polypeptides, antibodies, and/or agonists or antagonists of the present invention may be useful in treating, preventing, and/or diagnosing anemias. Anemias that may be treated prevented or diagnosed by the polynucleotides, polypeptides, antibodies, and/or agonists or antagonists of the present invention include iron deficiency anemia, hypochromic anemia, microcytic anemia, chlorosis, hereditary sideroblastic anemia, idiopathic acquired sideroblastic anemia, red cell aplasia, megaloblastic anemia (e.g., pernicious anemia, (vitamin B12 deficiency) and folic acid deficiency anemia), aplastic anemia, hemolytic anemias (e.g., autoimmune helolytic anemia, microangiopathic hemolytic anemia, and paroxysmal nocturnal hemoglobinuria). The polynucleotides, polypeptides, antibodies, and/or agonists or antagonists of the present invention may be useful in treating, preventing, and/or diagnosing anemias associated with diseases including but not limited to, anemias associated with systemic lupus erythematosus, cancers, lymphomas, chronic renal disease, and enlarged spleens. The polynucleotides, polypeptides, antibodies, and/or agonists or antagonists of the present invention may be useful in treating, preventing, and/or diagnosing anemias arising from drug treatments such as anemias associated with methyldopa, dapsone, and/or sulfadrugs. Additionally, rhe polynucleotides, polypeptides, antibodies, and/or agonists or antagonists of the present invention may be useful in treating, preventing, and/or diagnosing anemias associated with abnormal red blood cell architecture including but not limited to, hereditary spherocytosis, hereditary elliptocytosis, glucose-6-phosphate dehydrogenase deficiency, and sickle cell anemia.

[0623] The polynucleotides, polypeptides, antibodies, and/or agonists or antagonists of the present invention may be useful in treating, preventing, and/or diagnosing hemoglobin abnormalities, (e.g., those associated with sickle cell anemia, hemoglobin C disease, hemoglobin S-C disease, and hemoglobin E disease). Additionally, the polynucleotides, polypeptides, antibodies, and/or agonists or antagonists of the present invention may be useful in diagnosing, prognosing, preventing, and/or treating thalassemias, including, but not limited to major and minor forms of alpha-thalassemia and beta-thalassemia.

[0624] In another embodiment, the polynucleotides, polypeptides, antibodies, and/or agonists or antagonists of the present invention may be useful in diagnosing, prognosing, preventing, and/or treating bleeding disorders including, but not limited to, thrombocytopenia (e.g., idiopathic thrombocytopenic purpura, and thrombotic thrombocytopenic purpura), Von Willebrand's disease, hereditary platelet disorders (e.g., storage pool disease such as Chediak-Higashi and Hermansky-Pudlak syndromes, thromboxane A2 dysfunction, thromboasthenia, and Bemard-Soulier syndrome), hemolytic-uremic syndrome, hemophelias such as hemophelia A or Factor VII deficiency and Christmas disease or Factor IX deficiency, Hereditary Hemorhhagic Telangiectsia, also known as Rendu-Osler-Weber syndrome, allergic purpura (Henoch Schonlein purpura) and disseminated intravascular coagulation.

[0625] The effect of the polynucleotides, polypeptides, antibodies, and/or agonists or antagonists of the present invention on the clotting time of blood may be monitored using any of the clotting tests known in the art including, but not limited to, whole blood partial thromboplastin time (PTT), the activated partial thromboplastin time (aPTT), the activated clotting time (ACT), the recalcified activated clotting time, or the Lee-White Clotting time.

[0626] Several diseases and a variety of drugs can cause platelet dysfunction. Thus, in a specific embodiment, the polynucleotides, polypeptides, antibodies, and/or agonists or antagonists of the present invention may be useful in diagnosing, prognosing, preventing, and/or treating acquired platelet dysfunction such as platelet dysfunction accompanying kidney failure, leukemia, multiple myeloma, cirrhosis of the liver, and systemic lupus erythematosus as well as platelet dysfunction associated with drug treatments, including treatment with aspirin, ticlopidine, nonsteroidal anti-inflammatory drugs (used for arthritis, pain, and sprains), and penicillin in high doses.

[0627] In another embodiment, the polynucleotides, polypeptides, antibodies, and/or agonists or antagonists of the present invention may be useful in diagnosing, prognosing, preventing, and/or treating diseases and disorders characterized by or associated with increased or decreased numbers of white blood cells. Leukopenia occurs when the number of white blood cells decreases below normal. Leukopenias include, but are not limited to, neutropenia and lymphocytopenia. An increase in the number of white blood cells compared to normal is known as leukocytosis. The body generates increased numbers of white blood cells during infection. Thus, leukocytosis may simply be a normal physiological parameter that reflects infection. Alternatively, leukocytosis may be an indicator of injury or other disease such as cancer. Leokocytoses, include but are not limited to, eosinophilia, and accumulations of macrophages. In specific embodiments, the polynucleotides, polypeptides, antibodies, and/or agonists or antagonists of the present invention may be useful in diagnosing, prognosing, preventing, and/or treating leukopenia. In other specific embodiments, the polynucleotides, polypeptides, antibodies, and/or agonists or antagonists of the present invention may be useful in diagnosing, prognosing, preventing, and/or treating leukocytosis

[0628] Leukopenia may be a generalized decreased in all types of white blood cells, or may be a specific depletion of particular types of white blood cells. Thus, in specific embodiments, the polynucleotides, polypeptides, antibodies, and/or agonists or antagonists of the present invention may be useful in diagnosing, prognosing, preventing, and/or treating decreases in neutrophil numbers, known as neutropenia. Neutropenias that may be diagnosed, prognosed, prevented, and/or treated by the polynucleotides, polypeptides, antibodies, and/or agonists or antagonists of the present invention include, but are not limited to, infantile genetic agranulocytosis, familial neutropenia, cyclic neutropenia, neutropenias resulting from or associated with dietary deficiencies (e.g., vitamin B 12 deficiency or folic acid deficiency), neutropenias resulting from or associated with drug treatments (e.g., antibiotic regimens such as penicillin treatment, sulfonamide treatment, anticoagulant treatment, anticonvulsant drugs, anti-thyroid drugs, and cancer chemotherapy), and neutropenias resulting from increased neutrophil destruction that may occur in association with some bacterial or viral infections, allergic disorders, autoimmune diseases, conditions in which an individual has an enlarged spleen (e.g., Felty syndrome, malaria and sarcoidosis), and some drug treatment regimens.

[0629] The polynucleotides, polypeptides, antibodies, and/or agonists or antagonists of the present invention may be useful in diagnosing, prognosing, preventing, and/or treating lymphocytopenias (decreased numbers of B and/or T lymphocytes), including, but not limited lymphocytopenias resulting from or associated with stress, drug treatments (e.g., drug treatment with corticosteroids, cancer chemotherapies, and/or radiation therapies), AIDS infection and/or other diseases such as, for example, cancer, rheumatoid arthritis, systemic lupus erythematosus, chronic infections, some viral infections and/or hereditary disorders (e.g., DiGeorge syndrome, Wiskott-Aldrich Syndome, severe combined immunodeficiency, ataxia telangiectsia).

[0630] The polynucleotides, polypeptides, antibodies, and/or agonists or antagonists of the present invention may be useful in diagnosing, prognosing, preventing, and/or treating diseases and disorders associated with macrophage numbers and/or macrophage function including, but not limited to, Gaucher's disease, Niemann-Pick disease, Letterer-Siwe disease and Hand-Schuller-Christian disease.

[0631] In another embodiment, the polynucleotides, polypeptides, antibodies, and/or agonists or antagonists of the present invention may be useful in diagnosing, prognosing, preventing, and/or treating diseases and disorders associated with eosinophil numbers and/or eosinophil function including, but not limited to, idiopathic hypereosinophilic syndrome, eosinophilia-myalgia syndrome, and Hand-Schuller-Christian disease.

[0632] In yet another embodiment, the polynucleotides, polypeptides, antibodies, and/or agonists or antagonists of the present invention may be useful in diagnosing, prognosing, preventing, and/or treating leukemias and lymphomas including, but not limited to, acute lymphocytic (lymphpblastic) leukemia (ALL), acute myeloid (myelocytic, myelogenous, myeloblastic, or myelomonocytic) leukemia, chronic lymphocytic leukemia (e.g., B cell leukemias, T cell leukemias, Sezary syndrome, and Hairy cell leukenia), chronic myelocytic (myeloid, myelogenous, or granulocytic) leukemia, Hodgkin's lymphoma, non-hodgkin's lymphoma, Burkitt's lymphoma, and mycosis fungoides.

[0633] In other embodiments, the polynucleotides, polypeptides, antibodies, and/or agonists or antagonists of the present invention may be useful in diagnosing, prognosing, preventing, and/or treating diseases and disorders of plasma cells including, but not limited to, plasma cell dyscrasias, monoclonal gammaopathies, monoclonal gammopathies of undetermined significance, multiple myeloma, macroglobulinemia, Waldenstrom's macroglobulinemia, cryoglobulinemia, and Raynaud's phenomenon.

[0634] In other embodiments, the polynucleotides, polypeptides, antibodies, and/or agonists or antagonists of the present invention may be useful in treating, preventing, and/or diagnosing myeloproliferative disorders, including but not limited to, polycythemia vera, relative polycythemia, secondary polycythemia, myelofibrosis, acute myelofibrosis, agnogenic myelod metaplasia, thrombocythemia, (including both primary and seconday thrombocythemia) and chronic myelocytic leukemia.

[0635] In other embodiments, the polynucleotides, polypeptides, antibodies, and/or agonists or antagonists of the present invention may be useful as a treatment prior to surgery, to increase blood cell production.

[0636] In other embodiments, the polynucleotides, polypeptides, antibodies, and/or agonists or antagonists of the present invention may be useful as an agent to enhance the migration, phagocytosis, superoxide production, antibody dependent cellular cytotoxicity of neutrophils, eosionophils and macrophages.

[0637] In other embodiments, the polynucleotides, polypeptides, antibodies, and/or agonists or antagonists of the present invention may be useful as an agent to increase the number of stem cells in circulation prior to stem cells pheresis. In another specific embodiment, the polynucleotides, polypeptides, antibodies, and/or agonists or antagonists of the present invention may be useful as an agent to increase the number of stem cells in circulation prior to platelet pheresis.

[0638] In other embodiments, the polynucleotides, polypeptides, antibodies, and/or agonists or antagonists of the present invention may be useful as an agent to increase cytokine production.

[0639] In other embodiments, the polynucleotides, polypeptides, antibodies, and/or agonists or antagonists of the present invention may be useful in preventing, diagnosing, and/or treating primary hematopoietic disorders.

[0640] Hyperproliferative Disorders

[0641] Reproductive system associated polynucleotides or polypeptides, or agonists or antagonists thereof, can be used to treat, prevent, diagnose and/or prognose hyperproliferative diseases, disorders, and/or conditions, including neoplasms.

[0642] In a specific embodiment, reproductive system associated polynucleotides or polypeptides, or agonists or antagonists thereof, can be used to treat, prevent, and/or diagnose hyperproliferative diseases, disorders, and/or conditions of the reproductive system.

[0643] In a preferred embodiment, reproductive system associated polynucleotides or polypeptides, or agonists or antagonists thereof, can be used to treat, prevent, and/or diagnose reproductive system neoplasms.

[0644] Reproductive system associated polynucleotides or polypeptides, or agonists or antagonists of the invention, may inhibit the proliferation of the disorder through direct or indirect interactions. Alternatively, reproductive system associated polynucleotides or polypeptides, or agonists or antagonists thereof, may proliferate other cells, which can inhibit the hyperproliferative disorder.

[0645] For example, by increasing an immune response, particularly increasing antigenic qualities of the hyperproliferative disorder or by proliferating, differentiating, or mobilizing T-cells, hyperproliferative diseases, disorders, and/or conditions can be treated, prevented, and/or diagnosed. This immune response may be increased by either enhancing an existing immune response, or by initiating a new immune response. Alternatively, decreasing an immune response may also be a method of treating, preventing, and/or diagnosing hyperproliferative diseases, disorders, and/or conditions, such as a chemotherapeutic agent.

[0646] Examples of hyperproliferative diseases, disorders, and/or conditions that can be treated, prevented, and/or diagnosed by reproductive system associated polynucleotides or polypeptides, or agonists or antagonists thereof, include, but are not limited to neoplasms located in the: prostate, colon, abdomen, bone, breast, digestive system, liver, pancreas, peritoneum, endocrine glands (adrenal, parathyroid, pituitary, testicles, ovary, thymus, thyroid), eye, head and neck, nervous (central and peripheral), lymphatic system, pelvic, skin, soft tissue, spleen, thoracic, and urogenital.

[0647] Similarly, other hyperproliferative disorders can also be treated or detected by polynucleotides or polypeptides, or agonists or antagonists of the present invention. Examples of such hyperproliferative disorders include, but are not limited to: Acute Childhood Lymphoblastic Leukemia, Acute Lymphoblastic Leukemia, Acute Lymphocytic Leukemia, Acute Myeloid Leukemia, Adrenocortical Carcinoma, Adult (Primary) Hepatocellular Cancer, Adult (Primary) Liver Cancer, Adult Acute Lymphocytic Leukemia, Adult Acute Myeloid Leukemia, Adult Hodgkin's Disease, Adult Hodgkin's Lymphoma, Adult Lymphocytic Leukemia, Adult Non-Hodgkin's Lymphoma, Adult Primary Liver Cancer, Adult Soft Tissue Sarcoma, AIDS-Related Lymphoma, AIDS-Related Malignancies, Anal Cancer, Astrocytoma, Bile Duct Cancer, Bladder Cancer, Bone Cancer, Brain Stem Glioma, Brain Tumors, Breast Cancer, Cancer of the Renal Pelvis and Ureter, Central Nervous System (Primary) Lymphoma, Central Nervous System Lymphoma, Cerebellar Astrocytoma, Cerebral Astrocytoma, Cervical Cancer, Childhood (Primary) Hepatocellular Cancer, Childhood (Primary) Liver Cancer, Childhood Acute Lymphoblastic Leukemia, Childhood Acute Myeloid Leukemia, Childhood Brain Stem Glioma, Childhood Cerebellar Astrocytoma, Childhood Cerebral Astrocytoma, Childhood Extracranial Germ Cell Tumors, Childhood Hodgkin's Disease, Childhood Hodgkin's Lymphoma, Childhood Hypothalamic and Visual Pathway Glioma, Childhood Lymphoblastic Leukemia, Childhood Medulloblastoma, Childhood Non-Hodgkin's Lymphoma, Childhood Pineal and Supratentorial Primitive Neuroectodermal Tumors, Childhood Primary Liver Cancer, Childhood Rhabdomyosarcoma, Childhood Soft Tissue Sarcoma, Childhood Visual Pathway and Hypothalamic Glioma, Chronic Lymphocytic Leukemia, Chronic Myelogenous Leukemia, Colon Cancer, Cutaneous T-Cell Lymphoma, Endocrine Pancreas Islet Cell Carcinoma, Endometrial Cancer, Ependymoma, Epithelial Cancer, Esophageal Cancer, Ewing's Sarcoma and Related Tumors, Exocrine Pancreatic Cancer, Extracranial Germ Cell Tumor, Extragonadal Germ Cell Tumor, Extrahepatic Bile Duct Cancer, Eye Cancer, Female Breast Cancer, Gaucher's Disease, Gallbladder Cancer, Gastric Cancer, Gastrointestinal Carcinoid Tumor, Gastrointestinal Tumors, Germ Cell Tumors, Gestational Trophoblastic Tumor, Hairy Cell Leukemia, Head and Neck Cancer, Hepatocellular Cancer, Hodgkin's Disease, Hodgkin's Lymphoma, Hypergammaglobulinemia, Hypopharyngeal Cancer, Intestinal Cancers, Intraocular Melanoma, Islet Cell Carcinoma, Islet Cell Pancreatic Cancer, Kaposi's Sarcoma, Kidney Cancer, Laryngeal Cancer, Lip and Oral Cavity Cancer, Liver Cancer, Lung Cancer, Lymphoproliferative Disorders, Macroglobulinemia, Male Breast Cancer, Malignant Mesothelioma, Malignant Thymoma, Medulloblastoma, Melanoma, Mesothelioma, Metastatic Occult Primary Squamous Neck Cancer, Metastatic Primary Squamous Neck Cancer, Metastatic Squamous Neck Cancer, Multiple Myeloma, Multiple Myeloma/Plasma Cell Neoplasm, Myelodysplastic Syndrome, Myelogenous Leukemia, Myeloid Leukemia, Myeloproliferative Disorders, Nasal Cavity and Paranasal Sinus Cancer, Nasopharyngeal Cancer, Neuroblastoma, Non-Hodgkin's Lymphoma During Pregnancy, Nonmelanoma Skin Cancer, Non-Small Cell Lung Cancer, Occult Primary Metastatic Squamous Neck Cancer, Oropharyngeal Cancer, Osteo-/Malignant Fibrous Sarcoma, Osteosarcoma/Malignant Fibrous Histiocytoma, Osteosarcoma/Malignant Fibrous Histiocytoma of Bone, Ovarian Epithelial Cancer, Ovarian Germ Cell Tumor, Ovarian Low Malignant Potential Tumor, Pancreatic Cancer, Paraproteinemias, Purpura, Parathyroid Cancer, Penile Cancer, Pheochromocytoma, Pituitary Tumor, Plasma Cell Neoplasm/Multiple Mycloma, Primary Central Nervous System Lymphoma, Primary Liver Cancer, Prostate Cancer, Rectal Cancer, Renal Cell Cancer, Renal Pelvis and Ureter Cancer, Retinoblastoma, Rhabdomyosarcoma, Salivary Gland Cancer, Sarcoidosis Sarcomas, Sezary Syndrome, Skin Cancer, Small Cell Lung Cancer, Small Intestine Cancer, Soft Tissue Sarcoma, Squamous Neck Cancer, Stomach Cancer, Supratentorial Primitive Neuroectodermal and Pineal Tumors, T-Cell Lymphoma, Testicular Cancer, Thymoma, Thyroid Cancer, Transitional Cell Cancer of the Renal Pelvis and Ureter, Transitional Renal Pelvis and Ureter Cancer, Trophoblastic Tumors, Ureter and Renal Pelvis Cell Cancer, Urethral Cancer, Uterine Cancer, Uterine Sarcoma, Vaginal Cancer, Visual Pathway and Hypothalamic Glioma, Vulvar Cancer, Waldenstrom's Macroglobulinemia, Wilms' Tumor, and any other hyperproliferative disease, besides neoplasia, located in an organ system listed above.

[0648] In another preferred embodiment, polynucleotides or polypeptides, or agonists or antagonists of the present invention are used to diagnose, prognose, prevent, and/or treat premalignant conditions and to prevent progression to a neoplastic or malignant state, including but not limited to those disorders described above. Such uses are indicated in conditions known or suspected of preceding progression to neoplasia or cancer, in particular, where non-neoplastic cell growth consisting of hyperplasia, metaplasia, or most particularly, dysplasia has occurred (for review of such abnormal growth conditions, see Robbins and Angell, 1976, Basic Pathology, 2d Ed., W. B. Saunders Co., Philadelphia, pp. 68-79.)

[0649] Hyperplasia is a form of controlled cell proliferation, involving an increase in cell number in a tissue or organ, without significant alteration in structure or function. Hyperplastic disorders which can be diagnosed, prognosed, prevented, and/or treated with compositions of the invention (including polynucleotides, polypeptides, agonists or antagonists) include, but are not limited to, angiofollicular mediastinal lymph node hyperplasia, angiolymphoid hyperplasia with eosinophilia, atypical melanocytic hyperplasia, basal cell hyperplasia, benign giant lymph node hyperplasia, cementum hyperplasia, congenital adrenal hyperplasia, congenital sebaceous hyperplasia, cystic hyperplasia, cystic hyperplasia of the breast, denture hyperplasia, ductal hyperplasia, endometrial hyperplasia, fibromuscular hyperplasia, focal epithelial hyperplasia, gingival hyperplasia, inflammatory fibrous hyperplasia, inflammatory papillary hyperplasia, intravascular papillary endothelial hyperplasia, nodular hyperplasia of prostate, nodular regenerative hyperplasia, pseudoepitheliomatous hyperplasia, senile sebaceous hyperplasia, and verrucous hyperplasia.

[0650] Metaplasia is a form of controlled cell growth in which one type of adult or fully differentiated cell substitutes for another type of adult cell. Metaplastic disorders which can be diagnosed, prognosed, prevented, and/or treated with compositions of the invention (including polynucleotides, polypeptides, agonists or antagonists) include, but are not limited to, agnogenic myeloid metaplasia, apocrine metaplasia, atypical metaplasia, autoparenchymatous metaplasia, connective tissue metaplasia, epithelial metaplasia, intestinal metaplasia, metaplastic anemia, metaplastic ossification, metaplastic polyps, myeloid metaplasia, primary myeloid metaplasia, secondary myeloid metaplasia, squamous metaplasia, squamous metaplasia of amnion, and symptomatic myeloid metaplasia.

[0651] Dysplasia is frequently a forerunner of cancer, and is found mainly in the epithelia; it is the most disorderly form of non-neoplastic cell growth, involving a loss in individual cell uniformity and in the architectural orientation of cells. Dysplastic cells often have abnormally large, deeply stained nuclei, and exhibit pleomorphism. Dysplasia characteristically occurs where there exists chronic irritation or inflammation. Dysplastic disorders which can be diagnosed, prognosed, prevented, and/or treated with compositions of the invention (including polynucleotides, polypeptides, agonists or antagonists) include, but are not limited to, anhidrotic ectodermal dysplasia, anterofacial dysplasia, asphyxiating thoracic dysplasia, atriodigital dysplasia, bronchopulmonary dysplasia, cerebral dysplasia, cervical dysplasia, chondroectodermal dysplasia, cleidocranial dysplasia, congenital ectodermal dysplasia, craniodiaphysial dysplasia, craniocarpotarsal dysplasia, craniometaphysial dysplasia, dentin dysplasia, diaphysial dysplasia, ectodermal dysplasia, enamel dysplasia, encephalo-ophthalmic dysplasia, dysplasia epiphysialis hemimelia, dysplasia epiphysialis multiplex, dysplasia epiphysialis punctata, epithelial dysplasia, faciodigitogenital dysplasia, familial fibrous dysplasia of jaws, familial white folded dysplasia, fibromuscular dysplasia, fibrous dysplasia of bone, florid osseous dysplasia, hereditary renal-retinal dysplasia, hidrotic ectodermal dysplasia, hypohidrotic ectodermal dysplasia, lymphopenic thymic dysplasia, mammary dysplasia, mandibulofacial dysplasia, metaphysial dysplasia, Mondini dysplasia, monostotic fibrous dysplasia, mucoepithelial dysplasia, multiple epiphysial dysplasia, oculoauriculovertebral dysplasia, oculodentodigital dysplasia, oculovertebral dysplasia, odontogenic dysplasia, ophthalmomandibulomelic dysplasia, periapical cemental dysplasia, polyostotic fibrous dysplasia, pseudoachondroplastic spondyloepiphysial dysplasia, retinal dysplasia, septo-optic dysplasia, spondyloepiphysial dysplasia, and ventriculoradial dysplasia.

[0652] Additional pre-neoplastic disorders which can be diagnosed, prognosed, prevented, and/or treated with compositions of the invention (including polynucleotides, polypeptides, agonists or antagonists) include, but are not limited to, benign dysproliferative disorders (e.g., benign tumors, fibrocystic conditions, tissue hypertrophy, intestinal polyps, colon polyps, and esophageal dysplasia), leukoplakia, keratoses, Bowen's disease, Farmer's Skin, solar cheilitis, and solar keratosis.

[0653] In another embodiment, a polypeptide of the invention, or polynucleotides, antibodies, agonists, or antagonists corresponding to that polypeptide, may be used to diagnose and/or prognose disorders associated with the tissue(s) in which the polypeptide of the invention is expressed, including one, two, three, four, five, or more tissues disclosed in Table 1A, 7 (Tissue Distribution Library Code).

[0654] In another embodiment, polynucleotides, polypeptides, antibodies, and/or agonists or antagonists of the present invention conjugated to a toxin or a radioactive isotope, as described herein, may be used to treat cancers and neoplasms, including, but not limited to those described herein. In a further preferred embodiment, polynucleotides, polypeptides, antibodies, and/or agonists or antagonists of the present invention conjugated to a toxin or a radioactive isotope, as described herein, may be used to treat acute myelogenous leukemia.

[0655] Additionally, polynucleotides, polypeptides, and/or agonists or antagonists of the invention may affect apoptosis, and therefore, would be useful in treating a number of diseases associated with increased cell survival or the inhibition of apoptosis. For example, diseases associated with increased cell survival or the inhibition of apoptosis that could be diagnosed, prognosed, prevented, and/or treated by polynucleotides, polypeptides, and/or agonists or antagonists of the invention, include cancers (such as follicular lymphomas, carcinomas with p53 mutations, and hormone-dependent tumors, including, but not limited to colon cancer, cardiac tumors, pancreatic cancer, melanoma, retinoblastoma, glioblastoma, lung cancer, intestinal cancer, testicular cancer, stomach cancer, neuroblastoma, myxoma, myoma, lymphoma, endothelioma, osteoblastoma, osteoclastoma, osteosarcoma, chondrosarcoma, adenoma, breast cancer, prostate cancer, Kaposi's sarcoma and ovarian cancer); autoimmune disorders such as, multiple sclerosis, Sjogren's syndrome, Hashimoto's thyroiditis, biliary cirrhosis, Behcet's disease, Crohn's disease, polymyositis, systemic lupus erythematosus and immune-related glomerulonephritis and rheumatoid arthritis) and viral infections (such as herpes viruses, pox viruses and adenoviruses), inflammation, graft v. host disease, acute graft rejection, and chronic graft rejection.

[0656] In preferred embodiments, polynucleotides, polypeptides, and/or agonists or antagonists of the invention are used to inhibit growth, progression, and/or metastasis of cancers, in particular those listed above.

[0657] Additional diseases or conditions associated with increased cell survival that could be diagnosed, prognosed, prevented, and/or treated by polynucleotides, polypeptides, and/or agonists or antagonists of the invention, include, but are not limited to, progression, and/or metastases of malignancies and related disorders such as leukemia (including acute leukemias (e.g., acute lymphocytic leukemia, acute myelocytic leukemia (including myeloblastic, promyelocytic, myelomonocytic, monocytic, and erythroleukemia)) and chronic leukemias (e.g., chronic myelocytic (granulocytic) leukemia and chronic lymphocytic leukemia)), polycythemia vera, lymphomas (e.g., Hodgkin's disease and non-Hodgkin's disease), multiple myeloma, Waldenstrom's macroglobulinemia, heavy chain disease, and solid tumors including, but not limited to, sarcomas and carcinomas such as fibrosarcoma, myxosarcoma, liposarcoma, chondrosarcoma, osteogenic sarcoma, chordoma, angiosarcoma, endotheliosarcoma, lymphangiosarcoma, lymphangioendotheliosarcoma, synovioma, mesothelioma, Ewing's tumor, leiomyosarcoma, rhabdomyosarcoma, colon carcinoma, pancreatic cancer, breast cancer, ovarian cancer, prostate cancer, squamous cell carcinoma, basal cell carcinoma, adenocarcinoma, sweat gland carcinoma, sebaceous gland carcinoma, papillary carcinoma, papillary adenocarcinomas, cystadenocarcinoma, medullary carcinoma, bronchogenic carcinoma, renal cell carcinoma, hepatoma, bile duct carcinoma, choriocarcinoma, seminoma, embryonal carcinoma, Wilm's tumor, cervical cancer, testicular tumor, lung carcinoma, small cell lung carcinoma, bladder carcinoma, epithelial carcinoma, glioma, astrocytoma, medulloblastoma, craniopharyngioma, ependymoma, pinealoma, emangioblastoma, acoustic neuroma, oligodendroglioma, menangioma, melanoma, neuroblastoma, and retinoblastoma.

[0658] Diseases associated with increased apoptosis that could be diagnosed, prognosed, prevented, and/or treated by polynucleotides, polypeptides, and/or agonists or antagonists of the invention, include AIDS; neurodegenerative disorders (such as Alzheimer's disease, Parkinson's disease, amyotrophic lateral sclerosis, retinitis pigmentosa, cerebellar degeneration and brain tumor or prior associated disease); autoimmune disorders (such as, multiple sclerosis, Sjogren's syndrome, Hashimoto's thyroiditis, biliary cirrhosis, Behcet's disease, Crohn's disease, polymyositis, systemic lupus erythematosus and immune-related glomerulonephritis and rheumatoid arthritis) myelodysplastic syndromes (such as aplastic anemia), graft v. host disease, ischemic injury (such as that caused by myocardial infarction, stroke and reperfusion injury), liver injury (e.g., hepatitis related liver injury, ischemia/reperfusion injury, cholestosis (bile duct injury) and liver cancer); toxin-induced liver disease (such as that caused by alcohol), septic shock, cachexia and anorexia.

[0659] Hyperproliferative diseases and/or disorders that could be diagnosed, prognosed, prevented, and/or treated by polynucleotides, polypeptides, and/or agonists or antagonists of the invention, include, but are not limited to, neoplasms located in the liver, abdomen, bone, breast, digestive system, pancreas, peritoneum, endocrine glands (adrenal, parathyroid, pituitary, testicles, ovary, thymus, thyroid), eye, head and neck, nervous system (central and peripheral), lymphatic system, pelvis, skin, soft tissue, spleen, thorax, and urogenital tract.

[0660] Similarly, other hyperproliferative disorders can also be diagnosed, prognosed, prevented, and/or treated by polynucleotides, polypeptides, and/or agonists or antagonists of the invention. Examples of such hyperproliferative disorders include, but are not limited to: hypergammaglobulinemia, lymphoproliferative disorders, paraproteinemias, purpura, sarcoidosis, Sezary Syndrome, Waldenstron's macroglobulinemia, Gaucher's Disease, histiocytosis, and any other hyperproliferative disease, besides neoplasia, located in an organ system listed above.

[0661] One preferred embodiment utilizes polynucleotides of the present invention to inhibit aberrant cellular division, by gene therapy using the present invention, and/or protein fusions or fragments thereof.

[0662] Thus, the present invention provides a method for treating cell proliferative diseases, disorders, and/or conditions by inserting into an abnormally proliferating cell a polynucleotide of the present invention, wherein said polynucleotide represses said cell proliferation, disease, disorder, and/or condition.

[0663] In a preferred embodiment, the present invention provides a method for treating cell proliferative diseases, disorders and/or conditions of the reproductive system by inserting into a cell, a polynucleotide of the present invention, wherein said polynucleotide represses said cell proliferation, disease and/or disorder.

[0664] Another embodiment of the present invention provides a method of treating cell-proliferative diseases, disorders, and/or conditions in individuals comprising administration of one or more active gene copies of the present invention to an abnormally proliferating cell or cells. In a preferred embodiment, polynucleotides of the present invention is a DNA construct comprising a recombinant expression vector effective in expressing a DNA sequence encoding said polynucleotides. In another preferred embodiment of the present invention, the DNA construct encoding the polynucleotides of the present invention is inserted into cells to be treated utilizing a retrovirus, or more preferably an adenoviral vector (see, e.g., G J. Nabel, et. al., PNAS 96: 324-326 (1999), which is hereby incorporated by reference). In a most preferred embodiment, the viral vector is defective and will not transform non-proliferating cells, only proliferating cells. Moreover, in a preferred embodiment, the polynucleotides of the present invention inserted into proliferating cells either alone, or in combination with or fused to other polynucleotides, can then be modulated via an external stimulus (i.e., magnetic, specific small molecule, chemical, or drug administration, etc.), which acts upon the promoter upstream of said polynucleotides to induce expression of the encoded protein product. As such the beneficial therapeutic affect of the present invention may be expressly modulated (i.e., to increase, decrease, or inhibit expression of the present invention) based upon said external stimulus.

[0665] Polynucleotides of the present invention may be useful in repressing expression of oncogenic genes or antigens. By “repressing expression of the oncogenic genes” is intended the suppression of the transcription of the gene, the degradation of the gene transcript (pre-message RNA), the inhibition of splicing, the destruction of the messenger RNA, the prevention of the post-translational modifications of the protein, the destruction of the protein, or the inhibition of the normal function of the protein.

[0666] For local administration to abnormally proliferating cells, polynucleotides of the present invention may be administered by any method known to those of skill in the art including, but not limited to transfection, electroporation, microinjection of cells, or in vehicles such as liposomes, lipofectin, or as naked polynucleotides, or any other method described throughout the specification. The polynucleotide of the present invention may be delivered by known gene delivery systems such as, but not limited to, retroviral vectors (Gilboa, J. Virology 44:845 (1982); Hocke, Nature 320:275 (1986); Wilson, et al., Proc. Natl. Acad. Sci. U.S.A. 85:3014), vaccinia virus system (Chakrabarty et al., Mol. Cell Biol. 5:3403 (1985) or other efficient DNA delivery systems (Yates et al., Nature 313:812 (1985)) known to those skilled in the art. These references are exemplary only and are hereby incorporated by reference. In order to specifically deliver or transfect cells which are abnormally proliferating and spare non-dividing cells, it is preferable to utilize a retrovirus, or adenoviral (as described in the art and elsewhere herein) delivery system known to those of skill in the art. Since host DNA replication is required for retroviral DNA to integrate and the retrovirus will be unable to self replicate due to the lack of the retrovirus genes needed for its life cycle. Utilizing such a retroviral delivery system for polynucleotides of the present invention will target said gene and constructs to abnormally proliferating cells and will spare the non-dividing normal cells.

[0667] The polynucleotides of the present invention may be delivered directly to cell proliferative disorder/disease sites in internal organs, body cavities and the like by use of imaging devices used to guide an injecting needle directly to the disease site. The polynucleotides of the present invention may also be administered to disease sites at the time of surgical intervention.

[0668] By “cell proliferative disease” is meant any human or animal disease or disorder, affecting any one or any combination of organs, cavities, or body parts, which is characterized by single or multiple local abnormal proliferations of cells, groups of cells, or tissues, whether benign or malignant.

[0669] Any amount of the polynucleotides of the present invention may be administered as long as it has a biologically inhibiting effect on the proliferation of the treated cells. Moreover, it is possible to administer more than one of the polynucleotide of the present invention simultaneously to the same site. By “biologically inhibiting” is meant partial or total growth inhibition as well as decreases in the rate of proliferation or growth of the cells. The biologically inhibitory dose may be determined by assessing the effects of the polynucleotides of the present invention on target malignant or abnormally proliferating cell growth in tissue culture, tumor growth in animals and cell cultures, or any other method known to one of ordinary skill in the art.

[0670] The present invention is further directed to antibody-based therapies which involve administering of anti-polypeptides and anti-polynucleotide antibodies to a mammalian, preferably human, patient for treating one or more of the described diseases, disorders, and/or conditions. Methods for producing anti-polypeptides and anti-polynucleotide antibodies polyclonal and monoclonal antibodies are described in detail elsewhere herein. Such antibodies may be provided in pharmaceutically acceptable compositions as known in the art or as described herein.

[0671] A summary of the ways in which the antibodies of the present invention may be used therapeutically includes binding polynucleotides or polypeptides of the present invention locally or systemically in the body or by direct cytotoxicity of the antibody, e.g., as mediated by complement (CDC) or by effector cells (ADCC). Some of these approaches are described in more detail below. Armed with the teachings provided herein, one of ordinary skill in the art will know how to use the antibodies of the present invention for diagnostic, monitoring or therapeutic purposes without undue experimentation.

[0672] In particular, the antibodies, fragments and derivatives of the present invention are useful for treating a subject having or developing cell proliferative and/or differentiation diseases, disorders, and/or conditions as described herein. Such treatment comprises administering a single or multiple doses of the antibody, or a fragment, derivative, or a conjugate thereof.

[0673] The antibodies of this invention may be advantageously utilized in combination with other monoclonal or chimeric antibodies, or with lymphokines or hematopoietic growth factors, for example, which serve to increase the number or activity of effector cells which interact with the antibodies.

[0674] It is preferred to use high affinity and/or potent in vivo inhibiting and/or neutralizing antibodies against polypeptides or polynucleotides of the present invention, fragments or regions thereof, for both immunoassays directed to and therapy of diseases, disorders, and/or conditions related to polynucleotides or polypeptides, including fragments thereof, of the present invention. Such antibodies, fragments, or regions, will preferably have an affinity for polynucleotides or polypeptides, including fragments thereof. Preferred binding affinities include those with a dissociation constant or Kd less than 5×10⁻⁶M, 10⁻⁶M, 5×10 ⁻⁷M, 10⁻⁷M, 5×10⁻⁸M, 10⁻⁸M, 5×10⁻⁹M, 10⁻⁹M, 5×10⁻¹⁰M, 10⁻¹⁰M, 5×10⁻¹¹M, 5×10⁻¹²M, 10⁻¹²M, 5×10⁻¹³M, 10⁻¹³ M, 5×10⁻¹⁴M, 10⁻¹⁴M, 5×10⁻¹⁵M, and 10⁻¹⁵M.

[0675] Moreover, reproductive system antigen polypeptides of the present invention or fragments thereof, are useful in inhibiting the angiogenesis of proliferative cells or tissues, either alone, as a protein fusion, or in combination with other polypeptides directly or indirectly, as described elsewhere herein. In a most preferred embodiment, said anti-angiogenesis effect may be achieved indirectly, for example, through the inhibition of hematopoietic, tumor-specific cells, such as tumor-associated macrophages (see, e.g., Joseph I B, et al. J Natl Cancer Inst, 90(21):1648-53 (1998), which is hereby incorporated by reference). Antibodies directed to polypeptides or polynucleotides of the present invention may also result in inhibition of angiogenesis directly, or indirectly (see, e.g., Witte L, et al., Cancer Metastasis Rev. 17(2):155-61 (1998), which is hereby incorporated by reference)).

[0676] Polypeptides, including protein fusions, of the present invention, or fragments thereof may be useful in inhibiting proliferative cells or tissues through the induction of apoptosis. Said polypeptides may act either directly, or indirectly to induce apoptosis of proliferative cells and tissues, for example in the activation of a death-domain receptor, such as tumor necrosis factor (TNF) receptor-1, CD95 (Fas/APO-1), TNF-receptor-related apoptosis-mediated protein (TRAMP) and TNF-related apoptosis-inducing ligand (TRAIL) receptor-1 and -2 (see, e.g., Schulze-Osthoff K, et.al., Eur J Biochem 254(3):439-59 (1998), which is hereby incorporated by reference). Moreover, in another preferred embodiment of the present invention, said polypeptides may induce apoptosis through other mechanisms, such as in the activation of other proteins which will activate apoptosis, or through stimulating the expression of said proteins, either alone or in combination with small molecule drugs or adjuvants, such as apoptonin, galectins, thioredoxins, antiinflammatory proteins (See for example, Mutat. Res. 400(1-2):447-55 (1998), Med Hypotheses.50(5):423-33 (1998), Chem. Biol. Interact. Apr 24;111-112:23-34 (1998), J. Mo. Med. 76(6):402-12 (1998), Int. J. Tissue React. 20(l):3-15 (1998), which are all hereby incorporated by reference).

[0677] Polypeptides, including protein fusions to, or fragments thereof, of the present invention are useful in inhibiting the metastasis of proliferative cells or tissues. Inhibition may occur as a direct result of administering polypeptides, or antibodies directed to said polypeptides as described elsewhere herein, or indirectly, such as activating the expression of proteins known to inhibit metastasis, for example alpha 4 integrins, (See, e.g., Curr Top Microbiol Immunol 1998;231:125-41, which is hereby incorporated by reference). Such therapeutic affects of the present invention may be achieved either alone, or in combination with small molecule drugs or adjuvants.

[0678] In another embodiment, the invention provides a method of delivering compositions containing the polypeptides of the invention (e.g., compositions containing polypeptides or anti-reproductive system antigen polypeptide antibodies associated with heterologous polypeptides, heterologous nucleic acids, toxins, or prodrugs) to targeted cells expressing the polypeptide of the present invention. reproductive system antigen polypeptides or anti- reproductive system antigen polypeptide antibodies of the invention may be associated with heterologous polypeptides, heterologous nucleic acids, toxins, or prodrugs via hydrophobic, hydrophilic, ionic and/or covalent interactions.

[0679] Polypeptides, protein fusions to, or fragments thereof, of the present invention are useful in enhancing the immunogenicity and/or antigenicity of proliferating cells or tissues, either directly, such as would occur if the polypeptides of the present invention ‘vaccinated’ the immune response to respond to proliferative antigens and immunogens, or indirectly, such as in activating the expression of proteins known to enhance the immune response (e.g. chemokines), to said antigens and immunogens.

[0680] Urinary System Disorders

[0681] Polynucleotides, polypeptides, antibodies, and/or agonists or antagonists of the present invention, may be used to treat, prevent, diagnose, and/or prognose disorders of the urinary system, including but not limited to disorders of the renal system, bladder, ureters, and urethra. Renal disorders include, but are not limited to, kidney failure, nephritis, blood vessel disorders of kidney, metabolic and congenital kidney disorders, urinary disorders of the kidney, autoimmune disorders, sclerosis and necrosis, electrolyte imbalance, and kidney cancers.

[0682] Kidney failure diseases include, but are not limited to, acute kidney failure, chronic kidney failure, atheroembolic renal failure, and end-stage renal disease. Inflammatory diseases of the kidney include acute glomerulonephritis, postinfectious glomerulonephritis, rapidly progressive glomerulonephritis, nephrotic syndrome, membranous glomerulonephritis, familial nephrotic syndrome, membranoproliferative glomerulonephritis I and II, mesangial proliferative glomerulonephritis, chronic glomerulonephritis, acute tubulointerstitial nephritis, chronic tubulointerstitial nephritis, acute post-streptococcal glomerulonephritis (PSGN), pyelonephritis, lupus nephritis, chronic nephritis, interstitial nephritis, and post-streptococcal glomerulonephritis.

[0683] Blood vessel disorders of the kidneys include, but are not limited to, kidney infarction, atheroembolic kidney disease, cortical necrosis, malignant nephrosclerosis, renal vein thrombosis, renal underperfusion, renal ischemia-reperfusion, renal artery embolism, and renal artery stenosis. Kidney disorders resulting form urinary tract problems include, but are not limited to, pyelonephritis, hydronephrosis, urolithiasis (renal lithiasis, nephrolithiasis), reflux nephropathy, urinary tract infections, urinary retention, and acute or chronic unilateral obstructive uropathy.

[0684] Metabolic and congenital disorders of the kidneys include, but are not limited to, renal tubular acidosis, renal glycosuria, nephrogenic diabetes insipidus, cystinuria, Fanconi's syndrome, vitamin D-resistant rickets, Hartnup disease, Bartter's syndrome, Liddle's syndrome, polycystic kidney disease, medullary cystic disease, medullary sponge kidney, Alport's syndrome, nail-patella syndrome, congenital nephrotic syndrome, CRUSH syndrome, horseshoe kidney, diabetic nephropathy, nephrogenic diabetes insipidus, analgesic nephropathy, kidney stones, and membranous nephropathy, Kidney disorders resulting from an autoimmune response include, but are not limited to, systemic lupus erythematosus (SLE), Goodpasture syndrome, IgA nephropathy, and IgM mesangial proliferative glomerulonephritis.

[0685] Sclerotic or necrotic disorders of the kidney include, but are not limited to, glomerulosclerosis, diabetic nephropathy, focal segmental glomerulosclerosis (FSGS), necrotizing glomerulonephritis, and renal papillary necrosis. Kidneys may also develop carcinomas, including, but not limited to, hypemephroma, nephroblastoma, renal cell cancer, transitional cell cancer, squamous cell cancer, and Wilm's tumor.

[0686] Kidney disorders may also result in electrolyte imbalances, including, but not limited to, nephrocalcinosis, pyunria, edema, hydronephritis, proteinuria, hyponatremia, hypematremia, hypokalemia, hyperkalemia, hypocalcemia, hypercalcemia, hypophosphatemia, and hyperphosphatemia.

[0687] Bladder disorders include, but are not limited to, benign prostatic hyperplasia (BPH), interstitial cystitis (IC), prostatitis, proteinuria, urinary tract infections, urinary incontinence, urinary retention. Disorders of the ureters and urethra include, but are not limited to, acute or chronic unilateral obstructive uropathy. The bladder, ureters, and urethra may also develop carcinomas, including, but not limited to, superficial bladder cancer, invasive bladder cancer, carcinoma of the ureter, and urethra cancers.

[0688] Polypeptides may be administered using any method known in the art, including, but not limited to, direct needle injection at the delivery site, intravenous injection, topical administration, catheter infusion, biolistic injectors, particle accelerators, gelfoam sponge depots, other commercially available depot materials, osmotic pumps, oral or suppositorial solid pharmaceutical formulations, decanting or topical applications during surgery, aerosol delivery. Such methods are known in the art. Polypeptides may be administered as part of a Therapeutic, described in more detail below. Methods of delivering polynucleotides are described in more detail herein.

[0689] Cardiovascular Disorders

[0690] Polynucleotides or polypeptides, or agonists or antagonists of the present invention, may be used to treat, prevent, diagnose, and/or prognose cardiovascular disorders, including, but not limited to, peripheral artery disease, such as limb ischemia.

[0691] Cardiovascular disorders include cardiovascular abnormalities, such as arterio-arterial fistula, arteriovenous fistula, cerebral arteriovenous malformations, congenital heart defects, pulmonary atresia, and Scimitar Syndrome. Congenital heart defects include aortic coarctation, cor triatriatum, coronary vessel anomalies, crisscross heart, dextrocardia, patent ductus arteriosus, Ebstein's anomaly, Eisenmenger complex, hypoplastic left heart syndrome, levocardia, tetralogy of fallot, transposition of great vessels, double outlet right ventricle, tricuspid atresia, persistent truncus arteriosus, total anomalous pulmonary venous connection, hypoplastic left heart syndrome, and heart septal defects, such as aortopulmonary septal defect, endocardial cushion defects, Lutembacher's Syndrome, atrioventricular canal defect, trilogy of Fallot, ventricular heart septal defects.

[0692] Cardiovascular disorders also include heart disease, such as arrhythmias, carcinoid heart disease, high cardiac output, low cardiac output, cardiac tamponade, endocarditis (including bacterial), heart aneurysm, cardiac arrest, sudden cardiac death, congestive heart failure, congestive cardiomyopathy, paroxysmal dyspnea, cardiac edema, heart hypertrophy, congestive cardiomyopathy, left ventricular hypertrophy, right ventricular hypertrophy, post-infarction heart rupture, ventricular septal rupture, heart valve diseases, myocardial diseases, myocardial ischemia, pericardial effusion, pericarditis (including constrictive and tuberculous), pneumopericardium, postpericardiotomy syndrome, pulmonary heart disease, rheumatic heart disease, ventricular dysfunction, hyperemia, cardiovascular pregnancy complications, Scimitar Syndrome, diastolic dysfunction, enlarged heart, heart block, J-curve phenomenon, rheumatic heart disease, Marfan syndrome, cardiovascular syphilis, and cardiovascular tuberculosis.

[0693] Arrhythmias include sinus arrhythmia, atrial fibrillation, atrial flutter, bradycardia, extrasystole, Adams-Stokes Syndrome, bundle-branch block, sinoatrial block, long QT syndrome, parasystole, Lown-Ganong-Levine Syndrome, Mahaim-type pre-excitation syndrome, Wolff-Parkinson-White syndrome, sick sinus syndrome, tachycardias, and ventricular fibrillation. Tachycardias include paroxysmal tachycardia, supraventricular tachycardia, accelerated idioventricular rhythm, atrioventricular nodal reentry tachycardia, ectopic atrial tachycardia, ectopic junctional tachycardia, sinoatrial nodal reentry tachycardia, sinus tachycardia, Torsades de Pointes, and ventricular tachycardia.

[0694] Heart valve disease include aortic valve insufficiency, aortic valve stenosis, heart murmurs, aortic valve prolapse, mitral valve prolapse, tricuspid valve prolapse, mitral valve insufficiency, mitral valve stenosis, pulmonary atresia, pulmonary valve insufficiency, pulmonary valve stenosis, tricuspid atresia, tricuspid valve insufficiency, tricuspid valve stenosis, and bicuspid aortic valve.

[0695] Myocardial diseases include alcoholic cardiomyopathy, congestive cardiomyopathy, hypertrophic cardiomyopathy, aortic subvalvular stenosis, pulmonary subvalvular stenosis, restrictive cardiomyopathy, Chagas cardiomyopathy, endocardial fibroelastosis, endomyocardial fibrosis, Kearns Syndrome, Barth syndrome, myocardial reperfusion injury, and myocarditis.

[0696] Myocardial ischemias include coronary disease, such as angina pectoris, Prinzmetal's angina, unstable angina, coronary aneurysm, coronary arteriosclerosis, coronary thrombosis, coronary vasospasm, myocardial infarction and myocardial stunning.

[0697] Cardiovascular diseases also include vascular diseases such as aneurysms, angiodysplasia, angiomatosis, bacillary angiomatosis, Hippel-Lindau Disease, Klippel-Trenaunay-Weber Syndrome, Sturge-Weber Syndrome, angioneurotic edema, aortic diseases, Takayasu's Arteritis, aortitis, Leriche's Syndrome, arterial occlusive diseases, arteritis, enarteritis, polyarteritis nodosa, cerebrovascular disorders, diabetic angiopathies, diabetic retinopathy, embolisms, thrombosis, erythromelalgia, hemorrhoids, hepatic veno-occlusive disease, hypertension, hypotension (shock), ischemia, peripheral vascular diseases, phlebitis, superficial phlebitis, pulmonary veno-occlusive disease, chronic obstructive pulmonary disease, Buerger's disease, Raynaud's disease, CREST syndrome, retinal vein occlusion, Scimitar syndrome, superior vena cava syndrome, telangiectasia, atacia telangiectasia, hereditary hemorrhagic telangiectasia, deep vein thrombosis, varicocele, varicose veins, varicose ulcer, vasculitis, and venous insufficiency.

[0698] Aneurysms include dissecting aneurysms, false aneurysms, infected aneurysms, ruptured aneurysms, aortic aneurysms, cerebral aneurysms, coronary aneurysms, heart aneurysms, and iliac aneurysms.

[0699] Arterial occlusive diseases include arteriosclerosis, arteriolosclerosis, atherosclerosis, intermittent claudication, carotid stenosis, fibromuscular dysplasias, mesenteric vascular occlusion, Moyamoya disease, renal artery obstruction, retinal artery occlusion, and thromboangiitis obliterans.

[0700] Cerebrovascular disorders include carotid artery diseases, cerebral amyloid angiopathy, cerebral aneurysm, cerebral anoxia, cerebral arteriosclerosis, cerebral arteriovenous malformation, cerebral artery diseases, cerebral embolism and thrombosis, carotid artery thrombosis, sinus thrombosis, Wallenberg's syndrome, cerebral hemorrhage, epidural hematoma, subdural hematoma, subaraxhnoid hemorrhage, cerebral infarction, cerebral ischemia (including transient), subclavian steal syndrome, periventricular leukomalacia, vascular headache, cluster headache, migraine, and vertebrobasilar insufficiency.

[0701] Embolisms include air embolisms, amniotic fluid embolisms, cholesterol embolisms, blue toe syndrome, fat embolisms, pulmonary embolisms, and thromoboembolisms. Thrombosis include coronary thrombosis, hepatic vein thrombosis, deep vein thrombosis, retinal vein occlusion, carotid artery thrombosis, sinus thrombosis, Wallenberg's syndrome, and thrombophlebitis.

[0702] Ischemia includes cerebral ischemia, ischemic colitis, silent ischemia, compartment syndromes, anterior compartment syndrome, myocardial ischemia, reperfusion injuries, and peripheral limb ischemia. Vasculitis includes aortitis, arteritis, Behcet's Syndrome, Churg-Strauss Syndrome, mucocutaneous lymph node syndrome, thromboangiitis obliterans, hypersensitivity vasculitis, Schoenlein-Henoch purpura, allergic cutaneous vasculitis, and Wegener's granulomatosis.

[0703] Cardiovascular diseases can also occur due to electrolyte imbalances that include, but are not limited to hyponatremia, hypematremia, hypokalemia, hyperkalemia, hypocalcemia, hypercalcemia, hypophosphatemia, and hyperphophatemia. Neoplasm and/or cancers of the cardiovascular system include, but are not limited to, myxomas, fibromas, and rhabdomyomas.

[0704] Polypeptides may be administered using any method known in the art, including, but not limited to, direct needle injection at the delivery site, intravenous injection, topical administration, catheter infusion, biolistic injectors, particle accelerators, gelfoam sponge depots, other commercially available depot materials, osmotic pumps, oral or suppositorial solid pharmaceutical formulations, decanting or topical applications during surgery, aerosol delivery. Such methods are known in the art. Polypeptides may be administered as part of a Therapeutic, described in more detail below. Methods of delivering polynucleotides are described in more detail herein.

[0705] Respiratory Disorders

[0706] Polynucleotides or polypeptides, or agonists or antagonists of the present invention may be used to treat, prevent, diagnose, and/or prognose diseases and/or disorders of the respiratory system.

[0707] Diseases and disorders of the respiratory system include, but are not limited to, nasal vestibulitis, nonallergic rhinitis (e.g., acute rhinitis, chronic rhinitis, atrophic rhinitis, vasomotor rhinitis), nasal polyps, and sinusitis, juvenile angiofibromas, cancer of the nose and juvenile papillomas, vocal cord polyps, nodules (singer's nodules), contact ulcers, vocal cord paralysis, laryngoceles, pharyngitis (e.g., viral and bacterial), tonsillitis, tonsillar cellulitis, parapharyngeal abscess, laryngitis, laryngoceles, and throat cancers (e.g., cancer of the nasopharynx, tonsil cancer, larynx cancer), lung cancer (e.g., squamous cell carcinoma, small cell (oat cell) carcinoma, large cell carcinoma, and adenocarcinoma), allergic disorders (eosinophilic pneumonia, hypersensitivity pneumonitis (e.g., extrinsic allergic alveolitis, allergic interstitial pneumonitis, organic dust pneumoconiosis, allergic bronchopulmonary aspergillosis, asthma, Wegener's granulomatosis (granulomatous vasculitis), Goodpasture's syndrome)), pneumonia (e.g., bacterial pneumonia (e.g., Streptococcus pneumoniae (pneumoncoccal pneumonia), Staphylococcus aureus (staphylococcal pneumonia), Gram-negative bacterial pneumonia (caused by, e.g., Klebsiella and Pseudomas spp.), Mycoplasma pneumoniae pneumonia, Hemophilus influenzae pneumonia, Legionella pneumophila (Legionnaires' disease), and Chlamydia psittaci (Psittacosis)), and viral pneumonia (e.g., influenza, chickenpox (varicella).

[0708] Additional diseases and disorders of the respiratory system include, but are not limited to bronchiolitis, polio (poliomyelitis), croup, respiratory syncytial viral infection, mumps, erythema infectiosum (fifth disease), roseola infantum, progressive rubella panencephalitis, german measles, and subacute sclerosing panencephalitis), fungal pneumonia (e.g., Histoplasmosis, Coccidioidomycosis, Blastomycosis, fungal infections in people with severely suppressed immune systems (e.g., cryptococcosis, caused by Cryptococcus neoformans; aspergillosis, caused by Aspergillus spp.; candidiasis, caused by Candida; and mucormycosis)), Pneumocystis carinii (pneumocystis pneumonia), atypical pneumonias (e.g., Mycoplasma and Chlamydia spp.), opportunistic infection pneumonia, nosocomial pneumonia, chemical pneumonitis, and aspiration pneumonia, pleural disorders (e.g., pleurisy, pleural effusion, and pneumothorax (e.g., simple spontaneous pneumothorax, complicated spontaneous pneumothorax, tension pneumothorax)), obstructive airway diseases (e.g., asthma, chronic obstructive pulmonary disease (COPD), emphysema, chronic or acute bronchitis), occupational lung diseases (e.g., silicosis, black lung (coal workers' pneumoconiosis), asbestosis, berylliosis, occupational asthsma, byssinosis, and benign pneumoconioses), Infiltrative Lung Disease (e.g., pulmonary fibrosis (e.g., fibrosing alveolitis, usual interstitial pneumonia), idiopathic pulmonary fibrosis, desquamative interstitial pneumonia, lymphoid interstitial pneumonia, histiocytosis X (e.g., Letterer-Siwe disease, Hand-Schüller-Christian disease, eosinophilic granuloma), idiopathic pulmonary hemosiderosis, sarcoidosis and pulmonary alveolar proteinosis), Acute respiratory distress syndrome (also called, e.g., adult respiratory distress syndrome), edema, pulmonary embolism, bronchitis (e.g., viral, bacterial), bronchiectasis, atelectasis, lung abscess (caused by, e.g., Staphylococcus aureus or Legionella pneumophila), and cystic fibrosis.

[0709] Anti-Angiogenesis Activity

[0710] The naturally occurring balance between endogenous stimulators and inhibitors of angiogenesis is one in which inhibitory influences predominate. Rastinejad et al., Cell 56:345-355 (1989). In those rare instances in which neovascularization occurs under normal physiological conditions, such as wound healing, organ regeneration, embryonic development, and female reproductive processes, angiogenesis is stringently regulated and spatially and temporally delimited. Under conditions of pathological angiogenesis such as that characterizing solid tumor growth, these regulatory controls fail. Unregulated angiogenesis becomes pathologic and sustains progression of many neoplastic and non-neoplastic diseases. A number of serious diseases are dominated by abnormal neovascularization including solid tumor growth and metastases, arthritis, some types of eye disorders, and psoriasis. See, e.g., reviews by Moses et al., Biotech. 9:630-634 (1991); Folkman et al., N. Engl. J Med., 333:1757-1763 (1995); Auerbach et al., J. Microvasc. Res. 29:401-411 (1985); Folkman, Advances in Cancer Research, eds. Klein and Weinhouse, Academic Press, New York, pp. 175-203 (1985); Patz, Am. J Opthalmol. 94:715-743 (1982); and Folkman et al., Science 221:719-725 (1983). In a number of pathological conditions, the process of angiogenesis contributes to the disease state. For example, significant data have accumulated which suggest that the growth of solid tumors is dependent on angiogenesis. Folkman and Klagsbrun, Science 235:442-447 (1987).

[0711] The present invention provides for treatment of diseases or disorders associated with neovascularization by administration of the polynucleotides and/or polypeptides of the invention, as well as agonists or antagonists of the present invention. Malignant and metastatic conditions which can be treated with the polynucleotides and polypeptides, or agonists or antagonists of the invention include, but are not limited to, malignancies, solid tumors, and cancers described herein and otherwise known in the art (for a review of such disorders, see Fishman et al., Medicine, 2d Ed., J. B. Lippincott Co., Philadelphia (1985)). Thus, the present invention provides a method of treating an angiogenesis-related disease and/or disorder, comprising administration to an individual in need thereof a therapeutically effective amount of a polynucleotide, polypeptide, antagonist and/or agonist of the invention. For example, polynucleotides, polypeptides, antagonists and/or agonists may be utilized in a variety of additional methods in order to therapeutically treat a cancer or tumor. Cancers which may be treated with polynucleotides, polypeptides, antagonists and/or agonists include, but are not limited to solid tumors, including prostate, lung, breast, ovarian, stomach, pancreas, larynx, esophagus, testes, liver, parotid, biliary tract, colon, rectum, cervix, uterus, endometrium, kidney, bladder, thyroid cancer; primary tumors and metastases; melanomas; glioblastoma; Kaposi's sarcoma; leiomyosarcoma; non- small cell lung cancer; colorectal cancer; advanced malignancies; and blood born tumors such as leukemias. For example, polynucleotides, polypeptides, antagonists and/or agonists may be delivered topically, in order to treat cancers such as skin cancer, head and neck tumors, breast tumors, and Kaposi's sarcoma.

[0712] Within yet other aspects, polynucleotides, polypeptides, antagonists and/or agonists may be utilized to treat superficial forms of bladder cancer by, for example, intravesical administration. Polynucleotides, polypeptides, antagonists and/or agonists may be delivered directly into the tumor, or near the tumor site, via injection or a catheter. Of course, as the artisan of ordinary skill will appreciate, the appropriate mode of administration will vary according to the cancer to be treated. Other modes of delivery are discussed herein.

[0713] Polynucleotides, polypeptides, antagonists and/or agonists may be useful in treating other disorders, besides cancers, which involve angiogenesis. These disorders include, but are not limited to: benign tumors, for example hemangiomas, acoustic neuromas, neurofibromas, trachomas, and pyogenic granulomas; artheroscleric plaques; ocular angiogenic diseases, for example, diabetic retinopathy, retinopathy of prematurity, macular degeneration, comeal graft rejection, neovascular glaucoma, retrolental fibroplasia, rubeosis, retinoblastoma, uvietis and Pterygia (abnormal blood vessel growth) of the eye; rheumatoid arthritis; psoriasis; delayed wound healing; endometriosis; vasculogenesis; granulations; hypertrophic scars (keloids); nonunion fractures; scleroderma; trachoma; vascular adhesions; myocardial angiogenesis; coronary collaterals; cerebral collaterals; arteriovenous malformations; ischemic limb angiogenesis; Osler-Webber Syndrome; plaque neovascularization; telangiectasia; hemophiliac joints; angiofibroma; fibromuscular dysplasia; wound granulation; Crohn's disease; and atherosclerosis.

[0714] For example, within one aspect of the present invention methods are provided for treating hypertrophic scars and keloids, comprising the step of administering a polynucleotide, polypeptide, antagonist and/or agonist of the invention to a hypertrophic scar or keloid.

[0715] Within one embodiment of the present invention polynucleotides, polypeptides, antagonists and/or agonists of the invention are directly injected into a hypertrophic scar or keloid, in order to prevent the progression of these lesions. This therapy is of particular value in the prophylactic treatment of conditions which are known to result in the development of hypertrophic scars and keloids (e.g., burns), and is preferably initiated after the proliferative phase has had time to progress (approximately 14 days after the initial injury), but before hypertrophic scar or keloid development. As noted above, the present invention also provides methods for treating neovascular diseases of the eye, including for example, corneal neovascularization, neovascular glaucoma, proliferative diabetic retinopathy, retrolental fibroplasia and macular degeneration.

[0716] Moreover, ocular disorders associated with neovascularization which can be treated with the polynucleotides and polypeptides of the present invention (including agonists and/or antagonists) include, but are not limited to: neovascular glaucoma, diabetic retinopathy, retinoblastoma, retrolental fibroplasia, uveitis, retinopathy of prematurity macular degeneration, corneal graft neovascularization, as well as other eye inflammatory diseases, ocular tumors and diseases associated with choroidal or iris neovascularization. See, e.g., reviews by Waltman et al., Am. J Ophthal 85:704-710 (1978) and Gartner et al., Surv. Ophthal. 22:291-312 (1978).

[0717] Thus, within one aspect of the present invention methods are provided for treating neovascular diseases of the eye such as corneal neovascularization (including corneal graft neovascularization), comprising the step of administering to a patient a therapeutically effective amount of a compound (as described above) to the cornea, such that the formation of blood vessels is inhibited. Briefly, the cornea is a tissue, which normally lacks blood vessels. In certain pathological conditions however, capillaries may extend into the cornea from the pericorneal vascular plexus of the limbus. When the cornea becomes vascularized, it also becomes clouded, resulting in a decline in the patient's visual acuity. Visual loss may become complete if the cornea completely opacitates. A wide variety of disorders can result in corneal neovascularization, including for example, corneal infections (e.g., trachoma, herpes simplex keratitis, leishmaniasis and onchocerciasis), immunological processes (e.g., graft rejection and Stevens-Johnson's syndrome), alkali burns, trauma, inflammation (of any cause), toxic and nutritional deficiency states, and as a complication of wearing contact lenses.

[0718] Within particularly preferred embodiments of the invention, may be prepared for topical administration in saline (combined with any of the preservatives and antimicrobial agents commonly used in ocular preparations), and administered in eyedrop form. The solution or suspension may be prepared in its pure form and administered several times daily. Alternatively, anti-angiogenic compositions, prepared as described above, may also be administered directly to the cornea. Within preferred embodiments, the anti-angiogenic composition is prepared with a muco-adhesive polymer, which binds to cornea. Within further embodiments, the anti-angiogenic factors or anti-angiogenic compositions may be utilized as an adjunct to conventional steroid therapy. Topical therapy may also be useful prophylactically in corneal lesions which are known to have a high probability of inducing an angiogenic response (such as chemical bums). In these instances the treatment, likely in combination with steroids, may be instituted immediately to help prevent subsequent complications.

[0719] Within other embodiments, the compounds described above may be injected directly into the corneal stroma by an ophthalmologist under microscopic guidance. The preferred site of injection may vary with the morphology of the individual lesion, but the goal of the administration would be to place the composition at the advancing front of the vasculature (i.e., interspersed between the blood vessels and the normal cornea). In most cases this would involve perilimbic comeal injection to “protect” the cornea from the advancing blood vessels. This method may also be utilized shortly after a corneal insult in order to prophylactically prevent corneal neovascularization. In this situation, the material could be injected in the perilimbic cornea interspersed between the corneal lesion and its undesired potential limbic blood supply. Such methods may also be utilized in a similar fashion to prevent capillary invasion of transplanted corneas. In a sustained-release form, injections might only be required 2-3 times per year. A steroid could also be added to the injection solution to reduce inflammation resulting from the injection itself.

[0720] Within another aspect of the present invention, methods are provided for treating neovascular glaucoma, comprising the step of administering to a patient a therapeutically effective amount of a polynucleotide, polypeptide, antagonist and/or agonist to the eye, such that the formation of blood vessels is inhibited. In one embodiment, the compound may be administered topically to the eye in order to treat early forms of neovascular glaucoma. Within other embodiments, the compound may be implanted by injection into the region of the anterior chamber angle. Within other embodiments, the compound may also be placed in any location such that the compound is continuously released into the aqueous humor. Within another aspect of the present invention, methods are provided for treating proliferative diabetic retinopathy, comprising the step of administering to a patient a therapeutically effective amount of a polynucleotide, polypeptide, antagonist and/or agonist to the eyes, such that the formation of blood vessels is inhibited.

[0721] Within particularly preferred embodiments of the invention, proliferative diabetic retinopathy may be treated by injection into the aqueous humor or the vitreous, in order to increase the local concentration of the polynucleotide, polypeptide, antagonist and/or agonist in the retina. Preferably, this treatment should be initiated prior to the acquisition of severe disease requiring photocoagulation.

[0722] Within another aspect of the present invention, methods are provided for treating retrolental fibroplasia, comprising the step of administering to a patient a therapeutically effective amount of a polynucleotide, polypeptide, antagonist and/or agonist to the eye, such that the formation of blood vessels is inhibited. The compound may be administered topically, via intravitreous injection and/or via intraocular implants.

[0723] Additionally, disorders which can be treated with the polynucleotides, polypeptides, agonists and/or agonists include, but are not limited to, hemangioma, arthritis, psoriasis, angiofibroma, atherosclerotic plaques, delayed wound healing, granulations, hemophilic joints, hypertrophic scars, nonunion fractures, Osler-Weber syndrome, pyogenic granuloma, scleroderma, trachoma, and vascular adhesions.

[0724] Moreover, disorders and/or states, which can be treated, prevented, diagnosed and/or prognosed with the polynucleotides, polypeptides, agonists and/or agonists of the invention include, but are not limited to, solid tumors, blood born tumors such as leukemias, tumor metastasis, Kaposi's sarcoma, benign tumors, for example hemangiomas, acoustic neuromas, neurofibromas, trachomas, and pyogenic granulomas, rheumatoid arthritis, psoriasis, ocular angiogenic diseases, for example, diabetic retinopathy, retinopathy of prematurity, macular degeneration, corneal graft rejection, neovascular glaucoma, retrolental fibroplasia, rubeosis, retinoblastoma, and uvietis, delayed wound healing, endometriosis, vascluogenesis, granulations, hypertrophic scars (keloids), nonunion fractures, scleroderma, trachoma, vascular adhesions, myocardial angiogenesis, coronary collaterals, cerebral collaterals, arteriovenous malformations, ischemic limb angiogenesis, Osler-Webber Syndrome, plaque neovascularization, telangiectasia, hemophiliac joints, angiofibroma fibromuscular dysplasia, wound granulation, Crohn's disease, atherosclerosis, birth control agent by preventing vascularization required for embryo implantation controlling menstruation, diseases that have angiogenesis as a pathologic consequence such as cat scratch disease (Rochele minalia quintosa), ulcers (Helicobacter pylori), Bartonellosis and bacillary angiomatosis.

[0725] In one aspect of the birth control method, an amount of the compound sufficient to block embryo implantation is administered before or after intercourse and fertilization have occurred, thus providing an effective method of birth control, possibly a “morning after” method. Polynucleotides, polypeptides, agonists and/or agonists may also be used in controlling menstruation or administered as either a peritoneal lavage fluid or for peritoneal implantation in the treatment of endometriosis.

[0726] Polynucleotides, polypeptides, agonists and/or agonists of the present invention may be incorporated into surgical sutures in order to prevent stitch granulomas.

[0727] Polynucleotides, polypeptides, agonists and/or agonists may be utilized in a wide variety of surgical procedures. For example, within one aspect of the present invention a compositions (in the form of, for example, a spray or film) may be utilized to coat or spray an area prior to removal of a tumor, in order to isolate normal surrounding tissues from malignant tissue, and/or to prevent the spread of disease to surrounding tissues. Within other aspects of the present invention, compositions (e.g., in the form of a spray) may be delivered via endoscopic procedures in order to coat tumors, or inhibit angiogenesis in a desired locale. Within yet other aspects of the present invention, surgical meshes, which have been coated with anti- angiogenic compositions of the present invention may be utilized in any procedure wherein a surgical mesh might be utilized. For example, within one embodiment of the invention a surgical mesh laden with an anti-angiogenic composition may be utilized during abdominal cancer resection surgery (e.g., subsequent to colon resection) in order to provide support to the structure, and to release an amount of the anti-angiogenic factor.

[0728] Within further aspects of the present invention, methods are provided for treating tumor excision sites, comprising administering a polynucleotide, polypeptide, agonist and/or agonist to the resection margins of a tumor subsequent to excision, such that the local recurrence of cancer and the formation of new blood vessels at the site is inhibited. Within one embodiment of the invention, the anti-angiogenic compound is administered directly to the tumor excision site (e.g., applied by swabbing, brushing or otherwise coating the resection margins of the tumor with the anti-angiogenic compound). Alternatively, the anti-angiogenic compounds may be incorporated into known surgical pastes prior to administration. Within particularly preferred embodiments of the invention, the anti-angiogenic compounds are applied after hepatic resections for malignancy, and after neurosurgical operations.

[0729] Within one aspect of the present invention, polynucleotides, polypeptides, agonists and/or agonists may be administered to the resection margin of a wide variety of tumors, including for example, breast, colon, brain and hepatic tumors. For example, within one embodiment of the invention, anti-angiogenic compounds may be administered to the site of a neurological tumor subsequent to excision, such that the formation of new blood vessels at the site are inhibited.

[0730] The polynucleotides, polypeptides, agonists and/or agonists of the present invention may also be administered along with other anti-angiogenic factors. Representative examples of other anti-angiogenic factors include: Anti-Invasive Factor, retinoic acid and derivatives thereof, paclitaxel, Suramin, Tissue Inhibitor of Metalloproteinase-1, Tissue Inhibitor of Metalloproteinase-2, Plasminogen Activator Inhibitor-1, Plasminogen Activator Inhibitor-2, and various forms of the lighter “d group” transition metals.

[0731] Lighter “d group” transition metals include, for example, vanadium, molybdenum, tungsten, titanium, niobium, and tantalum species. Such transition metal species may form transition metal complexes. Suitable complexes of the above-mentioned transition metal species include oxo transition metal complexes.

[0732] Representative examples of vanadium complexes include oxo vanadium complexes such as vanadate and vanadyl complexes. Suitable vanadate complexes include metavanadate and orthovanadate complexes such as, for example, ammonium metavanadate, sodium metavanadate, and sodium orthovanadate. Suitable vanadyl complexes include, for example, vanadyl acetylacetonate and vanadyl sulfate including vanadyl sulfate hydrates such as vanadyl sulfate mono- and trihydrates.

[0733] Representative examples of tungsten and molybdenum complexes also include oxo complexes. Suitable oxo tungsten complexes include tungstate and tungsten oxide complexes. Suitable tungstate complexes include ammonium tungstate, calcium tungstate, sodium tungstate dihydrate, and tungstic acid. Suitable tungsten oxides include tungsten (IV) oxide and tungsten (VI) oxide. Suitable oxo molybdenum complexes include molybdate, molybdenum oxide, and molybdenyl complexes. Suitable molybdate complexes include ammonium molybdate and its hydrates, sodium molybdate and its hydrates, and potassium molybdate and its hydrates. Suitable molybdenum oxides include molybdenum (VI) oxide, molybdenum (VI) oxide, and molybdic acid. Suitable molybdenyl complexes include, for example, molybdenyl acetylacetonate. Other suitable tungsten and molybdenum complexes include hydroxo derivatives derived from, for example, glycerol, tartaric acid, and sugars.

[0734] A wide variety of other anti-angiogenic factors may also be utilized within the context of the present invention. Representative examples include platelet factor 4; protamine sulphate; sulphated chitin derivatives (prepared from queen crab shells), (Murata et al., Cancer Res. 51:22-26 (1991)); Sulphated Polysaccharide Peptidoglycan Complex (SP- PG) (the function of this compound may be enhanced by the presence of steroids such as estrogen, and tamoxifen citrate); Staurosporine; modulators of matrix metabolism, including for example, proline analogs, cishydroxyproline, d,L-3,4-dehydroproline, Thiaproline, alpha,alpha-dipyridyl, aminopropionitrile fumarate; 4-propyl-5-(4-pyridinyl)-2(3H)-oxazolone; Methotrexate; Mitoxantrone; Heparin; Interferons; 2 Macroglobulin-serum; ChIMP-3 (Pavloff et al., J. Bio. Chem. 267:17321-17326 (1992)); Chymostatin (Tomkinson et al., Biochem J. 286:475-480 (1992)); Cyclodextrin Tetradecasulfate; Eponemycin; Camptothecin; Fumagillin (Ingber et al., Nature 348:555-557 (1990)); Gold Sodium Thiomalate (“GST”; Matsubara and Ziff, J. Clin. Invest. 79:1440-1446 (1987)); anticollagenase-serum; alpha2-antiplasmin (Holmes et al., J. Biol. Chem. 262(4):1659-1664 (1987)); Bisantrene (National Cancer Institute); Lobenzarit disodium (N-(2)-carboxyphenyl-4-chloroanthronilic acid disodium or “CCA”; Takeuchi et al., Agents Actions 36:312-316, 1992); Thalidomide; Angostatic steroid; AGM-1470; carboxynaminolmidazole; and metalloproteinase inhibitors such as BB94.

[0735] Musculoskeletal System Disorders

[0736] Polynucleotides, polypeptides, antibodies, and/or agonists or antagonists of the present invention, may be used to treat, prevent, diagnose, and/or prognose disorders of the musculoskeletal system, including but not limited to, disorders of the bone, joints, ligaments, tendons, bursa, muscle, and/or neoplasms and cancers associated with musculoskeletal tissue.

[0737] Diseases or disorders of the bone include, but are not limited to, Albers-Schönberg disease, bowlegs, heel spurs, Kohler's bone disease, knock-knees, Legg-Calvé-Perthes disease, Marfan's syndrome, mucopolysaccharidoses, Osgood-Schlatter disease, osteochondroses, osteochondrodysplasia, osteomyelitis, osteopetroses, osteoporosis (postmenopausal, senile, and juvenile), Paget's disease, Scheuermann's disease, scoliosis, Sever's disease, and patellofemoral stress syndrome.

[0738] Joint diseases or disorders include, but are not limited to, ankylosing spondylitis, Behcet's syndrome, CREST syndrome, Ehlers-Danlos syndrome, infectious arthritis, discoid lupus erythematosus, systemic lupus erythematosus, Lyme disease, osteoarthritis, psoriatic arthritis, relapsing polychondrites, Reiter's syndrome, rheumatoid arthritis (adult and juvenile), scleroderma, and Still's disease.

[0739] Diseases or disorders affecting ligaments, tendons, or bursa include, but are not limited to, ankle sprain, bursitis, posterior Achilles tendon bursitis (Haglund's deformity), anterior Achilles tendon bursitis (Albert's disease), tendinitis, tenosynovitis, poplieus tendinitis, Achilles tendinitis, medial or lateral epicondylitis, rotator cuff tendinitis, spasmodic torticollis, and fibromyalgia syndrome.

[0740] Muscle diseases or disorders include, but are not limited to, Becker's muscular dystrophy, Duchenne's muscular dystrophy, Landouzy-Dejerine muscular dystrophy, Leyden-Möbius muscular dystrophy, Erb's muscular dystrophy, Charcot's joints, dermatomyositis, gout, pseudogout, glycogen storage diseases, Pompe's disease, mitochondrial myopathy, periodic paralysis, polymyalgia rheumatica, polymyositis, Steinert's disease, Thomsen's disease, anterolateral and posteromedial shin splints, posterior femoral muscle strain, and fibromyositis.

[0741] Musculoskeletal tissue may also develop cancers and/or neoplasms that include, but are not limited to, osteochondroma, benign chondroma, chondroblastoma, chondromyxoid fibroma, osteoid osteoma, giant cell tumor, multiple myeloma, osteosarcoma, fibrosarcoma, malignant fibrous histiocytoma, chondrosarcoma, Ewing's tumor, and malignant lymphoma of bone.

[0742] Neural Activity and Neurological Diseases

[0743] The polynucleotides, polypeptides and agonists or antagonists of the invention may be used for the diagnosis and/or treatment of diseases, disorders, damage or injury of the brain and/or nervous system. Nervous system disorders that can be treated with the compositions of the invention (e.g., polypeptides, polynucleotides, and/or agonists or antagonists), include, but are not limited to, nervous system injuries, and diseases or disorders which result in either a disconnection of axons, a diminution or degeneration of neurons, or demyelination. Nervous system lesions which may be treated in a patient (including human and non-human mammalian patients) according to the methods of the invention, include but are not limited to, the following lesions of either the central (including spinal cord, brain) or peripheral nervous systems: (1) ischemic lesions, in which a lack of oxygen in a portion of the nervous system results in neuronal injury or death, including cerebral infarction or ischemia, or spinal cord infarction or ischemia; (2) traumatic lesions, including lesions caused by physical injury or associated with surgery, for example, lesions which sever a portion of the nervous system, or compression injuries; (3) malignant lesions, in which a portion of the nervous system is destroyed or injured by malignant tissue which is either a nervous system associated malignancy or a malignancy derived from non-nervous system tissue; (4) infectious lesions, in which a portion of the nervous system is destroyed or injured as a result of infection, for example, by an abscess or associated with infection by human immunodeficiency virus, herpes zoster, or herpes simplex virus or with Lyme disease, tuberculosis, or syphilis; (5) degenerative lesions, in which a portion of the nervous system is destroyed or injured as a result of a degenerative process including but not limited to, degeneration associated with Parkinson's disease, Alzheimer's disease, Huntington's chorea, or amyotrophic lateral sclerosis (ALS); (6) lesions associated with nutritional diseases or disorders, in which a portion of the nervous system is destroyed or injured by a nutritional disorder or disorder of metabolism including, but not limited to, vitamin B12 deficiency, folic acid deficiency, Wemicke disease, tobacco-alcohol amblyopia, Marchiafava-Bignami disease (primary degeneration of the corpus callosum), and alcoholic cerebellar degeneration; (7) neurological lesions associated with systemic diseases including, but not limited to, diabetes (diabetic neuropathy, Bell's palsy), systemic lupus erythematosus, carcinoma, or sarcoidosis; (8) lesions caused by toxic substances including alcohol, lead, or particular neurotoxins; and (9) demyelinated lesions in which a portion of the nervous system is destroyed or injured by a demyelinating disease including, but not limited to, multiple sclerosis, human immunodeficiency virus-associated myelopathy, transverse myelopathy or various etiologies, progressive multifocal leukoencephalopathy, and central pontine myelinolysis.

[0744] In one embodiment, the polypeptides, polynucleotides, or agonists or antagonists of the invention are used to protect neural cells from the damaging effects of hypoxia. In a further preferred embodiment, the polypeptides, polynucleotides, or agonists or antagonists of the invention are used to protect neural cells from the damaging effects of cerebral hypoxia. According to this embodiment, the compositions of the invention are used to treat or prevent neural cell injury associated with cerebral hypoxia. In one non-exclusive aspect of this embodiment, the polypeptides, polynucleotides, or agonists or antagonists of the invention, are used to treat or prevent neural cell injury associated with cerebral ischemia. In another non-exclusive aspect of this embodiment, the polypeptides, polynucleotides, or agonists or antagonists of the invention are used to treat or prevent neural cell injury associated with cerebral infarction.

[0745] In another preferred embodiment, the polypeptides, polynucleotides, or agonists or antagonists of the invention are used to treat or prevent neural cell injury associated with a stroke. In a specific embodiment, the polypeptides, polynucleotides, or agonists or antagonists of the invention are used to treat or prevent cerebral neural cell injury associated with a stroke.

[0746] In another preferred embodiment, the polypeptides, polynucleotides, or agonists or antagonists of the invention are used to treat or prevent neural cell injury associated with a heart attack. In a specific embodiment, the polypeptides, polynucleotides, or agonists or antagonists of the invention are used to treat or prevent cerebral neural cell injury associated with a heart attack.

[0747] The compositions of the invention which are useful for treating or preventing a nervous system disorder may be selected by testing for biological activity in promoting the survival or differentiation of neurons. For example, and not by way of limitation, compositions of the invention which elicit any of the following effects may be useful according to the invention: (1) increased survival time of neurons in culture either in the presence or absence of hypoxia or hypoxic conditions; (2) increased sprouting of neurons in culture or in vivo; (3) increased production of a neuron-associated molecule in culture or in vivo, e.g., choline acetyltransferase or acetylcholinesterase with respect to motor neurons; or (4) decreased symptoms of neuron dysfunction in vivo. Such effects may be measured by any method known in the art. In preferred, non-limiting embodiments, increased survival of neurons may routinely be measured using a method set forth herein or otherwise known in the art, such as, for example, in Zhang et al., Proc Natl Acad Sci USA 97:3637-42 (2000) or in Arakawa et al., J. Neurosci., 10:3507-15 (1990); increased sprouting of neurons may be detected by methods known in the art, such as, for example, the methods set forth in Pestronk et al., Exp. Neurol., 70:65-82 (1980), or Brown et al., Ann. Rev. Neurosci., 4:17-42 (1981); increased production of neuron-associated molecules may be measured by bioassay, enzymatic assay, antibody binding, Northern blot assay, etc., using techniques known in the art and depending on the molecule to be measured; and motor neuron dysfunction may be measured by assessing the physical manifestation of motor neuron disorder, e.g., weakness, motor neuron conduction velocity, or functional disability.

[0748] In specific embodiments, motor neuron disorders that may be treated according to the invention include, but are not limited to, disorders such as infarction, infection, exposure to toxin, trauma, surgical damage, degenerative disease or malignancy that may affect motor neurons as well as other components of the nervous system, as well as disorders that selectively affect neurons such as amyotrophic lateral sclerosis, and including, but not limited to, progressive spinal muscular atrophy, progressive bulbar palsy, primary lateral sclerosis, infantile and juvenile muscular atrophy, progressive bulbar paralysis of childhood (Fazio-Londe syndrome), poliomyelitis and the post polio syndrome, and Hereditary Motorsensory Neuropathy (Charcot-Marie-Tooth Disease).

[0749] Further, polypeptides or polynucleotides of the invention may play a role in neuronal survival; synapse formation; conductance; neural differentiation, etc. Thus, compositions of the invention (including polynucleotides, polypeptides, and agonists or antagonists) may be used to diagnose and/or treat or prevent diseases or disorders associated with these roles, including, but not limited to, learning and/or cognition disorders. The compositions of the invention may also be useful in the treatment or prevention of neurodegenerative disease states and/or behavioural disorders. Such neurodegenerative disease states and/or behavioral disorders include, but are not limited to, Alzheimer's Disease, Parkinson's Disease, Huntington's Disease, Tourette Syndrome, schizophrenia, mania, dementia, paranoia, obsessive compulsive disorder, panic disorder, learning disabilities, ALS, psychoses, autism, and altered behaviors, including disorders in feeding, sleep patterns, balance, and perception. In addition, compositions of the invention may also play a role in the treatment, prevention and/or detection of developmental disorders associated with the developing embryo, or sexually-linked disorders.

[0750] Additionally, polypeptides, polynucleotides and/or agonists or antagonists of the invention, may be useful in protecting neural cells from diseases, damage, disorders, or injury, associated with cerebrovascular disorders including, but not limited to, carotid artery diseases (e.g., carotid artery thrombosis, carotid stenosis, or Moyamoya Disease), cerebral amyloid angiopathy, cerebral aneurysm, cerebral anoxia, cerebral arteriosclerosis, cerebral arteriovenous malformations, cerebral artery diseases, cerebral embolism and thrombosis (e.g., carotid artery thrombosis, sinus thrombosis, or Wallenberg's Syndrome), cerebral hemorrhage (e.g., epidural or subdural hematoma, or subarachnoid hemorrhage), cerebral infarction, cerebral ischemia (e.g., transient cerebral ischemia, Subclavian Steal Syndrome, or vertebrobasilar insufficiency), vascular dementia (e.g., multi-infarct), leukomalacia, periventricular, and vascular headache (e.g., cluster headache or migraines).

[0751] In accordance with yet a further aspect of the present invention, there is provided a process for utilizing polynucleotides or polypeptides, as well as agonists or antagonists of the present invention, for therapeutic purposes, for example, to stimulate neurological cell proliferation and/or differentiation. Therefore, polynucleotides, polypeptides, agonists and/or antagonists of the invention may be used to treat and/or detect neurologic diseases. Moreover, polynucleotides or polypeptides, or agonists or antagonists of the invention, can be used as a marker or detector of a particular nervous system disease or disorder.

[0752] Examples of neurologic diseases which can be treated or detected with polynucleotides, polypeptides, agonists, and/or antagonists of the present invention include brain diseases, such as metabolic brain diseases which includes phenylketonuria such as maternal phenylketonuria, pyruvate carboxylase deficiency, pyruvate dehydrogenase complex deficiency, Wernicke's Encephalopathy, brain edema, brain neoplasms such as cerebellar neoplasms which include infratentorial neoplasms, cerebral ventricle neoplasms such as choroid plexus neoplasms, hypothalamic neoplasms, supratentorial neoplasms, canavan disease, cerebellar diseases such as cerebellar ataxia which include spinocerebellar degeneration such as ataxia telangiectasia, cerebellar dyssynergia, Friederich's Ataxia, Machado-Joseph Disease, olivopontocerebellar atrophy, cerebellar neoplasms such as infratentorial neoplasms, diffuse cerebral sclerosis such as encephalitis periaxialis, globoid cell leukodystrophy, metachromatic leukodystrophy and subacute sclerosing panencephalitis.

[0753] Additional neurologic diseases which can be treated or detected with polynucleotides, polypeptides, agonists, and/or antagonists of the present invention include cerebrovascular disorders (such as carotid artery diseases which include carotid artery thrombosis, carotid stenosis and Moyamoya Disease), cerebral amyloid angiopathy, cerebral aneurysm, cerebral anoxia, cerebral arteriosclerosis, cerebral arteriovenous malformations, cerebral artery diseases, cerebral embolism and thrombosis such as carotid artery thrombosis, sinus thrombosis and Wallenberg's Syndrome, cerebral hemorrhage such as epidural hematoma, subdural hematoma and subarachnoid hemorrhage, cerebral infarction, cerebral ischemia such as transient cerebral ischemia, Subclavian Steal Syndrome and vertebrobasilar insufficiency, vascular dementia such as multi-infarct dementia, periventricular leukomalacia, vascular headache such as cluster headache and migraine.

[0754] Additional neurologic diseases which can be treated or detected with polynucleotides, polypeptides, agonists, and/or antagonists of the present invention include dementia such as AIDS Dementia Complex, presenile dementia such as Alzheimer's Disease and Creutzfeldt-Jakob Syndrome, senile dementia such as Alzheimer's Disease and progressive supranuclear palsy, vascular dementia such as multi-infarct dementia, encephalitis which include encephalitis periaxialis, viral encephalitis such as epidemic encephalitis, Japanese Encephalitis, St. Louis Encephalitis, tick-borne encephalitis and West Nile Fever, acute disseminated encephalomyelitis, meningoencephalitis such as uveomeningoencephalitic syndrome, Postencephalitic Parkinson Disease and subacute sclerosing panencephalitis, encephalomalacia such as periventricular leukomalacia, epilepsy such as generalized epilepsy which includes infantile spasms, absence epilepsy, myoclonic epilepsy which includes MERRF Syndrome, tonic-clonic epilepsy, partial epilepsy such as complex partial epilepsy, frontal lobe epilepsy and temporal lobe epilepsy, post-traumatic epilepsy, status epilepticus such as Epilepsia Partialis Continua, and Hallervorden-Spatz Syndrome.

[0755] Additional neurologic diseases which can be treated or detected with polynucleotides, polypeptides, agonists, and/or antagonists of the present invention include hydrocephalus such as Dandy-Walker Syndrome and normal pressure hydrocephalus, hypothalamic diseases such as hypothalamic neoplasms, cerebral malaria, narcolepsy which includes cataplexy, bulbar poliomyelitis, cerebri pseudotumor, Rett Syndrome, Reye's Syndrome, thalamic diseases, cerebral toxoplasmosis, intracranial tuberculoma and Zellweger Syndrome, central nervous system infections such as AIDS Dementia Complex, Brain Abscess, subdural empyema, encephalomyelitis such as Equine Encephalomyelitis, Venezuelan Equine Encephalomyelitis, Necrotizing Hemorrhagic Encephalomyelitis, Visna, and cerebral malaria.

[0756] Additional neurologic diseases which can be treated or detected with polynucleotides, polypeptides, agonists, and/or antagonists of the present invention include meningitis such as arachnoiditis, aseptic meningtitis such as viral meningtitis which includes lymphocytic choriomeningitis, Bacterial meningtitis which includes Haemophilus Meningtitis, Listeria Meningtitis, Meningococcal Meningtitis such as Waterhouse-Friderichsen Syndrome, Pneumococcal Meningtitis and meningeal tuberculosis, fungal meningitis such as Cryptococcal Meningtitis, subdural effusion, meningoencephalitis such as uvemeningoencephalitic syndrome, myelitis such as transverse myelitis, neurosyphilis such as tabes dorsalis, poliomyelitis which includes bulbar poliomyelitis and postpoliomyelitis syndrome, prion diseases (such as Creutzfeldt-Jakob Syndrome, Bovine Spongiform Encephalopathy, Gerstmann-Straussler Syndrome, Kuru, Scrapie), and cerebral toxoplasmosis.

[0757] Additional neurologic diseases which can be treated or detected with polynucleotides, polypeptides, agonists, and/or antagonists of the present invention include central nervous system neoplasms such as brain neoplasms that include cerebellar neoplasms such as infratentorial neoplasms, cerebral ventricle neoplasms such as choroid plexus neoplasms, hypothalamic neoplasms and supratentorial neoplasms, meningeal neoplasms, spinal cord neoplasms which include epidural neoplasms, demyelinating diseases such as Canavan Diseases, diffuse cerebral sceloris which includes adrenoleukodystrophy, encephalitis periaxialis, globoid cell leukodystrophy, diffuse cerebral sclerosis such as metachromatic leukodystrophy, allergic encephalomyelitis, necrotizing hemorrhagic encephalomyelitis, progressive multifocal leukoencephalopathy, multiple sclerosis, central pontine myelinolysis, transverse myelitis, neuromyclitis optica, Scrapie, Swayback, Chronic Fatigue Syndrome, Visna, High Pressure Nervous Syndrome, Meningism, spinal cord diseases such as amyotonia congenita, amyotrophic lateral sclerosis, spinal muscular atrophy such as Werdnig-Hoffmann Disease, spinal cord compression, spinal cord neoplasms such as epidural neoplasms, syringomyelia, Tabes Dorsalis, Stiff-Man Syndrome, mental retardation such as Angelman Syndrome, Cri-du-Chat Syndrome, De Lange's Syndrome, Down Syndrome, Gangliosidoses such as gangliosidoses G(M1), Sandhoff Disease, Tay-Sachs Disease, Hartnup Disease, homocystinuria, Laurence-Moon-Biedl Syndrome, Lesch-Nyhan Syndrome, Maple Syrup Urine Disease, mucolipidosis such as fucosidosis, neuronal ceroid-lipofuscinosis, oculocerebrorenal syndrome, phenylketonuria such as maternal phenylketonuria, Prader-Willi Syndrome, Rett Syndrome, Rubinstein-Taybi Syndrome, Tuberous Sclerosis, WAGR Syndrome, nervous system abnormalities such as holoprosencephaly, neural tube defects such as anencephaly which includes hydrangencephaly, Arnold-Chairi Deformity, encephalocele, meningocele, meningomyelocele, spinal dysraphism such as spina bifida cystica and spina bifida occulta.

[0758] Additional neurologic diseases which can be treated or detected with polynucleotides, polypeptides, agonists, and/or antagonists of the present invention include hereditary motor and sensory neuropathies which include Charcot-Marie Disease, Hereditary optic atrophy, Refsum's Disease, hereditary spastic paraplegia, Werdnig-Hoffmann Disease, Hereditary Sensory and Autonomic Neuropathies such as Congenital Analgesia and Familial Dysautonomia, Neurologic manifestations (such as agnosia that include Gerstmann's Syndrome, Amnesia such as retrograde amnesia, apraxia, neurogenic bladder, cataplexy, communicative disorders such as hearing disorders that includes deafness, partial hearing loss, loudness recruitment and tinnitus, language disorders such as aphasia which include agraphia, anomia, broca aphasia, and Wernicke Aphasia, Dyslexia such as Acquired Dyslexia, language development disorders, speech disorders such as aphasia which includes anomia, broca aphasia and Wernicke Aphasia, articulation disorders, communicative disorders such as speech disorders which include dysarthria, echolalia, mutism and stuttering, voice disorders such as aphonia and hoarseness, decerebrate state, delirium, fasciculation, hallucinations, meningism, movement disorders such as angelman syndrome, ataxia, athetosis, chorea, dystonia, hypokinesia, muscle hypotonia, myoclonus, tic, torticollis and tremor, muscle hypertonia such as muscle rigidity such as stiff-man syndrome, muscle spasticity, paralysis such as facial paralysis which includes Herpes Zoster Oticus, Gastroparesis, Hemiplegia, ophthalmoplegia such as diplopia, Duane's Syndrome, Homer's Syndrome, Chronic progressive external ophthalmoplegia such as Kearns Syndrome, Bulbar Paralysis, Tropical Spastic Paraparesis, Paraplegia such as Brown-Sequard Syndrome, quadriplegia, respiratory paralysis and vocal cord paralysis, paresis, phantom limb, taste disorders such as ageusia and dysgeusia, vision disorders such as amblyopia, blindness, color vision defects, diplopia, hemianopsia, scotoma and subnormal vision, sleep disorders such as hypersomnia which includes Kleine-Levin Syndrome, insomnia, and somnambulism, spasm such as trismus, unconsciousness such as coma, persistent vegetative state and syncope and vertigo, neuromuscular diseases such as amyotonia congenita, amyotrophic lateral sclerosis, Lambert-Eaton Myasthenic Syndrome, motor neuron disease, muscular atrophy such as spinal muscular atrophy, Charcot-Marie Disease and Werdnig-Hoffmann Disease, Postpoliomyelitis Syndrome, Muscular Dystrophy, Myasthenia Gravis, Myotonia Atrophica, Myotonia Confenita, Nemaline Myopathy, Familial Periodic Paralysis, Multiplex Paramyloclonus, Tropical Spastic Paraparesis and Stiff-Man Syndrome, peripheral nervous system diseases such as acrodynia, amyloid neuropathies, autonomic nervous system diseases such as Adie's Syndrome, Barre-Lieou Syndrome, Familial Dysautonomia, Homer's Syndrome, Reflex Sympathetic Dystrophy and Shy-Drager Syndrome, Cranial Nerve Diseases such as Acoustic Nerve Diseases such as Acoustic Neuroma which includes Neurofibromatosis 2, Facial Nerve Diseases such as Facial Neuralgia,Melkersson-Rosenthal Syndrome, ocular motility disorders which includes amblyopia, nystagmus, oculomotor nerve paralysis, ophthalmoplegia such as Duane's Syndrome, Homer's Syndrome, Chronic Progressive External Ophthalmoplegia which includes Kearns Syndrome, Strabismus such as Esotropia and Exotropia, Oculomotor Nerve Paralysis, Optic Nerve Diseases such as Optic Atrophy which includes Hereditary Optic Atrophy, Optic Disk Drusen, Optic Neuritis such as Neuromyelitis Optica, Papilledema, Trigeminal Neuralgia, Vocal Cord Paralysis, Demyelinating Diseases such as Neuromyelitis Optica and Swayback, and Diabetic neuropathies such as diabetic foot.

[0759] Additional neurologic diseases which can be treated or detected with polynucleotides, polypeptides, agonists, and/or antagonists of the present invention include nerve compression syndromes such as carpal tunnel syndrome, tarsal tunnel syndrome, thoracic outlet syndrome such as cervical rib syndrome, ulnar nerve compression syndrome, neuralgia such as causalgia, cervico-brachial neuralgia, facial neuralgia and trigeminal neuralgia, neuritis such as experimental allergic neuritis, optic neuritis, polyneuritis, polyradiculoneuritis and radiculities such as polyradiculitis, hereditary motor and sensory neuropathies such as Charcot-Marie Disease, Hereditary Optic Atrophy, Refsum's Disease, Hereditary Spastic Paraplegia and Werdnig-Hoffmann Disease, Hereditary Sensory and Autonomic Neuropathies which include Congenital Analgesia and Familial Dysautonomia, POEMS Syndrome, Sciatica, Gustatory Sweating and Tetany).

[0760] Endocrine Disorders

[0761] Polynucleotides or polypeptides, or agonists or antagonists of the present invention, may be used to treat, prevent, diagnose, and/or prognose disorders and/or diseases related to hormone imbalance, and/or disorders or diseases of the endocrine system.

[0762] Hormones secreted by the glands of the endocrine system control physical growth, sexual function, metabolism, and other functions. Disorders may be classified in two ways: disturbances in the production of hormones, and the inability of tissues to respond to hormones. The etiology of these hormone imbalance or endocrine system diseases, disorders or conditions may be genetic, somatic, such as cancer and some autoimmune diseases, acquired (e.g., by chemotherapy, injury or toxins), or infectious. Moreover, polynucleotides, polypeptides, antibodies, and/or agonists or antagonists of the present invention can be used as a marker or detector of a particular disease or disorder related to the endocrine system and/or hormone imbalance.

[0763] Endocrine system and/or hormone imbalance and/or diseases encompass disorders of uterine motility including, but not limited to: complications with pregnancy and labor (e.g., pre-term labor, post-term pregnancy, spontaneous abortion, and slow or stopped labor); and disorders and/or diseases of the menstrual cycle (e.g., dysmenorrhea and endometriosis).

[0764] Endocrine system and/or hormone imbalance disorders and/or diseases include disorders and/or diseases of the pancreas, such as, for example, diabetes mellitus, diabetes insipidus, congenital pancreatic agenesis, pheochromocytoma-islet cell tumor syndrome; disorders and/or diseases of the adrenal glands such as, for example, Addison's Disease, corticosteroid deficiency, virilizing disease, hirsutism, Cushing's Syndrome, hyperaldosteronism, pheochromocytoma; disorders and/or diseases of the pituitary gland, such as, for example, hyperpituitarism, hypopituitarism, pituitary dwarfism, pituitary adenoma, panhypopituitarism, acromegaly, gigantism; disorders and/or diseases of the thyroid, including but not limited to, hyperthyroidism, hypothyroidism, Plummer's disease, Graves' disease (toxic diffuse goiter), toxic nodular goiter, thyroiditis (Hashimoto's thyroiditis, subacute granulomatous thyroiditis, and silent lymphocytic thyroiditis), Pendred's syndrome, myxedema, cretinism, thyrotoxicosis, thyroid hormone coupling defect, thymic aplasia, Hurthle cell tumours of the thyroid, thyroid cancer, thyroid carcinoma, Medullary thyroid carcinoma; disorders and/or diseases of the parathyroid, such as, for example, hyperparathyroidism, hypoparathyroidism; disorders and/or diseases of the hypothalamus.

[0765] In addition, endocrine system and/or hormone imbalance disorders and/or diseases may also include disorders and/or diseases of the testes or ovaries, including cancer. Other disorders and/or diseases of the testes or ovaries further include, for example, ovarian cancer, polycystic ovary syndrome, Klinefelter's syndrome, vanishing testes syndrome (bilateral anorchia), congenital absence of Leydig's cells, cryptorchidism, Noonan's syndrome, myotonic dystrophy, capillary haemangioma of the testis (benign), neoplasias of the testis and neo-testis.

[0766] Moreover, endocrine system and/or hormone imbalance disorders and/or diseases may also include disorders and/or diseases such as, for example, polyglandular deficiency syndromes, pheochromocytoma, neuroblastoma, multiple Endocrine neoplasia, and disorders and/or cancers of endocrine tissues.

[0767] In another embodiment, a polypeptide of the invention, or polynucleotides, antibodies, agonists, or antagonists corresponding to that polypeptide, may be used to diagnose, prognose, prevent, and/or treat endocrine diseases and/or disorders associated with the tissue(s) in which the polypeptide of the invention is expressed, including one, two, three, four, five, or more tissues disclosed in Table 1A, column 7 (Tissue Distribution Library Code).

[0768] Gastrointestinal Disorders

[0769] Polynucleotides or polypeptides, or agonists or antagonists of the present invention, may be used to treat, prevent, diagnose, and/or prognose gastrointestinal disorders, including inflammatory diseases and/or conditions, infections, cancers (e.g., intestinal neoplasms (carcinoid tumor of the small intestine, non-Hodgkin's lymphoma of the small intestine, small bowl lymphoma)), and ulcers, such as peptic ulcers.

[0770] Gastrointestinal disorders include dysphagia, odynophagia, inflammation of the esophagus, peptic esophagitis, gastric reflux, submucosal fibrosis and stricturing, Mallory-Weiss lesions, leiomyomas, lipomas, epidermal cancers, adeoncarcinomas, gastric retention disorders, gastroenteritis, gastric atrophy, gastric/stomach cancers, polyps of the stomach, autoimmune disorders such as pernicious anemia, pyloric stenosis, gastritis (bacterial, viral, eosinophilic, stress-induced, chronic erosive, atrophic, plasma cell, and Ménétrier's), and peritoneal diseases (e.g., chyloperioneum, hemoperitoneum, mesenteric cyst, mesenteric lymphadenitis, mesenteric vascular occlusion, panniculitis, neoplasms, peritonitis, pneumoperitoneum, bubphrenic abscess).

[0771] Gastrointestinal disorders also include disorders associated with the small intestine, such as malabsorption syndromes, distension, irritable bowel syndrome, sugar intolerance, celiac disease, duodenal ulcers, duodenitis, tropical sprue, Whipple's disease, intestinal lymphangiectasia, Crohn's disease, appendicitis, obstructions of the ileum, Meckel's diverticulum, multiple diverticula, failure of complete rotation of the small and large intestine, lymphoma, and bacterial and parasitic diseases (such as Traveler's diarrhea, typhoid and paratyphoid, cholera, infection by Roundworms (Ascariasis lumbricoides), Hookworms (Ancylostoma duodenale), Threadworms (Enterobius vermicularis), Tapeworms (Taenia saginata, Echinococcus granulosus, Diphyllobothrium spp., and T. solium).

[0772] Liver diseases and/or disorders include intrahepatic cholestasis (alagille syndrome, biliary liver cirrhosis), fatty liver (alcoholic fatty liver, reye syndrome), hepatic vein thrombosis, hepatolentricular degeneration, hepatomegaly, hepatopulmonary syndrome, hepatorenal syndrome, portal hypertension (esophageal and gastric varices), liver abscess (amebic liver abscess), liver cirrhosis (alcoholic, biliary and experimental), alcoholic liver diseases (fatty liver, hepatitis, cirrhosis), parasitic (hepatic echinococcosis, fascioliasis, amebic liver abscess), jaundice (hemolytic, hepatocellular, and cholestatic), cholestasis, portal hypertension, liver enlargement, ascites, hepatitis (alcoholic hepatitis, animal hepatitis, chronic hepatitis (autoimmune, hepatitis B, hepatitis C, hepatitis D, drug induced), toxic hepatitis, viral human hepatitis (hepatitis A, hepatitis B, hepatitis C, hepatitis D, hepatitis E), Wilson's disease, granulomatous hepatitis, secondary biliary cirrhosis, hepatic encephalopathy, portal hypertension, varices, hepatic encephalopathy, primary biliary cirrhosis, primary sclerosing cholangitis, hepatocellular adenoma, hemangiomas, bile stones, liver failure (hepatic encephalopathy, acute liver failure), and liver neoplasms (angiomyolipoma, calcified liver metastases, cystic liver metastases, epithelial tumors, fibrolamellar hepatocarcinoma, focal nodular hyperplasia, hepatic adenoma, hepatobiliary cystadenoma, hepatoblastoma, hepatocellular carcinoma, hepatoma, liver cancer, liver hemangioendothelioma, mesenchymal hamartoma, mesenchymal tumors of liver, nodular regenerative hyperplasia, benign liver tumors (Hepatic cysts [Simple cysts, Polycystic liver disease, Hepatobiliary cystadenoma, Choledochal cyst], Mesenchymal tumors [Mesenchymal hamartoma, Infantile hemangioendothelioma, Hemangioma, Peliosis hepatis, Lipomas, Inflammatory pseudotumor, Miscellaneous], Epithelial tumors [Bile duct epithelium (Bile duct hamartoma, Bile duct adenoma), Hepatocyte (Adenoma, Focal nodular hyperplasia, Nodular regenerative hyperplasia)], malignant liver tumors [hepatocellular, hepatoblastoma, hepatocellular carcinoma, cholangiocellular, cholangiocarcinoma, cystadenocarcinoma, tumors of blood vessels, angiosarcoma, Karposi's sarcoma, hemangioendothelioma, other tumors, embryonal sarcoma, fibrosarcoma, leiomyosarcoma, rhabdomyosarcoma, carcinosarcoma, teratoma, carcinoid, squamous carcinoma, primary lymphoma]), peliosis hepatis, erythrohepatic porphyria, hepatic porphyria (acute intermittent porphyria, porphyria cutanea tarda), Zellweger syndrome).

[0773] Pancreatic diseases and/or disorders include acute pancreatitis, chronic pancreatitis (acute necrotizing pancreatitis, alcoholic pancreatitis), neoplasms (adenocarcinoma of the pancreas, cystadenocarcinoma, insulinoma, gastrinoma, and glucagonoma, cystic neoplasms, islet-cell tumors, pancreoblastoma), and other pancreatic diseases (e.g., cystic fibrosis, cyst (pancreatic pseudocyst, pancreatic fistula, insufficiency)).

[0774] Gallbladder diseases include gallstones (cholelithiasis and choledocholithiasis), postcholecystectomy syndrome, diverticulosis of the gallbladder, acute cholecystitis, chronic cholecystitis, bile duct tumors, and mucocele.

[0775] Diseases and/or disorders of the large intestine include antibiotic-associated colitis, diverticulitis, ulcerative colitis, acquired megacolon, abscesses, fungal and bacterial infections, anorectal disorders (e.g., fissures, hemorrhoids), colonic diseases (colitis, colonic neoplasms [colon cancer, adenomatous colon polyps (e.g., villous adenoma), colon carcinoma, colorectal cancer], colonic diverticulitis, colonic diverticulosis, megacolon [Hirschsprung disease, toxic megacolon]; sigmoid diseases [proctocolitis, sigmoin neoplasms]), constipation, Crohn's disease, diarrhea (infantile diarrhea, dysentery), duodenal diseases (duodenal neoplasms, duodenal obstruction, duodenal ulcer, duodenitis), enteritis (enterocolitis), HIV enteropathy, ileal diseases (ileal neoplasms, ileitis), immunoproliferative small intestinal disease, inflammatory bowel disease (ulcerative colitis, Crohn's disease), intestinal atresia, parasitic diseases (anisakiasis, balantidiasis, blastocystis infections, cryptosporidiosis, dientamoebiasis, amebic dysentery, giardiasis), intestinal fistula (rectal fistula), intestinal neoplasms (cecal neoplasms, colonic neoplasms, duodenal neoplasms, ileal neoplasms, intestinal polyps, jejunal neoplasms, rectal neoplasms), intestinal obstruction (afferent loop syndrome, duodenal obstruction, impacted feces, intestinal pseudo-obstruction [cecal volvulus], intussusception), intestinal perforation, intestinal polyps (colonic polyps, gardner syndrome, peutz-jeghers syndrome), jejunal diseases jejunal neoplasms), malabsorption syndromes (blind loop syndrome, celiac disease, lactose intolerance, short bowl syndrome, tropical sprue, whipple's disease), mesenteric vascular occlusion, pneumatosis cystoides intestinalis, protein-losing enteropathies (intestinal lymphagiectasis), rectal diseases (anus diseases, fecal incontinence, hemorrhoids, proctitis, rectal fistula, rectal prolapse, rectocele), peptic ulcer (duodenal ulcer, peptic esophagitis, hemorrhage, perforation, stomach ulcer, Zollinger-Ellison syndrome), postgastrectomy syndromes (dumping syndrome), stomach diseases (e.g., achlorhydria, duodenogastric reflux (bile reflux), gastric antral vascular ectasia, gastric fistula, gastric outlet obstruction, gastritis (atrophic or hypertrophic), gastroparesis, stomach dilatation, stomach diverticulum, stomach neoplasms (gastric cancer, gastric polyps, gastric adenocarcinoma, hyperplastic gastric polyp), stomach rupture, stomach ulcer, stomach volvulus), tuberculosis, visceroptosis, vomiting (e.g., hematemesis, hyperemesis gravidarum, postoperative nausea and vomiting) and hemorrhagic colitis.

[0776] Further diseases and/or disorders of the gastrointestinal system include biliary tract diseases, such as, gastroschisis, fistula (e.g., biliary fistula, esophageal fistula, gastric fistula, intestinal fistula, pancreatic fistula), neoplasms (e.g., biliary tract neoplasms, esophageal neoplasms, such as adenocarcinoma of the esophagus, esophageal squamous cell carcinoma, gastrointestinal neoplasms, pancreatic neoplasms, such as adenocarcinoma of the pancreas, mucinous cystic neoplasm of the pancreas, pancreatic cystic neoplasms, pancreatoblastoma, and peritoneal neoplasms), esophageal disease (e.g., bullous diseases, candidiasis, glycogenic acanthosis, ulceration, barrett esophagus varices, atresia, cyst, diverticulum (e.g., Zenker's diverticulum), fistula (e.g., tracheoesophageal fistula), motility disorders (e.g., CREST syndrome, deglutition disorders, achalasia, spasm, gastroesophageal reflux), neoplasms, perforation (e.g., Boerhaave syndrome, Mallory-Weiss syndrome), stenosis, esophagitis, diaphragmatic hernia (e.g., hiatal hernia); gastrointestinal diseases, such as, gastroenteritis (e.g., cholera morbus, norwalk virus infection), hemorrhage (e.g., hematemesis, melena, peptic ulcer hemorrhage), stomach neoplasms (gastric cancer, gastric polyps, gastric adenocarcinoma, stomach cancer)), hernia (e.g., congenital diaphragmatic hernia, femoral hernia, inguinal hernia, obturator hernia, umbilical hernia, ventral hernia), and intestinal diseases (e.g., cecal diseases (appendicitis, cecal neoplasms)).

[0777] Developmental and Inherited Disorders

[0778] Polynuceotides or polypeptides, or agonists or antagonists of the present invention may be used to treat, prevent, diagnose, and/or prognose diseases associated with mixed fetal tissues, including, but not limited to, developmental and inherited disorders or defects of the nervous system, musculoskelelal system, execretory system, cardiovascular system, hematopoietic system, gastrointestinal system, reproductive system, and respiratory system. Compositions of the present invention may also be used to treat, prevent, diagnose, and/or prognose developmental and inherited disorders or defects associated with, but not limited to, skin, hair, visual, and auditory tissues, metabolism. Additionally, the compositions of the invention may be useful in the diagnosis, treatment, and/or prevention of disorders or diseases associated with, but not limited to, chromosomal or genetic abnormalities and hyperproliferation or neoplasia.

[0779] Disorders or defects of the nervous system associated with developmental or inherited abnormalities that may be diagnosed, treated, and/or prevented with the compostions of the invention include, but are not limited to, adrenoleukodystrophy, agenesis of corpus callosum, Alexander disease, anencephaly, Angelman syndrome, Arnold-Chiari deformity, Batten disease, Canavan disease, cephalic disorders, Charcot-Marie-Tooth disease, encephalocele, Friedreich's ataxia, Gaucher's disease, Gorlin syndrome, Hallervorden-Spatz disease, hereditary spastic paraplegia, Huntington disease, hydranencephaly, hydrocephalus, Joubert syndrome, Lesch-Nyhan syndrome, leukodystrophy, Menkes disease, microcephaly, Niemann-Pick Type C1, neurofibromatosis, porencephaly, progeria, proteus syndrome, Refsum disease, spina bifida, Sturge-Weber syndrome, Tay-Sachs disease, tuberous sclerosis, and von Hippel-Lindau disease.

[0780] Developmental and inherited disorders resulting in disorders or defects of the musculoskeletal system that may be diagnosed, treated, and/or prevented with the compositions of the invention include, but are not limited to, achondroplasia, atlanto-occipital fusion, arthrogryposis mulitplex congenita, autosomal recessive muscular dystrophy, Becker's muscular dystrophy, cerebral palsy, choanal atresia, cleft lip, cleft palate, clubfoot, congenital amputation, congenital dislocation of the hip, congenital torticollis, congenital scoliosis, dopa-repsonsive dystonia, Duchenne muscular dystrophy, early-onset generalized dystonia, femoral torsion, Gorlin syndrome, hypophosphatasia, Klippel-Feil syndrome, knee dislocation, myoclonic dystonia, myotonic dystrophy, nail-patella syndrome, osteogenesis imperfecta, paroxysmal dystonia, progeria, prune-belly syndrome, rapid-onset dystonia parkinsonism, scolosis, syndactyly, Treacher Collins' syndrome, velocardiofacial syndrome, and X-linked dystonia-parkinsonism.

[0781] Developmental or hereditary disorders or defects of the excretory system that may be diagnosed, treated, and/or prevented with the compositions of the invention include, but are not limited to, Alport's syndrome, Bartter's syndrome, bladder diverticula, bladder exstrophy, cystinuria, epispadias, Fanconi's syndrome, Hartnup disease, horseshoe kidney, hypospadias, kidney agenesis, kidney ectopia, kidney malrotation, Liddle's syndrome, medullary cystic disease, medullary sponge, multicystic kidney, kidney polycystic kidney disease, nail-patella syndrome, Potter's syndrome, urinary tract flow obstruction, vitamin D-resistant rickets, and Wilm's tumor.

[0782] Cardiovascular disorders or defects of developmental or hereditary origin that may be diagnosed, treated, and/or prevented with the compositions of the inventtion include, but are not limited to, aortic valve stenosis, atrial septal defects, artioventricular (A-V) canal defect, bicuspid aortic valve, coarctation or the aorta, dextrocardia, Ebstein's anomaly, Eisenmenger's complex, hypoplastic left heart syndrome, Marfan syndrome, patent ductus arteriosus, progeria, pulmonary atresia, pulmonary valve stenosis, subaortic stenosis, tetralogy of fallot, total anomalous pulmonary venous (P-V) connection, transposition of the great arteries, tricuspid atresia, truncus arteriosus, ventricular septal defects. Developmental or inherited disorders resulting in disorders involving the hematopoietic system that may be diagnosed, treated, and/or prevented with the compositions of the invention include, but not limited to, Bemard-Soulier syndrome, Chédiak-Higashi syndrome, hemophilia, Hermansky-Pudlak syndrome, sickle cell anemia, storage pool disease, thromboxane A2 dysfunction, thrombasthenia, and von Willebrand's disease.

[0783] The compositions of the invention may also be used to diagnose, treat, and/or prevent developmental and inherited disorders resulting in disorders or defects of the gastrointestinal system, including, but not limited to, anal atresia, biliary atresia, esophageal atresia, diaphragmatic hernia, Hirschsprung's disease, Meckel's diverticulum, oligohydramnios, omphalocele, polyhydramnios, porphyria, situs inversus viscera. Developmental or inherited disorders resulting in metabolic disorders that may be diagnosed, treated, and/or prevented with the compositions of the invention include, but are not limited to, alpha-i antitrypsin deficiency, cystic fibrosis, hemochromatosis, lysosomal storage disease, phenylketonuria, Wilson's disease, and Zellweger syndrome.

[0784] Disorders of the reproductive system that are developmentally or hereditary related that may also be diagnosed, treated, and/or prevented with the compositions of the invention include, but are not limited to, androgen insensitivity syndrome, ambiguous genitalia, autosomal sex reversal, congenital adreneal hyperplasia, gonadoblastoma, ovarian germ cell cancer, pseudohermphroditism, true hermaphroditism, undeseended testis, XX male syndrome, and XY female type gonadal dysgenesis. The compositions of the invention may also be used to diagnose, treat, and/or prevent developmental or inherited respiratory defects including, but not limited to, askin tumor, azygos lobe, congenital diaphragmatic hernia, congenital lobar emphysema, cystic adenomatoid malformation, lobar emphysema, hyaline membrane disease, and pectus excavatum.

[0785] Developmental or inherited disorders may also result from chromosomal or genetic aberration that may be diagnosed, treated, and/or prevented with the compositions of the invention including, but not limited to, 4p- syndrome, cri du chat syndrome, Digeorge syndrome, Down's syndrome, Edward's syndrome, fragile X syndrome, Klinefelter's syndrome, Patau's syndrome, Prader-Willi syndrome, progeria, Turner's syndrome, triple X syndrome, and XYY syndrome. Other developmental disorders that can be diagnosed, treated, and/or prevented with the compositions of the invention, include, but are not limited to, fetal alcohol syndrome, and can be caused by environmental factors surrounding the developing fetus.

[0786] The compositions of the invention may further be able to be used to diagnose, treat, and/or prevent errors in development or a genetic disposition that may result in hyperproliferative disorders or neoplasms, including, but not limited to, acute childhood lymphoblastic leukemia, askin tumor, Beckwith-Wiedemann syndrome, childhood acute myeloid leukemia, childhood brain stem glioma, childhood cerebellar astrocytoma, childhood extracranial germ cell tumors childhood (primary), gonadoblastoma, hepatocellular cancer, childhood Hodgkin's disease, childhood Hodgkin's lymphoma, childhood hypothalamic and visual pathway glioma, childhood (primary) liver cancer, childhood lymphoblastic leukemia, childhood medulloblastoma, childhood non-Hodgkin's lymphoma, childhood pineal and supratentorial primitive neuroectodermal tumors, childhood primary liver cancer, childhood rhabdomyosarcoma, childhood soft tissue sarcoma, Gorlin syndrome, familial multiple endrocrine neoplasia type I, neuroblastoma, ovarian germ cell cancer, pheochromocytoma, retinoblastoma, and Wilm's tumor.

[0787] Polypeptides may be administered using any method known in the art, including, but not limited to, direct needle injection at the delivery site, intravenous injection, topical administration, catheter infusion, biolistic injectors, particle accelerators, gelfoam sponge depots, other commercially available depot materials, osmotic pumps, oral or suppositorial solid pharmaceutical formulations, decanting or topical applications during surgery, aerosol delivery. Such methods are known in the art. Polypeptides may be administered as part of a Therapeutic, described in more detail below. Methods of delivering polynucleotides are described in more detail herein.

[0788] Diseases at the Cellular Level

[0789] Diseases associated with increased cell survival or the inhibition of apoptosis that could be treated, prevented, diagnosed and/or prognosed using polynucleotides or polypeptides, as well as antagonists or agonists of the present invention, include cancers (such as follicular lymphomas, carcinomas with p53 mutations, and hormone-dependent tumors, including, but not limited to colon cancer, cardiac tumors, pancreatic cancer, melanoma, retinoblastoma, glioblastoma, lung cancer, intestinal cancer, testicular cancer, stomach cancer, neuroblastoma, myxoma, myoma, lymphoma, endothelioma, osteoblastoma, osteoclastoma, osteosarcoma, chondrosarcoma, adenoma, breast cancer, prostate cancer, Kaposi's sarcoma and ovarian cancer); autoimmune disorders (such as, multiple sclerosis, Sjogren's syndrome, Hashimoto's thyroiditis, biliary cirrhosis, Behcet's disease, Crohn's disease, polymyositis, systemic lupus erythematosus and immune-related glomerulonephritis and rheumatoid arthritis) and viral infections (such as herpes viruses, pox viruses and adenoviruses), inflammation, graft v. host disease, acute graft rejection, and chronic graft rejection.

[0790] In preferred embodiments, polynucleotides, polypeptides, and/or antagonists of the invention are used to inhibit growth, progression, and/or metastasis of cancers, in particular those [listed above] involving reproductive system tissues.

[0791] Additional diseases or conditions associated with increased cell survival that could be treated or detected by polynucleotides or polypeptides, or agonists or antagonists of the present invention include, but are not limited to, progression, and/or metastases of malignancies and related disorders such as leukemia (including acute leukemias (e.g., acute lymphocytic leukemia, acute myelocytic leukemia (including myeloblastic, promyelocytic, myelomonocytic, monocytic, and erythroleukemia)) and chronic leukemias (e.g., chronic myelocytic (granulocytic) leukemia and chronic lymphocytic leukemia)), polycythemia vera, lymphomas (e.g., Hodgkin's disease and non-Hodgkin's disease), multiple myeloma, Waldenstrom's macroglobulinemia, heavy chain disease, and solid tumors including, but not limited to, sarcomas and carcinomas such as fibrosarcoma, myxosarcoma, liposarcoma, chondrosarcoma, osteogenic sarcoma, chordoma, angiosarcoma, endotheliosarcoma, lymphangiosarcoma, lymphangioendotheliosarcoma, synovioma, mesothelioma, Ewing's tumor, leiomyosarcoma, rhabdomyosarcoma, colon carcinoma, pancreatic cancer, breast cancer, ovarian cancer, prostate cancer, squamous cell carcinoma, basal cell carcinoma, adenocarcinoma, sweat gland carcinoma, sebaceous gland carcinoma, papillary carcinoma, papillary adenocarcinomas, cystadenocarcinoma, medullary carcinoma, bronchogenic carcinoma, renal cell carcinoma, hepatoma, bile duct carcinoma, choriocarcinoma, seminoma, embryonal carcinoma, Wilm's tumor, cervical cancer, testicular tumor, lung carcinoma, small cell lung carcinoma, bladder carcinoma, epithelial carcinoma, glioma, astrocytoma, medulloblastoma, craniopharyngioma, ependymoma, pinealoma, hemangioblastoma, acoustic neuroma, oligodendroglioma, menangioma, melanoma, neuroblastoma, and retinoblastoma.

[0792] Diseases associated with increased apoptosis that could be treated, prevented, diagnosted, and/or prognosed using polynucleotides or polypeptides, as well as agonists or antagonists of the present invention, include, but are not limited to, AIDS; neurodegenerative disorders (such as Alzheimer's disease, Parkinson's disease, Amyotrophic lateral sclerosis, Retinitis pigmentosa, Cerebellar degeneration and brain tumor or prior associated disease); autoimmune disorders (such as, multiple sclerosis, Sjogren's syndrome, Hashimoto's thyroiditis, biliary cirrhosis, Behcet's disease, Crohn's disease, polymyositis, systemic lupus erythematosus and immune-related glomerulonephritis and rheumatoid arthritis) myelodysplastic syndromes (such as aplastic anemia), graft v. host disease, ischemic injury (such as that caused by myocardial infarction, stroke and reperfusion injury), liver injury (e.g., hepatitis related liver injury, ischemia/reperfusion injury, cholestosis (bile duct injury) and liver cancer); toxin-induced liver disease (such as that caused by alcohol), septic shock, cachexia and anorexia.

[0793] Wound Healing and Epithelial Cell Proliferation

[0794] In accordance with yet a further aspect of the present invention, there is provided a process for utilizing polynucleotides or polypeptides, as well as agonists or antagonists of the present invention, for therapeutic purposes, for example, to stimulate epithelial cell proliferation and basal keratinocytes for the purpose of wound healing, and to stimulate hair follicle production and healing of dermal wounds. Polynucleotides or polypeptides, as well as agonists or antagonists of the present invention, may be clinically useful in stimulating wound healing including surgical wounds, excisional wounds, deep wounds involving damage of the dermis and epidermis, eye tissue wounds, dental tissue wounds, oral cavity wounds, diabetic ulcers, dermal ulcers, cubitus ulcers, arterial ulcers, venous stasis ulcers, burns resulting from heat exposure or chemicals, and other abnormal wound healing conditions such as uremia, malnutrition, vitamin deficiencies and complications associated with systemic treatment with steroids, radiation therapy and antineoplastic drugs and antimetabolites. Polynucleotides or polypeptides, as well as agonists or antagonists of the present invention, could be used to promote dermal reestablishment subsequent to dermal loss.

[0795] Polynucleotides or polypeptides, as well as agonists or antagonists of the present invention, could be used to increase the adherence of skin grafts to a wound bed and to stimulate re-epithelialization from the wound bed. The following are types of grafts that polynucleotides or polypeptides, agonists or antagonists of the present invention, could be used to increase adherence to a wound bed: autografts, artificial skin, allografts, autodermic graft, autoepdermic grafts, avacular grafts, Blair-Brown grafts, bone graft, brephoplastic grafts, cutis graft, delayed graft, dermic graft, epidermic graft, fascia graft, full thickness graft, heterologous graft, xenograft, homologous graft, hyperplastic graft, lamellar graft, mesh graft, mucosal graft, Ollier-Thiersch graft, omenpal graft, patch graft, pedicle graft, penetrating graft, split skin graft, thick split graft. Polynucleotides or polypeptides, as well as agonists or antagonists of the present invention, can be used to promote skin strength and to improve the appearance of aged skin.

[0796] It is believed that polynucleotides or polypeptides, as well as agonists or antagonists of the present invention, will also produce changes in hepatocyte proliferation, and epithelial cell proliferation in the lung, breast, pancreas, stomach, small intestine, and large intestine. Polynucleotides or polypeptides, as well as agonists or antagonists of the present invention, could promote proliferation of epithelial cells such as sebocytes, hair follicles, hepatocytes, type II pneumocytes, mucin-producing goblet cells, and other epithelial cells and their progenitors contained within the skin, lung, liver, and gastrointestinal tract. Polynucleotides or polypeptides, agonists or antagonists of the present invention, may promote proliferation of endothelial cells, keratinocytes, and basal keratinocytes.

[0797] Polynucleotides or polypeptides, as well as agonists or antagonists of the present invention, could also be used to reduce the side effects of gut toxicity that result from radiation, chemotherapy treatments or viral infections. Polynucleotides or polypeptides, as well as agonists or antagonists of the present invention, may have a cytoprotective effect on the small intestine mucosa. Polynucleotides or polypeptides, as well as agonists or antagonists of the present invention, may also stimulate healing of mucositis (mouth ulcers) that result from chemotherapy and viral infections.

[0798] Polynucleotides or polypeptides, as well as agonists or antagonists of the present invention, could further be used in full regeneration of skin in full and partial thickness skin defects, including bums, (i.e., repopulation of hair follicles, sweat glands, and sebaceous glands), treatment of other skin defects such as psoriasis. Polynucleotides or polypeptides, as well as agonists or antagonists of the present invention, could be used to treat epidermolysis bullosa, a defect in adherence of the epidermis to the underlying dermis which results in frequent, open and painful blisters by accelerating reepithelialization of these lesions. Polynucleotides or polypeptides, as well as agonists or antagonists of the present invention, could also be used to treat gastric and doudenal ulcers and help heal by scar formation of the mucosal lining and regeneration of glandular mucosa and duodenal mucosal lining more rapidly. Inflammatory bowel diseases, such as Crohn's disease and ulcerative colitis, are diseases, which result in destruction of the mucosal surface of the small or large intestine, respectively. Thus, polynucleotides or polypeptides, as well as agonists or antagonists of the present invention, could be used to promote the resurfacing of the mucosal surface to aid more rapid healing and to prevent progression of inflammatory bowel disease. Treatment with polynucleotides or polypeptides, agonists or antagonists of the present invention, is expected to have a significant effect on the production of mucus throughout the gastrointestinal tract and could be used to protect the intestinal mucosa from injurious substances that are ingested or following surgery. Polynucleotides or polypeptides, as well as agonists or antagonists of the present invention, could be used to treat diseases associate with the under expression.

[0799] Moreover, polynucleotides or polypeptides, as well as agonists or antagonists of the present invention, could be used to prevent and heal damage to the lungs due to various pathological states. Polynucleotides or polypeptides, as well as agonists or antagonists of the present invention, could stimulate proliferation and differentiation and promote the repair of alveoli and brochiolar epithelium to prevent or treat acute or chronic lung damage. For example, emphysema, which results in the progressive loss of aveoli, and inhalation injuries, i.e., resulting from smoke inhalation and bums, that cause necrosis of the bronchiolar epithelium and alveoli could be effectively treated using polynucleotides or polypeptides, agonists or antagonists of the present invention. Also, polynucleotides or polypeptides, as well as agonists or antagonists of the present invention, could be used to stimulate the proliferation of and differentiation of type II pneumocytes, which may help treat or prevent disease such as hyaline membrane diseases, such as infant respiratory distress syndrome and bronchopulmonary displasia, in premature infants.

[0800] Polynucleotides or polypeptides, as well as agonists or antagonists of the present invention, could stimulate the proliferation and differentiation of hepatocytes and, thus, could be used to alleviate or treat liver diseases and pathologies such as fulminant liver failure caused by cirrhosis, liver damage caused by viral hepatitis and toxic substances (i.e., acetaminophen, carbon tetraholoride and other hepatotoxins known in the art).

[0801] In addition, polynucleotides or polypeptides, as well as agonists or antagonists of the present invention, could be used treat or prevent the onset of diabetes mellitus. In patients with newly diagnosed Types I and II diabetes, where some islet cell function remains, polynucleotides or polypeptides, as well as agonists or antagonists of the present invention, could be used to maintain the islet function so as to alleviate, delay or prevent permanent manifestation of the disease. Also, polynucleotides or polypeptides, as well as agonists or antagonists of the present invention, could be used as an auxiliary in islet cell transplantation to improve or promote islet cell function.

[0802] Infectious Diseases

[0803] Polynucleotides or polypeptides, as well as agonists or antagonists of the present invention can be used to treat or detect infectious agents. For example, by increasing the immune response, particularly increasing the proliferation and differentiation of B and/or T cells, infectious diseases may be treated. The immune response may be increased by either enhancing an existing immune response, or by initiating a new immune response. Alternatively, polynucleotides or polypeptides, as well as agonists or antagonists of the present invention may also directly inhibit the infectious agent, without necessarily eliciting an immune response.

[0804] Viruses are one example of an infectious agent that can cause disease or symptoms that can be treated or detected by a polynucleotide or polypeptide and/or agonist or antagonist of the present invention. Examples of viruses, include, but are not limited to Examples of viruses, include, but are not limited to the following DNA and RNA viruses and viral families: Arbovirus, Adenoviridae, Arenaviridae, Arterivirus, Bimaviridae, Bunyaviridae, Caliciviridae, Circoviridae, Coronaviridae, Dengue, EBV, HIV, Flaviviridae, Hepadnaviridae (Hepatitis), Herpesviridae (such as, Cytomegalovirus, Herpes Simplex, Herpes Zoster), Mononegavirus (e.g., Paramyxoviridae, Morbillivirus, Rhabdoviridae), Orthomyxoviridae (e.g., Influenza A, Influenza B, and parainfluenza), Papiloma virus, Papovaviridae, Parvoviridae, Picornaviridae, Poxviridae (such as Smallpox or Vaccinia), Reoviridae (e.g., Rotavirus), Retroviridae (HTLV-I, HTLV-II, Lentivirus), and Togaviridae (e.g., Rubivirus). Viruses falling within these families can cause a variety of diseases or symptoms, including, but not limited to: arthritis, bronchiollitis, respiratory syncytial virus, encephalitis, eye infections (e.g., conjunctivitis, keratitis), chronic fatigue syndrome, hepatitis (A, B, C, E, Chronic Active, Delta), Japanese B encephalitis, Junin, Chikungunya, Rift Valley fever, yellow fever, meningitis, opportunistic infections (e.g., AIDS), pneumonia, Burkitt's Lymphoma, chickenpox, hemorrhagic fever, Measles, Mumps, Parainfluenza, Rabies, the common cold, Polio, leukemia, Rubella, sexually transmitted diseases, skin diseases (e.g., Kaposi's, warts), and viremia. polynucleotides or polypeptides, or agonists or antagonists of the invention, can be used to treat or detect any of these symptoms or diseases. In specific embodiments, polynucleotides, polypeptides, or agonists or antagonists of the invention are used to treat: meningitis, Dengue, EBV, and/or hepatitis (e.g., hepatitis B). In an additional specific embodiment polynucleotides, polypeptides, or agonists or antagonists of the invention are used to treat patients nonresponsive to one or more other commercially available hepatitis vaccines. In a further specific embodiment polynucleotides, polypeptides, or agonists or antagonists of the invention are used to treat AIDS.

[0805] Similarly, bacterial and fungal agents that can cause disease or symptoms and that can be treated or detected by a polynucleotide or polypeptide and/or agonist or antagonist of the present invention include, but not limited to, the following Gram-Negative and Gram-positive bacteria, bacterial families, and fungi: Actinomyces (e.g., Norcardia), Acinetobacter, Cryptococcus neoformans, Aspergillus, Bacillaceae (e.g., Bacillus anthrasis), Bacteroides (e.g., Bacteroides fragilis), Blastomycosis, Bordetella, Borrelia (e.g., Borrelia burgdorferi), Brucella, Candidia, Campylobacter, Chlamydia, Clostridium (e.g., Clostridium botulinum, Clostridium dificile, Clostridium perfringens, Clostridium tetani), Coccidioides, Corynebacterium (e.g., Corynebacterium diptheriae), Cryptococcus, Dermatocycoses, E. coli (e.g., Enterotoxigenic E. coli and Enterohemorrhagic E. coli), Enterobacter (e.g. Enterobacter aerogenes), Enterobacteriaceae (Klebsiella, Salmonella (e.g., Salmonella typhi, Salmonella enteritidis, Salmonella typhi), Serratia, Yersinia, Shigella), Erysipelothrix, Haemophilus (e.g., Haemophilus influenza type B), Helicobacter, Legionella (e.g., Legionella pneumophila), Leptospira, Listeria (e.g., Listeria monocytogenes), Mycoplasma, Mycobacterium (e.g., Mycobacterium leprae and Mycobacterium tuberculosis), Vibrio (e.g., Vibrio cholerae), Neisseriaceae (e.g., Neisseria gonorrhea, Neisseria meningitidis), Pasteurellacea, Proteus, Pseudomonas (e.g., Pseudomonas aeruginosa), Rickettsiaceae, Spirochetes (e.g., Treponema spp., Leptospira spp., Borrelia spp.), Shigella spp., Staphylococcus (e.g., Staphylococcus aureus), Meningiococcus, Pneumococcus and Streptococcus (e.g., Streptococcus pneumoniae and Groups A, B, and C Streptococci), and Ureaplasmas. These bacterial, parasitic, and fungal families can cause diseases or symptoms, including, but not limited to: antibiotic-resistant infections, bacteremia, endocarditis, septicemia, eye infections (e.g., conjunctivitis), uveitis, tuberculosis, gingivitis, bacterial diarrhea, opportunistic infections (e.g., AIDS related infections), paronychia, prosthesis-related infections, dental caries, Reiter's Disease, respiratory tract infections, such as Whooping Cough or Empyema, sepsis, Lyme Disease, Cat-Scratch Disease, dysentery, paratyphoid fever, food poisoning, Legionella disease, chronic and acute inflammation, erythema, yeast infections, typhoid, pneumonia, gonorrhea, meningitis (e.g., mengitis types A and B), chlamydia, syphillis, diphtheria, leprosy, brucellosis, peptic ulcers, anthrax, spontaneous abortions, birth defects, pneumonia, lung infections, ear infections, deafness, blindness, lethargy, malaise, vomiting, chronic diarrhea, Crohn's disease, colitis, vaginosis, sterility, pelvic inflammatory diseases, candidiasis, paratuberculosis, tuberculosis, lupus, botulism, gangrene, tetanus, impetigo, Rheumatic Fever, Scarlet Fever, sexually transmitted diseases, skin diseases (e.g., cellulitis, dermatocycoses), toxemia, urinary tract infections, wound infections, noscomial infections. Polynucleotides or polypeptides, agonists or antagonists of the invention, can be used to treat or detect any of these symptoms or diseases. In specific embodiments, polynucleotides, polypeptides, agonists or antagonists of the invention are used to treat: tetanus, diptheria, botulism, and/or meningitis type B.

[0806] Moreover, parasitic agents causing disease or symptoms that can be treated, prevented, and/or diagnosed by a polynucleotide or polypeptide and/or agonist or antagonist of the present invention include, but not limited to, the following families or class: Amebiasis, Babesiosis, Coccidiosis, Cryptosporidiosis, Dientamoebiasis, Dourine, Ectoparasitic, Giardias, Helminthiasis, Leishmaniasis, Schistisoma, Theileriasis, Toxoplasmosis, Trypanosomiasis, and Trichomonas and Sporozoans (e.g., Plasmodium virax, Plasmodium falciparium, Plasmodium malariae and Plasmodium ovale). These parasites can cause a variety of diseases or symptoms, including, but not limited to: Scabies, Trombiculiasis, eye infections, intestinal disease (e.g., dysentery, giardiasis), liver disease, lung disease, opportunistic infections (e.g., AIDS related), malaria, pregnancy complications, and toxoplasmosis. polynucleotides or polypeptides, or agonists or antagonists of the invention, can be used to treat, prevent, and/or diagnose any of these symptoms or diseases. In specific embodiments, polynucleotides, polypeptides, or agonists or antagonists of the invention are used to treat, prevent, and/or diagnose malaria.

[0807] Polynucleotides or polypeptides, as well as agonists or antagonists of the present invention of the present invention could either be by administering an effective amount of a polypeptide to the patient, or by removing cells from the patient, supplying the cells with a polynucleotide of the present invention, and returning the engineered cells to the patient (ex vivo therapy). Moreover, the polypeptide or polynucleotide of the present invention can be used as an antigen in a vaccine to raise an immune response against infectious disease.

[0808] Regeneration

[0809] Polynucleotides or polypeptides, as well as agonists or antagonists of the present invention can be used to differentiate, proliferate, and attract cells, leading to the regeneration of tissues. (See, Science 276:59-87 (1997).) The regeneration of tissues could be used to repair, replace, or protect tissue damaged by congenital defects, trauma (wounds, burns, incisions, or ulcers), age, disease (e.g. osteoporosis, osteocarthritis, periodontal disease, liver failure), surgery, including cosmetic plastic surgery, fibrosis, reperfusion injury, or systemic cytokine damage.

[0810] Tissues that could be regenerated using the present invention include organs (e.g., pancreas, liver, intestine, kidney, skin, endothelium), muscle (smooth, skeletal or cardiac), vasculature (including vascular and lymphatics), nervous, hematopoietic, and skeletal (bone, cartilage, tendon, and ligament) tissue. Preferably, regeneration occurs without or decreased scarring. Regeneration also may include angiogenesis.

[0811] Moreover, polynucleotides or polypeptides, as well as agonists or antagonists of the present invention, may increase regeneration of tissues difficult to heal. For example, increased tendon/ligament regeneration would quicken recovery time after damage. Polynucleotides or polypeptides, as well as agonists or antagonists of the present invention could also be used prophylactically in an effort to avoid damage. Specific diseases that could be treated include of tendinitis, carpal tunnel syndrome, and other tendon or ligament defects. A further example of tissue regeneration of non-healing wounds includes pressure ulcers, ulcers associated with vascular insufficiency, surgical, and traumatic wounds.

[0812] Similarly, nerve and brain tissue could also be regenerated by using polynucleotides or polypeptides, as well as agonists or antagonists of the present invention, to proliferate and differentiate nerve cells. Diseases that could be treated using this method include central and peripheral nervous system diseases, neuropathies, or mechanical and traumatic disorders (e.g., spinal cord disorders, head trauma, cerebrovascular disease, and stoke). Specifically, diseases associated with peripheral nerve injuries, peripheral neuropathy (e.g., resulting from chemotherapy or other medical therapies), localized neuropathies, and central nervous system diseases (e.g., Alzheimer's disease, Parkinson's disease, Huntington's disease, amyotrophic lateral sclerosis, and Shy-Drager syndrome), could all be treated using the polynucleotides or polypeptides, as well as agonists or antagonists of the present invention.

[0813] Chemotaxis

[0814] Polynucleotides or polypeptides, as well as agonists or antagonists of the present invention may have chemotaxis activity. A chemotaxic molecule attracts or mobilizes cells (e.g., monocytes, fibroblasts, neutrophils, T-cells, mast cells, eosinophils, epithelial and/or endothelial cells) to a particular site in the body, such as inflammation, infection, or site of hyperproliferation. The mobilized cells can then fight off and/or heal the particular trauma or abnormality.

[0815] Polynucleotides or polypeptides, as well as agonists or antagonists of the present invention may increase chemotaxic activity of particular cells. These chemotactic molecules can then be used to treat inflammation, infection, hyperproliferative disorders, or any immune system disorder by increasing the number of cells targeted to a particular location in the body. For example, chemotaxic molecules can be used to treat wounds and other trauma to tissues by attracting immune cells to the injured location. Chemotactic molecules of the present invention can also attract fibroblasts, which can be used to treat wounds.

[0816] It is also contemplated that polynucleotides or polypeptides, as well as agonists or antagonists of the present invention may inhibit chemotactic activity. These molecules could also be used to treat disorders. Thus, polynucleotides or polypeptides, as well as agonists or antagonists of the present invention could be used as an inhibitor of chemotaxis.

[0817] Binding Activity

[0818] A polypeptide of the present invention may be used to screen for molecules that bind to the polypeptide or for molecules to which the polypeptide binds. The binding of the polypeptide and the molecule may activate (agonist), increase, inhibit (antagonist), or decrease activity of the polypeptide or the molecule bound. Examples of such molecules include antibodies, oligonucleotides, proteins (e.g., receptors),or small molecules.

[0819] Preferably, the molecule is closely related to the natural ligand of the polypeptide, e.g., a fragment of the ligand, or a natural substrate, a ligand, a structural or functional mimetic. (See, Coligan et al., Current Protocols in Immunology 1(2):Chapter 5 (1991).) Similarly, the molecule can be closely related to the natural receptor to which the polypeptide binds, or at least, a fragment of the receptor capable of being bound by the polypeptide (e.g., active site). In either case, the molecule can be rationally designed using known techniques.

[0820] Preferably, the screening for these molecules involves producing appropriate cells which express the polypeptide. Preferred cells include cells from mammals, yeast, Drosophila, or E. coli. Cells expressing the polypeptide (or cell membrane containing the expressed polypeptide) are then preferably contacted with a test compound potentially containing the molecule to observe binding, stimulation, or inhibition of activity of either the polypeptide or the molecule.

[0821] The assay may simply test binding of a candidate compound to the polypeptide, wherein binding is detected by a label, or in an assay involving competition with a labeled competitor. Further, the assay may test whether the candidate compound results in a signal generated by binding to the polypeptide.

[0822] Alternatively, the assay can be carried out using cell-free preparations, polypeptide/molecule affixed to a solid support, chemical libraries, or natural product mixtures. The assay may also simply comprise the steps of mixing a candidate compound with a solution containing a polypeptide, measuring polypeptide/molecule activity or binding, and comparing the polypeptide/molecule activity or binding to a standard.

[0823] Preferably, an ELISA assay can measure polypeptide level or activity in a sample (e.g., biological sample) using a monoclonal or polyclonal antibody. The antibody can measure polypeptide level or activity by either binding, directly or indirectly, to the polypeptide or by competing with the polypeptide for a substrate.

[0824] Additionally, the receptor to which the polypeptide of the present invention binds can be identified by numerous methods known to those of skill in the art, for example, ligand panning and FACS sorting (Coligan, et al., Current Protocols in Immun., 1(2), Chapter 5, (1991)). For example, expression cloning is employed wherein polyadenylated RNA is prepared from a cell responsive to the polypeptides, for example, NIH3T3 cells which are known to contain multiple receptors for the FGF family proteins, and SC-3 cells, and a cDNA library created from this RNA is divided into pools and used to transfect COS cells or other cells that are not responsive to the polypeptides. Transfected cells which are grown on glass slides are exposed to the polypeptide of the present invention, after they have been labeled. The polypeptides can be labeled by a variety of means including iodination or inclusion of a recognition site for a site-specific protein kinase.

[0825] Following fixation and incubation, the slides are subjected to auto-radiographic analysis. Positive pools are identified and sub-pools are prepared and re-transfected using an iterative sub-pooling and re-screening process, eventually yielding a single clones that encodes the putative receptor.

[0826] As an alternative approach for receptor identification, the labeled polypeptides can be photoaffinity linked with cell membrane or extract preparations that express the receptor molecule. Cross-linked material is resolved by PAGE analysis and exposed to X-ray film. The labeled complex containing the receptors of the polypeptides can be excised, resolved into peptide fragments, and subjected to protein microsequencing. The amino acid sequence obtained from microsequencing would be used to design a set of degenerate oligonucleotide probes to screen a cDNA library to identify the genes encoding the putative receptors.

[0827] Moreover, the techniques of gene-shuffling, motif-shuffling, exon-shuffling, and/or codon-shuffling (collectively referred to as “DNA shuffling”) may be employed to modulate the activities of the polypeptide of the present invention thereby effectively generating agonists and antagonists of the polypeptide of the present invention. See generally, U.S. Pat. Nos. 5,605,793, 5,811,238, 5,830,721, 5,834,252, and 5,837,458, and Patten, P. A., et al., Curr. Opinion Biotechnol. 8:724-33 (1997); Harayama, S. Trends Biotechnol. 16(2):76-82 (1998); Hansson L. O., et al., J. Mol. Biol. 287:265-76 (1999); and Lorenzo, M. M. and Blasco, R. Biotechniques 24(2):308-13 (1998); each of these patents and publications are hereby incorporated by reference). In one embodiment, alteration of polynucleotides and corresponding polypeptides may be achieved by DNA shuffling. DNA shuffling involves the assembly of two or more DNA segments into a desired molecule by homologous, or site-specific, recombination. In another embodiment, polynucleotides and corresponding polypeptides may be altered by being subjected to random mutagenesis by error-prone PCR, random nucleotide insertion or other methods prior to recombination. In another embodiment, one or more components, motifs, sections, parts, domains, fragments, etc., of the polypeptide of the present invention may be recombined with one or more components, motifs, sections, parts, domains, fragments, etc. of one or more heterologous molecules. In preferred embodiments, the heterologous molecules are family members. In further preferred embodiments, the heterologous molecule is a growth factor such as, for example, platelet-derived growth factor (PDGF), insulin-like growth factor (IGF-I), transforming growth factor (TGF)-alpha, epidermal growth factor (EGF), fibroblast growth factor (FGF), TGF-beta, bone morphogenetic protein (BMP)-2, BMP-4, BMP-5, BMP-6, BMP-7, activins A and B, decapentaplegic(dpp), 60A, OP-2, dorsalin, growth differentiation factors (GDFs), nodal, MIS, inhibin-alpha, TGF-betal, TGF-beta2, TGF-beta3, TGF-beta5, and glial-derived neurotrophic factor (GDNF).

[0828] Other preferred fragments are biologically active fragments of the polypeptide of the present invention. Biologically active fragments are those exhibiting activity similar, but not necessarily identical, to an activity of the polypeptide of the present invention. The biological activity of the fragments may include an improved desired activity, or a decreased undesirable activity.

[0829] Additionally, this invention provides a method of screening compounds to identify those which modulate the action of the polypeptide of the present invention. An example of such an assay comprises combining a mammalian fibroblast cell, the polypeptide of the present invention, the compound to be screened and ³[H] thymidine under cell culture conditions where the fibroblast cell would normally proliferate. A control assay may be performed in the absence of the compound to be screened and compared to the amount of fibroblast proliferation in the presence of the compound to determine if the compound stimulates proliferation by determining the uptake of 3[H] thymidine in each case. The amount of fibroblast cell proliferation is measured by liquid scintillation chromatography which measures the incorporation of ³[H] thymidine. Both agonist and antagonist compounds may be identified by this procedure.

[0830] In another method, a mammalian cell or membrane preparation expressing a receptor for a polypeptide of the present invention is incubated with a labeled polypeptide of the present invention in the presence of the compound. The ability of the compound to enhance or block this interaction could then be measured. Alternatively, the response of a known second messenger system following interaction of a compound to be screened and the receptor is measured and the ability of the compound to bind to the receptor and elicit a second messenger response is measured to determine if the compound is a potential agonist or antagonist. Such second messenger systems include but are not limited to, cAMP guanylate cyclase, ion channels or phosphoinositide hydrolysis.

[0831] All of these above assays can be used as diagnostic or prognostic markers. The molecules discovered using these assays can be used to treat disease or to bring about a particular result in a patient (e.g., blood vessel growth) by activating or inhibiting the polypeptide/molecule. Moreover, the assays can discover agents which may inhibit or enhance the production of the polypeptides of the invention from suitably manipulated cells or tissues.

[0832] Therefore, the invention includes a method of identifying compounds which bind to a polypeptide of the invention comprising the steps of: (a) incubating a candidate binding compound with a polypeptide of the present invention; and (b) determining if binding has occurred. Moreover, the invention includes a method of identifying agonists/antagonists comprising the steps of: (a) incubating a candidate compound with a polypeptide of the present invention, (b) assaying a biological activity, and (b) determining if a biological activity of the polypeptide has been altered.

[0833] Targeted Delivery

[0834] In another embodiment, the invention provides a method of delivering compositions to targeted cells expressing a receptor for a polypeptide of the invention, or cells expressing a cell bound form of a polypeptide of the invention.

[0835] As discussed herein, polypeptides or antibodies of the invention may be associated with heterologous polypeptides, heterologous nucleic acids, toxins, or prodrugs via hydrophobic, hydrophilic, ionic and/or covalent interactions. In one embodiment, the invention provides a method for the specific delivery of compositions of the invention to cells by administering polypeptides of the invention (including antibodies) that are associated with heterologous polypeptides or nucleic acids. In one example, the invention provides a method for delivering a therapeutic protein into the targeted cell. In another example, the invention provides a method for delivering a single stranded nucleic acid (e.g., antisense or ribozymes) or double stranded nucleic acid (e.g., DNA that can integrate into the cell's genome or replicate episomally and that can be transcribed) into the targeted cell.

[0836] In another embodiment, the invention provides a method for the specific destruction of cells (e.g., the destruction of tumor cells) by administering polypeptides of the invention (e.g., polypeptides of the invention or antibodies of the invention) in association with toxins or cytotoxic prodrugs.

[0837] By “toxin” is meant compounds that bind and activate endogenous cytotoxic effector systems, radioisotopes, holotoxins, modified toxins, catalytic subunits of toxins, or any molecules or enzymes not normally present in or on the surface of a cell that under defined conditions cause the cell's death. Toxins that may be used according to the methods of the invention include, but are not limited to, radioisotopes known in the art, compounds such as, for example, antibodies (or complement fixing containing portions thereof) that bind an inherent or induced endogenous cytotoxic effector system, thymidine kinase, endonuclease, RNAse, alpha toxin, ricin, abrin, Pseudomonas exotoxin A, diphtheria toxin, saporin, momordin, gelonin, pokeweed antiviral protein, alpha-sarcin and cholera toxin. By “cytotoxic prodrug” is meant a non-toxic compound that is converted by an enzyme, normally present in the cell, into a cytotoxic compound. Cytotoxic prodrugs that may be used according to the methods of the invention include, but are not limited to, glutamyl derivatives of benzoic acid mustard alkylating agent, phosphate derivatives of etoposide or mitomycin C, cytosine arabinoside, daunorubisin, and phenoxyacetamide derivatives of doxorubicin.

[0838] Drug Screening

[0839] Further contemplated is the use of the polypeptides of the present invention, or the polynucleotides encoding these polypeptides, to screen for molecules which modify the activities of the polypeptides of the present invention. Such a method would include contacting the polypeptide of the present invention with a selected compound(s) suspected of having antagonist or agonist activity, and assaying the activity of these polypeptides following binding.

[0840] This invention is particularly useful for screening therapeutic compounds by using the polypeptides of the present invention, or binding fragments thereof, in any of a variety of drug screening techniques. The polypeptide or fragment employed in such a test may be affixed to a solid support, expressed on a cell surface, free in solution, or located intracellularly. One method of drug screening utilizes eukaryotic or prokaryotic host cells which are stably transformed with recombinant nucleic acids expressing the polypeptide or fragment. Drugs are screened against such transformed cells in competitive binding assays. One may measure, for example, the formulation of complexes between the agent being tested and a polypeptide of the present invention.

[0841] Thus, the present invention provides methods of screening for drugs or any other agents which affect activities mediated by the polypeptides of the present invention. These methods comprise contacting such an agent with a polypeptide of the present invention or a fragment thereof and assaying for the presence of a complex between the agent and the polypeptide or a fragment thereof, by methods well known in the art. In such a competitive binding assay, the agents to screen are typically labeled. Following incubation, free agent is separated from that present in bound form, and the amount of free or uncomplexed label is a measure of the ability of a particular agent to bind to the polypeptides of the present invention.

[0842] Another technique for drug screening provides high throughput screening for compounds having suitable binding affinity to the polypeptides of the present invention, and is described in great detail in European Patent Application 84/03564, published on Sep. 13, 1984, which is incorporated herein by reference herein. Briefly stated, large numbers of different small peptide test compounds are synthesized on a solid substrate, such as plastic pins or some other surface. The peptide test compounds are reacted with polypeptides of the present invention and washed. Bound polypeptides are then detected by methods well known in the art. Purified polypeptides are coated directly onto plates for use in the aforementioned drug screening techniques. In addition, non-neutralizing antibodies may be used to capture the peptide and immobilize it on the solid support.

[0843] This invention also contemplates the use of competitive drug screening assays in which neutralizing antibodies capable of binding polypeptides of the present invention specifically compete with a test compound for binding to the polypeptides or fragments thereof. In this manner, the antibodies are used to detect the presence of any peptide which shares one or more antigenic epitopes with a polypeptide of the invention.

[0844] Antisense And Ribozyme (Antagonists)

[0845] In specific embodiments, antagonists according to the present invention are nucleic acids corresponding to the sequences contained in SEQ ID NO: X, or the complementary strand thereof, and/or to cDNA sequences contained in cDNA Clone ID NO: Z identified for example, in Table 1A. In one embodiment, antisense sequence is generated internally, by the organism, in another embodiment, the antisense sequence is separately administered (see, for example, O'Connor, J., Neurochem. 56:560 (1991). Oligodeoxynucleotides as Antisense Inhibitors of Gene Expression, CRC Press, Boca Raton, Fla. (1988). Antisense technology can be used to control gene expression through antisense DNA or RNA, or through triple-helix formation. Antisense techniques are discussed for example, in Okano, J., Neurochem. 56:560 (1991); Oligodeoxynucleotides as Antisense Inhibitors of Gene Expression, CRC Press, Boca Raton, Fla. (1988). Triple helix formation is discussed in, for instance, Lee et al., Nucleic Acids Research 6:3073 (1979); Cooney et al., Science 241:456 (1988); and Dervan et al., Science 251:1300 (1991). The methods are based on binding of a polynucleotide to a complementary DNA or RNA.

[0846] For example, the use of c-myc and c-myb antisense RNA constructs to inhibit the growth of the non-lymphocytic leukemia cell line HL-60 and other cell lines was previously described. (Wickstrom et al. (1988); Anfossi et al. (1989)). These experiments were performed in vitro by incubating cells with the oligoribonucleotide. A similar procedure for in vivo use is described in WO 91/15580. Briefly, a pair of oligonucleotides for a given antisense RNA is produced as follows: A sequence complimentary to the first 15 bases of the open reading frame is flanked by an EcoR1 site on the 5′ end and a HindIII site on the 3′ end. Next, the pair of oligonucleotides is heated at 90° C. for one minute and then annealed in 2× ligation buffer (20mM TRIS HCl pH 7.5, 10 mM MgCl2, 10 MM dithiothreitol (DTT) and 0.2 mM ATP) and then ligated to the EcoR1/Hind III site of the retroviral vector PMV7 (WO 91/15580).

[0847] For example, the 5′ coding portion of a polynucleotide that encodes the polypeptide of the present invention may be used to design an antisense RNA oligonucleotide of from about 10 to 40 base pairs in length. A DNA oligonucleotide is designed to be complementary to a region of the gene involved in transcription thereby preventing transcription and the production of the receptor. The antisense RNA oligonucleotide hybridizes to the mRNA in vivo and blocks translation of the MRNA molecule into receptor polypeptide.

[0848] In one embodiment, the antisense nucleic acid of the invention is produced intracellularly by transcription from an exogenous sequence. For example, a vector or a portion thereof, is transcribed, producing an antisense nucleic acid (RNA) of the invention. Such a vector would contain a sequence encoding the antisense nucleic acid. Such a vector can remain episomal or become chromosomally integrated, as long as it can be transcribed to produce the desired antisense RNA. Such vectors can be constructed by recombinant DNA technology methods standard in the art. Vectors can be plasmid, viral, or others known in the art, used for replication and expression in vertebrate cells. Expression of the sequence encoding the polypeptide of the present invention or fragments thereof, can be by any promoter known in the art to act in vertebrate, preferably human cells. Such promoters can be inducible or constitutive. Such promoters include, but are not limited to, the SV40 early promoter region (Bernoist and Chambon, Nature 29:304-310 (1981), the promoter contained in the 3′ long terminal repeat of Rous sarcoma virus (Yamamoto et al., Cell 22:787-797 (1980), the herpes thymidine promoter (Wagner et al., Proc. Natl. Acad. Sci. U.S.A. 78:1441-1445 (1981), the regulatory sequences of the metallothionein gene (Brinster, et al., Nature 296:39-42 (1982)), etc.

[0849] The antisense nucleic acids of the invention comprise a sequence complementary to at least a portion of an RNA transcript of a gene of the present invention. However, absolute complementarity, although preferred, is not required. A sequence “complementary to at least a portion of an RNA,” referred to herein, means a sequence having sufficient complementarity to be able to hybridize with the RNA, forming a stable duplex; in the case of double stranded antisense nucleic acids, a single strand of the duplex DNA may thus be tested, or triplex formation may be assayed. The ability to hybridize will depend on both the degree of complementarity and the length of the antisense nucleic acid. Generally, the larger the hybridizing nucleic acid, the more base mismatches with a RNA it may contain and still form a stable duplex (or triplex as the case may be). One skilled in the art can ascertain a tolerable degree of mismatch by use of standard procedures to determine the melting point of the hybridized complex.

[0850] Oligonucleotides that are complementary to the 5′ end of the message, e.g., the 5′ untranslated sequence up to and including the AUG initiation codon, should work most efficiently at inhibiting translation. However, sequences complementary to the 3′ untranslated sequences of mRNAs have been shown to be effective at inhibiting translation of mRNAs as well. See generally, Wagner, R., 1994, Nature 372:333-335. Thus, oligonucleotides complementary to either the 5′- or 3′-non-translated, non-coding regions of polynucleotide sequences described herein could be used in an antisense approach to inhibit translation of endogenous mRNA. Oligonucleotides complementary to the 5′ untranslated region of the mRNA should include the complement of the AUG start codon. Antisense oligonucleotides complementary to mRNA coding regions are less efficient inhibitors of translation but could be used in accordance with the invention. Whether designed to hybridize to the 5′-, 3′- or coding region of MRNA of the present invention, antisense nucleic acids should be at least six nucleotides in length, and are preferably oligonucleotides ranging from 6 to about 50 nucleotides in length. In specific aspects the oligonucleotide is at least 10 nucleotides, at least 17 nucleotides, at least 25 nucleotides or at least 50 nucleotides.

[0851] The polynucleotides of the invention can be DNA or RNA or chimeric mixtures or derivatives or modified versions thereof, single-stranded or double-stranded. The oligonucleotide can be modified at the base moiety, sugar moiety, or phosphate backbone, for example, to improve stability of the molecule, hybridization, etc. The oligonucleotide may include other appended groups such as peptides (e.g., for targeting host cell receptors in vivo), or agents facilitating transport across the cell membrane (see, e.g., Letsinger et al., 1989, Proc. Natl. Acad. Sci. U.S.A. 86:6553-6556; Lemaitre et al., 1987, Proc. Natl. Acad. Sci. 84:648-652; PCT Publication No. WO88/09810, published Dec. 15, 1988) or the blood-brain barrier (see, e.g., PCT Publication No. WO89/10134, published Apr. 25, 1988), hybridization-triggered cleavage agents. (See, e.g., Krol et al., 1988, BioTechniques 6:958-976) or intercalating agents. (See, e.g., Zon, 1988, Pharm. Res. 5:539-549). To this end, the oligonucleotide may be conjugated to another molecule, e.g., a peptide, hybridization triggered cross-linking agent, transport agent, hybridization-triggered cleavage agent, etc.

[0852] The antisense oligonucleotide may comprise at least one modified base moiety which is selected from the group including, but not limited to, 5-fluorouracil, 5-bromouracil, 5-chlorouracil, 5-iodouracil, hypoxanthine, xantine, 4-acetylcytosine, 5-(carboxyhydroxylmethyl) uracil, 5-carboxymethylaminomethyl-2-thiouridine, 5-carboxymethylaminomethyluracil, dihydrouracil, beta-D-galactosylqueosine, inosine, N6-isopentenyladenine, 1-methylguanine, 1-methylinosine, 2,2-dimethylguanine, 2-methyladenine, 2-methylguanine, 3-methylcytosine, 5-methylcytosine, N6-adenine, 7-methylguanine, 5-methylaminomethyluracil, 5-methoxyaminomethyl-2-thiouracil, beta-D-mannosylqueosine, 5′-methoxycarboxymethyluracil, 5-methoxyuracil, 2-methylthio-N6-isopentenyladenine, uracil-5-oxyacetic acid (v), wybutoxosine, pseudouracil, queosine, 2-thiocytosine, 5-methyl-2-thiouracil, 2-thiouracil, 4-thiouracil, 5-methyluracil, uracil-5-oxyacetic acid methylester, uracil-5-oxyacetic acid (v), 5-methyl-2-thiouracil, 3-(3-amino-3-N-2-carboxypropyl) uracil, (acp3)w, and 2,6-diaminopurine.

[0853] The antisense oligonucleotide may also comprise at least one modified sugar moiety selected from the group including, but not limited to, arabinose, 2-fluoroarabinose, xylulose, and hexose.

[0854] In yet another embodiment, the antisense oligonucleotide comprises at least one modified phosphate backbone selected from the group including, but not limited to, a phosphorothioate, a phosphorodithioate, a phosphoramidothioate, a phosphoramidate, a phosphordiamidate, a methylphosphonate, an alkyl phosphotriester, and a formacetal or analog thereof.

[0855] In yet another embodiment, the antisense oligonucleotide is an a-anomeric oligonucleotide. An a-anomeric oligonucleotide forms specific double-stranded hybrids with complementary RNA in which, contrary to the usual b-units, the strands run parallel to each other (Gautier et al., 1987, Nucl. Acids Res. 15:6625-6641). The oligonucleotide is a 2′-0-methylribonucleotide (Inoue et al., 1987, Nucl. Acids Res. 15:6131-6148), or a chimeric RNA-DNA analogue (Inoue et al., 1987, FEBS Lett. 215:327-330).

[0856] Polynucleotides of the invention may be synthesized by standard methods known in the art, e.g. by use of an automated DNA synthesizer (such as are commercially available from Biosearch, Applied Biosystems, etc.). As examples, phosphorothioate oligonucleotides may be synthesized by the method of Stein et al. (1988, Nucl. Acids Res. 16:3209), methylphosphonate oligonucleotides can be prepared by use of controlled pore glass polymer supports (Sarin et al., 1988, Proc. Natl. Acad. Sci. U.S.A. 85:7448-7451), etc.

[0857] While antisense nucleotides complementary to the coding region sequence could be used, those complementary to the transcribed untranslated region are most preferred.

[0858] Potential antagonists according to the invention also include catalytic RNA, or a ribozyme (See, e.g., PCT International Publication WO 90/11364, published Oct. 4, 1990; Sarver et al, Science 247:1222-1225 (1990). While ribozymes that cleave mRNA at site specific recognition sequences can be used to destroy mRNAs, the use of hammerhead ribozymes is preferred. Hammerhead ribozymes cleave mRNAs at locations dictated by flanking regions that form complementary base pairs with the target MRNA. The sole requirement is that the target mRNA have the following sequence of two bases: 5′-UG-3′. The construction and production of hammerhead ribozymes is well known in the art and is described more fully in Haseloff and Gerlach, Nature 334:585-591 (1988). There are numerous potential hammerhead ribozyme cleavage sites within the nucleotide sequence of SEQ ID NO: X. Preferably, the ribozyme is engineered so that the cleavage recognition site is located near the 5′ end of the mRNA; i.e., to increase efficiency and minimize the intracellular accumulation of non-functional mRNA transcripts.

[0859] As in the antisense approach, the ribozymes of the invention can be composed of modified oligonucleotides (e.g. for improved stability, targeting, etc.) and should be delivered to cells which express in vivo. DNA constructs encoding the ribozyme may be introduced into the cell in the same manner as described above for the introduction of antisense encoding DNA. A preferred method of delivery involves using a DNA construct “encoding” the ribozyme under the control of a strong constitutive promoter, such as, for example, pol III or pol II promoter, so that transfected cells will produce sufficient quantities of the ribozyme to destroy endogenous messages and inhibit translation. Since ribozymes unlike antisense molecules, are catalytic, a lower intracellular concentration is required for efficiency.

[0860] Antagonist/agonist compounds may be employed to inhibit the cell growth and proliferation effects of the polypeptides of the present invention on neoplastic cells and tissues, i.e. stimulation of angiogenesis of tumors, and, therefore, retard or prevent abnormal cellular growth and proliferation, for example, in tumor formation or growth.

[0861] The antagonist/agonist may also be employed to prevent hyper-vascular diseases, and prevent the proliferation of epithelial lens cells after extracapsular cataract surgery. Prevention of the mitogenic activity of the polypeptides of the present invention may also be desirous in cases such as restenosis after balloon angioplasty.

[0862] The antagonist/agonist may also be employed to prevent the growth of scar tissue during wound healing.

[0863] The antagonist/agonist may also be employed to treat the diseases described herein.

[0864] Thus, the invention provides a method of treating disorders or diseases, including but not limited to the disorders or diseases listed throughout this application, associated with overexpression of a polynucleotide of the present invention by administering to a patient (a) an antisense molecule directed to the polynucleotide of the present invention, and/or (b) a ribozyme directed to the polynucleotide of the present invention.

[0865] Binding, Peptides and Other Molecules

[0866] The invention also encompasses screening methods for identifying polypeptides and nonpolypeptides that bind reproductive system related antigen polypeptides, and the reproductive system related antigen binding molecules identified thereby. These binding molecules are useful, for example, as agonists and antagonists of the reproductive system related antigen polypeptides. Such agonists and antagonists can be used, in accordance with the invention, in the therapeutic embodiments described in detail, below.

[0867] This method comprises the steps of: contacting reproductive system related antigen polypeptides or reproductive system related antigen-like polypeptides with a plurality of molecules; and identifying a molecule that binds the reproductive system related antigen polypeptides or reproductive system related antigen-like polypeptides.

[0868] The step of contacting the reproductive system related antigen polypeptides or reproductive system related antigen-like polypeptides with the plurality of molecules may be effected in a number of ways. For example, one may contemplate immobilizing the reproductive system related antigen polypeptides or reproductive system related antigen-like polypeptides on a solid support and bringing a solution of the plurality of molecules in contact with the immobilized reproductive system related antigen polypeptides or reproductive system related antigen-like polypeptides. Such a procedure would be akin to an affinity chromatographic process, with the affinity matrix being comprised of the immobilized reproductive system related antigen polypeptides or reproductive system related antigen-like polypeptides. The molecules having a selective affinity for the reproductive system related antigen polypeptides or reproductive system related antigen-like polypeptides can then be purified by affinity selection. The nature of the solid support, process for attachment of the reproductive system related antigen polypeptides or reproductive system related antigen-like polypeptides to the solid support, solvent, and conditions of the affinity isolation or selection are largely conventional and well known to those of ordinary skill in the art.

[0869] Alternatively, one may also separate a plurality of polypeptides into substantially separate fractions comprising a subset of or individual polypeptides. For instance, one can separate the plurality of polypeptides by gel electrophoresis, column chromatography, or like method known to those of ordinary skill for the separation of polypeptides. The individual polypeptides can also be produced by a transformed host cell in such a way as to be expressed on or about its outer surface (e.g., a recombinant phage). Individual isolates can then be “probed” by the reproductive system related antigen polypeptides or reproductive system related antigen-like polypeptides, optionally in the presence of an inducer should one be required for expression, to determine if any selective affinity interaction takes place between the reproductive system related antigen polypeptides or reproductive system related antigen-like polypeptides and the individual clone. Prior to contacting the reproductive system related antigen polypeptides or reproductive system related antigen-like polypeptides with each fraction comprising individual polypeptides, the polypeptides could first be transferred to a solid support for additional convenience. Such a solid support may simply be a piece of filter membrane, such as one made of nitrocellulose or nylon. In this manner, positive clones could be identified from a collection of transformed host cells of an expression library, which harbor a DNA construct encoding a polypeptide having a selective affinity for reproductive system related antigen polypeptides or reproductive system related antigen-like polypeptides. Furthermore, the amino acid sequence of the polypeptide having a selective affinity for the reproductive system related antigen polypeptides or reproductive system related antigen-like polypeptides can be determined directly by conventional means or the coding sequence of the DNA encoding the polypeptide can frequently be determined more conveniently. The primary sequence can then be deduced from the corresponding DNA sequence. If the amino acid sequence is to be determined from the polypeptide itself, one may use microsequencing techniques. The sequencing technique may include mass spectroscopy.

[0870] In certain situations, it may be desirable to wash away any unbound reproductive system related antigen polypeptides or reproductive system related antigen-like polypeptides, or alternatively, unbound polypeptides, from a mixture of the reproductive system related antigen polypeptides or reproductive system related antigen-like polypeptides and the plurality of polypeptides prior to attempting to determine or to detect the presence of a selective affinity interaction. Such a wash step may be particularly desirable when the reproductive system related antigen polypeptides or reproductive system related antigen-like polypeptides or the plurality of polypeptides is bound to a solid support.

[0871] The plurality of molecules provided according to this method may be provided by way of diversity libraries, such as random or combinatorial peptide or nonpeptide libraries which can be screened for molecules that specifically bind reproductive system related antigen polypeptides. Many libraries are known in the art that can be used, e.g., chemically synthesized libraries, recombinant (e.g., phage display libraries), and in vitro translation-based libraries. Examples of chemically synthesized libraries are described in Fodor et al., 1991, Science 251:767-773; Houghten et al., 1991, Nature 354:84-86; Lam et al., 1991, Nature 354:82-84; Medynski, 1994, Bio/Technology 12:709-710;Gallop et al., 1994, J. Medicinal Chemistry 37(9):1233-1251; Ohlmeyer et al., 1993, Proc. Natl. Acad. Sci. USA 90:10922-10926; Erb et al., 1994, Proc. Natl. Acad. Sci. USA 91:11422-11426; Houghten et al., 1992, Biotechniques 13:412; Jayawickreme et al., 1994, Proc. Natl. Acad. Sci. USA 91:1614-1618; Salmon et al., 1993, Proc. Natl. Acad. Sci. USA 90:11708-11712; PCT Publication No. WO 93/20242; and Brenner and Lemer, 1992, Proc. Natl. Acad. Sci. USA 89:5381-5383.

[0872] Examples of phage display libraries are described in Scott and Smith, 1990, Science 249:386-390; Devlin et al., 1990, Science, 249:404-406; Christian, R. B., et al., 1992, J. Mol. Biol. 227:711-718); Lenstra, 1992, J. Immunol. Meth. 152:149-157; Kay et al., 1993, Gene 128:59-65; and PCT Publication No. WO 94/18318 dated Aug. 18, 1994.

[0873] In vitro translation-based libraries include but are not limited to those described in PCT Publication No. WO 91/05058 dated Apr. 18, 1991; and Mattheakis et al., 1994, Proc. Natl. Acad. Sci. USA 91:9022-9026.

[0874] By way of examples of nonpeptide libraries, a benzodiazepine library (see e.g., Bunin et al., 1994, Proc. Natl. Acad. Sci. USA 91:4708-4712) can be adapted for use. Peptoid libraries (Simon et al., 1992, Proc. Natl. Acad. Sci. USA 89:9367-9371) can also be used. Another example of a library that can be used, in which the amide functionalities in peptides have been permethylated to generate a chemically transformed combinatorial library, is described by Ostresh et al. (1994, Proc. Natl. Acad. Sci. USA 91:11138-11142).

[0875] The variety of non-peptide libraries that are useful in the present invention is great. For example, Ecker and Crooke, 1995, Bio/Technology 13:351-360 list benzodiazepines, hydantoins, piperazinediones, biphenyls, sugar analogs, beta-mercaptoketones, arylacetic acids, acylpiperidines, benzopyrans, cubanes, xanthines, aminimides, and oxazolones as among the chemical species that form the basis of various libraries.

[0876] Non-peptide libraries can be classified broadly into two types: decorated monomers and oligomers. Decorated monomer libraries employ a relatively simple scaffold structure upon which a variety functional groups is added. Often the scaffold will be a molecule with a known useful pharmacological activity. For example, the scaffold might be the benzodiazepine structure.

[0877] Non-peptide oligomer libraries utilize a large number of monomers that are assembled together in ways that create new shapes that depend on the order of the monomers. Among the monomer units that have been used are carbamates, pyrrolinones, and morpholinos. Peptoids, peptide-like oligomers in which the side chain is attached to the alpha amino group rather than the alpha carbon, form the basis of another version of non-peptide oligomer libraries. The first non-peptide oligomer libraries utilized a single type of monomer and thus contained a repeating backbone. Recent libraries have utilized more than one monomer, giving the libraries added flexibility.

[0878] Screening the libraries can be accomplished by any of a variety of commonly known methods. See, e.g., the following references, which disclose screening of peptide libraries: Parmley and Smith, 1989, Adv. Exp. Med. Biol. 251:215-218; Scott and Smith, 1990, Science 249:386-390; Fowlkes et al., 1992; BioTechniques 13:422-427; Oldenburg et al., 1992, Proc. Natl. Acad. Sci. USA 89:5393-5397; Yu et al., 1994, Cell 76:933-945; Staudt et al., 1988, Science 241:577-580; Bock et al., 1992, Nature 355:564-566; Tuerk et al., 1992, Proc. Natl. Acad. Sci. USA 89:6988-6992; Ellington et al., 1992, Nature 355:850-852; U.S. Pat. No. 5,096,815, U.S. Pat. No. 5,223,409, and U.S. Pat. No. 5,198,346, all to Ladner et al.; Rebar and Pabo, 1993, Science 263:671-673; and CT Publication No. WO 94/18318.

[0879] In a specific embodiment, screening to identify a molecule that binds reproductive system related antigen polypeptides can be carried out by contacting the library members with a reproductive system related antigen polypeptides or reproductive system related antigen-like polypeptides immobilized on a solid phase and harvesting those library members that bind to the reproductive system related antigen polypeptides or reproductive system related antigen-like polypeptides. Examples of such screening methods, termed “panning” techniques are described by way of example in Parmley and Smith, 1988, Gene 73:305-318; Fowlkes et al., 1992, BioTechniques 13:422-427; International Publication No. WO 94/18318; and in references cited herein.

[0880] In another embodiment, the two-hybrid system for selecting interacting proteins in yeast (Fields and Song, 1989, Nature 340:245-246; Chien et al., 1991, Proc. Natl. Acad. Sci. USA 88:9578-9582) can be used to identify molecules that specifically bind to reproductive system related antigen polypeptides or reproductive system related antigen-like polypeptides.

[0881] Where the reproductive system related antigen binding molecule is a polypeptide, the polypeptide can be conveniently selected from any peptide library, including random peptide libraries, combinatorial peptide libraries, or biased peptide libraries. The term “biased” is used herein to mean that the method of generating the library is manipulated so as to restrict one or more parameters that govern the diversity of the resulting collection of molecules, in this case peptides.

[0882] Thus, a truly random peptide library would generate a collection of peptides in which the probability of finding a particular amino acid at a given position of the peptide is the same for all 20 amino acids. A bias can be introduced into the library, however, by specifying, for example, that a lysine occur every fifth amino acid or that positions 4, 8, and 9 of a decapeptide library be fixed to include only arginine. Clearly, many types of biases can be contemplated, and the present invention is not restricted to any particular bias. Furthermore, the present invention contemplates specific types of peptide libraries, such as phage displayed peptide libraries and those that utilize a DNA construct comprising a lambda phage vector with a DNA insert.

[0883] As mentioned above, in the case of a reproductive system related antigen binding molecule that is a polypeptide, the polypeptide may have about 6 to less than about 60 amino acid residues, preferably about 6 to about 10 amino acid residues, and most preferably, about 6 to about 22 amino acids. In another embodiment, a reproductive system related antigen binding polypeptide has in the range of 15-100 amino acids, or 20-50 amino acids.

[0884] The selected reproductive system related antigen binding polypeptide can be obtained by chemical synthesis or recombinant expression.

[0885] Other Activities

[0886] A polypeptide, polynucleotide, agonist, or antagonist of the present invention, as a result of the ability to stimulate vascular endothelial cell growth, may be employed in treatment for stimulating re-vascularization of ischemic tissues due to various disease conditions such as thrombosis, arteriosclerosis, and other cardiovascular conditions. The polypeptide, polynucleotide, agonist, or antagonist of the present invention may also be employed to stimulate angiogenesis and limb regeneration, as discussed above.

[0887] A polypeptide, polynucleotide, agonist, or antagonist of the present invention may also be employed for treating wounds due to injuries, burns, post-operative tissue repair, and ulcers since they are mitogenic to various cells of different origins, such as fibroblast cells and skeletal muscle cells, and therefore, facilitate the repair or replacement of damaged or diseased tissue.

[0888] A polypeptide, polynucleotide, agonist, or antagonist of the present invention may also be employed to stimulate neuronal growth and to treat and prevent neuronal damage which occurs in certain neuronal disorders or neuro-degenerative conditions such as Alzheimer's disease, Parkinson's disease, and AIDS-related complex. A polypeptide, polynucleotide, agonist, or antagonist of the present invention may have the ability to stimulate chondrocyte growth, therefore, they may be employed to enhance bone and periodontal regeneration and aid in tissue transplants or bone grafts.

[0889] A polypeptide, polynucleotide, agonist, or antagonist of the present invention may be also be employed to prevent skin aging due to sunburn by stimulating keratinocyte growth.

[0890] A polypeptide, polynucleotide, agonist, or antagonist of the present invention may also be employed for preventing hair loss, since FGF family members activate hair-forming cells and promotes melanocyte growth. Along the same lines, a polypeptide, polynucleotide, agonist, or antagonist of the present invention may be employed to stimulate growth and differentiation of hematopoietic cells and bone marrow cells when used in combination with other cytokines.

[0891] A polypeptide, polynucleotide, agonist, or antagonist of the present invention may also be employed to maintain organs before transplantation or for supporting cell culture of primary tissues. A polypeptide, polynucleotide, agonist, or antagonist of the present invention may also be employed for inducing tissue of mesodermal origin to differentiate in early embryos.

[0892] A polypeptide, polynucleotide, agonist, or antagonist of the present invention may also increase or decrease the differentiation or proliferation of embryonic stem cells, besides, as discussed above, hematopoietic lineage.

[0893] A polypeptide, polynucleotide, agonist, or antagonist of the present invention may also be used to modulate mammalian characteristics, such as body height, weight, hair color, eye color, skin, percentage of adipose tissue, pigmentation, size, and shape (e.g., cosmetic surgery). Similarly, a polypeptide, polynucleotide, agonist, or antagonist of the present invention may be used to modulate mammalian metabolism affecting catabolism, anabolism, processing, utilization, and storage of energy.

[0894] A polypeptide, polynucleotide, agonist, or antagonist of the present invention may be used to change a mammal's mental state or physical state by influencing biorhythms, caricadic rhythms, depression (including depressive disorders), tendency for violence, tolerance for pain, reproductive capabilities (preferably by Activin or Inhibin-like activity), hormonal or endocrine levels, appetite, libido, memory, stress, or other cognitive qualities.

[0895] A polypeptide, polynucleotide, agonist, or antagonist of the present invention may also be used as a food additive or preservative, such as to increase or decrease storage capabilities, fat content, lipid, protein, carbohydrate, vitamins, minerals, cofactors or other nutritional components.

[0896] The above-recited applications have uses in a wide variety of hosts. Such hosts include, but are not limited to, human, murine, rabbit, goat, guinea pig, camel, horse, mouse, rat, hamster, pig, micro-pig, chicken, goat, cow, sheep, dog, cat, non-human primate, and human. In specific embodiments, the host is a mouse, rabbit, goat, guinea pig, chicken, rat, hamster, pig, sheep, dog or cat. In preferred embodiments, the host is a mammal. In most preferred embodiments, the host is a human.

[0897] Other Preferred Embodiments

[0898] Other preferred embodiments of the claimed invention include an isolated nucleic acid molecule comprising a nucleotide sequence which is at least 95% identical to a sequence of at least about 50 contiguous nucleotides in the nucleotide sequence of SEQ ID NO: X or the complementary strand thereto, the nucleotide sequence as defined in column 4 of Table 1A or columns 8 and 9 of Table 2 or the complementary strand thereto, and/or cDNA contained in Clone ID NO: Z.

[0899] Also preferred is a nucleic acid molecule wherein said sequence of contiguous nucleotides is included in the nucleotide sequence of the portion of SEQ ID NO: X as defined in column 4, “ORF (From-To)”, in Table 1A.

[0900] Also preferred is a nucleic acid molecule wherein said sequence of contiguous nucleotides is included in the nucleotide sequence of the portion of SEQ ID NO: X as defined in columns 8 and 9, “NT From” and “NT To” respectively, in Table 2.

[0901] Also preferred is an isolated nucleic acid molecule comprising a nucleotide sequence which is at least 95% identical to a sequence of at least about 150 contiguous nucleotides in the nucleotide sequence of SEQ ID NO: X or the complementary strand thereto, the nucleotide sequence as defined in column 4 of Table 1A or columns 8 and 9 of Table 2 or the complementary strand thereto, and/or cDNA contained in Clone ID NO: Z.

[0902] Further preferred is an isolated nucleic acid molecule comprising a nucleotide sequence which is at least 95% identical to a sequence of at least about 500 contiguous nucleotides in the nucleotide sequence of SEQ ID NO: X or the complementary strand thereto, the nucleotide sequence as defined in column 4 of Table 1A or columns 8 and 9 of Table 2 or the complementary strand thereto, and/or cDNA contained in Clone ID NO: Z.

[0903] A further preferred embodiment is a nucleic acid molecule comprising a nucleotide sequence which is at least 95% identical to the nucleotide sequence of the portion of SEQ ID NO: X defined in column 4, “ORF (From-To)”, in Table 1A.

[0904] A further preferred embodiment is a nucleic acid molecule comprising a nucleotide sequence which is at least 95% identical to the nucleotide sequence of the portion of SEQ ID NO: X defined in columns 8 and 9, “NT From” and “NT To”, respectively, in Table 2.

[0905] A further preferred embodiment is an isolated nucleic acid molecule comprising a nucleotide sequence which is at least 95% identical to the complete nucleotide sequence of SEQ ID NO: X or the complementary strand thereto, the nucleotide sequence as defined in column 4 of Table 1A or columns 8 and 9 of Table 2 or the complementary strand thereto, and/or cDNA contained in Clone ID NO: Z.

[0906] Also preferred is an isolated nucleic acid molecule which hybridizes under stringent hybridization conditions to a nucleic acid molecule comprising a nucleotide sequence of SEQ ID NO: X or the complementary strand thereto, the nucleotide sequence as defined in column 4 of Table 1A or columns 8 and 9 of Table 2 or the complementary strand thereto, and/or cDNA contained in Clone ID NO: Z, wherein said nucleic acid molecule which hybridizes does not hybridize under stringent hybridization conditions to a nucleic acid molecule having a nucleotide sequence consisting of only A residues or of only T residues.

[0907] Also preferred is a composition of matter comprising a DNA molecule which comprises the cDNA contained in Clone ID NO: Z.

[0908] Also preferred is an isolated nucleic acid molecule comprising a nucleotide sequence which is at least 95% identical to a sequence of at least 50 contiguous nucleotides of the cDNA sequence contained in Clone ID NO: Z.

[0909] Also preferred is an isolated nucleic acid molecule, wherein said sequence of at least 50 contiguous nucleotides is included in the nucleotide sequence of an open reading frame sequence encoded by cDNA contained in Clone ID NO: Z.

[0910] Also preferred is an isolated nucleic acid molecule comprising a nucleotide sequence which is at least 95% identical to sequence of at least 150 contiguous nucleotides in the nucleotide sequence encoded by cDNA contained in Clone ID NO: Z.

[0911] A further preferred embodiment is an isolated nucleic acid molecule comprising a nucleotide sequence which is at least 95% identical to sequence of at least 500 contiguous nucleotides in the nucleotide sequence encoded by cDNA contained in Clone ID NO: Z.

[0912] A further preferred embodiment is an isolated nucleic acid molecule comprising a nucleotide sequence which is at least 95% identical to the complete nucleotide sequence encoded by cDNA contained in Clone ID NO: Z.

[0913] A further preferred embodiment is a method for detecting in a biological sample a nucleic acid molecule comprising a nucleotide sequence which is at least 95% identical to a sequence of at least 50 contiguous nucleotides in a sequence selected from the group consisting of: a nucleotide sequence of SEQ ID NO: X or the complementary strand thereto; the nucleotide sequence as defined in column 4 of Table 1A or columns 8 and 9 of Table 2 or the complementary strand thereto; and a nucleotide sequence encoded by cDNA contained in Clone ID NO: Z; which method comprises a step of comparing a nucleotide sequence of at least one nucleic acid molecule in said sample with a sequence selected from said group and determining whether the sequence of said nucleic acid molecule in said sample is at least 95% identical to said selected sequence.

[0914] Also preferred is the above method wherein said step of comparing sequences comprises determining the extent of nucleic acid hybridization between nucleic acid molecules in said sample and a nucleic acid molecule comprising said sequence selected from said group. Similarly, also preferred is the above method wherein said step of comparing sequences is performed by comparing the nucleotide sequence determined from a nucleic acid molecule in said sample with said sequence selected from said group. The nucleic acid molecules can comprise DNA molecules or RNA molecules.

[0915] A further preferred embodiment is a method for identifying the species, tissue or cell type of a biological sample which method comprises a step of detecting nucleic acid molecules in said sample, if any, comprising a nucleotide sequence that is at least 95% identical to a sequence of at least 50 contiguous nucleotides in a sequence selected from the group consisting of: a nucleotide sequence of SEQ ID NO: X or the complementary strand thereto; the nucleotide sequence as defined in column 4 of Table 1A or columns 8 and 9 of Table 2 or the complementary strand thereto; and a nucleotide sequence of the cDNA contained in Clone ID NO: Z.

[0916] The method for identifying the species, tissue or cell type of a biological sample can comprise a step of detecting nucleic acid molecules comprising a nucleotide sequence in a panel of at least two nucleotide sequences, wherein at least one sequence in said panel is at least 95% identical to a sequence of at least 50 contiguous nucleotides in a sequence selected from said group.

[0917] Also preferred is a method for diagnosing in a subject a pathological condition associated with abnormal structure or expression of a nucleotide sequence of SEQ ID NO: X or the complementary strand thereto; the nucleotide sequence as defined in column 4 of Table 1A or columns 8 and 9 of Table 2 or the complementary strand thereto; or the cDNA contained in Clone ID NO: Z which encodes a protein, wherein the method comprises a step of detecting in a biological sample obtained from said subject nucleic acid molecules, if any, comprising a nucleotide sequence that is at least 95% identical to a sequence of at least 50 contiguous nucleotides in a sequence selected from the group consisting of: a nucleotide sequence of SEQ ID NO: X or the complementary strand thereto; the nucleotide sequence as defined in column 4 of Table 1A or columns 8 and 9 of Table 2 or the complementary strand thereto; and a nucleotide sequence of cDNA contained in Clone ID NO: Z.

[0918] The method for diagnosing a pathological condition can comprise a step of detecting nucleic acid molecules comprising a nucleotide sequence in a panel of at least two nucleotide sequences, wherein at least one sequence in said panel is at least 95% identical to a sequence of at least 50 contiguous nucleotides in a sequence selected from said group.

[0919] Also preferred is a composition of matter comprising isolated nucleic acid molecules wherein the nucleotide sequences of said nucleic acid molecules comprise a panel of at least two nucleotide sequences, wherein at least one sequence in said panel is at least 95% identical to a sequence of at least 50 contiguous nucleotides in a sequence selected from the group consisting of: a nucleotide sequence of SEQ ID NO: X or the complementary strand thereto; the nucleotide sequence as defined in column 4 of Table 1A or columns 8 and 9 of Table 2 or the complementary strand thereto; and a nucleotide sequence encoded by cDNA contained in Clone ID NO: Z.

[0920] The nucleic acid molecules can comprise DNA molecules or RNA molecules.

[0921] Also preferred is a composition of matter comprising isolated nucleic acid molecules wherein the nucleotide sequences of said nucleic acid molecules comprise a DNA microarray or “chip” of at least 1, 2, 3, 4, 5, 6, 7, 8, 9, 10, 15, 20, 25, 30, 40, 50, 100, 150, 200, 250, 300, 500, 1000, 2000, 3000, or 4000 nucleotide sequences, wherein at least one sequence in said DNA microarray or “chip” is at least 95% identical to a sequence of at least 50 contiguous nucleotides in a sequence selected from the group consisting of: a nucleotide sequence of SEQ ID NO: X wherein X is any integer as defined in Table 1A; and a nucleotide sequence encoded by a human cDNA clone identified by a cDNA “Clone ID” in Table 1A.

[0922] Also preferred is an isolated polypeptide comprising an amino acid sequence at least 90% identical to a sequence of at least about 10 contiguous amino acids in the polypeptide sequence of SEQ ID NO: Y; a polypeptide encoded by SEQ ID NO: X or the complementary strand thereto; the polypeptide encoded by the nucleotide sequence as defined in columns 8 and 9 of Table 2; and/or a polypeptide encoded by cDNA contained in Clone ID NO: Z.

[0923] Also preferred is an isolated polypeptide comprising an amino acid sequence at least 95% identical to a sequence of at least about 30 contiguous amino acids in the amino acid sequence of SEQ ID NO: Y; a polypeptide encoded by SEQ ID NO: X or the complementary strand thereto; the polypeptide encoded by the nucleotide sequence as defined in columns 8 and 9 of Table 2; and/or a polypeptide encoded by cDNA contained in Clone ID NO: Z.

[0924] Further preferred is an isolated polypeptide comprising an amino acid sequence at least 95% identical to a sequence of at least about 100 contiguous amino acids in the amino acid sequence of SEQ ID NO: Y; a polypeptide encoded by SEQ ID NO: X or the complementary strand thereto; the polypeptide encoded by the nucleotide sequence as defined in columns 8 and 9 of Table 2; and/or a polypeptide encoded by cDNA contained in Clone ID NO: Z.

[0925] Further preferred is an isolated polypeptide comprising an amino acid sequence at least 95% identical to the complete amino acid sequence of SEQ ID NO: Y; a polypeptide encoded by SEQ ID NO: X or the complementary strand thereto; the polypeptide encoded by the nucleotide sequence as defined in columns 8 and 9 of Table 2; and/or a polypeptide encoded by cDNA contained in Clone ID NO: Z.

[0926] Further preferred is an isolated polypeptide comprising an amino acid sequence at least 90% identical to a sequence of at least about 10 contiguous amino acids in the complete amino acid sequence of a polypeptide encoded by contained in Clone ID NO: Z

[0927] Also preferred is a polypeptide wherein said sequence of contiguous amino acids is included in the amino acid sequence of a portion of said polypeptide encoded by cDNA contained in Clone ID NO: Z; a polypeptide encoded by SEQ ID NO: X or the complementary strand thereto; the polypeptide encoded by the nucleotide sequence as defined in columns 8 and 9 of Table 2; and/or the polypeptide sequence of SEQ ID NO: Y.

[0928] Also preferred is an isolated polypeptide comprising an amino acid sequence at least 95% identical to a sequence of at least about 30 contiguous amino acids in the amino acid sequence of a polypeptide encoded by the cDNA contained in Clone ID NO: Z.

[0929] Also preferred is an isolated polypeptide comprising an amino acid sequence at least 95% identical to a sequence of at least about 100 contiguous amino acids in the amino acid sequence of a polypeptide encoded by cDNA contained in Clone ID NO: Z.

[0930] Also preferred is an isolated polypeptide comprising an amino acid sequence at least 95% identical to the amino acid sequence of a polypeptide encoded by the cDNA contained in Clone ID NO: Z.

[0931] Further preferred is an isolated antibody which binds specifically to a polypeptide comprising an amino acid sequence that is at least 90% identical to a sequence of at least 10 contiguous amino acids in a sequence selected from the group consisting of: a polypeptide sequence of SEQ ID NO: Y; a polypeptide encoded by SEQ ID NO: X or the complementary strand thereto; the polypeptide encoded by the nucleotide sequence as defined in columns 8 and 9 of Table 2; and a polypeptide encoded by the cDNA contained in Clone ID NO: Z.

[0932] Further preferred is a method for detecting in a biological sample a polypeptide comprising an amino acid sequence which is at least 90% identical to a sequence of at least 10 contiguous amino acids in a sequence selected from the group consisting of: a polypeptide sequence of SEQ ID NO: Y; a polypeptide encoded by SEQ ID NO: X or the complementary strand thereto; the polypeptide encoded by the nucleotide sequence as defined in columns 8 and 9 of Table 2; and a polypeptide encoded by the cDNA contained in Clone ID NO: Z; which method comprises a step of comparing an amino acid sequence of at least one polypeptide molecule in said sample with a sequence selected from said group and determining whether the sequence of said polypeptide molecule in said sample is at least 90% identical to said sequence of at least 10 contiguous amino acids.

[0933] Also preferred is the above method wherein said step of comparing an amino acid sequence of at least one polypeptide molecule in said sample with a sequence selected from said group comprises determining the extent of specific binding of polypeptides in said sample to an antibody which binds specifically to a polypeptide comprising an amino acid sequence that is at least 90% identical to a sequence of at least 10 contiguous amino acids in a sequence selected from the group consisting of: a polypeptide sequence of SEQ ID NO: Y; a polypeptide encoded by SEQ ID NO: X or the complementary strand thereto; the polypeptide encoded by the nucleotide sequence as defined in columns 8 and 9 of Table 2; and a polypeptide encoded by the cDNA contained in Clone ID NO: Z.

[0934] Also preferred is the above method wherein said step of comparing sequences is performed by comparing the amino acid sequence determined from a polypeptide molecule in said sample with said sequence selected from said group.

[0935] Also preferred is a method for identifying the species, tissue or cell type of a biological sample which method comprises a step of detecting polypeptide molecules in said sample, if any, comprising an amino acid sequence that is at least 90% identical to a sequence of at least 10 contiguous amino acids in a sequence selected from the group consisting of: polypeptide sequence of SEQ ID NO: Y; a polypeptide encoded by SEQ ID NO: X or the complementary strand thereto; the polypeptide encoded by the nucleotide sequence as defined in columns 8 and 9 of Table 2; and a polypeptide encoded by the cDNA contained in Clone ID NO: Z.

[0936] Also preferred is the above method for identifying the species, tissue or cell type of a biological sample, which method comprises a step of detecting polypeptide molecules comprising an amino acid sequence in a panel of at least two amino acid sequences, wherein at least one sequence in said panel is at least 90% identical to a sequence of at least 10 contiguous amino acids in a sequence selected from the above group.

[0937] Also preferred is a method for diagnosing in a subject a pathological condition associated with abnormal structure or expression of a nucleic acid sequence identified in Table 1A or Table 2 encoding a polypeptide, which method comprises a step of detecting in a biological sample obtained from said subject polypeptide molecules comprising an amino acid sequence in a panel of at least two amino acid sequences, wherein at least one sequence in said panel is at least 90% identical to a sequence of at least 10 contiguous amino acids in a sequence selected from the group consisting of: polypeptide sequence of SEQ ID NO: Y; a polypeptide encoded by SEQ ID NO: X or the complementary strand thereto; the polypeptide encoded by the nucleotide sequence as defined in columns 8 and 9 of Table 2; and a polypeptide encoded by the cDNA contained in Clone ID NO: Z.

[0938] In any of these methods, the step of detecting said polypeptide molecules includes using an antibody.

[0939] Also preferred is an isolated nucleic acid molecule comprising a nucleotide sequence which is at least 95% identical to a nucleotide sequence encoding a polypeptide wherein said polypeptide comprises an amino acid sequence that is at least 90% identical to a sequence of at least 10 contiguous amino acids in a sequence selected from the group consisting of: polypeptide sequence of SEQ ID NO: Y; a polypeptide encoded by SEQ ID NO: X or the complementary strand thereto; the polypeptide encoded by the nucleotide sequence as defined in columns 8 and 9 of Table 2; and a polypeptide encoded by the cDNA contained in Clone ID NO: Z.

[0940] Also preferred is an isolated nucleic acid molecule, wherein said nucleotide sequence encoding a polypeptide has been optimized for expression of said polypeptide in a prokaryotic host.

[0941] Also preferred is a polypeptide molecule, wherein said polypeptide comprises an amino acid sequence selected from the group consisting of: polypeptide sequence of SEQ ID NO: Y; a polypeptide encoded by SEQ ID NO: X or the complementary strand thereto; the polypeptide encoded by the nucleotide sequence as defined in columns 8 and 9 of Table 2; and a polypeptide encoded by the cDNA contained in Clone ID NO: Z.

[0942] Further preferred is a method of making a recombinant vector comprising inserting any of the above isolated nucleic acid molecule into a vector. Also preferred is the recombinant vector produced by this method. Also preferred is a method of making a recombinant host cell comprising introducing the vector into a host cell, as well as the recombinant host cell produced by this method.

[0943] Also preferred is a method of making an isolated polypeptide comprising culturing this recombinant host cell under conditions such that said polypeptide is expressed and recovering said polypeptide. Also preferred is this method of making an isolated polypeptide, wherein said recombinant host cell is a eukaryotic cell and said polypeptide is a human protein comprising an amino acid sequence selected from the group consisting of: polypeptide sequence of SEQ ID NO: Y; a polypeptide encoded by SEQ ID NO: X or the complementary strand thereto; the polypeptide encoded by the nucleotide sequence as defined in columns 8 and 9 of Table 2; and a polypeptide encoded by the cDNA contained in Clone ID NO: Z. The isolated polypeptide produced by this method is also preferred.

[0944] Also preferred is a method of treatment of an individual in need of an increased level of a protein activity, which method comprises administering to such an individual a Therapeutic comprising an amount of an isolated polypeptide, polynucleotide, immunogenic fragment or analogue thereof, binding agent, antibody, or antigen binding fragment of the claimed invention effective to increase the level of said protein activity in said individual.

[0945] Also preferred is a method of treatment of an individual in need of a decreased level of a protein activity, which method comprised administering to such an individual a Therapeutic comprising an amount of an isolated polypeptide, polynucleotide, immunogenic fragment or analogue thereof, binding agent, antibody, or antigen binding fragment of the claimed invention effective to decrease the level of said protein activity in said individual.

[0946] Also preferred is a method of treatment of an individual in need of a specific delivery of toxic compositions to diseased cells (e.g., tumors, leukemias or lymphomas), which method comprises administering to such an individual a Therapeutic comprising an amount of an isolated polypeptide of the invention, including, but not limited to a binding agent, or antibody of the claimed invention that are associated with toxin or cytotoxic prodrugs.

[0947] Having generally described the invention, the same will be more readily understood by reference to the following examples, which are provided by way of illustration and are not intended as limiting.

TABLE 6

| ATCC Deposits | Deposit Date | ATCC Designation Number |
|---|---|---|
| LP01, LP02, LP03, | May 20,1997 | 209059, 209060, 209061, 209062, |
| LP04, LP05, LP06, | | 209063, 209064, 209065, 209066, |
| LP07, LP08, LP09, | | 209067, 209068, 209069 |
| LP10, LP11, | | |
| LP12 | Jan. 12,1998 | 209579 |
| LP13 | Jan. 12,1998 | 209578 |
| LP14 | Jul. 16,1998 | 203067 |
| LP15 | Jul. 16,1998 | 203068 |
| LP16 | Feb. 1,1999 | 203609 |
| LP17 | Feb. 1,1999 | 203610 |
| LP20 | Nov. 17,1998 | 203485 |
| LP21 | Jun. 18,1999 | PTA-252 |
| LP22 | Jun. 18,1999 | PTA-253 |
| LP23 | Dec. 22,1999 | PTA-1081 |

### EXAMPLES

### Example 1

### Isolation of a Selected cDNA Clone from the Deposited Sample

[0948] Each Clone ID NO: Z is contained in a plasmid. Table 7 identifies the vectors used to construct the cDNA library from which each clone was isolated. In many cases, the vector used to construct the library is a phage vector from which a plasmid has been excised. The following correlates the related plasmid for each phage vector used in constructing the cDNA library. For example, where a particular clone is identified in Table 7 as being isolated in the vector “Lambda Zap,” the corresponding deposited clone is in “pBluescript.”

| Vector Used to | Corresponding |
|---|---|
| Construct Library | Deposited Plasmid |
| Lambda Zap | pBluescript (pBS) |
| Uni-Zap XR | pBluescript (pBS) |
| Zap Express | pBK |
| lafmid BA | plafmid BA |
| pSportl | pSportl |
| pCMVSport 2.0 | pCMVSport 2.0 |
| pCMVSport 3.0 | pCMVSport 3.0 |
| pCR ® 2.1 | pCR ® 2.1 |

[0949] Vectors Lambda Zap (U.S. Pat. Nos. 5,128,256 and 5,286,636), Uni-Zap XR (U.S. Pat. Nos. 5,128, 256 and 5,286,636), Zap Express (U.S. Pat. Nos. 5,128,256 and 5,286,636), pBluescript (pBS) (Short, J. M. et al., Nucleic Acids Res. 16:7583-7600 (1988); Alting-Mees, M. A. and Short, J. M., Nucleic Acids Res. 17:9494 (1989)) and pBK (Alting-Mees, M. A. et al., Strategies 5:58-61 (1992)) are commercially available from Stratagene Cloning Systems, Inc., 11011 N. Torrey Pines Road, La Jolla, Calif., 92037. pBS contains an ampicillin resistance gene and pBK contains a neomycin resistance gene. Both can be transformed into E. coli strain XL-1 Blue, also available from Stratagene. pBS comes in 4 forms SK+, SK−, KS+ and KS. The S and K refers to the orientation of the polylinker to the T7 and T3 primer sequences which flank the polylinker region (“S” is for SacI and “K” is for KpnI which are the first sites on each respective end of the linker). “+” or “−” refer to the orientation of the f1 origin of replication (“ori”), such that in one orientation, single stranded rescue initiated from the f1 ori generates sense strand DNA and in the other, antisense.

[0950] Vectors pSport1, pCMVSport 2.0 and pCMVSport 3.0, were obtained from Life Technologies, Inc., P. O. Box 6009, Gaithersburg, Md. 20897. All Sport vectors contain an ampicillin resistance gene and may be transformed into E. coli strain DH10B, also available from Life Technologies. (See, for instance, Gruber, C. E., et al., Focus 15:59 (1993).) Vector lafmid BA (Bento Soares, Columbia University, NY) contains an ampicillin resistance gene and can be transformed into E. coli strain XL-1 Blue. Vector pCR®2.1, which is available from Invitrogen, 1600 Faraday Avenue, Carlsbad, Calif. 92008, contains an ampicillin resistance gene and may be transformed into E. coli strain DH10B, available from Life Technologies. (See, for instance, Clark, J. M., Nuc. Acids Res. 16:9677-9686 (1988) and Mead, D. et al., Bio/Technology 9: (1991).) Preferably, a polynucleotide of the present invention does not comprise the vector sequences identified for the particular clone in Table 7, as well as the corresponding plasmid vector sequences designated above.

[0951] The deposited material in the sample assigned the ATCC Deposit Number cited by reference to Tables 1A, 2, 6 and 7 for any given cDNA clone also may contain one or more additional plasmids, each comprising a cDNA clone different from that given clone. Thus, deposits sharing the same ATCC Deposit Number contain at least a plasmid for each Clone ID NO: Z.

TABLE 7

| Libraries owned | Catalog | | ATCC |
|---|---|---|---|
| by Catalog | Description | Vector | Deposit |
| HUKA HUKB HUKC HUKD | Human Uterine | Lambda | LP01 |
| HUKE HUKF HUKG | Cancer | ZAP II | |
| HCNA HCNB | Human Colon | Lambda Zap II | LP01 |
| HFFA | Human Fetal Brain, | Lambda Zap II | LP01 |
| | random primed | | |
| HTWA | Resting T-Cell | Lambda ZAP II | LP01 |
| HBQA | Early Stage | Lambda ZAP II | LP01 |
| | Human Brain, | | |
| | random primed | | |
| HLMB HLMF HLMG HLMH | breast lymph node | Lambda ZAP II | LP01 |
| HLMI HLMJ HLMM HLMN | CDNA library | | |
| HCQA HCQB | human colon cancer | Lamda ZAP II | LP01 |
| HMEA HMEC HMED HMEE | Human Microvascular | Lambda ZAP II | LP01 |
| HMEF HMEG HMEI HMEJ | Endothelial | | |
| HMEK HMEL | Cells, fract. A | | |
| HUSA HUSC | Human Umbilical | Lambda ZAP II | LP01 |
| | Vein Endothelial | | |
| | Cells, fract. A | | |
| HLQA HLQB | Hepatocellular Tumor | Lambda ZAP II | LP01 |
| HHGA HHGB HHGC HHGD | Hemangiopericytoma | Lambda ZAP II | LP01 |
| HSDM | Human Striatum | Lambda ZAP II | LP01 |
| | Depression, re-rescue | | |
| HUSH | H Umbilical Vein | Lambda ZAP II | LP01 |
| | Endothelial Cells, | | |
| | frac A, re-excision | | |
| HSGS | Salivary gland, | Lambda ZAP II | LP01 |
| | subtracted | | |
| HFXA HFXB HFXC HFXD | Brain frontal | Lambda ZAP II | LP01 |
| HFXE HFXF HFXG HFXH | cortex | | |
| HPQA HPQB HPQC | PERM TF274 | Lambda ZAP II | LP01 |
| HFXJ HFXK | Brain Frontal | Lambda ZAP II | LP01 |
| | Cortex, re-excision | | |
| HCWA HCWB HCWC HCWD | CD34 positive | ZAP Express | LP02 |
| HCWE HCWF HCWG HCWH | cells (Cord | | |
| HCWI HCWJ HCWK | Blood) | | |
| HCUA HCUB HCUC | CD34 depleted Buffy | ZAP Express | LP02 |
| | Coat (Cord Blood) | | |
| HRSM | A-14 cell line | ZAP Express | LP02 |
| HRSA | A1-CELL LINE | ZAP Express | LP02 |
| HCUD HCUE HCUF HCUG | CD34 depleted Buffy | ZAP Express | LP02 |
| HCUH HCUI | Coat (Cord Blood), | | |
| | re-excision | | |
| HBXE HBXF HBXG | H. Whole Brain | ZAP Express | LP02 |
| | #2, re-excision | | |
| HRLM | L8 cell line | ZAP Express | LP02 |
| HBXA HBXB HBXC HBXD | Human Whole Brain | ZAP Express | LP02 |
| | #2-Oligo dT > 1.5Kb | | |
| HUDA HUDB HUDC | Testes | ZAP Express | LP02 |
| HHTM HHTN HHTO | H. hypothalamus, frac | ZAP Express | LP02 |
| | A; re-excision | | |
| HHTL | H. hypothalamus, frac A | ZAP Express | LP02 |
| HASA HASD | Human Adult Spleen | Uni-ZAP XR | LP03 |
| HFKC HFKD HFKE HFKF | Human Fetal Kidney | Uni-ZAP XR | LP03 |
| HFKG | | | |
| HE8A HE8B HE8C HE8D | Human 8 Week | Uni-ZAP XR | LP03 |
| HE8E HE8F HE8M HE8N | Whole Embryo | | |
| HGBA HGBD HGBE HGBF | Human Gall Bladder | Uni-ZAP XR | LP03 |
| HGBG HGBH HGBI | | | |
| HLHA HLHB HLHC HLHD | Human Fetal Lung | Uni-ZAP XR | LP03 |
| HLHE HLHF HLHG HLHH | III | | |
| HLHQ | | | |
| HPMA HPMB HPMC HPMD | Human Placenta | Uni-ZAP XR | LP03 |
| HPME HPMF HPMG HPMH | | | |
| HPRA HPRB HPRC HPRD | Human Prostate | Uni-ZAP XR | LP03 |
| HSIA HSIC HSID HSIE | Human Adult | Uni-ZAP XR | LP03 |
| | Small Intestine | | |
| HTEA HTEB HTEC HTED | Human Testes | Uni-ZAP XR | LP03 |
| HTEE HTEF HTEG HTEH | | | |
| HTEI HTEJ HTEK | | | |
| HTPA HTPB HTPC HTPD | Human Pancreas | Uni-ZAP XR | LP03 |
| HTPE | Tumor | | |
| HTTA HTTB HTTC HTTD | Human Testes Tumor | Uni-ZAP XR | LP03 |
| HTTE HTTF | | | |
| HAPA HAPB HAPC HAPM | Human Adult Pulmonary | Uni-ZAP XR | LP03 |
| HETA HETB HETC HETD | Human Endometrial Tumor | Uni-ZAP XR | LP03 |
| HETE HETF HETG HETH | | | |
| HETI | | | |
| HHFB HHFC HHFD HHFE | Human Fetal Heart | Uni-ZAP XR | LP03 |
| HHFF HHFG HHFH HHFI | | | |
| HHPB HHPC HHPD HHPE | Human Hippocampus | Uni-ZAP XR | LP03 |
| HHPF HHPG HHPH | | | |
| HCE1 HCE2 HCE3 HCE4 | Human Cerebellum | Uni-ZAP XR | LP03 |
| HCE5 HCEB HCEC HCED | | | |
| HCEE HCEF HCEG | | | |
| HUVB HUVC HUVD HUVE | Human Umbilical Vein, | Uni-ZAP XR | LP03 |
| | Endo. remake | | |
| HSTA HSTB HSTC HSTD | Human Skin Tumor | Uni-ZAP XR | LP03 |
| HTAA HTAB HTAC HTAD | Human Activated T-Cells | Uni-ZAP XR | LP03 |
| HTAE | | | |
| HFEA HFEB HFEC | Human Fetal | Uni-ZAP XR | LP03 |
| | Epithelium (Skin) | | |
| HJPA HJPB HJPC HJPD | HUMAN JURKAT | Uni-ZAP XR | LP03 |
| | MEMBRANE BOUND | | |
| | POLYSOMES | | |
| HESA | Human epithelioid sarcoma | Uni-Zap XR | LP03 |
| HLTA HLTB HLTC HLTD | Human T-Cell | Uni-ZAP XR | LP03 |
| HLTE HLTF | Lymphoma | | |
| HFTA HFTB HFTC HFTD | Human Fetal Dura Mater | Uni-ZAP XR | LP03 |
| HRDA HRDB HRDC HRDD | Human Rhabdo- | Uni-ZAP XR | LP03 |
| HRDE HRDF | myosarcoma | | |
| HCAA HCAB HCAC | Cem cells cyclo- | Uni-ZAP XR | LP03 |
| | hexamide treated | | |
| HRGA HRGB HRGC HRGD | Raji Cells, cyclo- | Uni-ZAP XR | LP03 |
| | hexamide treated | | |
| HSUA HSUB HSUC HSUM | Supt Cells, cyclo- | Uni-ZAP XR | LP03 |
| | hexamide treated | | |
| HT4A HT4C HT4D | Activated T-Cells, 12 hrs. | Uni-ZAP XR | LP03 |
| HE9A HE9B HE9C HE9D | Nine Week Old | Uni-ZAP XR | LP03 |
| HE9E HE9F HE9G HE9H | Early Stage Human | | |
| HE9M HE9N | | | |
| HATA HATB HATC HATD | Human Adrenal | Uni-ZAP XR | LP03 |
| HATE | Gland Tumor | | |
| HT5A | Activated T-Cells, 24 hrs. | Uni-ZAP XR | LP03 |
| HFGA HFGM | Human Fetal Brain | Uni-ZAP XR | LP03 |
| HNEA HNEB HNEC HNED | Human Neutrophil | Uni-ZAP XR | LP03 |
| HNEE | | | |
| HBGB HBGD | Human Primary | Uni-ZAP XR | LP03 |
| | Breast Cancer | | |
| HBNA HBNB | Human Normal Breast | Uni-ZAP XR | LP03 |
| HCAS | Cem Cells, cyclo- | Uni-ZAP XR | LP03 |
| | hexamide treated, subtra | | |
| HHPS | Human Hippocampus, | pBS | LP03 |
| | subtracted | | |
| HKCS HKCU | Human Colon Cancer, | pBS | LP03 |
| | subtracted | | |
| HRGS | Raji cells, cyclo- | pBS | LP03 |
| | hexamide treated, | | |
| | subtracted | | |
| HSUT | Supt cells, cyclo- | pBS | LP03 |
| | hexamide treated, | | |
| | differentially expressed | | |
| HT4S | Activated T-Cells, | Uni-ZAP XR | LP03 |
| | 12 hrs, subtracted | | |
| HCDA HCDB HCDC HCDD | Human Chondrosarcoma | Uni-ZAP XR | LP03 |
| HCDE | | | |
| HOAA HOAB HOAC | Human Osteosarcoma | Uni-ZAP XR | LP03 |
| HTLA HTLB HTLC HTLD | Human adult testis, | Uni-ZAP XR | LP03 |
| HTLE HTLF | large inserts | | |
| HLMA HLMC HLMD | Breast Lymph node | Uni-ZAP XR | LP03 |
| | cDNA library | | |
| H6EA H6EB H6EC | HL-60, PMA 4H | Uni-ZAP XR | LP03 |
| HTXA HTXB HTXC HTXD | Activated T-Cell | Uni-ZAP XR | LP03 |
| HTXE HTXF HTXG HTXH | (12 hs)/Thiouridine | | |
| | labelledEco | | |
| HNFA HNFB HNFC HNFD | Human Neutrophil, | Uni-ZAP XR | LP03 |
| HNFE HNFF HNFG HNFH | Activated | | |
| HNFJ | | | |
| HTOB HTOC | HUMAN TONSILS, | Uni-ZAP XR | LP03 |
| | FRACTION 2 | | |
| HMGB | Human OB MG63 | Uni-ZAP XR | LP03 |
| | control fraction I | | |
| HOPB | Human OB HOS | Uni-ZAP XR | LP03 |
| | control fraction I | | |
| HORB | Human OB HOS | Uni-ZAP XR | LP03 |
| | treated (10 nM E2) | | |
| | fraction I | | |
| HSVA HSVB HSVC | Human Chronic Synovitis | Uni-ZAP XR | LP03 |
| HROA | HUMAN STOMACH | Uni-ZAP XR | LP03 |
| HBJA HBJB HBJC HBJD | HUMAN B CELL | Uni-ZAP XR | LP03 |
| HBJE HBJF HBJG HBJH | LYMPHOMA | | |
| HBJI HBJJ HBJK | | | |
| HCRA HCRB HCRC | human corpus colosum | Uni-ZAP XR | LP03 |
| HODA HODB HODC HODD | human ovarian cancer | Uni-ZAP XR | LP03 |
| HDSA | Dermatofibrosarcoma | Uni-ZAP XR | LP03 |
| | Protuberance | | |
| HMWA HMWB HMWC | Bone Marrow | Uni-ZAP XR | LP03 |
| HMWD HMWE HMWF | Cell Line (RS4;11) | | |
| HMWG HMWH HMWI | | | |
| HMWJ | | | |
| HSOA | stomach cancer (human) | Uni-ZAP XR | LP03 |
| HERA | SKIN | Uni-ZAP XR | LP03 |
| HMDA | Brain-medulloblastoma | Uni-ZAP XR | LP03 |
| HGLA HGLB HGLD | Glioblastoma | Uni-ZAP XR | LP03 |
| HEAA | H. Atrophic Endometrium | Uni-ZAP XR | LP03 |
| HBCA HBCB | H. Lymph node | Uni-ZAP XR | LP03 |
| | breast Cancer | | |
| HPWT | Human Prostate | Uni-ZAP XR | LP03 |
| | BPH, re-excision | | |
| HFVG HFVH HFVI | Fetal Liver, | pBS | LP03 |
| | subtraction II | | |
| HNFI | Human Neutrophils, | pBS | LP03 |
| | Activated, re-excision | | |
| HBMB HBMC HBMD | Human Bone Marrow, | pBS | LP03 |
| | re-excision | | |
| HKML HKMM HKMN | H. Kidney Medulla, | pBS | LP03 |
| | re-excision | | |
| HKIX HKIY | H. Kidney Cortex, | pBS | LP03 |
| | subtracted | | |
| HADT | H. Amygdala Depression, | pBS | LP03 |
| | subtracted | | |
| H6AS | H1-60, untreated, | Uni-ZAP XR | LP03 |
| | subtracted | | |
| H6ES | HL-60, PMA 4H, | Uni-ZAP XR | LP03 |
| | subtracted | | |
| H6BS | HL-60, RA 4h, | Uni-ZAP XR | LP03 |
| | Subtracted | | |
| H6CS | HL-60, PMA 1d, | Uni-ZAP XR | LP03 |
| | subtracted | | |
| HTXJ HTXK | Activated T-cell (12 h)/ | Uni-ZAP XR | LP03 |
| | Thiouridine-re-excision | | |
| HMSA HMSB HMSC HMSD | Monocyte activated | Uni-ZAP XR | LP03 |
| HMSE HMSF HMSG HMSH | | | |
| HMSI HMSJ HMSK | | | |
| HAGA HAGB HAGC HAGD | Human Amygdala | Uni-ZAP XR | LP03 |
| HAGE HAGF | | | |
| HSRA HSRB HSRE | STROMAL-OSTEO- | Uni-ZAP XR | LP03 |
| | CLASTOMA | | |
| HSRD HSRF HSRG HSRH | Human Osteoclastoma | Uni-ZAP XR | LP03 |
| | Stromal Cells- | | |
| | unamplified | | |
| HSQA HSQB HSQC HSQD | Stromal cell TF274 | Uni-ZAP XR | LP03 |
| HSQE HSQF HSQG | | | |
| HSKA HSKB HSKC HSKD | Smooth muscle, | Uni-ZAP XR | LP03 |
| HSKE HSKF HSKZ | serum treated | | |
| HSLA HSLB HSLC HSLD | Smooth muscle, control | Uni-ZAP XR | LP03 |
| HSLE HSLF HSLG | | | |
| HSDA HSDD HSDE HSDF | Spinal cord | Uni-ZAP XR | LP03 |
| HSDG HSDH | | | |
| HPWS | Prostate-BPH | pBS | LP03 |
| | subtracted II | | |
| HSKW HSKX HSKY | Smooth Muscle- | pBS | LP03 |
| | HASTE normalized | | |
| HFPB HFPC HFPD | H. Frontal cortex, | Uni-ZAP XR | LP03 |
| | epileptic; re-excision | | |
| HSDI HSDJ HSDK | Spinal Cord, re-excision | Uni-ZAP XR | LP03 |
| HSKN HSKO | Smooth Muscle Serum | pBS | LP03 |
| | Treated, Norm | | |
| HSKG HSKH HSKI | Smooth muscle, serum | pBS | LP03 |
| | induced, re-exc | | |
| HFCA HFCB HFCC HFCD | Human Fetal Brain | Uni-ZAP XR | LP04 |
| HFCE HFCF | | | |
| HPTA HPTB HPTD | Human Pituitary | Uni-ZAP XR | LP04 |
| HTHB HTHC HTHD | Human Thymus | Uni-ZAP XR | LP04 |
| HE6B HE6C HE6D HE6E | Human Whole Six | Uni-ZAP XR | LP04 |
| HE6F HE6G HE6S | Week Old Embryo | | |
| HSSA HSSB HSSC HSSD | Human Synovial Sarcoma | Uni-ZAP XR | LP04 |
| HSSE HSSF HSSG HSSH | | | |
| HSSI HSSJ HSSK | | | |
| HE7T | 7 Week Old Early | Uni-ZAP XR | LP04 |
| | Stage Human, subtracted | | |
| HEPA HEPB HEPC | Human Epididymus | Uni-ZAP XR | LP04 |
| HSNA HSNB HSNC HSNM | Human Synovium | Uni-ZAP XR | LP04 |
| HSNN | | | |
| HPFB HPFC HPFD HPFE | Human Prostate | Uni-ZAP XR | LP04 |
| | Cancer, Stage C | | |
| | fraction | | |
| HE2A HE2D HE2E HE2H | 12 Week Old Early | Uni-ZAP XR | LP04 |
| HE2I HE2M HE2N HE2O | Stage Human | | |
| HE2B HE2C HE2F HE2G | 12 Week Old Early | Uni-ZAP XR | LP04 |
| HE2P HE2Q | Stage Human, II | | |
| HPTS HPTT HPTU | Human Pituitary, subtracted | Uni-ZAP XR | LP04 |
| HAUA HAUB HAUC | Amniotic Cells- | Uni-ZAP XR | LP04 |
| | TNF induced | | |
| HAQA HAQB HAQC HAQD | Amniotic Cells- | Uni-ZAP XR | LP04 |
| | Primary Culture | | |
| HWTA HWTB HWTC | wilm’s tumor | Uni-ZAP XR | LP04 |
| HBSD | Bone Cancer, re-excision | Uni-ZAP XR | LP04 |
| HSGB | Salivary gland, re-excision | Uni-ZAP XR | LP04 |
| HSJA HSJB HSJC | Smooth muscle-ILb | Uni-ZAP XR | LP04 |
| | induced | | |
| HSXA HSXB HSXC HSXD | Human Substantia Nigra | Uni-ZAP XR | LP04 |
| HSHA HSHB HSHC | Smooth muscle, IL1b | Uni-ZAP XR | LP04 |
| | induced | | |
| HOUA HOUB HOUC HOUD | Adipocytes | Uni-ZAP XR | LP04 |
| HOUE | | | |
| HPWA HPWB HPWC HPWD | Prostate BPH | Uni-ZAP XR | LP04 |
| HPWE | | | |
| HELA HELB HELC HELD | Endothelial | Uni-ZAP XR | LP04 |
| HELE HELF HELG HELH | cells-control | | |
| HEMA HEMB HEMC HEMD | Endothelial-induced | Uni-ZAP XR | LP04 |
| HEME HEMF HEMG HEMH | | | |
| HBIA HBIB HBIC | Human Brain, Striatum | Uni-ZAP XR | LP04 |
| HHSA HHSB HHSC HHSD | Human Hypothalmus, | Uni-ZAP XR | LP04 |
| HHSE | Schizophrenia | | |
| HNGA HNGB HNGC HNGD | neutrophils control | Uni-ZAP XR | LP04 |
| HNGE HNGF HNGG HNGH | | | |
| HNGI HNGJ | | | |
| HNHA HNHB HNHC HNHD | Neutrophils IL-1 | Uni-ZAP XR | LP04 |
| HNHE HNHF HNHG HNHH | and LPS induced | | |
| HNHI HNHJ | | | |
| HSDB HSDC | STRIATUM | Uni-ZAP XR | LP04 |
| | DEPRESSION | | |
| HHPT | Hypothalamus | Uni-ZAP XR | LP04 |
| HSAT HSAU HSAV HSAW | Anergic T-cell | Uni-ZAP XR | LP04 |
| HSAX HSAY HSAZ | | | |
| HBMS HBMT HBMU HBMV | Bone marrow | Uni-ZAP XR | LP04 |
| HBMW HBMX | | | |
| HOEA HOEB HOEC HOED | Osteoblasts | Uni-ZAP XR | LP04 |
| HOEE HOEF HOEJ | | | |
| HAIA HAIB HAIC HAID | Epithelial-TNFa | Uni-ZAP XR | LP04 |
| HAIE HAIF | and INF induced | | |
| HTGA HTGB HTGC HTGD | Apoptotic T-cell | Uni-ZAP XR | LP04 |
| HMCA HMCB HMCC HMCD | Macrophage-oxLDL | Uni-ZAP XR | LP04 |
| HMCE | | | |
| HMAA HMAB HMAC HMAD | Macrophage (GM- | Uni-ZAP XR | LP04 |
| HMAE HMAF HMAG | CSF treated) | | |
| HPHA | Normal Prostate | Uni-ZAP XR | LP04 |
| HPIA HPIB HPIC | LNCAP prostate | Uni-ZAP XR | LP04 |
| | cell line | | |
| HPJA HPJB HPJC | PC3 Prostate cell line | Uni-ZAP XR | LP04 |
| HOSE HOSF HOSG | Human Osteoclastoma, | Uni-ZAP XR | LP04 |
| | re-excision | | |
| HTGE HTGF | Apoptotic T-cell, | Uni-ZAP XR | LP04 |
| | re-excision | | |
| HMAJ HMAK | H Macrophage (GM- | Uni-ZAP XR | LP04 |
| | CSF treated), re-excision | | |
| HACB HACC HACD | Human Adipose Tissue, | Uni-ZAP XR | LP04 |
| | re-excision | | |
| HFPA | H. Frontal Cortex, | Uni-ZAP XR | LP04 |
| | Epileptic | | |
| HFAA HFAB HFAC HFAD | Alzheimers, spongy | Uni-ZAP XR | LP04 |
| HFAE | change | | |
| HFAM | Frontal Lobe, Dementia | Uni-ZAP XR | LP04 |
| HMIA HMIB HMIC | Human Manic | Uni-ZAP XR | LP04 |
| | Depression Tissue | | |
| HTSA HTSE HTSF HTSG | Human Thymus | pBS | LP05 |
| HTSH | | | |
| HPBA HPBB HPBC | Human Pineal Gland | pBS | LP05 |
| HPBD HPBE | | | |
| HSAA HSAB HSAC | HSA 172 Cells | pBS | LP05 |
| HSBA HSBB HSBC HSBM | HSC172 cells | pBS | LP05 |
| HJAA HJAB HJAC HJAD | Jurkat T-cell | pBS | LP05 |
| | G1 phase | | |
| HJBA HJBB HJBC HJBD | Jurkat T-Cell, | pBS | LP05 |
| | S phase | | |
| HAFA HAFB | Aorta endothelial | pBS | LP05 |
| | cells + TNF-a | | |
| HAWA HAWB HAWC | Human White Adipose | pBS | LP05 |
| HTNA HTNB | Human Thyroid | pBS | LP05 |
| HONA | Normal Ovary, | pBS | LP05 |
| | Premenopausal | | |
| HARA HARB | Human Adult Retina | pBS | LP05 |
| HLJA HLJB | Human Lung | pCMVSport 1 | LP06 |
| HOFM HOFN HOFO | H. Ovarian Tumor, | pCMVSport 2.0 | LP07 |
| | II, OV5232 | | |
| HOGA HOGB HOGC | OV 10-3-95 | pCMVSport 2.0 | LP07 |
| HCGL | CD34 + cells, II | pCMVSport 2.0 | LP07 |
| HDLA | Hodgkin’s Lymphoma I | pCMVSport 2.0 | LP07 |
| HDTA HDTB HDTC HDTD | Hodgkin’s Lymphoma II | pCMVSport 2.0 | LP07 |
| HDTE | | | |
| HKAA HKAB HKAC HKAD | Keratinocyte | pCMVSport 2.0 | LP07 |
| HKAE HKAF HKAG HKAH | | | |
| HCIM | CAPFINDER, Crohn’s | pCMVSport 2.0 | LP07 |
| | Disease, lib 2 | | |
| HKAL | Keratinocyte, lib 2 | pCMVSport 2.0 | LP07 |
| HKAT | Keratinocyte, lib 3 | pCMVSport 2.0 | LP07 |
| HNDA | Nasal polyps | pCMVSport 2.0 | LP07 |
| HDRA | H. Primary Dendritic | pCMVSport 2.0 | LP07 |
| | Cells, lib 3 | | |
| HOHA HOHB HOHC | Human Osteoblasts II | pCMVSport 2.0 | LP07 |
| HLDA HLDB HLDC | Liver, Hepatoma | pCMVSport 3.0 | LP08 |
| HLDN HLDO HLDP | Human Liver, normal | pCMVSport 3.0 | LP08 |
| HMTA | pBMC stimulated w/ | pCMVSport 3.0 | LP08 |
| | poly I/C | | |
| HNTA | NTERA2, control | pCMVSport 3.0 | LP08 |
| HDPA HDPB HDPC HDPD | Primary Dendritic | pCMVSport 3.0 | LP08 |
| HDPF HDPG HDPH HDPI | Cells, lib 1 | | |
| HDPJ HDPK | | | |
| HDPM HDPN HDPO HDPP | Primary Dendritic | pCMVSport 3.0 | LP08 |
| | cells, frac 2 | | |
| HMUA HMUB HMUC | Myoloid Progenitor | pCMVSport 3.0 | LP08 |
| | Cell Line | | |
| HHEA HHEB HHEC HHED | T Cell helper I | pCMVSport 3.0 | LP08 |
| HHEM HHEN HHEO HHEP | T cell helper II | pCMVSport 3.0 | LP08 |
| HEQA HEQB HEQC | Human endometrial | pCMVSport 3.0 | LP08 |
| | stromal cells | | |
| HJMA HJMB | Human endometrial | pCMVSport 3.0 | LP08 |
| | stromal cells- | | |
| | treated with progesterone | | |
| HSWA HSWB HSWC | Human endometrial | pCMVSport 3.0 | LP08 |
| | stromal cells- | | |
| | treated with estradiol | | |
| HSYA HSYB HSYC | Human Thymus | pCMVSport 3.0 | LP08 |
| | Stromal Cells | | |
| HLWA HLWB HLWC | Human Placenta | pCMVSport 3.0 | LP08 |
| HRAA HRAB HRAC | Rejected Kidney, lib 4 | pCMVSport 3.0 | LP08 |
| HMTM | PCR, pBMC I/C treated | PCRII | LP09 |
| HMJA | H. Meniingima, M6 | pSport 1 | LP10 |
| HMKA HMKB HMKC HMKD | H. Meningima, M1 | pSport 1 | LP10 |
| HMKE | | | |
| HUSG HUSI | Human umbilical vein | pSport 1 | LP10 |
| | endothelial cells, | | |
| | IL-4 induced | | |
| HUSX HUSY | Human Umbilical Vein | pSport 1 | LP10 |
| | Endothelial Cells, | | |
| | uninduced | | |
| HOFA | Ovarian Tumor I, OV5232 | pSport I | LP10 |
| HCFA HCFB HCFC HCFD | T-Cell PHA 16 hrs | pSport 1 | LP10 |
| HCFL HCFM HCFN HCFO | T-Cell PHA 24 hrs | pSport 1 | LP10 |
| HADA HADC HADD HADE | Human Adipose | pSport 1 | LP10 |
| HADF HADG | | | |
| HOVA HOVB HOVC | Human Ovary | pSport 1 | LP10 |
| HTWB HTWC HTWD HTWE | Resting T-Cell | pSport 1 | LP10 |
| HTWF | Library, II | | |
| HMMA | Spleen metastic melanoma | pSport 1 | LP10 |
| HLYA HLYB HLYC HLYD | Spleen, Chronic | pSport 1 | LP10 |
| HLYE | lymphocytic leukemia | | |
| HCGA | CD34 + cell, I | pSport 1 | LP10 |
| HEOM HEON | Human Eosinophils | pSport 1 | LP10 |
| HTDA | Human Tonsil, Lib 3 | pSport 1 | LP10 |
| HSPA | Salivary Gland, Lib 2 | pSport 1 | LP10 |
| HCHA HCHB HCHC | Breast Cancer cell | pSport 1 | LP10 |
| | line, MDA 36 | | |
| HCHM HCHN | Breast Cancer Cell | pSport 1 | LP10 |
| | line, angiogenic | | |
| HCIA | Crohn’s Disease | pSport 1 | LP10 |
| HDAA HDAB HDAC | HEL cell line | pSport 1 | LP10 |
| HABA | Human Astrocyte | pSport 1 | LP10 |
| HUFA HUFB HUFC | Ulcerative Colitis | pSport 1 | LP10 |
| HNTM | NTERA2 + retinoic | pSport 1 | LP10 |
| | acid, 14 days | | |
| HDQA | Primary Dendritic cells, | pSport 1 | LP10 |
| | CapFinder2, frac 1 | | |
| HDQM | Primary Dendritic Cells, | pSport 1 | LP10 |
| | CapFinder, frac 2 | | |
| HLDX | Human Liver, normal, | pSport 1 | LP10 |
| HULA HULB HULC | Human Dermal | pSport 1 | LP10 |
| | Endothelial | | |
| | Cells, untreated | | |
| HUMA | Human Dermal | pSport 1 | LP10 |
| | Endothelial | | |
| | cells, treated | | |
| HCJA | Human Stromal | pSport 1 | LP10 |
| | Endometrial | | |
| | fibroblasts, untreated | | |
| HCJM | Human Stromal | pSport 1 | LP10 |
| | endometrial fibroblasts, | | |
| | treated w/ estradiol | | |
| HEDA | Human Stromal | pSport 1 | LP10 |
| | endometrial fibroblasts, | | |
| | treated with progesterone | | |
| HFNA | Human ovary tumor | pSport 1 | LP10 |
| | cell OV350721 | | |
| HKGA HKGB HKGC HKGD | Merkel Cells | pSport 1 | LP10 |
| HISA HISB HISC | Pancreas Islet | pSport 1 | LP10 |
| | Cell Tumor | | |
| HLSA | Skin, burned | pSport 1 | LP10 |
| HBZA | Prostate, BPH, Lib 2 | pSport 1 | LP10 |
| HBZS | Prostate BPH, Lib | pSport 1 | LP10 |
| | 2, subtracted | | |
| HFIA HFIB HFIC | Synovial Fibroblasts | pSport 1 | LP10 |
| | (control) | | |
| HFIH HFII HFIJ | Synovial hypoxia | pSport 1 | LP10 |
| HFIT HFIU HFIV | Synovial IL-1/TNF | pSport 1 | LP10 |
| | stimulated | | |
| HGCA | Messangial cell, frac 1 | pSport 1 | LP10 |
| HMVA HMVB HMVC | Bone Marrow Stromal | pSport 1 | LP10 |
| | Cell, untreated | | |
| HFIX HFIY HFIZ | Synovial Fibroblasts | pSport 1 | LP10 |
| | (II1/TNF), subt | | |
| HFOX HFOY HFOZ | Synovial hypoxia-RSF | pSport 1 | LP10 |
| | subtracted | | |
| HMQA HMQB HMQC HMQD | Human Activated | Uni-ZAP XR | LP11 |
| | Monocytes | | |
| HLIA HLIB HLIC | Human Liver | pCMVSport 1 | LP012 |
| HHBA HHBB HHBC HHBD | Human Heart | pCMVSport 1 | LP012 |
| HHBE | | | |
| HBBA HBBB | Human Brain | pCMVSport 1 | LP012 |
| HLJA HLJB HLJC HLJD | Human Lung | pCMVSport 1 | LP012 |
| HLJE | | | |
| HOGA HOGB HOGC | Ovarian Tumor | pCMVSport 2.0 | LP012 |
| HTJM | Human Tonsils, Lib 2 | pCMVSport 2.0 | LP012 |
| HAMF HAMG | KMH2 | pCMVSport 3.0 | LP012 |
| HAJA HAJB HAJC | L428 | pCMVSport 3.0 | LP012 |
| HWBA HWBB HWBC HWBD | Dendritic cells, pooled | pCMVSport 3.0 | LP012 |
| HWBE | | | |
| HWAA HWAB HWAC HWAD | Human Bone Marrow, | pCMVSport 3.0 | LP012 |
| HWAE | treated | | |
| HYAA HYAB HYAC | B Cell lymphoma | pCMVSport 3.0 | LP012 |
| HWHG HWHH HWHI | Healing groin wound, | pCMVSport 3.0 | LP012 |
| | 6.5 hours post incision | | |
| HWHP HWHQ HWHR | Healing groin wound; | pCMVSport 3.0 | LP012 |
| | 7.5 hours post incision | | |
| HARM | Healing groin wound- | pCMVSport 3.0 | LP012 |
| | zero hr post- | | |
| | incision (control) | | |
| HBIM | Olfactory epithelium; | pCMVSport 3.0 | LP012 |
| | nasalcavity | | |
| HWDA | Healing Abdomen wound; | pCMVSport 3.0 | LP012 |
| | 70&90 min post | | |
| | incision | | |
| HWEA | Healing Abdomen | pCMVSport 3.0 | LP012 |
| | Wound; 15 days | | |
| | post incision | | |
| HWJA | Healing Abdomen | pCMVSport 3.0 | LP012 |
| | Wound; 21&29 days | | |
| HNAL | Human Tongue, frac 2 | pSport1 | LP012 |
| HMJA | H. Meniingima, M6 | pSport1 | LP012 |
| HMKA HMKB HMKC HMKD | H. Meningima, M1 | pSport1 | LP012 |
| HMKE | | | |
| HOFA | Ovarian Tumor I, | pSport1 | LP012 |
| | OV5232 | | |
| HCFA HCFB HCFC HCFD | T-Cell PHA 16 hrs | pSport1 | LP012 |
| HCFL HCFM HCFN HCFO | T-Cell PHA 24 hrs | pSport1 | LP012 |
| HMMA HMMB HMMC | Spleen metastic | pSport1 | LP012 |
| | melanoma | | |
| HTDA | Human Tonsil, Lib 3 | pSport1 | LP012 |
| HDBA | Human Fetal Thymus | pSport1 | LP012 |
| HDUA | Pericardium | pSport1 | LP012 |
| HBZA | Prostate, BPH, Lib 2 | pSport1 | LP012 |
| HWCA | Larynx tumor | pSport1 | LP012 |
| HWKA | Normal lung | pSport1 | LP012 |
| HSMB | Bone marrow | pSport1 | LP012 |
| | stroma, treated | | |
| HBHM | Normal trachea | pSport1 | LP012 |
| HLFC | Human Larynx | pSport1 | LP012 |
| HLRB | Siebben Polyposis | pSport1 | LP012 |
| HNIA | Mammary Gland | pSport1 | LP012 |
| HNJB | Palate carcinoma | pSport1 | LP012 |
| HNKA | Palate normal | pSport1 | LP012 |
| HMZA | Pharynx carcinoma | pSport1 | LP012 |
| HABG | Cheek Carcinoma | pSport1 | LP012 |
| HMZM | Pharynx Carcinoma | pSport1 | LP012 |
| HDRM | Larynx Carcinoma | pSport1 | LP012 |
| HVAA | Pancreas normal | pSport1 | LP012 |
| | PCA4 No | | |
| HICA | Tongue carcinoma | pSport1 | LP012 |
| HUKA HUKB HUKC HUKD | Human Uterine Cancer | Lambda ZAP II | LP013 |
| HUKE | | | |
| HFFA | Human Fetal Brain, | Lambda ZAP II | LP013 |
| | random primed | | |
| HTUA | Activated T-cell labeled | Lambda ZAP II | LP013 |
| | with 4-thioluri | | |
| HBQA | Early Stage Human Brain, | Lambda ZAP II | LP013 |
| | random primed | | |
| HMEB | Human microvascular | Lambda ZAP II | LP013 |
| | Endothelial cells, fract. B | | |
| HUSH | Human Umbilical Vein | Lambda ZAP II | LP013 |
| | Endothelial cells, fract. | | |
| | A, re-excision | | |
| HLQC HLQD | Hepatocellular tumor, | Lambda ZAP II | LP013 |
| | re-excision | | |
| HTWJ HTWK HTWL | Resting T-cell, | Lambda ZAP II | LP013 |
| | re-excision | | |
| HF6S | Human Whole 6 week | pBluescript | LP013 |
| | Old Embryo (II), subt | | |
| HHPS | Human Hippocampus, | pBluescript | LP013 |
| | subtracted | | |
| HL1S | LNCAP, differential | pBluescript | LP013 |
| | expression | | |
| HLHS HLHT | Early Stage Human | pBluescript | LP013 |
| | Lung, Subtracted | | |
| HSUS | Supt cells, cyclohexamide | pBluescript | LP013 |
| | treated, subtracted | | |
| HSUT | Supt cells, cyclohexamide | pBluescript | LP013 |
| | treated, differentially | | |
| | expressed | | |
| HSDS | H. Striatum Depression, | pBluescript | LP013 |
| | subtracted | | |
| HPTZ | Human Pituitary, | pBluescript | LP013 |
| | Subtracted VII | | |
| HSDX | H. Striatum Depression, | pBluescript | LP013 |
| | subt II | | |
| HSDZ | H. Striatum Depression, | pBluescript | LP013 |
| | subt | | |
| HPBA HPBB HPBC HPBD | Human Pineal Gland | pBluescript SK- | LP013 |
| HPBE | | | |
| HRTA | Colorectal Tumor | pBluescript SK- | LP013 |
| HSBA HSBB HSBC HSBM | HSC172 cells | pBluescript SK- | LP013 |
| HJAA HJAB HJAC HJAD | Jurkat T-cell G1 phase | pBluescript SK- | LP013 |
| HJBA HJBB HJBC HJBD | Jurkat T-cell, S1 phase | pBluescript SK- | LP013 |
| HTNA HTNB | Human Thyroid | pBluescript SK- | LP013 |
| HAHA HAHB | Human Adult Heart | Uni-ZAP XR | LP013 |
| HE6A | Whole 6 week | Uni-ZAP XR | LP013 |
| | Old Embryo | | |
| HFCA HFCB HFCC HFCD | Human Fetal Brain | Uni-ZAP XR | LP013 |
| HFCE | | | |
| HFKC HFKD HFKE HFKF | Human Fetal Kidney | Uni-ZAP XR | LP013 |
| HFKG | | | |
| HGBA HGBD HGBE HGBF | Human Gall Bladder | Uni-ZAP XR | LP013 |
| HGBG | | | |
| HPRA HPRB HPRC HPRD | Human Prostate | Uni-ZAP XR | LP013 |
| HTEA HTEB HTEC HTED | Human Testes | Uni-ZAP XR | LP013 |
| HTEE | | | |
| HTTA HTTB HTTC HTTD | Human Testes Tumor | Uni-ZAP XR | LP013 |
| HTEE | | | |
| HYBA HYBB | Human Fetal Bone | Uni-ZAP XR | LP013 |
| HFLA | Human Fetal Liver | Uni-ZAP XR | LP013 |
| HHFB HHFC HHFD HHFE | Human Fetal Heart | Uni-ZAP XR | LP013 |
| HHFF | | | |
| HUVB HUVC HUVD HUVE | Human Umbilical Vein, | Uni-ZAP XR | LP013 |
| | End remake | | |
| HTHB HTHC HTHD | Human Thymus | Uni-ZAP XR | LP013 |
| HSTA HSTB HSTC HSTD | Human Skin Tumor | Uni-ZAP XR | LP013 |
| HTAA HTAB HTAC HTAD | Human Activated T-cells | Uni-ZAP XR | LP013 |
| HTAE | | | |
| HFEA HFEB HFEC | Human Fetal | Uni-ZAP XR | LP013 |
| | Epithelium (skin) | | |
| HJPA HJPB HJPC HJPD | Human Jurkat Membrane | Uni-ZAP XR | LP013 |
| | Bound Polysomes | | |
| HESA | Human Epithelioid | Uni-ZAP XR | LP013 |
| | Sarcoma | | |
| HALS | Human Adult Liver, | Uni-ZAP XR | LP013 |
| | Subtracted | | |
| HFTA HFTB HFTC HFTD | Human Fetal | Uni-ZAP XR | LP013 |
| | Dura Mater | | |
| HCAA HCAB HCAC | Cem cells, cyclo- | Uni-ZAP XR | LP013 |
| | hexamide treated | | |
| HRGA HRGB HRGC HRGD | Raji Cells, cyclo- | Uni-ZAP XR | LP013 |
| | hexamide treated | | |
| HE9A HE9B HE9C HE9D | Nine Week Old Early | Uni-ZAP XR | LP013 |
| HE9E | Stage Human | | |
| HSFA | Human Fibrosarcoma | Uni-ZAP XR | LP013 |
| HATA HATB HATC HATD | Human Adrenal Gland | Uni-ZAP XR | LP013 |
| HATE | Tumor | | |
| HTRA | Human Trachea Tumor | Uni-ZAP XR | LP013 |
| HE2A HE2D HE2E HE2H | 12 Week Old Early | Uni-ZAP XR | LP013 |
| HE2I | Stage Human | | |
| HE2B HE2C HE2F HE2G | 12 Week Old Early | Uni-ZAP XR | LP013 |
| HE2P | Stage Human, II | | |
| HENA HNEB HNEC HNED | Human Neutrophil | Uni-ZAP XR | LP013 |
| HNEE | | | |
| HBGA | Human Primary | Uni-ZAP XR | LP013 |
| | Breast Cancer | | |
| HPTS HPTT HPTU | Human Pituitary, | Uni-ZAP XR | LP013 |
| | subtracted | | |
| HMQA HMQB HMQC HMQD | Human Activated | Uni-ZAP XR | LP013 |
| | Monocytes | | |
| HOAA HOAB HOAC | Human Osteosarcoma | Uni-ZAP XR | LP013 |
| HTOA HTOD HTOE HTOF | human tonsils | Uni-ZAP XR | LP013 |
| HTOG | | | |
| HMGB | Human OB MG63 | Uni-ZAP XR | LP013 |
| | control fraction I | | |
| HOPB | Human OB HOS | Uni-ZAP XR | LP013 |
| | control fraction I | | |
| HOQB | Human OB HOS | Uni-ZAP XR | LP013 |
| | treated (1 nM E2) | | |
| | fraction I | | |
| HAUA HAUB HAUC | Amniotic Cells- | Uni-ZAP XR | LP013 |
| | TNF induced | | |
| HAQA HAQB HAQC HAQD | Amniotic Cells- | Uni-ZAP XR | LP013 |
| | Primary Culture | | |
| HROA HROC | HUMAN STOMACH | Uni-ZAP XR | LP013 |
| HBJA HBJB HBJC HBJD | HUMAN B CELL | Uni-ZAP XR | LP013 |
| HBJE | LYMPHOMA | | |
| HODA HODB HODC HODD | human ovarian cancer | Uni-ZAP XR | LP013 |
| HCPA | Corpus Callosum | Uni-ZAP XR | LP013 |
| HSOA | stomach cancer (human) | Uni-ZAP XR | LP013 |
| HERA | SKIN | Uni-ZAP XR | LP013 |
| HMDA | Brain-medulloblastoma | Uni-ZAP XR | LP013 |
| HGLA HGLB HGLD | Glioblastoma | Uni-ZAP XR | LP013 |
| HWTA HWTB HWTC | wilm’s tumor | Uni-ZAP XR | LP013 |
| HEAA | H. Atrophic Endometrium | Uni-ZAP XR | LP013 |
| HAPN HAPO HAPP HAPQ | Human Adult | Uni-ZAP XR | LP013 |
| HAPR | Pulmonary; re-excision | | |
| HLTG HLTH | Human T-cell | Uni-ZAP XR | LP013 |
| | lymphoma; re-excision | | |
| HAHC HAHD HAHE | Human Adult Heart; | Uni-ZAP XR | LP013 |
| | re-excision | | |
| HAGA HAGB HAGC HAGD | Human Amygdala | Uni-ZAP XR | LP013 |
| HAGE | | | |
| HSJA HSJB HSJC | Smooth muscle-ILb | Uni-ZAP XR | LP013 |
| | induced | | |
| HSHA HSHB HSHC | Smooth muscle, | Uni-ZAP XR | LP013 |
| | IL1b induced | | |
| HPWA HPWB HPWC HPWD | Prostate BPH | Uni-ZAP XR | LP013 |
| HPWE | | | |
| HPIA HPIB HPIC | LNCAP prostate | Uni-ZAP XR | LP013 |
| | cell line | | |
| HPJA HPJB HPJC | PC3 Prostate cell line | Uni-ZAP XR | LP013 |
| HBTA | Bone Marrow Stroma, | Uni-ZAP XR | LP013 |
| | TNF&LPS ind | | |
| HMCF HMCG HMCH HMCI | Macrophage-oxLDL; | Uni-ZAP XR | LP013 |
| HMCJ | re-excision | | |
| HAGG HAGH HAGI | Human Amygdala; | Uni-ZAP XR | LP013 |
| | re-excision | | |
| HACA | H. Adipose Tissue | Uni-ZAP XR | LP013 |
| HKFB | K562 + PMA (36 hrs), | ZAP Express | LP013 |
| | re-excision | | |
| HCWT HCWU HCWV | CD34 positive cells | ZAP Express | LP013 |
| | (cord blood), re-ex | | |
| HBWA | Whole brain | ZAP Express | LP013 |
| HBXA HBXB HBXC HBXD | Human Whole Brain #2- | ZAP Express | LP013 |
| | Oligo dT > 1.5Kb | | |
| HAVM | Temporal cortex- | pT-Adv | LP014 |
| | Alzheizmer | | |
| HAVT | Hippocampus, Alzheimer | pT-Adv | LP014 |
| | Subtracted | | |
| HHAS | CHME Cell Line | Uni-ZAP XR | LP014 |
| HAJR | Larynx normal | pSport 1 | LP014 |
| HWLE HWLF HWLG HWLH | Colon Normal | pSport 1 | LP014 |
| HCRM HCRN HCRO | Colon Carcinoma | pSport 1 | LP014 |
| HWLI HWLJ HWLK | Colon Normal | pSport 1 | LP014 |
| HWLQ HWLR HWLS HWLT | Colon Tumor | pSport 1 | LP014 |
| HBFM | Gastrocnemius Muscle | pSport 1 | LP014 |
| HBOD HBOE | Quadriceps Muscle | pSport 1 | LP014 |
| HBKD HBKE | Soleus Muscle | pSport 1 | LP014 |
| HCCM | Pancreatic Langerhans | pSport 1 | LP014 |
| HWGA | Larynx carcinoma | pSport 1 | LP014 |
| HWGM HWGN | Larynx carcinoma | pSport 1 | LP014 |
| HWLA HWLB HWLC | Normal colon | pSport 1 | LP014 |
| HWLM HWLN | Colon Tumor | pSport 1 | LP014 |
| HVAM HVAN HVAO | Pancreas Tumor | pSport 1 | LP014 |
| HWGQ | Larynx carcinoma | pSport 1 | LP014 |
| HAQM HAQN | Salivary Gland | pSport 1 | LP014 |
| HASM | Stomach; normal | pSport 1 | LP014 |
| HBCM | Uterus; normal | pSport 1 | LP014 |
| HCDM | Testis; normal | pSport 1 | LP014 |
| HDJM | Brain; normal | pSport 1 | LP014 |
| HEFM | Adrenal Gland, normal | pSport 1 | LP014 |
| HBAA | Rectum normal | pSport 1 | LP014 |
| HFDM | Rectum tumour | pSport 1 | LP014 |
| HGAM | Colon, normal | pSport 1 | LP014 |
| HHMM | Colon, tumour | pSport 1 | LP014 |
| HCLB HCLC | Human Lung Cancer | Lambda Zap II | LP015 |
| HRLA | L1 Cell line | ZAP Express | LP015 |
| HHAM | Hypothalamus, | pCMV Sport 3.0 | LP015 |
| | Alzheimer’s | | |
| HKBA | Ku 812F Basophils Line | pSport 1 | LP015 |
| HS2S | Saos2, Dexamethosome | pSport 1 | LP016 |
| | Treated | | |
| HA5A | Lung Carcinoma A549 | pSport 1 | LP016 |
| | TNFalpha activated | | |
| HTFM | TF-1 Cell Line GM- | pSport 1 | LP016 |
| | CSF Treated | | |
| HYAS | Thyroid Tumour | pSport 1 | LP016 |
| HUTS | Larynx Normal | pSport 1 | LP016 |
| HXOA | Larynx Tumor | pSport 1 | LP016 |
| HEAH | Ea.hy.926 cell line | pSport 1 | LP016 |
| HINA | Adenocarcinoma Human | pSport 1 | LP016 |
| HRMA | Lung Mesothelium | pSport 1 | LP016 |
| HLCL | Human Pre-Differentiated | Uni-Zap XR | LP017 |
| | Adipocytes | | |
| HS2A | Saos2 Cells | pSport 1 | LP020 |
| HS2I | Saos2 Cells; Vitamin | pSport 1 | LP020 |
| | D3 Treated | | |
| HUCM | CHME Cell Line, | pSport 1 | LP020 |
| | untreated | | |
| HEPN | Aryepiglottis Normal | pSport 1 | LP020 |
| HPSN | Sinus Piniformis Tumour | pSport 1 | LP020 |
| HNSA | Stomach Normal | pSport 1 | LP020 |
| HNSM | Stomach Tumour | pSport 1 | LP020 |
| HNLA | Liver Normal Met5No | pSport 1 | LP020 |
| HUTA | Liver Tumour Met 5 Tu | pSport 1 | LP020 |
| HOCN | Colon Normal | pSport 1 | LP020 |
| HOCT | Colon Tumor | pSport 1 | LP020 |
| HTNT | Tongue Tumour | pSport 1 | LP020 |
| HLXN | Larynx Normal | pSport 1 | LP020 |
| HLXT | Larynx Tumour | pSport 1 | LP020 |
| HTYN | Thymus | pSport 1 | LP020 |
| HPLN | Placenta | pSport 1 | LP020 |
| HTNG | Tongue Normal | pSport 1 | LP020 |
| HZAA | Thyroid Normal (SDCA2 | pSport 1 | LP020 |
| | No) | | |
| HWES | Thyroid Thyroiditis | pSport 1 | LP020 |
| HFHD | Ficolled Human Stromal | pTrip1Ex2 | LP021 |
| | Cells, 5Fu treated | | |
| HFHM, HFHN | Ficolled Human Stromal | pTrip1Ex2 | LP021 |
| | Cells, Untreated | | |
| HPCI | Hep G2 Cells, lambda | lambda Zap-CMV | LP021 |
| | library | XR | |
| HBCA, HBCB, HBCC | H. Lymph node breast | Uni-ZAP XR | LP021 |
| | Cancer | | |
| HCOK | Chondrocytes | pSPORT1 | LP022 |
| HDCA, HDCB, HDCC | Dendritic Cells From | pSPORT1 | LP022 |
| | CD34 Cells | | |
| HDMA, HDMB | CD40 activated monocyte | pSPORT1 | LP022 |
| | dendritic cells | | |
| HDDM, HDDN, HDDO | LPS activated derived | pSPORT1 | LP022 |
| | dendritic cells | | |
| HPCR | Hep G2 Cells, PCR | lambda Zap-CMV | LP022 |
| | library | XR | |
| HAAA, HAAB, HAAC | Lung, Cancer | pSPORT1 | LP022 |
| | (4005313A3): Invasive | | |
| | Poorly Differentiated | | |
| | Lung Adenocarcinoma | | |
| HIPA, HIPB, HIPC | Lung, Cancer | pSPORTl | LP022 |
| | (4005163 B7): Invasive, | | |
| | Poorly Diff. Adeno- | | |
| | carcinoma, Metastatic | | |
| HOOH, HOOI | Ovary, Cancer: (4004562 | pSPORT1 | LP022 |
| | B6) Papillary Serous | | |
| | Cystic Neoplasm, Low | | |
| | Malignant Pot | | |
| HIDA | Lung, Normal: | pSPORT1 | LP022 |
| | (4005313 B1) | | |
| HUJA, HUJB, HUJC, | B-Cells | pCMVSport 3.0 | LP022 |
| HUJD, HUJE | | | |
| HNOA, HNOB, HNOC, | Ovary, Normal: | pSPORT1 | LP022 |
| HNOD | (9805C040R) | | |
| HNLM | Lung, Normal: | pSPORT1 | LP022 |
| | (4005313 B1) | | |
| HSCL | Stromal Cells | pSPORT1 | LP022 |
| HAAX | Lung, Cancer: (4005313 | pSPORT1 | LP022 |
| | A3) Invasive Poorly- | | |
| | differentiated Metastatic | | |
| | lung adenocarcinoma | | |
| HUUA, HUUB, HUUC, HUUD | B-cells (unstimulated) | pTrip1Ex2 | LP022 |
| HWWA, HWWB, HWWC, | B-cells (stimulated) | pSPORT1 | LP022 |
| HWWD, HWWE, HWWF, | | | |
| HWWG | | | |
| HCCC | Colon, Cancer: | pCMVSport 3.0 | LP023 |
| | (9808C064R) | | |
| HPDO HPDP HPDQ HPDR | Ovary, Cancer (9809C- | pSport 1 | LP023 |
| HPD | 332): Poorly differ- | | |
| | entiated adenocarcinoma | | |
| HPCO HPCP HPCQ HPCT | Ovary, Cancer (15395- | pSport 1 | LP023 |
| | A1F): Grade II | | |
| | Papillary Carcinoma | | |
| HOCM HOCO HOCP HOCQ | Ovary, Cancer: (15799- | pSport 1 | LP023 |
| | A1F) Poorly | | |
| | differentiated carcinoma | | |
| HCBM HCBN HCBO | Breast, Cancer: | pSport 1 | LP023 |
| | (4004943 A5) | | |
| HNBT HNBU HNBV | Breast, Normal: | pSport 1 | LP023 |
| | (4005522B2) | | |
| HBCP HBCQ | Breast, Cancer: | pSport 1 | LP023 |
| | (4005522 A2) | | |
| HBCJ | Breast, Cancer: | pSport 1 | LP023 |
| | (9806C012R) | | |
| HSAM HSAN | Stromal cells 3.88 | pSport 1 | LP023 |
| HVCA HVCB HVCC HVCD | Ovary, Cancer: | pSport 1 | LP023 |
| | (4004332 A2) | | |
| HSCK HSEN HSEO | Stromal cells (HBM3.18) | pSport 1 | LP023 |
| HSCP HSCQ | stromal cell clone 2.5 | pSport 1 | LP023 |
| HUXA | Breast Cancer: | pSport 1 | LP023 |
| | (4005385 A2) | | |
| HCOM HCON HCOO HCOP | Ovary, Cancer (4004- | pSport 1 | LP023 |
| HCOQ | 650 A3): Well-Differ- | | |
| | entiated Micropapillary | | |
| | Serous Carcinoma | | |
| HBNM | Breast, Cancer: | pSport 1 | LP023 |
| | (9802C020E) | | |
| HVVA HVVB HVVC HVVD | Human Bone Marrow, | pSport 1 | LP023 |
| HVVE | treated | | |

[0952] Two nonlimiting examples are provided below for isolating a particular clone from the deposited sample of plasmid cDNAs cited for that clone in Table 7. First, a plasmid is directly isolated by screening the clones using a polynucleotide probe corresponding to the nucleotide sequence of SEQ ID NO: X.

[0953] Particularly, a specific polynucleotide with 30-40 nucleotides is synthesized using an Applied Biosystems DNA synthesizer according to the sequence reported. The oligonucleotide is labeled, for instance, with ³²P-γ-ATP using T4 polynucleotide kinase and purified according to routine methods. (E.g., Maniatis et al., Molecular Cloning: A Laboratory Manual, Cold Spring Harbor Press, Cold Spring, N.Y. (1982).) The plasmid mixture is transformed into a suitable host, as indicated above (such as XL-1 Blue (Stratagene)) using techniques known to those of skill in the art, such as those provided by the vector supplier or in related publications or patents cited above. The transformants are plated on 1.5% agar plates (containing the appropriate selection agent, e.g., ampicillin) to a density of about 150 transformants (colonies) per plate. These plates are screened using Nylon membranes according to routine methods for bacterial colony screening (e.g., Sambrook et al., Molecular Cloning: A Laboratory Manual, 2nd Edit., (1989), Cold Spring Harbor Laboratory Press, pages 1.93 to 1.104), or other techniques known to those of skill in the art.

[0954] Alternatively, two primers of 17-20 nucleotides derived from both ends of the nucleotide sequence of SEQ ID NO: X are synthesized and used to amplify the desired cDNA using the deposited cDNA plasmid as a template. The polymerase chain reaction is carried out under routine conditions, for instance, in 25 μl of reaction mixture with 0.5 μg of the above cDNA template. A convenient reaction mixture is 1.5-5 mM MgCl₂, 0.01% (w/v) gelatin, 20 μM each of dATP, dCTP, dGTP, dTTP, 25 pmol of each primer and 0.25 Unit of Taq polymerase. Thirty five cycles of PCR (denaturation at 94° C. for 1 min; annealing at 55° C. for 1 min; elongation at 72° C. for 1 min) are performed with a Perkin-Elmer Cetus automated thermal cycler. The amplified product is analyzed by agarose gel electrophoresis and the DNA band with expected molecular weight is excised and purified. The PCR product is verified to be the selected sequence by subcloning and sequencing the DNA product.

[0955] Several methods are available for the identification of the 5′ or 3′ non-coding portions of a gene which may not be present in the deposited clone. These methods include but are not limited to, filter probing, clone enrichment using specific probes, and protocols similar or identical to 5′ and 3′ “RACE” protocols which are well known in the art. For instance, a method similar to 5′ RACE is available for generating the missing 5′ end of a desired full-length transcript. (Fromont-Racine et al., Nucleic Acids Res. 21(7):1683-1684 (1993).)

[0956] Briefly, a specific RNA oligonucleotide is ligated to the 5′ ends of a population of RNA presumably containing full-length gene RNA transcripts. A primer specific to the ligated RNA oligonucleotide and a primer specific to a known sequence of the gene of interest is used to PCR amplify the 5′ portion of the desired full-length gene. This amplified product may then be sequenced and used to generate the full length gene.

[0957] This above method starts with total RNA isolated from the desired source, although poly-A+ RNA can be used. The RNA preparation can then be treated with phosphatase if necessary to eliminate 5′ phosphate groups on degraded or damaged RNA which may interfere with the later RNA ligase step. The phosphatase should then be inactivated and the RNA treated with tobacco acid pyrophosphatase in order to remove the cap structure present at the 5′ ends of messenger RNAs. This reaction leaves a 5′ phosphate group at the 5′ end of the cap cleaved RNA which can then be ligated to an RNA oligonucleotide using T4 RNA ligase.

[0958] This modified RNA preparation is used as a template for first strand cDNA synthesis using a gene specific oligonucleotide. The first strand synthesis reaction is used as a template for PCR amplification of the desired 5′ end using a primer specific to the ligated RNA oligonucleotide and a primer specific to the known sequence of the gene of interest. The resultant product is then sequenced and analyzed to confirm that the 5′ end sequence belongs to the desired gene.

### Example 2

### Isolation of Genomic Clones Corresponding to a Polynucleotide

[0959] A human genomic P1 library (Genomic Systems, Inc.) is screened by PCR using primers selected for the sequence corresponding to SEQ ID NO: X according to the method described in Example 1. (See also, Sambrook et al., Molecular Cloning: A Laboratory Manual, 2nd Edn., (1989), Cold Spring Harbor Laboratory Press).

### Example 3

### Tissue Specific Expression Analysis

[0960] The Human Genome Sciences, Inc. (HGS) database is derived from sequencing tissue and/or disease specific cDNA libraries. Libraries generated from a particular tissue are selected and the specific tissue expression pattern of EST groups or assembled contigs within these libraries is determined by comparison of the expression patterns of those groups or contigs within the entire database. ESTs and assembled contigs which show tissue specific expression are selected.

[0961] The original clone from which the specific EST sequence was generated, or in the case of an assembled contig, the clone from which the 5′ most EST sequence was generated, is obtained from the catalogued library of clones and the insert amplified by PCR using methods known in the art. The PCR product is denatured and then transferred in 96 or 384 well format to a nylon membrane (Schleicher and Scheull) generating an array filter of tissue specific clones. Housekeeping genes, maize genes, and known tissue specific genes are included on the filters. These targets can be used in signal normalization and to validate assay sensitivity. Additional targets are included to monitor probe length and specificity of hybridization.

[0962] Radioactively labeled hybridization probes are generated by first strand cDNA synthesis per the manufacturer's instructions (Life Technologies) from mRNA/RNA samples prepared from the specific tissue being analyzed (e.g., reproductive system, cancers of the reproductive system, or, more specifically, prostate, prostate cancer, ovarian, ovarian cancer, etc.). The hybridization probes are purified by gel exclusion chromatography, quantitated, and hybridized with the array filters in hybridization bottles at 65° C. overnight. The filters are washed under stringent conditions and signals are captured using a Fuji phosphorimager.

[0963] Data is extracted using AIS software and following background subtraction, signal normalization is performed. This includes a normalization of filter-wide expression levels between different experimental runs. Genes that are differentially expressed in the tissue of interest are identified.

### Example 4

### Chromosomal Mapping of the Polynucleotides

[0964] An oligonucleotide primer set is designed according to the sequence at the 5′ end of SEQ ID NO: X. This primer preferably spans about 100 nucleotides. This primer set is then used in a polymerase chain reaction under the following set of conditions: 30 seconds, 95° C.; 1 minute, 56° C.; 1 minute, 70° C. This cycle is repeated 32 times followed by one 5 minute cycle at 70° C. Human, mouse, and hamster DNA is used as template in addition to a somatic cell hybrid panel containing individual chromosomes or chromosome fragments (Bios, Inc). The reactions are analyzed on either 8% polyacrylamide gels or 3.5% agarose gels. Chromosome mapping is determined by the presence of an approximately 100 bp PCR fragment in the particular somatic cell hybrid.

### Example 5

### Bacterial Expression of a Polypeptide

[0965] A polynucleotide encoding a polypeptide of the present invention is amplified using PCR oligonucleotide primers corresponding to the 5′ and 3′ ends of the DNA sequence, as outlined in Example 1, to synthesize insertion fragments. The primers used to amplify the cDNA insert should preferably contain restriction sites, such as BamHI and XbaI, at the 5′ end of the primers in order to clone the amplified product into the expression vector. For example, BamHI and XbaI correspond to the restriction enzyme sites on the bacterial expression vector pQE-9. (Qiagen, Inc., Chatsworth, Calif.). This plasmid vector encodes antibiotic resistance (Amp^{r}), a bacterial origin of replication (ori), an IPTG-regulatable promoter/operator (P/O), a ribosome binding site (RBS), a 6-histidine tag (6-His), and restriction enzyme cloning sites.

[0966] The pQE-9 vector is digested with BamHI and XbaI and the amplified fragment is ligated into the pQE-9 vector maintaining the reading frame initiated at the bacterial RBS. The ligation mixture is then used to transform the E. coli strain M15/rep4 (Qiagen, Inc.) which contains multiple copies of the plasmid pREP4, which expresses the lacI repressor and also confers kanamycin resistance (Kanr). Transformants are identified by their ability to grow on LB plates and ampicillin/kanamycin resistant colonies are selected. Plasmid DNA is isolated and confirmed by restriction analysis.

[0967] Clones containing the desired constructs are grown overnight (O/N) in liquid culture in LB media supplemented with both Amp (100 ug/ml) and Kan (25 ug/ml). The O/N culture is used to inoculate a large culture at a ratio of 1:100 to 1:250. The cells are grown to an optical density 600 (O.D.⁶⁰⁰) of between 0.4 and 0.6. IPTG (Isopropyl-B-D-thiogalacto pyranoside) is then added to a final concentration of 1 mM. IPTG induces by inactivating the lacI repressor, clearing the P/O leading to increased gene expression.

[0968] Cells are grown for an extra 3 to 4 hours. Cells are then harvested by centrifugation (20 mins at 6000×g). The cell pellet is solubilized in the chaotropic agent 6 Molar Guanidine HCl by stirring for 3-4 hours at 4° C. The cell debris is removed by centrifugation, and the supernatant containing the polypeptide is loaded onto a nickel-nitrilo-tri-acetic acid (“Ni-NTA”) affinity resin column (available from QIAGEN, Inc., supra). Proteins with a 6×His tag bind to the Ni-NTA resin with high affinity and can be purified in a simple one-step procedure (for details see: The QIAexpressionist (1995) QIAGEN, Inc., supra).

[0969] Briefly, the supernatant is loaded onto the column in 6 M guanidine-HCl, pH 8. The column is first washed with 10 volumes of 6 M guanidine-HCl, pH 8, then washed with 10 volumes of 6 M guanidine-HCl pH 6, and finally the polypeptide is eluted with 6 M guanidine-HCl, pH 5.

[0970] The purified protein is then renatured by dialyzing it against phosphate-buffered saline (PBS) or 50 mM Na-acetate, pH 6 buffer plus 200 mM NaCl. Alternatively, the protein can be successfully refolded while immobilized on the Ni-NTA column. The recommended conditions are as follows: renature using a linear 6M-1M urea gradient in 500 mM NaCl, 20% glycerol, 20 mM Tris/HCl pH 7.4, containing protease inhibitors. The renaturation should be performed over a period of 1.5 hours or more. After renaturation the proteins are eluted by the addition of 250 mM immidazole. Immidazole is removed by a final dialyzing step against PBS or 50 mM sodium acetate pH 6 buffer plus 200 mM NaCl. The purified protein is stored at 4° C. or frozen at -80° C.

[0971] In addition to the above expression vector, the present invention further includes an expression vector, called pHE4a (ATCC Accession Number 209645, deposited on Feb. 25, 1998) which contains phage operator and promoter elements operatively linked to a polynucleotide of the present invention. This vector contains: 1) a neomycinphosphotransferase gene as a selection marker, 2) an E. coli origin of replication, 3) a T5 phage promoter sequence, 4) two lac operator sequences, 5) a Shine-Delgamo sequence, and 6) the lactose operon repressor gene (lacIq). The origin of replication (oriC) is derived from pUC19 (LTI, Gaithersburg, Md.). The promoter and operator sequences are made synthetically.

[0972] DNA can be inserted into the pHE4a by restricting the vector with NdeI and XbaI, BamHI, XhoI, or Asp718, running the restricted product on a gel, and isolating the larger fragment (the stuffer fragment should be about 310 base pairs). The DNA insert is generated according to the PCR protocol described in Example 1, using PCR primers having restriction sites for NdeI (5′ primer) and XbaI, BamHI, XhoI, or Asp718 (3′ primer). The PCR insert is gel purified and restricted with compatible enzymes. The insert and vector are ligated according to standard protocols.

[0973] The engineered vector could easily be substituted in the above protocol to express protein in a bacterial system.

### Example 6

### Purification of a Polypeptide from an Inclusion Body

[0974] The following alternative method can be used to purify a polypeptide expressed in E coli when it is present in the form of inclusion bodies. Unless otherwise specified, all of the following steps are conducted at 4-10° C.

[0975] Upon completion of the production phase of the E. Coli fermentation, the cell culture is cooled to 4-10° C. and the cells harvested by continuous centrifugation at 15,000 rpm (Heraeus Sepatech). On the basis of the expected yield of protein per unit weight of cell paste and the amount of purified protein required, an appropriate amount of cell paste, by weight, is suspended in a buffer solution containing 100 mM Tris, 50 mM EDTA, pH 7.4. The cells are dispersed to a homogeneous suspension using a high shear mixer.

[0976] The cells are then lysed by passing the solution through a microfluidizer (Microfuidics, Corp. or APV Gaulin, Inc.) twice at 4000-6000 psi. The homogenate is then mixed with NaCl solution to a final concentration of 0.5 M NaCl, followed by centrifugation at 7000×g for 15 min. The resultant pellet is washed again using 0.5M NaCl, 100 mM Tris, 50 mM EDTA, pH 7.4.

[0977] The resulting washed inclusion bodies are solubilized with 1.5 M guanidine hydrochloride (GuHCl) for 2-4 hours. After 7000×g centrifugation for 15 min., the pellet is discarded and the polypeptide containing supernatant is incubated at 4° C. overnight to allow further GuHCl extraction.

[0978] Following high speed centrifugation (30,000×g) to remove insoluble particles, the GuHCl solubilized protein is refolded by quickly mixing the GuHCl extract with 20 volumes of buffer containing 50 mM sodium, pH 4.5, 150 mM NaCl, 2 mM EDTA by vigorous stirring. The refolded diluted protein solution is kept at 4° C. without mixing for 12 hours prior to further purification steps.

[0979] To clarify the refolded polypeptide solution, a previously prepared tangential filtration unit equipped with 0.16 μm membrane filter with appropriate surface area (e.g., Filtron), equilibrated with 40 mM sodium acetate, pH 6.0 is employed. The filtered sample is loaded onto a cation exchange resin (e.g., Poros HS-50, Perseptive Biosystems). The column is washed with 40 mM sodium acetate, pH 6.0 and eluted with 250 mM, 500 mM, 1000 mM, and 1500 mM NaCl in the same buffer, in a stepwise manner. The absorbance at 280 nm of the effluent is continuously monitored. Fractions are collected and further analyzed by SDS-PAGE.

[0980] Fractions containing the polypeptide are then pooled and mixed with 4 volumes of water. The diluted sample is then loaded onto a previously prepared set of tandem columns of strong anion (Poros HQ-50, Perseptive Biosystems) and weak anion (Poros CM-20, Perseptive Biosystems) exchange resins. The columns are equilibrated with 40 mM sodium acetate, pH 6.0. Both columns are washed with 40 mM sodium acetate, pH 6.0, 200 mM NaCl. The CM-20 column is then eluted using a 10 column volume linear gradient ranging from 0.2 M NaCl, 50 mM sodium acetate, pH 6.0 to 1.0 M NaCl, 50 mM sodium acetate, pH 6.5. Fractions are collected under constant A₂₈₀ monitoring of the effluent. Fractions containing the polypeptide (determined, for instance, by 16% SDS-PAGE) are then pooled.

[0981] The resultant polypeptide should exhibit greater than 95% purity after the above refolding and purification steps. No major contaminant bands should be observed from Commassie blue stained 16% SDS-PAGE gel when 5 μg of purified protein is loaded. The purified protein can also be tested for endotoxin/LPS contamination, and typically the LPS content is less than 0.1 ng/ml according to LAL assays.

### Example 7

### Cloning and Expression of a Polypeptide in a Baculovirus Expression System

[0982] In this example, the plasmid shuttle vector pA2 is used to insert a polynucleotide into a baculovirus to express a polypeptide. This expression vector contains the strong polyhedrin promoter of the Autographa californica nuclear polyhedrosis virus (AcMNPV) followed by convenient restriction sites such as BamHI, Xba I and Asp718. The polyadenylation site of the simian virus 40 (“SV40”) is used for efficient polyadenylation. For easy selection of recombinant virus, the plasmid contains the beta-galactosidase gene from E. coli under control of a weak Drosophila promoter in the same orientation, followed by the polyadenylation signal of the polyhedrin gene. The inserted genes are flanked on both sides by viral sequences for cell-mediated homologous recombination with wild-type viral DNA to generate a viable virus that express the cloned polynucleotide.

[0983] Many other baculovirus vectors can be used in place of the vector above, such as pAc373, pVL941, and pAcIM1, as one skilled in the art would readily appreciate, as long as the construct provides appropriately located signals for transcription, translation, secretion and the like, including a signal peptide and an in-frame AUG as required. Such vectors are described, for instance, in Luckow et al., Virology 170:31-39 (1989).

[0984] Specifically, the cDNA sequence contained in the deposited clone, including the AUG initiation codon, is amplified using the PCR protocol described in Example 1. If a naturally occurring signal sequence is used to produce the polypeptide of the present invention, the pA2 vector does not need a second signal peptide. Alternatively, the vector can be modified (pA2 GP) to include a baculovirus leader sequence, using the standard methods described in Summers et al., “A Manual of Methods for Baculovirus Vectors and Insect Cell Culture Procedures,” Texas Agricultural Experimental Station Bulletin No. 1555 (1987).

[0985] The amplified fragment is isolated from a 1% agarose gel using a commercially available kit (“Geneclean,” BIO 101 Inc., La Jolla, Calif.). The fragment then is digested with appropriate restriction enzymes and again purified on a 1% agarose gel.

[0986] The plasmid is digested with the corresponding restriction enzymes and optionally, can be dephosphorylated using calf intestinal phosphatase, using routine procedures known in the art. The DNA is then isolated from a 1% agarose gel using a commercially available kit (“Geneclean” BIO 101 Inc., La Jolla, Calif.).

[0987] The fragment and the dephosphorylated plasmid are ligated together with T4 DNA ligase. E. coli HB101 or other suitable E. coli hosts such as XL-1 Blue (Stratagene Cloning Systems, La Jolla, Calif.) cells are transformed with the ligation mixture and spread on culture plates. Bacteria containing the plasmid are identified by digesting DNA from individual colonies and analyzing the digestion product by gel electrophoresis. The sequence of the cloned fragment is confirmed by DNA sequencing.

[0988] Five μg of a plasmid containing the polynucleotide is co-transfected with 1.0 μg of a commercially available linearized baculovirus DNA (“BaculoGold™ baculovirus DNA”, Pharmingen, San Diego, Calif.), using the lipofection method described by Felgner et al., Proc. Natl. Acad. Sci. USA 84:7413-7417 (1987). One μg of BaculoGold™ virus DNA and 5 μg of the plasmid are mixed in a sterile well of a microtiter plate containing 50 μl of serum-free Grace's medium (Life Technologies Inc., Gaithersburg, Md.). Afterwards, 10 μl Lipofectin plus 90 μl Grace's medium are added, mixed and incubated for 15 minutes at room temperature. Then the transfection mixture is added drop-wise to Sf9 insect cells (ATCC CRL 1711) seeded in a 35 mm tissue culture plate with 1 ml Grace's medium without serum. The plate is then incubated for 5 hours at 27° C. The transfection solution is then removed from the plate and 1 ml of Grace's insect medium supplemented with 10% fetal calf serum is added. Cultivation is then continued at 27° C. for four days.

[0989] After four days the supernatant is collected and a plaque assay is performed, as described by Summers and Smith, supra. An agarose gel with “Blue Gal” (Life Technologies Inc., Gaithersburg) is used to allow easy identification and isolation of gal-expressing clones, which produce blue-stained plaques. (A detailed description of a “plaque assay” of this type can also be found in the user's guide for insect cell culture and baculovirology distributed by Life Technologies Inc., Gaithersburg, page 9-10.) After appropriate incubation, blue stained plaques are picked with the tip of a micropipettor (e.g., Eppendorf). The agar containing the recombinant viruses is then resuspended in a microcentrifuge tube containing 200 μl of Grace's medium and the suspension containing the recombinant baculovirus is used to infect Sf9 cells seeded in 35 mm dishes. Four days later the supernatants of these culture dishes are harvested and then they are stored at 4° C.

[0990] To verify the expression of the polypeptide, Sf9 cells are grown in Grace's medium supplemented with 10% heat-inactivated FBS. The cells are infected with the recombinant baculovirus containing the polynucleotide at a multiplicity of infection (“MOI”) of about 2. If radiolabeled proteins are desired, 6 hours later the medium is removed and is replaced with SF900 II medium minus methionine and cysteine (available from Life Technologies Inc., Rockville, Md.). After 42 hours, 5 μCi of ³⁵S-methionine and 5 μCi ³⁵S-cysteine (available from Amersham) are added. The cells are further incubated for 16 hours and then are harvested by centrifugation. The proteins in the supernatant as well as the intracellular proteins are analyzed by SDS-PAGE followed by autoradiography (if radiolabeled).

[0991] Microsequencing of the amino acid sequence of the amino terminus of purified protein may be used to determine the amino terminal sequence of the produced protein.

### Example 8

### Expression of a Polypeptide in Mammalian Cells

[0992] The polypeptide of the present invention can be expressed in a mammalian cell. A typical mammalian expression vector contains a promoter element, which mediates the initiation of transcription of MRNA, a protein coding sequence, and signals required for the termination of transcription and polyadenylation of the transcript. Additional elements include enhancers, Kozak sequences and intervening sequences flanked by donor and acceptor sites for RNA splicing. Highly efficient transcription is achieved with the early and late promoters from SV40, the long terminal repeats (LTRs) from Retroviruses, e.g., RSV, HTLVI, HIVI and the early promoter of the cytomegalovirus (CMV). However, cellular elements can also be used (e.g., the human actin promoter).

[0993] Suitable expression vectors for use in practicing the present invention include, for example, vectors such as pSVL and pMSG (Pharmacia, Uppsala, Sweden), pRSVcat (ATCC 37152), pSV2dhfr (ATCC 37146), pBC12MI (ATCC 67109), pCMVSport 2.0, and pCMVSport 3.0. Mammalian host cells that could be used include, human Hela, 293, H9 and Jurkat cells, mouse NIH3T3 and C127 cells, Cos 1, Cos 7 and CVI, quail QC1-3 cells, mouse L cells and Chinese hamster ovary (CHO) cells.

[0994] Alternatively, the polypeptide can be expressed in stable cell lines containing the polynucleotide integrated into a chromosome. The co-transfection with a selectable marker such as DHFR, gpt, neomycin, or hygromycin allows the identification and isolation of the transfected cells.

[0995] The transfected gene can also be amplified to express large amounts of the encoded protein. The DHFR (dihydrofolate reductase) marker is useful in developing cell lines that carry several hundred or even several thousand copies of the gene of interest. (See, e.g., Alt, F. W., et al., J. Biol. Chem. 253:1357-1370 (1978); Hamlin, J. L. and Ma, C., Biochem. et Biophys. Acta, 1097:107-143 (1990); Page, M. J. and Sydenham, M. A., Biotechnology 9:64-68 (1991).) Another useful selection marker is the enzyme glutamine synthase (GS) (Murphy et al., Biochem J. 227:277-279 (1991); Bebbington et al., Bio/Technology 10:169-175 (1992). Using these markers, the mammalian cells are grown in selective medium and the cells with the highest resistance are selected. These cell lines contain the amplified gene(s) integrated into a chromosome. Chinese hamster ovary (CHO) and NSO cells are often used for the production of proteins.

[0996] Derivatives of the plasmid pSV2-dhfr (ATCC Accession No. 37146), the expression vectors pC4 (ATCC Accession No. 209646) and pC6 (ATCC Accession No.209647) contain the strong promoter (LTR) of the Rous Sarcoma Virus (Cullen et al., Molecular and Cellular Biology, 438-447 (March, 1985)) plus a fragment of the CMV-enhancer (Boshart et al., Cell 41:521-530 (1985).) Multiple cloning sites, e.g., with the restriction enzyme cleavage sites BamHI, XbaI and Asp718, facilitate the cloning of the gene of interest. The vectors also contain the 3′ intron, the polyadenylation and termination signal of the rat preproinsulin gene, and the mouse DHFR gene under control of the SV40 early promoter.

[0997] Specifically, the plasmid pC6, for example, is digested with appropriate restriction enzymes and then dephosphorylated using calf intestinal phosphates by procedures known in the art. The vector is then isolated from a 1% agarose gel.

[0998] A polynucleotide of the present invention is amplified according to the protocol outlined in Example 1. If a naturally occurring signal sequence is used to produce the polypeptide of the present invention, the vector does not need a second signal peptide. Alternatively, if a naturally occurring signal sequence is not used, the vector can be modified to include a heterologous signal sequence. (See, e.g., International Publication No. WO 96/34891.)

[0999] The amplified fragment is isolated from a 1% agarose gel using a commercially available kit (“Geneclean,” BIO 101 Inc., La Jolla, Calif.). The fragment then is digested with appropriate restriction enzymes and again purified on a 1% agarose gel.

[1000] The amplified fragment is then digested with the same restriction enzyme and purified on a 1% agarose gel. The isolated fragment and the dephosphorylated vector are then ligated with T4 DNA ligase. E. Coli HB11 or XL-1 Blue cells are then transformed and bacteria are identified that contain the fragment inserted into plasmid pC6 using, for instance, restriction enzyme analysis.

[1001] Chinese hamster ovary cells lacking an active DHFR gene is used for transfection. Five μg of the expression plasmid pC6 or pC4 is cotransfected with 0.5 μg of the plasmid pSVneo using lipofectin (Felgner et al., supra). The plasmid pSV2-neo contains a dominant selectable marker, the neo gene from Tn5 encoding an enzyme that confers resistance to a group of antibiotics including G418. The cells are seeded in alpha minus MEM supplemented with 1 mg/ml G418. After 2 days, the cells are trypsinized and seeded in hybridoma cloning plates (Greiner, Germany) in alpha minus MEM supplemented with 10, 25, or 50 ng/ml of methotrexate plus 1 mg/ml G418. After about 10-14 days single clones are trypsinized and then seeded in 6-well petri dishes or 10 ml flasks using different concentrations of methotrexate (50 nM, 100 nM, 200 nM, 400 nM, 800 nM). Clones growing at the highest concentrations of methotrexate are then transferred to new 6-well plates containing even higher concentrations of methotrexate (1 μM, 2 μM, 5 μM, 10 mM, 20 mM). The same procedure is repeated until clones are obtained which grow at a concentration of 100-200 μM. Expression of the desired gene product is analyzed, for instance, by SDS-PAGE and Western blot or by reversed phase HPLC analysis.

### Example 9

### Protein Fusions

[1002] The polypeptides of the present invention are preferably fused to other proteins. These fusion proteins can be used for a variety of applications. For example, fusion of the present polypeptides to His-tag, HA-tag, protein A, IgG domains, and maltose binding protein facilitates purification. (See Example 5; see also EP A 394,827; Traunecker, et al., Nature 331:84-86 (1988).) Similarly, fusion to IgG-1, IgG-3, and albumin increases the halflife time in vivo. Nuclear localization signals fused to the polypeptides of the present invention can target the protein to a specific subcellular localization, while covalent heterodimer or homodimers can increase or decrease the activity of a fusion protein. Fusion proteins can also create chimeric molecules having more than one function. Finally, fusion proteins can increase solubility and/or stability of the fused protein compared to the non-fused protein. All of the types of fusion proteins described above can be made by modifying the following protocol, which outlines the fusion of a polypeptide to an IgG molecule, or the protocol described in Example 5.

[1003] Briefly, the human Fc portion of the IgG molecule can be PCR amplified, using primers that span the 5′ and 3′ ends of the sequence described below. These primers also should have convenient restriction enzyme sites that will facilitate cloning into an expression vector, preferably a mammalian expression vector.

[1004] For example, if pC4 (ATCC Accession No. 209646) is used, the human Fc portion can be ligated into the BamHI cloning site. Note that the 3′ BamHI site should be destroyed. Next, the vector containing the human Fc portion is re-restricted with BamHl, linearizing the vector, and a polynucleotide of the present invention, isolated by the PCR protocol described in Example 1, is ligated into this BamHI site. Note that the polynucleotide is cloned without a stop codon, otherwise a fusion protein will not be produced.

[1005] If the naturally occurring signal sequence is used to produce the polypeptide of the present invention, pC4 does not need a second signal peptide. Alternatively, if the naturally occurring signal sequence is not used, the vector can be modified to include a heterologous signal sequence. (See, e.g., International Publication No. WO 96/34891.)

| | |
|---|---|
| GGGATCCGGAGCCCAAATCTTCTGACAAAACTCACAC | (SEQ ID NO:1) |
| ATGCCCACCGTGCCCAGCACCTGAATTCGAGGGTGCA | |
| CCGTCAGTCTTCCTCTTCCCCCCAAAACCCAAGGACA | |
| CCCTCATGATCTCCCGGACTCCTGAGGTCACATGCGT | |
| GGTGGTGGACGTAAGCCACGAAGACCCTGAGGTCAAG | |
| TTCAACTGGTACGTGGACGGCGTGGAGGTGCATAATG | |
| CCAAGACAAAGCCGCGGGAGGAGCAGTACAACAGCAC | |
| GTACCGTGTGGTCAGCGTCCTCACCGTCCTGCACCAG | |
| GACTGGCTGAATGGCAAGGAGTACAAGTGCAAGGTCT | |
| CCAACAAAGCCCTCCCAACCCCCATCGAGAAAACCAT | |
| CTCCAAAGCCAAAGGGCAGCCCCGAGAACCACAGGTG | |
| TACACCCTGCCCCCATCCCGGGATGAGCTGACCAAGA | |
| ACCAGGTCAGCCTGACCTGCCTGGTCAAAGGCTTCTA | |
| TCCAAGCGACATCGCCGTGGAGTGGGAGAGCAATGGG | |
| CAGCCGGAGAACAACTACAAGACCACGCCTCCCGTGC | |
| TGGACTCCGACGGCTCCTTCTTCCTCTACAGCAAGCT | |
| CACCGTGGACAAGAGCAGGTGGCAGCAGGGGAACGTC | |
| TTCTCATGCTCCGTGATGCATGAGGCTCTGCACAACC | |
| ACTACACGCAGAAGAGCCTCTCCCTGTCTCCGGGTAA | |
| ATGAGTGCGACGGCCGCGACTCTAGAGGAT | |

### Example 10

### Production of an Antibody from a Polypeptide

[1006] Hybridoma Technology

[1007] The antibodies of the present invention can be prepared by a variety of methods. (See, Current Protocols, Chapter 2.) As one example of such methods, cells expressing polypeptide of the present invention are administered to an animal to induce the production of sera containing polyclonal antibodies. In a preferred method, a preparation of polypeptide of the present invention is prepared and purified to render it substantially free of natural contaminants. Such a preparation is then introduced into an animal in order to produce polyclonal antisera of greater specific activity.

[1008] Monoclonal antibodies specific for polypeptide of the present invention are prepared using hybridoma technology (Kohler et al., Nature 256:495 (1975); Kohler et al., Eur. J. Immunol. 6:511 (1976); Kohler et al., Eur. J. Inmunol. 6:292 (1976); Hammerling et al., in: Monoclonal Antibodies and T-Cell Hybridomas, Elsevier, N.Y., pp. 563-681 (1981)). In general, an animal (preferably a mouse) is immunized with polypeptide of the present invention or, more preferably, with a secreted polypeptide of the present invention-expressing cell. Such polypeptide-expressing cells are cultured in any suitable tissue culture medium, preferably in Earle's modified Eagle's medium supplemented with 10% fetal bovine serum (inactivated at about 56° C.), and supplemented with about 10 g/l of nonessential amino acids, about 1,000 U/ml of penicillin, and about 100 μg/ml of streptomycin.

[1009] The splenocytes of such mice are extracted and fused with a suitable myeloma cell line. Any suitable myeloma cell line may be employed in accordance with the present invention; however, it is preferable to employ the parent myeloma cell line (SP2O), available from the ATCC. After fusion, the resulting hybridoma cells are selectively maintained in HAT medium, and then cloned by limiting dilution as described by Wands et al. (Gastroenterology 80:225-232 (1981)). The hybridoma cells obtained through such a selection are then assayed to identify clones which secrete antibodies capable of binding the polypeptide of the present invention.

[1010] Alternatively, additional antibodies capable of binding to polypeptide of the present invention can be produced in a two-step procedure using anti-idiotypic antibodies. Such a method makes use of the fact that antibodies are themselves antigens, and therefore, it is possible to obtain an antibody which binds to a second antibody. In accordance with this method, protein specific antibodies are used to immunize an animal, preferably a mouse. The splenocytes of such an animal are then used to produce hybridoma cells, and the hybridoma cells are screened to identify clones which produce an antibody whose ability to bind to the polypeptide of the present invention-specific antibody can be blocked by polypeptide of the present invention. Such antibodies comprise anti-idiotypic antibodies to the polypeptide of the present invention-specific antibody and are used to immunize an animal to induce formation of further polypeptide of the present invention-specific antibodies.

[1011] For in vivo use of antibodies in humans, an antibody is “humanized”. Such antibodies can be produced using genetic constructs derived from hybridoma cells producing the monoclonal antibodies described above. Methods for producing chimeric and humanized antibodies are known in the art and are discussed herein. (See, for review, Morrison, Science 229:1202 (1985); Oi et al., BioTechniques 4:214 (1986); Cabilly et al., U.S. Pat. No. 4,816,567; Taniguchi et al., EP 171496;

[1012] Morrison et al., EP 173494; Neuberger et al., WO 8601533; Robinson et al., International Publication No. WO 8702671; Boulianne et al., Nature 312:643 (1984);

[1013] Neuberger et al., Nature 314:268 (1985).)

[1014] Isolation Of Antibody Fragments Directed Against Polypeptide of the Present Invention From A Library Of scFvs

[1015] Naturally occurring V-genes isolated from human PBLs are constructed into a library of antibody fragments which contain reactivities against polypeptide of the present invention to which the donor may or may not have been exposed (see e.g., U.S. Pat. No. 5,885,793 incorporated herein by reference in its entirety).

[1016] Rescue of the Library. A library of scFvs is constructed from the RNA of human PBLs as described in International Publication No. WO 92/01047. To rescue phage displaying antibody fragments, approximately 109 E. coli harboring the phagemid are used to inoculate 50 ml of 2×TY containing 1% glucose and 100 μg/ml of ampicillin (2×TY-AMP-GLU) and grown to an O.D. of 0.8 with shaking. Five ml of this culture is used to inoculate 50 ml of 2×TY-AMP-GLU, 2×108 TU of delta gene 3 helper (M13 delta gene III, see International Publication No. WO 92/01047) are added and the culture incubated at 37° C. for 45 minutes without shaking and then at 37° C. for 45 minutes with shaking. The culture is centrifuged at 4000 r.p.m. for 10 min. and the pellet resuspended in 2 liters of 2×TY containing 100 μg/ml ampicillin and 50 ug/ml kanamycin and grown overnight. Phage are prepared as described in International Application No. WO 92/01047.

[1017] M13 delta gene III is prepared as follows: M13 delta gene III helper phage does not encode gene III protein, hence the phage(mid) displaying antibody fragments have a greater avidity of binding to antigen. Infectious M13 delta gene III particles are made by growing the helper phage in cells harboring a pUC19 derivative supplying the wild type gene III protein during phage morphogenesis. The culture is incubated for 1 hour at 37° C. without shaking and then for a further hour at 37° C. with shaking. Cells are spun down (IEC-Centra 8,400 r.p.m. for 10 min), resuspended in 300 ml 2×TY broth containing 100 μg ampicillin/ml and 25 μg kanamycin/ml (2×TY-AMP-KAN) and grown overnight, shaking at 37° C. Phage particles are purified and concentrated from the culture medium by two PEG-precipitations (Sambrook et al., 1990), resuspended in 2 ml PBS and passed through a 0.45 μm filter (Minisart NML;

[1018] Sartorius) to give a final concentration of approximately 10¹³ transducing units/ml (ampicillin-resistant clones).

[1019] Panning of the Library. Immunotubes (Nunc) are coated overnight in PBS with 4 ml of either 100 μg/ml or 10 μg/ml of a polypeptide of the present invention.

[1020] Tubes are blocked with 2% Marvel-PBS for 2 hours at 37° C. and then washed 3 times in PBS. Approximately 10¹³ TU of phage is applied to the tube and incubated for 30 minutes at room temperature tumbling on an over and under turntable and then left to stand for another 1.5 hours. Tubes are washed 10 times with PBS 0.1% Tween-20 and 10 times with PBS. Phage are eluted by adding 1 ml of 100 mM triethylamine and rotating 15 minutes on an under and over turntable after which the solution is immediately neutralized with 0.5 ml of 1.0M Tris-HCl, pH 7.4. Phage are then used to infect 10 ml of mid-log E. coli TG1 by incubating eluted phage with bacteria for 30 minutes at 37° C. The E. coli are then plated on TYE plates containing 1% glucose and 100 μg/ml ampicillin. The resulting bacterial library is then rescued with delta gene 3 helper phage as described above to prepare phage for a subsequent round of selection. This process is then repeated for a total of 4 rounds of affinity purification with tube-washing increased to 20 times with PBS, 0.1% Tween-20 and 20 times with PBS for rounds 3 and 4.

[1021] Characterization of Binders. Eluted phage from the 3rd and 4th rounds of selection are used to infect E. coli HB 2151 and soluble scFv is produced (Marks, et al., 1991) from single colonies for assay. ELISAs are performed with microtitre plates coated with 10 pg/ml of the polypeptide of the present invention in 50 mM bicarbonate pH 9.6. Clones positive in ELISA are further characterized by PCR fingerprinting (see, e.g., International Application No. WO 92/01047) and then by sequencing. These ELISA positive clones may also be further characterized by techniques known in the art, such as, for example, epitope mapping, binding affinity, receptor signal transduction, ability to block or competitively inhibit antibody/antigen binding, and competitive agonistic or antagonistic activity.

### Example 11

### Method of Determining Alterations in a Gene Corresponding to a Polynucleotide

[1022] RNA isolated from entire families or individual patients presenting with a phenotype of interest (such as a disease) is isolated. cDNA is then generated from these RNA samples using protocols known in the art. (See, Sambrook.) The cDNA is then used as a template for PCR, employing primers surrounding regions of interest in SEQ ID NO: X; and/or the nucleotide sequence of the cDNA contained in Clone ID NO: Z. Suggested PCR conditions consist of 35 cycles at 95 degrees C. for 30 seconds; 60-120 seconds at 52-58 degrees C.; and 60-120 seconds at 70 degrees C., using buffer solutions described in Sidransky et al., Science 252:706 (1991).

[1023] PCR products are then sequenced using primers labeled at their 5′ end with T4 polynucleotide kinase, employing SequiTherm Polymerase (Epicentre Technologies). The intron-exon boundaries of selected exons is also determined and genomic PCR products analyzed to confirm the results. PCR products harboring suspected mutations are then cloned and sequenced to validate the results of the direct sequencing.

[1024] PCR products are cloned into T-tailed vectors as described in Holton et al., Nucleic Acids Research, 19:1156 (1991) and sequenced with T7 polymerase (United States Biochemical). Affected individuals are identified by mutations not present in unaffected individuals.

[1025] Genomic rearrangements are also observed as a method of determining alterations in a gene corresponding to a polynucleotide. Genomic clones isolated according to Example 2 are nick-translated with digoxigenindeoxy-uridine 5′-triphosphate (Boehringer Manheim), and FISH performed as described in Johnson et al., Methods Cell Biol. 35:73-99 (1991). Hybridization with the labeled probe is carried out using a vast excess of human cot-i DNA for specific hybridization to the corresponding genomic locus.

[1026] Chromosomes are counterstained with 4,6-diamino-2-phenylidole and propidium iodide, producing a combination of C- and R-bands. Aligned images for precise mapping are obtained using a triple-band filter set (Chroma Technology, Brattleboro, Vt.) in combination with a cooled charge-coupled device camera (Photometrics, Tucson, Ariz.) and variable excitation wavelength filters. (Johnson et al., Genet. Anal. Tech. Appl., 8:75 (1991).) Image collection, analysis and chromosomal fractional length measurements are performed using the ISee Graphical Program System. (Inovision Corporation, Durham, N.C.) Chromosome alterations of the genomic region hybridized by the probe are identified as insertions, deletions, and translocations. These alterations are used as a diagnostic marker for an associated disease.

### Example 12

### Method of Detecting Abnormal Levels of a Polypeptide in a Biological Sample

[1027] A polypeptide of the present invention can be detected in a biological sample, and if an increased or decreased level of the polypeptide is detected, this polypeptide is a marker for a particular phenotype. Methods of detection are numerous, and thus, it is understood that one skilled in the art can modify the following assay to fit their particular needs.

[1028] For example, antibody-sandwich ELISAs are used to detect polypeptides in a sample, preferably a biological sample. Wells of a microtiter plate are coated with specific antibodies, at a final concentration of 0.2 to 10 ug/ml. The antibodies are either monoclonal or polyclonal and are produced by the method described in Example 10. The wells are blocked so that non-specific binding of the polypeptide to the well is reduced.

[1029] The coated wells are then incubated for >2 hours at RT with a sample containing the polypeptide. Preferably, serial dilutions of the sample should be used to validate results. The plates are then washed three times with deionized or distilled water to remove unbound polypeptide.

[1030] Next, 50 ul of specific antibody-alkaline phosphatase conjugate, at a concentration of 25-400 ng, is added and incubated for 2 hours at room temperature. The plates are again washed three times with deionized or distilled water to remove unbound conjugate.

[1031] Add 75 ul of 4-methylumbelliferyl phosphate (MUP) or p-nitrophenyl phosphate (NPP) substrate solution to each well and incubate 1 hour at room temperature. Measure the reaction by a microtiter plate reader. Prepare a standard curve, using serial dilutions of a control sample, and plot polypeptide concentration on the X-axis (log scale) and fluorescence or absorbance of the Y-axis (linear scale). Interpolate the concentration of the polypeptide in the sample using the standard curve.

### Example 13

### Formulation

[1032] The invention also provides methods of treatment and/or prevention of diseases or disorders (such as, for example, any one or more of the diseases or disorders disclosed herein) by administration to a subject of an effective amount of a Therapeutic. By “Therapeutic” is meant polynucleotides or polypeptides of the invention (including fragments, analogs, derivatives and variants thereof), agonists or antagonists thereof, and/or antibodies thereto (including fragments thereof), in combination with a pharmaceutically acceptable carrier type (e.g., a sterile carrier).

[1033] The Therapeutic will be formulated and dosed in a fashion consistent with good medical practice, taking into account the clinical condition of the individual patient (especially the side effects of treatment with the Therapeutic alone), the site of delivery, the method of administration, the scheduling of administration, and other factors known to practitioners. The “effective amount” for purposes herein is thus determined by such considerations.

[1034] As a general proposition, the total pharmaceutically effective amount of the Therapeutic administered parenterally per dose will be in the range of about 1 ug/kg/day to 10 mg/kg/day of patient body weight, although, as noted above, this will be subject to therapeutic discretion. More preferably, this dose is at least 0.01 mg/kg/day, and most preferably for humans between about 0.01 and 1 mg/kg/day for the hormone. If given continuously, the Therapeutic is typically administered at a dose rate of about 1 ug/kg/hour to about 50 ug/kg/hour, either by 1-4 injections per day or by continuous subcutaneous infusions, for example, using a mini-pump. An intravenous bag solution may also be employed. The length of treatment needed to observe changes and the interval following treatment for responses to occur appears to vary depending on the desired effect.

[1035] Therapeutics can be are administered orally, rectally, parenterally, intracistemally, intravaginally, intraperitoneally, topically (as by powders, ointments, gels, drops or transdermal patch), bucally, or as an oral or nasal spray. “Pharmaceutically acceptable carrier” refers to a non-toxic solid, semisolid or liquid filler, diluent, encapsulating material or formulation auxiliary of any. The term “parenteral” as used herein refers to modes of administration which include intravenous, intramuscular, intraperitoneal, intrastemal, subcutaneous and intraarticular injection and infusion.

[1036] Therapeutics of the invention are also suitably administered by sustained-release systems. Suitable examples of sustained-release Therapeutics are administered orally, rectally, parenterally, intracistemally, intravaginally, intraperitoneally, topically (as by powders, ointments, gels, drops or transdermal patch), bucally, or as an oral or nasal spray. “Pharmaceutically acceptable carrier” refers to a non-toxic solid, semisolid or liquid filler, diluent, encapsulating material or formulation auxiliary of any type. The term “parenteral” as used herein refers to modes of administration which include intravenous, intramuscular, intraperitoneal, intrasternal, subcutaneous and intraarticular injection and infusion.

[1037] Therapeutics of the invention are also suitably administered by sustained-release systems. Suitable examples of sustained-release Therapeutics include suitable polymeric materials (such as, for example, semi-permeable polymer matrices in the form of shaped articles, e.g., films, or mirocapsules), suitable hydrophobic materials (for example as an emulsion in an acceptable oil) or ion exchange resins, and sparingly soluble derivatives (such as, for example, a sparingly soluble salt).

[1038] Sustained-release matrices include polylactides (U.S. Pat. No. 3,773,919, EP 58,481), copolymers of L-glutamic acid and gamma-ethyl-L-glutamate (Sidman et al., Biopolymers 22:547-556 (1983)), poly (2-hydroxyethyl methacrylate) (Langer et al., J. Biomed. Mater. Res. 15:167-277 (1981), and Langer, Chem. Tech. 12:98-105 (1982)), ethylene vinyl acetate (Langer et al., Id.) or poly-D-(−)-3-hydroxybutyric acid (EP 133,988).

[1039] Sustained-release Therapeutics also include liposomally entrapped Therapeutics of the invention (see generally, Langer, Science 249:1527-1533 (1990); Treat et al., in Liposomes in the Therapy of Infectious Disease and Cancer, Lopez-Berestein and Fidler (eds.), Liss, N.Y., pp. 317-327 and 353-365 (1989)). Liposomes containing the Therapeutic are prepared by methods known per se: DE 3,218,121; Epstein et al., Proc. Natl. Acad. Sci. (USA) 82:3688-3692 (1985); Hwang et al., Proc. Natl. Acad. Sci.(USA) 77:4030-4034 (1980); EP 52,322; EP 36,676; EP 88,046; EP 143,949; EP 142,641; Japanese Pat. Appl. 83-118008; U.S. Pat. Nos. 4,485,045 and 4,544,545; and EP 102,324. Ordinarily, the liposomes are of the small (about 200-800 Angstroms) unilamellar type in which the lipid content is greater than about 30 mol. percent cholesterol, the selected proportion being adjusted for the optimal Therapeutic.

[1040] In yet an additional embodiment, the Therapeutics of the invention are delivered by way of a pump (see Langer, supra; Sefton, CRC Crit. Ref. Biomed. Eng. 14:201 (1987); Buchwald et al., Surgery 88:507 (1980); Saudek et al., N. Engl. J. Med. 321:574 (1989)).

[1041] Other controlled release systems are discussed in the review by Langer (Science 249:1527-1533 (1990)).

[1042] For parenteral administration, in one embodiment, the Therapeutic is formulated generally by mixing it at the desired degree of purity, in a unit dosage injectable form (solution, suspension, or emulsion), with a pharmaceutically acceptable carrier, i.e., one that is non-toxic to recipients at the dosages and concentrations employed and is compatible with other ingredients of the formulation. For example, the formulation preferably does not include oxidizing agents and other compounds that are known to be deleterious to the Therapeutic.

[1043] Generally, the formulations are prepared by contacting the Therapeutic uniformly and intimately with liquid carriers or finely divided solid carriers or both. Then, if necessary, the product is shaped into the desired formulation. Preferably the carrier is a parenteral carrier, more preferably a solution that is isotonic with the blood of the recipient. Examples of such carrier vehicles include water, saline, Ringer's solution, and dextrose solution. Non-aqueous vehicles such as fixed oils and ethyl oleate are also useful herein, as well as liposomes.

[1044] The carrier suitably contains minor amounts of additives such as substances that enhance isotonicity and chemical stability. Such materials are non-toxic to recipients at the dosages and concentrations employed, and include buffers such as phosphate, citrate, succinate, acetic acid, and other organic acids or their salts; antioxidants such as ascorbic acid; low molecular weight (less than about ten residues) polypeptides, e.g., polyarginine or tripeptides; proteins, such as serum albumin, gelatin, or immunoglobulins; hydrophilic polymers such as polyvinylpyrrolidone; amino acids, such as glycine, glutamic acid, aspartic acid, or arginine; monosaccharides, disaccharides, and other carbohydrates including cellulose or its derivatives, glucose, manose, or dextrins; chelating agents such as EDTA; sugar alcohols such as mannitol or sorbitol; counterions such as sodium; and/or nonionic surfactants such as polysorbates, poloxamers, or PEG.

[1045] The Therapeutic is typically formulated in such vehicles at a concentration of about 0.1 mg/ml to 100 mg/ml, preferably 1-10 mg/ml, at a pH of about 3 to 8. It will be understood that the use of certain of the foregoing excipients, carriers, or stabilizers will result in the formation of polypeptide salts.

[1046] Any pharmaceutical used for therapeutic administration can be sterile. Sterility is readily accomplished by filtration through sterile filtration membranes (e.g., 0.2 micron membranes). Therapeutics generally are placed into a container having a sterile access port, for example, an intravenous solution bag or vial having a stopper pierceable by a hypodermic injection needle.

[1047] Therapeutics ordinarily will be stored in unit or multi-dose containers, for example, sealed ampoules or vials, as an aqueous solution or as a lyophilized formulation for reconstitution. As an example of a lyophilized formulation, 10-ml vials are filled with 5 ml of sterile-filtered 1% (w/v) aqueous Therapeutic solution, and the resulting mixture is lyophilized. The infusion solution is prepared by reconstituting the lyophilized Therapeutic using bacteriostatic Water-for-Injection.

[1048] The invention also provides a pharmaceutical pack or kit comprising one or more containers filled with one or more of the ingredients of the Therapeutics of the invention. Associated with such container(s) can be a notice in the form prescribed by a governmental agency regulating the manufacture, use or sale of pharmaceuticals or biological products, which notice reflects approval by the agency of manufacture, use or sale for human administration. In addition, the Therapeutics may be employed in conjunction with other therapeutic compounds.

[1049] The Therapeutics of the invention may be administered alone or in combination with adjuvants. Adjuvants that may be administered with the Therapeutics of the invention include, but are not limited to, alum, alum plus deoxycholate (ImmunoAg), MTP-PE (Biocine Corp.), QS21 (Genentech, Inc.), BCG, and MPL. In a specific embodiment, Therapeutics of the invention are administered in combination with alum. In another specific embodiment, Therapeutics of the invention are administered in combination with QS-21. Further adjuvants that may be administered with the Therapeutics of the invention include, but are not limited to, Monophosphoryl lipid immunomodulator, AdjuVax 100a, QS-21, QS-18, CRL1005, Aluminum salts, MF-59, and Virosomal adjuvant technology. Vaccines that may be administered with the Therapeutics of the invention include, but are not limited to, vaccines directed toward protection against MMR (measles, mumps, rubella), polio, varicella, tetanus/diptheria, hepatitis A, hepatitis B, haemophilus influenzae B, whooping cough, pneumonia, influenza, Lyme's Disease, rotavirus, cholera, yellow fever, Japanese encephalitis, poliomyelitis, rabies, typhoid fever, and pertussis. Combinations may be administered either concomitantly, e.g., as an admixture, separately but simultaneously or concurrently; or sequentially. This includes presentations in which the combined agents are administered together as a therapeutic mixture, and also procedures in which the combined agents are administered separately but simultaneously, e.g., as through separate intravenous lines into the same individual. Administration “in combination” further includes the separate administration of one of the compounds or agents given first, followed by the second.

[1050] The Therapeutics of the invention may be administered alone or in combination with other therapeutic agents. Therapeutic agents that may be administered in combination with the Therapeutics of the invention, include but not limited to, other members of the TNF family, chemotherapeutic agents, antibiotics, steroidal and non-steroidal anti-inflammatories, conventional immunotherapeutic agents, cytokines and/or growth factors. Combinations may be administered either concomitantly, e.g., as an admixture, separately but simultaneously or concurrently; or sequentially. This includes presentations in which the combined agents are administered together as a therapeutic mixture, and also procedures in which the combined agents are administered separately but simultaneously, e.g., as through separate intravenous lines into the same individual. Administration “in combination” further includes the separate administration of one of the compounds or agents given first, followed by the second.

[1051] In one embodiment, the Therapeutics of the invention are administered in combination with members of the TNF family. TNF, TNF-related or TNF-like molecules that may be administered with the Therapeutics of the invention include, but are not limited to, soluble forms of TNF-alpha, lymphotoxin-alpha (LT-alpha, also known as TNF-beta), LT-beta (found in complex heterotrimer LT-alpha2-beta), OPGL, FasL, CD27L, CD30L, CD40L, 4-1BBL, DcR3, OX40L, TNF-gamma (International Publication No. WO 96/14328), AIM-I (International Publication No. WO 97/33899), endokine-alpha (International Publication No. WO 98/07880), TR6 (International Publication No. WO 98/30694), OPG, and neutrokine-alpha (International Publication No. WO 98/18921, OX40, and nerve growth factor (NGF), and soluble forms of Fas, CD30, CD27, CD40 and 4-IBB, TR2 (International Publication No. WO 96/34095), DR3 (International Publication No. WO 97/33904), DR4 (International Publication No. WO 98/32856), TR5 (International Publication No. WO 98/30693), TR6 (International Publication No. WO 98/30694), TR7 (International Publication No. WO 98/41629), TRANK, TR9 (International Publication No. WO 98/56892),TR10 (International Publication No. WO 98/54202), 312C2 (International Publication No. WO 98/06842), and TR12, and soluble forms CD154, CD70, and CD153.

[1052] In certain embodiments, Therapeutics of the invention are administered in combination with antiretroviral agents, nucleoside reverse transcriptase inhibitors, non-nucleoside reverse transcriptase inhibitors, and/or protease inhibitors. Nucleoside reverse transcriptase inhibitors that may be administered in combination with the Therapeutics of the invention, include, but are not limited to, RETROVIR™ (zidovudine/AZT), VIDEX™ (didanosine/ddI), HIVID™ (zalcitabine/ddC), ZERIT™ (stavudine/d4T), EPIVIR™ (lamivudine/3TC), and COMBIVIR™ (zidovudine/lamivudine). Non-nucleoside reverse transcriptase inhibitors that may be administered in combination with the Therapeutics of the invention, include, but are not limited to, VIRAMUNE™ (nevirapine), RESCRIPTOR™ (delavirdine), and SUSTIVA™ (efavirenz). Protease inhibitors that may be administered in combination with the Therapeutics of the invention, include, but are not limited to, CRIXIVAN™ (indinavir), NORVIR™ (ritonavir), INVIRASE ™ (saquinavir), and VIRACEPT™ (nelfinavir). In a specific embodiment, antiretroviral agents, nucleoside reverse transcriptase inhibitors, non-nucleoside reverse transcriptase inhibitors, and/or protease inhibitors may be used in any combination with Therapeutics of the invention to treat AIDS and/or to prevent or treat HIV infection.

[1053] In other embodiments, Therapeutics of the invention may be administered in combination with anti-opportunistic infection agents. Anti-opportunistic agents that may be administered in combination with the Therapeutics of the invention, include, but are not limited to, TRIMETHOPRIM-SULFAMETHOXAZOLE™, DAPSONE™, PENTAMIDINE™, ATOVAQUONE™, ISONIAZID™, RIFAMPIN™, PYRAZINAMIDE™, ETHAMBUTOL™, RIFABUTIN™, CLARITHROMYCIN™, AZITHROMYCIN™, GANCICLOVIR™, FOSCARNET™, CIDOFOVIR™, FLUCONAZOLE™, ITRACONAZOLE™, KETOCONAZOLE™, ACYCLOVIR™, FAMCICOLVIR™, PYRIMETHAMINE™, LEUCOVORIN™, NEUPOGEN™ (filgrastim/G-CSF), and LEUKINE™ (sargramostim/GM-CSF). In a specific embodiment, Therapeutics of the invention are used in any combination with TRIMETHOPRIM-SULFAMETHOXAZOLE™, DAPSONE™, PENTAMIDINE™, and/or ATOVAQUONE™ to prophylactically treat or prevent an opportunistic Pneumocystis carinii pneumonia infection. In another specific embodiment, Therapeutics of the invention are used in any combination with ISONIAZID™, RIFAMPIN™, PYRAZINAMIDE™, and/or ETHAMBUTOL™ to prophylactically treat or prevent an opportunistic Mycobacterium avium complex infection. In another specific embodiment, Therapeutics of the invention are used in any combination with RIFABUTIN™, CLARITHROMYCIN™, and/or AZITHROMYCIN™ to prophylactically treat or prevent an opportunistic Mycobacterium tuberculosis infection. In another specific embodiment, Therapeutics of the invention are used in any combination with GANCICLOVIR™, FOSCARNET™, and/or CIDOFOVIR™ to prophylactically treat or prevent an opportunistic cytomegalovirus infection. In another specific embodiment, Therapeutics of the invention are used in any combination with FLUCONAZOLE™, ITRACONAZOLE™, and/or KETOCONAZOLE™ to prophylactically treat or prevent an opportunistic fungal infection. In another specific embodiment, Therapeutics of the invention are used in any combination with ACYCLOVIR™ and/or FAMCICOLVIR™ to prophylactically treat or prevent an opportunistic herpes simplex virus type I and/or type II infection. In another specific embodiment, Therapeutics of the invention are used in any combination with PYRIMETHAMINE™ and/or LEUCOVORIN™ to prophylactically treat or prevent an opportunistic Toxoplasma gondii infection. In another specific embodiment, Therapeutics of the invention are used in any combination with LEUCOVORIN™ and/or NEUPOGEN™ to prophylactically treat or prevent an opportunistic bacterial infection.

[1054] In a further embodiment, the Therapeutics of the invention are administered in combination with an antiviral agent. Antiviral agents that may be administered with the Therapeutics of the invention include, but are not limited to, acyclovir, ribavirin, amantadine, and remantidine.

[1055] In a further embodiment, the Therapeutics of the invention are administered in combination with an antibiotic agent. Antibiotic agents that may be administered with the Therapeutics of the invention include, but are not limited to, amoxicillin, beta-lactamases, aminoglycosides, beta-lactam (glycopeptide), beta-lactamases, Clindamycin, chloramphenicol, cephalosporins, ciprofloxacin, ciprofloxacin, erythromycin, fluoroquinolones, macrolides, metronidazole, penicillins, quinolones, rifampin, streptomycin, sulfonamide, tetracyclines, trimethoprim, trimethoprim-sulfamthoxazole, and vancomycin.

[1056] Conventional nonspecific immunosuppressive agents, that may be administered in combination with the Therapeutics of the invention include, but are not limited to, steroids, cyclosporine, cyclosporine analogs, cyclophosphamide methylprednisone, prednisone, azathioprine, FK-506, 15-deoxyspergualin, and other immunosuppressive agents that act by suppressing the function of responding T cells.

[1057] In specific embodiments, Therapeutics of the invention are administered in combination with immunosuppressants. Immunosuppressants preparations that may be administered with the Therapeutics of the invention include, but are not limited to, ORTHOCLONE™ (OKT3), SANDIMMUNE™/NEORAL™/SANGDYA™ (cyclosporin), PROGRAF™ (tacrolimus), CELLCEPT™ (mycophenolate), Azathioprine, glucorticosteroids, and RAPAMUNE™ (sirolimus). In a specific embodiment, immunosuppressants may be used to prevent rejection of organ or bone marrow transplantation.

[1058] In an additional embodiment, Therapeutics of the invention are administered alone or in combination with one or more intravenous immune globulin preparations. Intravenous immune globulin preparations that may be administered with the Therapeutics of the invention include, but not limited to, GAMMAR™, IVEEGAM™, SANDOGLOBULIN™, GAMMAGARD S/D™, and GAMIMUNE™. In a specific embodiment, Therapeutics of the invention are administered in combination with intravenous immune globulin preparations in transplantation therapy (e.g., bone marrow transplant).

[1059] In an additional embodiment, the Therapeutics of the invention are administered alone or in combination with an anti-inflammatory agent. Anti-inflammatory agents that may be administered with the Therapeutics of the invention include, but are not limited to, glucocorticoids and the nonsteroidal anti-inflammatories, aminoarylcarboxylic acid derivatives, arylacetic acid derivatives, arylbutyric acid derivatives, arylcarboxylic acids, arylpropionic acid derivatives, pyrazoles, pyrazolones, salicylic acid derivatives, thiazinecarboxamides, e-acetamidocaproic acid, S-adenosylmethionine, 3-amino-4-hydroxybutyric acid, amixetrine, bendazac, benzydamine, bucolome, difenpiramide, ditazol, emorfazone, guaiazulene, nabumetone, nimesulide, orgotein, oxaceprol, paranyline, perisoxal, pifoxime, proquazone, proxazole, and tenidap.

[1060] In an additional embodiment, the compositions of the invention are administered alone or in combination with an anti-angiogenic agent. Anti-angiogenic agents that may be administered with the compositions of the invention include, but are not limited to, Angiostatin (Entremed, Rockville, Md.), Troponin-1 (Boston Life Sciences, Boston, Mass.), anti-Invasive Factor, retinoic acid and derivatives thereof, paclitaxel (Taxol), Suramin, Tissue Inhibitor of Metalloproteinase-1, Tissue Inhibitor of Metalloproteinase-2, VEGI, Plasminogen Activator Inhibitor-1, Plasminogen Activator Inhibitor-2, and various forms of the lighter “d group” transition metals.

[1061] Lighter “d group” transition metals include, for example, vanadium, molybdenum, tungsten, titanium, niobium, and tantalum species. Such transition metal species may form transition metal complexes. Suitable complexes of the above-mentioned transition metal species include oxo transition metal complexes.

[1062] Representative examples of vanadium complexes include oxo vanadium complexes such as vanadate and vanadyl complexes. Suitable vanadate complexes include metavanadate and orthovanadate complexes such as, for example, ammonium metavanadate, sodium metavanadate, and sodium orthovanadate. Suitable vanadyl complexes include, for example, vanadyl acetylacetonate and vanadyl sulfate including vanadyl sulfate hydrates such as vanadyl sulfate mono- and trihydrates.

[1063] Representative examples of tungsten and molybdenum complexes also include oxo complexes. Suitable oxo tungsten complexes include tungstate and tungsten oxide complexes. Suitable tungstate complexes include ammonium tungstate, calcium tungstate, sodium tungstate dihydrate, and tungstic acid. Suitable tungsten oxides include tungsten (IV) oxide and tungsten (VI) oxide. Suitable oxo molybdenum complexes include molybdate, molybdenum oxide, and molybdenyl complexes. Suitable molybdate complexes include ammonium molybdate and its hydrates, sodium molybdate and its hydrates, and potassium molybdate and its hydrates. Suitable molybdenum oxides include molybdenum (VI) oxide, molybdenum (VI) oxide, and molybdic acid. Suitable molybdenyl complexes include, for example, molybdenyl acetylacetonate. Other suitable tungsten and molybdenum complexes include hydroxo derivatives derived from, for example, glycerol, tartaric acid, and sugars.

[1064] A wide variety of other anti-angiogenic factors may also be utilized within the context of the present invention. Representative examples include, but are not limited to, platelet factor 4; protamine sulphate; sulphated chitin derivatives (prepared from queen crab shells), (Murata et al., Cancer Res. 51:22-26 (1991)); Sulphated Polysaccharide Peptidoglycan Complex (SP-PG) (the function of this compound may be enhanced by the presence of steroids such as estrogen, and tamoxifen citrate); Staurosporine; modulators of matrix metabolism, including for example, proline analogs, cishydroxyproline, d,L-3,4-dehydroproline, Thiaproline, alpha,alpha-dipyridyl, aminopropionitrile fumarate; 4-propyl-5-(4-pyridinyl)-2(3H)-oxazolone; Methotrexate; Mitoxantrone; Heparin; Interferons; 2 Macroglobulin-serum; ChIMP-3 (Pavloff et al., J. Bio. Chem. 267:17321-17326, (1992)); Chymostatin (Tomkinson et al., Biochem J. 286:475-480 (1992)); Cyclodextrin Tetradecasulfate; Eponemycin;

[1065] Camptothecin; Fumagillin (Ingber et al., Nature 348:555-557, 1990); Gold Sodium Thiomalate (“GST”; Matsubara and Ziff, J. Clin. Invest. 79:1440-1446, 1987); anticollagenase-serum; alpha2-antiplasmin (Holmes et al., J. Biol. Chem. 262(4):1659-1664 (1987)); Bisantrene (National Cancer Institute); Lobenzarit disodium (N-(2)-carboxyphenyl-4-chloroanthronilic acid disodium or “CCA”; (Takeuchi et al., Agents Actions 36:312-316, 1992); and metalloproteinase inhibitors such as BB94.

[1066] Additional anti-angiogenic factors that may also be utilized within the context of the present invention include Thalidomide, (Celgene, Warren, N.J.); Angiostatic steroid; AGM-1470 (H. Brem and J. Folkman J Pediatr. Surg. 28:445-51 (1993)); an integrin alpha v beta 3 antagonist (C. Storgard et al., J Clin. Invest. 103:47-54 (1999)); carboxynaminolmidazole; Carboxyamidotriazole (CAI) (National Cancer Institute, Bethesda, Md.); Conbretastatin A-4 (CA4P) (OXiGENE, Boston, Mass.); Squalamine (Magainin Pharmaceuticals, Plymouth Meeting, Pa.); TNP-470, (Tap Pharmaceuticals, Deerfield, Ill.); ZD-0101 AstraZeneca (London, UK); APRA (CT2584); Benefin, Byrostatin-1 (SC339555); CGP-41251 (PKC 412); CM101; Dexrazoxane (ICRF187); DMXAA; Endostatin; Flavopridiol; Genestein; GTE; ImmTher; Iressa (ZD1839); Octreotide (Somatostatin); Panretin; Penacillamine; Photopoint; PI-88; Prinomastat (AG-3340) Purlytin; Suradista (FCE26644); Tamoxifen (Nolvadex); Tazarotene; Tetrathiomolybdate; Xeloda (Capecitabine); and 5-Fluorouracil.

[1067] Anti-angiogenic agents that may be administed in combination with the compounds of the invention may work through a variety of mechanisms including, but not limited to, inhibiting proteolysis of the extracellular matrix, blocking the function of endothelial cell-extracellular matrix adhesion molecules, by antagonizing the function of angiogenesis inducers such as growth factors, and inhibiting integrin receptors expressed on proliferating endothelial cells. Examples of anti-angiogenic inhibitors that interfere with extracellular matrix proteolysis and which may be administered in combination with the compositons of the invention include, but are not imited to, AG-3340 (Agouron, La Jolla, Calif.), BAY-12-9566 (Bayer, West Haven, Conn.), BMS-275291 (Bristol Myers Squibb, Princeton, N.J.), CGS-27032A (Novartis, East Hanover, N.J.), Marimastat (British Biotech, Oxford, UK), and Metastat (Aetema, St-Foy, Quebec). Examples of anti-angiogenic inhibitors that act by blocking the function of endothelial cell-extracellular matrix adhesion molecules and which may be administered in combination with the compositons of the invention include, but are not Imited to, EMD-121974 (Merck KcgaA Darmstadt, Germany) and Vitaxin (Ixsys, La Jolla, Calif./Medimmune, Gaithersburg, Md.). Examples of anti-angiogenic agents that act by directly antagonizing or inhibiting angiogenesis inducers and which may be administered in combination with the compositons of the invention include, but are not Imited to, Angiozyme (Ribozyme, Boulder, Colo.), Anti-VEGF antibody (Genentech, S. San Francisco, Calif.), PTK-787/ZK-225846 (Novartis, Basel, Switzerland), SU-101 (Sugen, S. San Francisco, Calif.), SU-5416 (Sugen/ Pharmacia Upjohn, Bridgewater, N.J.), and SU-6668 (Sugen). Other anti-angiogenic agents act to indirectly inhibit angiogenesis. Examples of indirect inhibitors of angiogenesis which may be administered in combination with the compositons of the invention include, but are not limited to, IM-862 (Cytran, Kirkland, Wash.), Interferon-alpha, IL-12 (Roche, Nutley, N.J.), and Pentosan polysulfate (Georgetown University, Washington, D.C.).

[1068] In particular embodiments, the use of compositions of the invention in combination with anti-angiogenic agents is contemplated for the treatment, prevention, and/or amelioration of an autoimmune disease, such as for example, an autoimmune disease described herein.

[1069] In a particular embodiment, the use of compositions of the invention in combination with anti-angiogenic agents is contemplated for the treatment, prevention, and/or amelioration of arthritis. In a more particular embodiment, the use of compositions of the invention in combination with anti-angiogenic agents is contemplated for the treatment, prevention, and/or amelioration of rheumatoid arthritis.

[1070] In another embodiment, the polynucleotides encoding a polypeptide of the present invention are administered in combination with an angiogenic protein, or polynucleotides encoding an angiogenic protein. Examples of angiogenic proteins that may be administered with the compositions of the invention include, but are not limited to, acidic and basic fibroblast growth factors, VEGF-1, VEGF-2, VEGF-3, epidermal growth factor alpha and beta, platelet-derived endothelial cell growth factor, platelet-derived growth factor, tumor necrosis factor alpha, hepatocyte growth factor, insulin like growth factor, colony stimulating factor, macrophage colony stimulating factor, granulocyte/macrophage colony stimulating factor, and nitric oxide synthase.

[1071] In another embodiment, compostions of the invention are administered in combination with a chemotherapeutic agent. Chemotherapeutic agents that may be administered with the compositions of the invention include, but are not limited to, antibiotic derivatives (e.g., doxorubicin, bleomycin, daunorubicin, and dactinomycin); antiestrogens (e.g., tamoxifen); antimetabolites (e.g., fluorouracil, 5-FU, methotrexate, floxuridine, interferon alpha-2b, glutamic acid, plicamycin, mercaptopurine, and 6-thioguanine); cytotoxic agents (e.g., carmustine, BCNU, lomustine, CCNU, cytosine arabinoside, cyclophosphamide, estramustine, hydroxyurea, procarbazine, mitomycin, busulfan, cis-platin, and vincristine sulfate); hormones (e.g., medroxyprogesterone, estramustine phosphate sodium, ethinyl estradiol, estradiol, megestrol acetate, methyltestosterone, diethylstilbestrol diphosphate, chlorotrianisene, and testolactone); nitrogen mustard derivatives (e.g., mephalen, chorambucil, mechlorethamine (nitrogen mustard) and thiotepa); steroids and combinations (e.g., bethamethasone sodium phosphate); and others (e.g., dicarbazine, asparaginase, mitotane, vincristine sulfate, vinblastine sulfate, and etoposide).

[1072] In a specific embodiment, Therapeutics of the invention are administered in combination with CHOP (cyclophosphamide, doxorubicin, vincristine, and prednisone) or any combination of the components of CHOP. In another embodiment, Therapeutics of the invention are administered in combination with Rituximab. In a further embodiment, Therapeutics of the invention are administered with Rituxmab and CHOP, or Rituxmab and any combination of the components of CHOP.

[1073] In an additional embodiment, the Therapeutics of the invention are administered in combination with cytokines. Cytokines that may be administered with the Therapeutics of the invention include, but are not limited to, IL2, IL3, IL4, IL5, IL6, IL7, IL10, IL12, IL13, IL15, anti-CD40, CD40L, IFN-gamma and TNF-alpha. In another embodiment, Therapeutics of the invention may be administered with any interleukin, including, but not limited to, IL-1 alpha, IL-1 beta, IL-2, IL-3, IL-4, IL-5, IL-6, IL-7, IL-8, IL-9, IL-10, IL-11, IL-12, IL-13, IL-14, IL-15, IL-16, IL-17, IL-18, IL-19, IL-20, and IL-21.

[1074] In an additional embodiment, the Therapeutics of the invention are administered in combination with angiogenic proteins. Angiogenic proteins that may be administered with the Therapeutics of the invention include, but are not limited to, Glioma Derived Growth Factor (GDGF), as disclosed in European Patent Number EP-399816; Platelet Derived Growth Factor-A (PDGF-A), as disclosed in European Patent Number EP-682110; Platelet Derived Growth Factor-B (PDGF-B), as disclosed in European Patent Number EP-282317; Placental Growth Factor (PlGF), as disclosed in International Publication Number WO 92/06194; Placental Growth Factor-2 (PIGF-2), as disclosed in Hauser et al., Gorwth Factors, 4:259-268 (1993); Vascular Endothelial Growth Factor (VEGF), as disclosed in International Publication Number WO 90/13649; Vascular Endothelial Growth Factor-A (VEGF-A), as disclosed in European Patent Number EP-506477; Vascular Endothelial Growth Factor-2 (VEGF-2), as disclosed in International Publication Number WO 96/39515; Vascular Endothelial Growth Factor B (VEGF-3); Vascular Endothelial Growth Factor B-186 (VEGF-B 186), as disclosed in International Publication Number WO 96/26736; Vascular Endothelial Growth Factor-D (VEGF-D), as disclosed in International Publication Number WO 98/02543; Vascular Endothelial Growth Factor-D (VEGF-D), as disclosed in International Publication Number WO 98/07832; and Vascular Endothelial Growth Factor-E (VEGF-E), as disclosed in German Patent Number DE19639601. The above mentioned references are herein incorporated by reference in their entireties.

[1075] In an additional embodiment, the Therapeutics of the invention are administered in combination with hematopoietic growth factors. Hematopoietic growth factors that may be administered with the Therapeutics of the invention include, but are not limited to, LEUKINE™ (SARGRAMOSTIM™) and NEUPOGEN™ (FILGRASTIM™).

[1076] In an additional embodiment, the Therapeutics of the invention are administered in combination with Fibroblast Growth Factors. Fibroblast Growth Factors that may be administered with the Therapeutics of the invention include, but are not limited to, FGF-1, FGF-2, FGF-3, FGF-4, FGF-5, FGF-6, FGF-7, FGF-8, FGF-9, FGF-10, FGF-11, FGF-12, FGF-13, FGF-14, and FGF-15.

[1077] In additional embodiments, the Therapeutics of the invention are administered in combination with other therapeutic or prophylactic regimens, such as, for example, radiation therapy.

### Example 14

### Method of Treating Decreased Levels of the Polypeptide

[1078] The present invention relates to a method for treating an individual in need of an increased level of a polypeptide of the invention in the body comprising administering to such an individual a composition comprising a therapeutically effective amount of an agonist of the invention (including polypeptides of the invention). Moreover, it will be appreciated that conditions caused by a decrease in the standard or normal expression level of a polypeptide of the present invention in an individual can be treated by administering the agonist or antagonist of the present invention. Thus, the invention also provides a method of treatment of an individual in need of an increased level of the polypeptide comprising administering to such an individual a Therapeutic comprising an amount of the agonist or antagonist to increase the activity level of the polypeptide in such an individual.

[1079] For example, a patient with decreased levels of a polypeptide receives a daily dose 0.1-100 ug/kg of the agonist or antagonist for six consecutive days. The exact details of the dosing scheme, based on administration and formulation, are provided in Example 13.

### Example 15

### Method of Treating Increased Levels of the Polypeptide

[1080] The present invention also relates to a method of treating an individual in need of a decreased level of a polypeptide of the invention in the body comprising administering to such an individual a composition comprising a therapeutically effective amount of an antagonist of the invention (including polypeptides and antibodies of the invention).

[1081] In one example, antisense technology is used to inhibit production of a polypeptide of the present invention. This technology is one example of a method of decreasing levels of a polypeptide, due to a variety of etiologies, such as cancer.

[1082] For example, a patient diagnosed with abnormally increased levels of a polypeptide is administered intravenously antisense polynucleotides at 0.5, 1.0, 1.5, 2.0 and 3.0 mg/kg day for 21 days. This treatment is repeated after a 7-day rest period if the treatment was well tolerated. The formulation of the antisense polynucleotide is provided in Example 13.

### Example 16

### Method of Treatment Using Gene Therapy-Ex Vivo

[1083] One method of gene therapy transplants fibroblasts, which are capable of expressing a polypeptide, onto a patient. Generally, fibroblasts are obtained from a subject by skin biopsy. The resulting tissue is placed in tissue-culture medium and separated into small pieces. Small chunks of the tissue are placed on a wet surface of a tissue culture flask, approximately ten pieces are placed in each flask. The flask is turned upside down, closed tight and left at room temperature over night. After 24 hours at room temperature, the flask is inverted and the chunks of tissue remain fixed to the bottom of the flask and fresh media (e.g., Ham's F12 media, with 10% FBS, penicillin and streptomycin) is added. The flasks are then incubated at 37 degree C. for approximately one week.

[1084] At this time, fresh media is added and subsequently changed every several days. After an additional two weeks in culture, a monolayer of fibroblasts emerge. The monolayer is trypsinized and scaled into larger flasks.

[1085] pMV-7 (Kirschmeier, P. T. et al., DNA, 7:219-25 (1988)), flanked by the long terminal repeats of the Moloney murine sarcoma virus, is digested with EcoRI and HindIII and subsequently treated with calf intestinal phosphatase. The linear vector is fractionated on agarose gel and purified, using glass beads.

[1086] The cDNA encoding a polypeptide of the present invention can be amplified using PCR primers which correspond to the 5′ and 3′ end sequences respectively as set forth in Example 1 using primers and having appropriate restriction sites and initiation/stop codons, if necessary. Preferably, the 5′ primer contains an EcoRI site and the 3′ primer includes a HindIII site. Equal quantities of the Moloney murine sarcoma virus linear backbone and the amplified EcoRI and HindIII fragment are added together, in the presence of T4 DNA ligase. The resulting mixture is maintained under conditions appropriate for ligation of the two fragments. The ligation mixture is then used to transform bacteria HB 101, which are then plated onto agar containing kanamycin for the purpose of confirming that the vector has the gene of interest properly inserted.

[1087] The amphotropic pA317 or GP+am12 packaging cells are grown in tissue culture to confluent density in Dulbecco's Modified Eagles Medium (DMEM) with 10% calf serum (CS), penicillin and streptomycin. The MSV vector containing the gene is then added to the media and the packaging cells transduced with the vector. The packaging cells now produce infectious viral particles containing the gene (the packaging cells are now referred to as producer cells).

[1088] Fresh media is added to the transduced producer cells, and subsequently, the media is harvested from a 10 cm plate of confluent producer cells. The spent media, containing the infectious viral particles, is filtered through a millipore filter to remove detached producer cells and this media is then used to infect fibroblast cells. Media is removed from a sub-confluent plate of fibroblasts and quickly replaced with the media from the producer cells. This media is removed and replaced with fresh media. If the titer of virus is high, then virtually all fibroblasts will be infected and no selection is required. If the titer is very low, then it is necessary to use a retroviral vector that has a selectable marker, such as neo or his. Once the fibroblasts have been efficiently infected, the fibroblasts are analyzed to determine whether protein is produced.

[1089] The engineered fibroblasts are then transplanted onto the host, either alone or after having been grown to confluence on cytodex 3 microcarrier beads.

### Example 17

### Gene Therapy Using Endogenous Genes Corresponding To Polynucleotides of the Invention

[1090] Another method of gene therapy according to the present invention involves operably associating the endogenous polynucleotide sequence of the invention with a promoter via homologous recombination as described, for example, in U.S. Pat. No. 5,641,670, issued Jun. 24, 1997; International Publication NO: WO 96/29411, published Sep. 26, 1996; International Publication NO: WO 94/12650, published Aug. 4, 1994; Koller et al., Proc. Natl. Acad. Sci. USA, 86:8932-8935 (1989); and Zijlstra et al., Nature, 342:435-438 (1989). This method involves the activation of a gene which is present in the target cells, but which is not expressed in the cells, or is expressed at a lower level than desired.

[1091] Polynucleotide constructs are made which contain a promoter and targeting sequences, which are homologous to the 5′ non-coding sequence of endogenous polynucleotide sequence, flanking the promoter. The targeting sequence will be sufficiently near the 5′ end of the polynucleotide sequence so the promoter will be operably linked to the endogenous sequence upon homologous recombination. The promoter and the targeting sequences can be amplified using PCR. Preferably, the amplified promoter contains distinct restriction enzyme sites on the 5′ and 3′ ends. Preferably, the 3′ end of the first targeting sequence contains the same restriction enzyme site as the 5′ end of the amplified promoter and the 5′ end of the second targeting sequence contains the same restriction site as the 3′ end of the amplified promoter.

[1092] The amplified promoter and the amplified targeting sequences are digested with the appropriate restriction enzymes and subsequently treated with calf intestinal phosphatase. The digested promoter and digested targeting sequences are added together in the presence of T4 DNA ligase. The resulting mixture is maintained under conditions appropriate for ligation of the two fragments. The construct is size fractionated on an agarose gel, then purified by phenol extraction and ethanol precipitation.

[1093] In this Example, the polynucleotide constructs are administered as naked polynucleotides via electroporation. However, the polynucleotide constructs may also be administered with transfection-facilitating agents, such as liposomes, viral sequences, viral particles, precipitating agents, etc. Such methods of delivery are known in the art.

[1094] Once the cells are transfected, homologous recombination will take place which results in the promoter being operably linked to the endogenous polynucleotide sequence. This results in the expression of polynucleotide corresponding to the polynucleotide in the cell. Expression may be detected by immunological staining, or any other method known in the art.

[1095] Fibroblasts are obtained from a subject by skin biopsy. The resulting tissue is placed in DMEM+10% fetal calf serum. Exponentially growing or early stationary phase fibroblasts are trypsinized and rinsed from the plastic surface with nutrient medium. An aliquot of the cell suspension is removed for counting, and the remaining cells are subjected to centrifugation. The supernatant is aspirated and the pellet is resuspended in 5 ml of electroporation buffer (20 mM HEPES pH 7.3, 137 mM NaCl, 5 mM KCl, 0.7 mM Na₂ HPO₄, 6 mM dextrose). The cells are recentrifuged, the supernatant aspirated, and the cells resuspended in electroporation buffer containing 1 mg/ml acetylated bovine serum albumin. The final cell suspension contains approximately 3×10⁶ cells/ml. Electroporation should be performed immediately following resuspension.

[1096] Plasmid DNA is prepared according to standard techniques. For example, to construct a plasmid for targeting to the locus corresponding to the polynucleotide of the invention, plasmid pUC18 (MBI Fermentas, Amherst, N.Y.) is digested with HindIII. The CMV promoter is amplified by PCR with an XbaI site on the 5′ end and a BamHI site on the 3′ end. Two non-coding sequences are amplified via PCR: one non-coding sequence (fragment 1) is amplified with a HindIII site at the 5′ end and an Xba site at the 3′end; the other non-coding sequence (fragment 2) is amplified with a BamHI site at the 5′end and a HindIII site at the 3′end. The CMV promoter and the fragments (1 and 2) are digested with the appropriate enzymes (CMV promoter—XbaI and BamHI; fragment 1—XbaI; fragment 2—BamHI) and ligated together. The resulting ligation product is digested with HindIII, and ligated with the HindIII-digested pUC 18 plasmid.

[1097] Plasmid DNA is added to a sterile cuvette with a 0.4 cm electrode gap (Bio-Rad). The final DNA concentration is generally at least 120 μg/ml. 0.5 ml of the cell suspension (containing approximately 1.5×10⁶ cells) is then added to the cuvette, and the cell suspension and DNA solutions are gently mixed. Electroporation is performed with a Gene-Pulser apparatus (Bio-Rad). Capacitance and voltage are set at 960 μF and 250-300 V, respectively. As voltage increases, cell survival decreases, but the percentage of surviving cells that stably incorporate the introduced DNA into their genome increases dramatically. Given these parameters, a pulse time of approximately 14-20 mSec should be observed.

[1098] Electroporated cells are maintained at room temperature for approximately 5 min, and the contents of the cuvette are then gently removed with a sterile transfer pipette. The cells are added directly to 10 ml of prewarmed nutrient media (DMEM with 15% calf serum) in a 10 cm dish and incubated at 37 degree C. The following day, the media is aspirated and replaced with 10 ml of fresh media and incubated for a further 16-24 hours.

[1099] The engineered fibroblasts are then injected into the host, either alone or after having been grown to confluence on cytodex 3 microcarrier beads. The fibroblasts now produce the protein product. The fibroblasts can then be introduced into a patient as described above.

### Example 18

### Method of Treatment Using Gene Therapy—in vivo

[1100] Another aspect of the present invention is using in vivo gene therapy methods to treat disorders, diseases and conditions. The gene therapy method relates to the introduction of naked nucleic acid (DNA, RNA, and antisense DNA or RNA) sequences into an animal to increase or decrease the expression of the polypeptide. The polynucleotide of the present invention may be operatively linked to (i.e., associated with) a promoter or any other genetic elements necessary for the expression of the polypeptide by the target tissue. Such gene therapy and delivery techniques and methods are known in the art, see, for example, WO90/11092, WO98/11779; U.S. Pat. Nos. 5,693,622, 5,705,151, 5,580,859; Tabata et al., Cardiovasc. Res. 35(3):470-479 (1997); Chao et al., Pharmacol. Res. 35(6):517-522 (1997); Wolff, Neuromuscul. Disord. 7(5):314-318 (1997); Schwartz et al., Gene Ther. 3(5):405-411 (1996); Tsurumi et al., Circulation 94(12):3281-3290 (1996) (incorporated herein by reference).

[1101] The polynucleotide constructs may be delivered by any method that delivers injectable materials to the cells of an animal, such as, injection into the interstitial space of tissues (heart, muscle, skin, lung, liver, intestine and the like). The polynucleotide constructs can be delivered in a pharmaceutically acceptable liquid or aqueous carrier.

[1102] The term “naked” polynucleotide, DNA or RNA, refers to sequences that are free from any delivery vehicle that acts to assist, promote, or facilitate entry into the cell, including viral sequences, viral particles, liposome formulations, lipofectin or precipitating agents and the like. However, the polynucleotides of the present invention may also be delivered in liposome formulations (such as those taught in Felgner P. L. et al. (1995) Ann. NY Acad. Sci. 772:126-139 and Abdallah B. et al. (1995) Biol. Cell 85(1):1-7) which can be prepared by methods well known to those skilled in the art.

[1103] The polynucleotide vector constructs used in the gene therapy method are preferably constructs that will not integrate into the host genome nor will they contain sequences that allow for replication. Any strong promoter known to those skilled in the art can be used for driving the expression of DNA. Unlike other gene therapy techniques, one major advantage of introducing naked nucleic acid sequences into target cells is the transitory nature of the polynucleotide synthesis in the cells. Studies have shown that non-replicating DNA sequences can be introduced into cells to provide production of the desired polypeptide for periods of up to six months.

[1104] The polynucleotide construct can be delivered to the interstitial space of tissues within an animal, including muscle, skin, brain, lung, liver, spleen, bone marrow, thymus, heart, lymph, blood, bone, cartilage, pancreas, kidney, gall bladder, stomach, intestine, testis, ovary, uterus, rectum, nervous system, eye, gland, and connective tissue. Interstitial space of the tissues comprises the intercellular fluid, mucopolysaccharide matrix among the reticular fibers of organ tissues, elastic fibers in the walls of vessels or chambers, collagen fibers of fibrous tissues, or that same matrix within connective tissue ensheathing muscle cells or in the lacunae of bone. It is similarly the space occupied by the plasma of the circulation and the lymph fluid of the lymphatic channels. Delivery to the interstitial space of muscle tissue is preferred for the reasons discussed below. They may be conveniently delivered by injection into the tissues comprising these cells. They are preferably delivered to and expressed in persistent, non-dividing cells which are differentiated, although delivery and expression may be achieved in non-differentiated or less completely differentiated cells, such as, for example, stem cells of blood or skin fibroblasts. In vivo muscle cells are particularly competent in their ability to take up and express polynucleotides.

[1105] For the naked polynucleotide injection, an effective dosage amount of DNA or RNA will be in the range of from about 0.05 g/kg body weight to about 50 mg/kg body weight. Preferably the dosage will be from about 0.005 mg/kg to about 20 mg/kg and more preferably from about 0.05 mg/kg to about 5 mg/kg. Of course, as the artisan of ordinary skill will appreciate, this dosage will vary according to the tissue site of injection. The appropriate and effective dosage of nucleic acid sequence can readily be determined by those of ordinary skill in the art and may depend on the condition being treated and the route of administration. The preferred route of administration is by the parenteral route of injection into the interstitial space of tissues. However, other parenteral routes may also be used, such as, inhalation of an aerosol formulation particularly for delivery to lungs or bronchial tissues, throat or mucous membranes of the nose. In addition, naked polynucleotide constructs can be delivered to arteries during angioplasty by the catheter used in the procedure.

[1106] The dose response effects of injected polynucleotide in muscle in vivo is determined as follows. Suitable template DNA for production of mRNA coding for polypeptide of the present invention is prepared in accordance with a standard recombinant DNA methodology. The template DNA, which may be either circular or linear, is either used as naked DNA or complexed with liposomes. The quadriceps muscles of mice are then injected with various amounts of the template DNA.

[1107] Five to six week old female and male Balb/C mice are anesthetized by intraperitoneal injection with 0.3 ml of 2.5% Avertin. A 1.5 cm incision is made on the anterior thigh, and the quadriceps muscle is directly visualized. The template DNA is injected in 0.1 ml of carrier in a 1 cc syringe through a 27 gauge needle over one minute, approximately 0.5 cm from the distal insertion site of the muscle into the knee and about 0.2 cm deep. A suture is placed over the injection site for future localization, and the skin is closed with stainless steel clips.

[1108] After an appropriate incubation time (e.g., 7 days) muscle extracts are prepared by excising the entire quadriceps. Every fifth 15 um cross-section of the individual quadriceps muscles is histochemically stained for protein expression. A time course for protein expression may be done in a similar fashion except that quadriceps from different mice are harvested at different times. Persistence of DNA in muscle following injection may be determined by Southern blot analysis after preparing total cellular DNA and HIRT supernatants from injected and control mice. The results of the above experimentation in mice can be used to extrapolate proper dosages and other treatment parameters in humans and other animals using naked DNA.

### Example 19

### Transgenic Animals

[1109] The polypeptides of the invention can also be expressed in transgenic animals. Animals of any species, including, but not limited to, mice, rats, rabbits, hamsters, guinea pigs, pigs, micro-pigs, goats, sheep, cows and non-human primates, e.g., baboons, monkeys, and chimpanzees may be used to generate transgenic animals. In a specific embodiment, techniques described herein or otherwise known in the art, are used to express polypeptides of the invention in humans, as part of a gene therapy protocol.

[1110] Any technique known in the art may be used to introduce the transgene (i.e., polynucleotides of the invention) into animals to produce the founder lines of transgenic animals. Such techniques include, but are not limited to, pronuclear microinjection (Paterson et al., Appl. Microbiol. Biotechnol. 40:691-698 (1994); Carver et al., Biotechnology (NY) 11:1263-1270 (1993); Wright et al., Biotechnology (NY) 9:830-834 (1991); and Hoppe et al., U.S. Pat. No. 4,873,191 (1989)); retrovirus mediated gene transfer into germ lines (Van der Putten et al., Proc. Natl. Acad. Sci., USA 82:6148-6152 (1985)), blastocysts or embryos; gene targeting in embryonic stem cells (Thompson et al., Cell 56:313-321 (1989)); electroporation of cells or embryos (Lo, 1983, Mol Cell. Biol. 3:1803-1814 (1983)); introduction of the polynucleotides of the invention using a gene gun (see, e.g., Ulmer et al., Science 259:1745 (1993); introducing nucleic acid constructs into embryonic pleuripotent stem cells and transferring the stem cells back into the blastocyst; and sperm-mediated gene transfer (Lavitrano et al., Cell 57:717-723 (1989); etc. For a review of such techniques, see Gordon, “Transgenic Animals,” Intl. Rev. Cytol. 115:171-229 (1989), which is incorporated by reference herein in its entirety.

[1111] Any technique known in the art may be used to produce transgenic clones containing polynucleotides of the invention, for example, nuclear transfer into enucleated oocytes of nuclei from cultured embryonic, fetal, or adult cells induced to quiescence (Campell et al., Nature 380:64-66 (1996); Wilmut et al., Nature 385:810-813 (1997)).

[1112] The present invention provides for transgenic animals that carry the transgene in all their cells, as well as animals which carry the transgene in some, but not all their cells, i.e., mosaic animals or chimeric. The transgene may be integrated as a single transgene or as multiple copies such as in concatamers, e.g., head-to-head tandems or head-to-tail tandems. The transgene may also be selectively introduced into and activated in a particular cell type by following, for example, the teaching of Lasko et al. (Lasko et al., Proc. Natl. Acad. Sci. USA 89:6232-6236 (1992)). The regulatory sequences required for such a cell-type specific activation will depend upon the particular cell type of interest, and will be apparent to those of skill in the art. When it is desired that the polynucleotide transgene be integrated into the chromosomal site of the endogenous gene, gene targeting is preferred. Briefly, when such a technique is to be utilized, vectors containing some nucleotide sequences homologous to the endogenous gene are designed for the purpose of integrating, via homologous recombination with chromosomal sequences, into and disrupting the function of the nucleotide sequence of the endogenous gene. The transgene may also be selectively introduced into a particular cell type, thus inactivating the endogenous gene in only that cell type, by following, for example, the teaching of Gu et al. (Gu et al., Science 265:103-106 (1994)). The regulatory sequences required for such a cell-type specific inactivation will depend upon the particular cell type of interest, and will be apparent to those of skill in the art.

[1113] Once transgenic animals have been generated, the expression of the recombinant gene may be assayed utilizing standard techniques. Initial screening may be accomplished by Southern blot analysis or PCR techniques to analyze animal tissues to verify that integration of the transgene has taken place. The level of mRNA expression of the transgene in the tissues of the transgenic animals may also be assessed using techniques which include, but are not limited to, Northern blot analysis of tissue samples obtained from the animal, in situ hybridization analysis, and reverse transcriptase-PCR (rt-PCR). Samples of transgenic gene-expressing tissue may also be evaluated immunocytochemically or immunohistochemically using antibodies specific for the transgene product.

[1114] Once the founder animals are produced, they may be bred, inbred, outbred, or crossbred to produce colonies of the particular animal. Examples of such breeding strategies include, but are not limited to: outbreeding of founder animals with more than one integration site in order to establish separate lines; inbreeding of separate lines in order to produce compound transgenics that express the transgene at higher levels because of the effects of additive expression of each transgene; crossing of heterozygous transgenic animals to produce animals homozygous for a given integration site in order to both augment expression and eliminate the need for screening of animals by DNA analysis; crossing of separate homozygous lines to produce compound heterozygous or homozygous lines; and breeding to place the transgene on a distinct background that is appropriate for an experimental model of interest.

[1115] Transgenic animals of the invention have uses which include, but are not limited to, animal model systems useful in elaborating the biological function of polypeptides of the present invention, studying conditions and/or disorders associated with aberrant expression, and in screening for compounds effective in ameliorating such conditions and/or disorders.

### Example 20

### Knock-Out Animals

[1116] Endogenous gene expression can also be reduced by inactivating or “knocking out” the gene and/or its promoter using targeted homologous recombination. (See e.g., Smithies et al., Nature 317:230-234 (1985); Thomas & Capecchi, Cell 51:503-512 (1987); Thompson et al., Cell 5:313-321 (1989); each of which is incorporated by reference herein in its entirety.) For example, a mutant, non-functional polynucleotide of the invention (or a completely unrelated DNA sequence) flanked by DNA homologous to the endogenous polynucleotide sequence (either the coding regions or regulatory regions of the gene) can be used, with or without a selectable marker and/or a negative selectable marker, to transfect cells that express polypeptides of the invention in vivo. In another embodiment, techniques known in the art are used to generate knockouts in cells that contain, but do not express the gene of interest. Insertion of the DNA construct, via targeted homologous recombination, results in inactivation of the targeted gene. Such approaches are particularly suited in research and agricultural fields where modifications to embryonic stem cells can be used to generate animal offspring with an inactive targeted gene (e.g., see Thomas & Capecchi 1987 and Thompson 1989, supra). However this approach can be routinely adapted for use in humans provided the recombinant DNA constructs are directly administered or targeted to the required site in vivo using appropriate viral vectors that will be apparent to those of skill in the art.

[1117] In further embodiments of the invention, cells that are genetically engineered to express the polypeptides of the invention, or alternatively, that are genetically engineered not to express the polypeptides of the invention (e.g., knockouts) are administered to a patient in vivo. Such cells may be obtained from the patient (i.e., animal, including human) or an MHC compatible donor and can include, but are not limited to fibroblasts, bone marrow cells, blood cells (e.g., lymphocytes), adipocytes, muscle cells, endothelial cells etc. The cells are genetically engineered in vitro using recombinant DNA techniques to introduce the coding sequence of polypeptides of the invention into the cells, or alternatively, to disrupt the coding sequence and/or endogenous regulatory sequence associated with the polypeptides of the invention, e.g., by transduction (using viral vectors, and preferably vectors that integrate the transgene into the cell genome) or transfection procedures, including, but not limited to, the use of plasmids, cosmids, YACs, naked DNA, electroporation, liposomes, etc. The coding sequence of the polypeptides of the invention can be placed under the control of a strong constitutive or inducible promoter or promoter/enhancer to achieve expression, and preferably secretion, of the polypeptides of the invention. The engineered cells which express and preferably secrete the polypeptides of the invention can be introduced into the patient systemically, e.g., in the circulation, or intraperitoneally.

[1118] Alternatively, the cells can be incorporated into a matrix and implanted in the body, e.g., genetically engineered fibroblasts can be implanted as part of a skin graft; genetically engineered endothelial cells can be implanted as part of a lymphatic or vascular graft. (See, for example, Anderson et al. U.S. Pat. No. 5,399,349; and Mulligan & Wilson, U.S. Pat. No. 5,460,959 each of which is incorporated by reference herein in its entirety).

[1119] When the cells to be administered are non-autologous or non-MHC compatible cells, they can be administered using well known techniques which prevent the development of a host immune response against the introduced cells. For example, the cells may be introduced in an encapsulated form which, while allowing for an exchange of components with the immediate extracellular environment, does not allow the introduced cells to be recognized by the host immune system.

[1120] Transgenic and “knock-out” animals of the invention have uses which include, but are not limited to, animal model systems useful in elaborating the biological function of polypeptides of the present invention, studying conditions and/or disorders associated with aberrant expression, and in screening for compounds effective in ameliorating such conditions and/or disorders.

### Example 21

### Assays Detecting Stimulation or Inhibition of B cell Proliferation and Differentiation

[1121] Generation of functional humoral immune responses requires both soluble and cognate signaling between B-lineage cells and their microenvironment. Signals may impart a positive stimulus that allows a B-lineage cell to continue its programmed development, or a negative stimulus that instructs the cell to arrest its current developmental pathway. To date, numerous stimulatory and inhibitory signals have been found to influence B cell responsiveness including IL-2, IL-4, IL-5, IL-6, IL-7, IL10, IL-13, IL-14 and IL-15. Interestingly, these signals are by themselves weak effectors but can, in combination with various co-stimulatory proteins, induce activation, proliferation, differentiation, homing, tolerance and death among B cell populations.

[1122] One of the best studied classes of B-cell co-stimulatory proteins is the TNF-superfamily. Within this family CD40, CD27, and CD30 along with their respective ligands CD154, CD70, and CD153 have been found to regulate a variety of immune responses. Assays which allow for the detection and/or observation of the proliferation and differentiation of these B-cell populations and their precursors are valuable tools in determining the effects various proteins may have on these B-cell populations in terms of proliferation and differentiation. Listed below are two assays designed to allow for the detection of the differentiation, proliferation, or inhibition of B-cell populations and their precursors.

[1123] In vitro Assay—Agonists or antagonists of the invention can be assessed for its ability to induce activation, proliferation, differentiation or inhibition and/or death in B-cell populations and their precursors. The activity of the agonists or antagonists of the invention on purified human tonsillar B cells, measured qualitatively over the dose range from 0.1 to 10,000 ng/mL, is assessed in a standard B-lymphocyte co-stimulation assay in which purified tonsillar B cells are cultured in the presence of either formalin-fixed Staphylococcus aureus Cowan I (SAC) or immobilized anti-human IgM antibody as the priming agent. Second signals such as IL-2 and IL-15 synergize with SAC and IgM crosslinking to elicit B cell proliferation as measured by tritiated-thymidine incorporation. Novel synergizing agents can be readily identified using this assay. The assay involves isolating human tonsillar B cells by magnetic bead (MACS) depletion of CD3-positive cells. The resulting cell population is greater than 95% B cells as assessed by expression of CD45R(B220).

[1124] Various dilutions of each sample are placed into individual wells of a 96-well plate to which are added 10⁵ B-cells suspended in culture medium (RPMI 1640 containing 10% FBS, 5×10⁻⁵M 2ME, 100 U/ml penicillin, 10 ug/ml streptomycin, and 10⁻⁵ dilution of SAC) in a total volume of 150 ul. Proliferation or inhibition is quantitated by a 20 h pulse (1 uCi/well) with 3H-thymidine (6.7 Ci/mM) beginning 72 h post factor addition. The positive and negative controls are IL2 and medium respectively.

[1125] In Vivo Assay—BALB/c mice are injected (i.p.) twice per day with buffer only, or 2 mg/Kg of agonists or antagonists of the invention, or truncated forms thereof. Mice receive this treatment for 4 consecutive days, at which time they are sacrificed and various tissues and serum collected for analyses. Comparison of H&E sections from normal spleens and spleens treated with agonists or antagonists of the invention identify the results of the activity of the agonists or antagonists on spleen cells, such as the diffusion of peri-arterial lymphatic sheaths, and/or significant increases in the nucleated cellularity of the red pulp regions, which may indicate the activation of the differentiation and proliferation of B-cell populations.

[1126] Immunohistochemical studies using a B cell marker, anti-CD45R(B220), are used to determine whether any physiological changes to splenic cells, such as splenic disorganization, are due to increased B-cell representation within loosely defined B-cell zones that infiltrate established T-cell regions.

[1127] Flow cytometric analyses of the spleens from mice treated with agonist or antagonist is used to indicate whether the agonists or antagonists specifically increases the proportion of ThB+, CD45R(B220)dull B cells over that which is observed in control mice.

[1128] Likewise, a predicted consequence of increased mature B-cell representation in vivo is a relative increase in serum Ig titers. Accordingly, serum IgM and IgA levels are compared between buffer and agonists or antagonists-treated mice.

[1129] The studies described in this example tested activity of agonists or antagonists of the invention. However, one skilled in the art could easily modify the exemplified studies to test the activity of polynucleotides or polypeptides of the invention (e.g., gene therapy).

### Example 22

### T Cell Proliferation Assay

[1130] A CD3-induced proliferation assay is performed on PBMCs and is measured by the uptake of ³H-thymidine. The assay is performed as follows. Ninety-six well plates are coated with 100 μl/well of mAb to CD3 (HIT3a, Pharmingen) or isotype-matched control mAb (B33.1) overnight at 4 degrees C. (1 μg/ml in 0.05M bicarbonate buffer, pH 9.5), then washed three times with PBS. PBMC are isolated by F/H gradient centrifugation from human peripheral blood and added to quadruplicate wells (5×10⁴/well) of mAb coated plates in RPMI containing 10% FCS and P/S in the presence of varying concentrations of agonists or antagonists of the invention (total volume 200 ul). Relevant protein buffer and medium alone are controls. After 48 hr. culture at 37 degrees C., plates are spun for 2 min. at 1000 rpm and 100 μl of supernatant is removed and stored −20 degrees C. for measurement of IL-2 (or other cytokines) if effect on proliferation is observed. Wells are supplemented with 100 ul of medium containing 0.5 uCi of ³H-thymidine and cultured at 37 degrees C. for 18-24 hr. Wells are harvested and incorporation of ³H-thymidine used as a measure of proliferation. Anti-CD3 alone is the positive control for proliferation. IL-2 (100 U/ml) is also used as a control which enhances proliferation. Control antibody which does not induce proliferation of T cells is used as the negative control for the effects of agonists or antagonists of the invention.

[1131] The studies described in this example tested activity of agonists or antagonists of the invention. However, one skilled in the art could easily modify the exemplified studies to test the activity of polynucleotides or polypeptides of the invention (e.g., gene therapy).

### Example 23

### Effect of Agonists or Antagonists of the Invention on the Expression of MHC Class II, Costimulatory and Adhesion Molecules and Cell Differentiation of Monocytes and Monocyte-Derived Human Dendritic Cells

[1132] Dendritic cells are generated by the expansion of proliferating precursors found in the peripheral blood: adherent PBMC or elutriated monocytic fractions are cultured for 7-10 days with GM-CSF (50 ng/ml) and IL-4 (20 ng/ml). These dendritic cells have the characteristic phenotype of immature cells (expression of CD1, CD80, CD86, CD40 and MHC class II antigens). Treatment with activating factors, such as TNF-α, causes a rapid change in surface phenotype (increased expression of MHC class I and II, costimulatory and adhesion molecules, downregulation of FCγRII, upregulation of CD83). These changes correlate with increased antigen-presenting capacity and with functional maturation of the dendritic cells.

[1133] FACS analysis of surface antigens is performed as follows. Cells are treated 1-3 days with increasing concentrations of agonist or antagonist of the invention or LPS (positive control), washed with PBS containing 1% BSA and 0.02 mM sodium azide, and then incubated with 1:20 dilution of appropriate FITC- or PE-labeled monoclonal antibodies for 30 minutes at 4 degrees C. After an additional wash, the labeled cells are analyzed by flow cytometry on a FACScan (Becton Dickinson).

[1134] Effect on the production of cytokines. Cytokines generated by dendritic cells, in particular IL-12, are important in the initiation of T-cell dependent immune responses. IL-12 strongly influences the development of Thl helper T-cell immune response, and induces cytotoxic T and NK cell function. An ELISA is used to measure the IL-12 release as follows. Dendritic cells (10⁶/ml) are treated with increasing concentrations of agonists or antagonists of the invention for 24 hours. LPS (100 ng/ml) is added to the cell culture as positive control. Supernatants from the cell cultures are then collected and analyzed for IL-12 content using commercial ELISA kit (e.g., R & D Systems (Minneapolis, Minn.)). The standard protocols provided with the kits are used.

[1135] Effect on the expression of MHC Class II, costimulatory and adhesion molecules. Three major families of cell surface antigens can be identified on monocytes: adhesion molecules, molecules involved in antigen presentation, and Fc receptor. Modulation of the expression of MHC class II antigens and other costimulatory molecules, such as B7 and ICAM-1, may result in changes in the antigen presenting capacity of monocytes and ability to induce T cell activation. Increased expression of Fc receptors may correlate with improved monocyte cytotoxic activity, cytokine release and phagocytosis.

[1136] FACS analysis is used to examine the surface antigens as follows.

[1137] Monocytes are treated 1-5 days with increasing concentrations of agonists or antagonists of the invention or LPS (positive control), washed with PBS containing 1% BSA and 0.02 mM sodium azide, and then incubated with 1:20 dilution of appropriate FITC- or PE-labeled monoclonal antibodies for 30 minutes at 4 degrees C.

[1138] After an additional wash, the labeled cells are analyzed by flow cytometry on a FACScan (Becton Dickinson).

[1139] Monocyte activation and/or increased survival. Assays for molecules that activate (or alternatively, inactivate) monocytes and/or increase monocyte survival (or alternatively, decrease monocyte survival) are known in the art and may routinely be applied to determine whether a molecule of the invention functions as an inhibitor or activator of monocytes. Agonists or antagonists of the invention can be screened using the three assays described below. For each of these assays, Peripheral blood mononuclear cells (PBMC) are purified from single donor leukopacks (American Red Cross, Baltimore, Md.) by centrifugation through a Histopaque gradient (Sigma). Monocytes are isolated from PBMC by counterflow centrifugal elutriation.

[1140] Monocyte Survival Assay. Human peripheral blood monocytes progressively lose viability when cultured in absence of serum or other stimuli. Their death results from internally regulated processes (apoptosis). Addition to the culture of activating factors, such as TNF-alpha dramatically improves cell survival and prevents DNA fragmentation. Propidium iodide (PI) staining is used to measure apoptosis as follows. Monocytes are cultured for 48 hours in polypropylene tubes in serum-free medium (positive control), in the presence of 100 ng/ml TNF-alpha (negative control), and in the presence of varying concentrations of the compound to be tested. Cells are suspended at a concentration of 2×10⁶/ml in PBS containing PI at a final concentration of 5 μg/ml, and then incubated at room temperature for 5 minutes before FACScan analysis. PI uptake has been demonstrated to correlate with DNA fragmentation in this experimental paradigm.

[1141] Effect on cytokine release. An important function of monocytes/macrophages is their regulatory activity on other cellular populations of the immune system through the release of cytokines after stimulation. An ELISA to measure cytokine release is performed as follows. Human monocytes are incubated at a density of 5×10⁵ cells/ml with increasing concentrations of agonists or antagonists of the invention and under the same conditions, but in the absence of agonists or antagonists. For IL-12 production, the cells are primed overnight with IFN (100 U/ml) in the presence of agonist or antagonist of the invention. LPS (10 ng/ml) is then added. Conditioned media are collected after 24h and kept frozen until use. Measurement of TNF-alpha, IL-10, MCP-1 and IL-8 is then performed using a commercially available ELISA kit (e.g., R & D Systems (Minneapolis, Minn.)) and applying the standard protocols provided with the kit.

[1142] Oxidative burst. Purified monocytes are plated in 96-w plate at 2-1×10⁵ cell/well. Increasing concentrations of agonists or antagonists of the invention are added to the wells in a total volume of 0.2 ml culture medium (RPMI 1640+10% FCS, glutamine and antibiotics). After 3 days incubation, the plates are centrifuged and the medium is removed from the wells. To the macrophage monolayers, 0.2 ml per well of phenol red solution (140 mM NaCl, 10 mM potassium phosphate buffer pH 7.0, 5.5 mM dextrose, 0.56 mM phenol red and 19 U/ml of HRPO) is added, together with the stimulant (200 nM PMA). The plates are incubated at 37° C. for 2 hours and the reaction is stopped by adding 20 μl 1N NaOH per well. The absorbance is read at 610 nm. To calculate the amount of H₂O₂ produced by the macrophages, a standard curve of a H₂O₂ solution of known molarity is performed for each experiment.

[1143] The studies described in this example tested activity of agonists or antagonists of the invention. However, one skilled in the art could easily modify the exemplified studies to test the activity of polynucleotides or polypeptides of the invention (e.g., gene therapy).

### Example 24

### Biological Effects of Agonists or Antagonists of the Invention Astrocyte and Neuronal Assays.

[1144] Agonists or antagonists of the invention, expressed in Escherichia coli and purified as described above, can be tested for activity in promoting the survival, neurite outgrowth, or phenotypic differentiation of cortical neuronal cells and for inducing the proliferation of glial fibrillary acidic protein immunopositive cells, astrocytes. The selection of cortical cells for the bioassay is based on the prevalent expression of FGF-1and FGF-2 in cortical structures and on the previously reported enhancement of cortical neuronal survival resulting from FGF-2 treatment. A thymidine incorporation assay, for example, can be used to elucidate an agonist or antagonist of the invention's activity on these cells.

[1145] Moreover, previous reports describing the biological effects of FGF-2 (basic FGF) on cortical or hippocampal neurons in vitro have demonstrated increases in both neuron survival and neurite outgrowth (Walicke et al., “Fibroblast growth factor promotes survival of dissociated hippocampal neurons and enhances neurite extension.” Proc. Natl. Acad. Sci. USA 83:3012-3016. (1986), assay herein incorporated by reference in its entirety). However, reports from experiments done on PC-12 cells suggest that these two responses are not necessarily synonymous and may depend on not only which FGF is being tested but also on which receptor(s) are expressed on the target cells. Using the primary cortical neuronal culture paradigm, the ability of an agonist or antagonist of the invention to induce neurite outgrowth can be compared to the response achieved with FGF-2 using, for example, a thymidine incorporation assay.

[1146] Fibroblast and Endothelial Cell Assays

[1147] Human lung fibroblasts are obtained from Clonetics (San Diego, Calif.) and maintained in growth media from Clonetics. Dermal microvascular endothelial cells are obtained from Cell Applications (San Diego, Calif.). For proliferation assays, the human lung fibroblasts and dermal microvascular endothelial cells can be cultured at 5,000 cells/well in a 96-well plate for one day in growth medium. The cells are then incubated for one day in 0.1% BSA basal medium. After replacing the medium with fresh 0.1% BSA medium, the cells are incubated with the test proteins for 3 days. Alamar Blue (Alamar Biosciences, Sacramento, Calif.) is added to each well to a final concentration of 10%. The cells are incubated for 4 hr. Cell viability is measured by reading in a CytoFluor fluorescence reader. For the PGE₂ assays, the human lung fibroblasts are cultured at 5,000 cells/well in a 96-well plate for one day. After a medium change to 0.1% BSA basal medium, the cells are incubated with FGF-2 or agonists or antagonists of the invention with or without IL-1α for 24 hours. The supernatants are collected and assayed for PGE₂ by EIA kit (Cayman, Ann Arbor, Mich.). For the IL-6 assays, the human lung fibroblasts are cultured at 5,000 cells/well in a 96-well plate for one day. After a medium change to 0.1% BSA basal medium, the cells are incubated with FGF-2 or with or without agonists or antagonists of the invention IL-1α for 24 hours. The supernatants are collected and assayed for IL-6 by ELISA kit (Endogen, Cambridge, Mass.).

[1148] Human lung fibroblasts are cultured with FGF-2 or agonists or antagonists of the invention for 3 days in basal medium before the addition of Alamar Blue to assess effects on growth of the fibroblasts. FGF-2 should show a stimulation at 10-2500 ng/ml which can be used to compare stimulation with agonists or antagonists of the invention.

[1149] Parkinson Models.

[1150] The loss of motor function in Parkinson's disease is attributed to a deficiency of striatal dopamine resulting from the degeneration of the nigrostriatal dopaminergic projection neurons. An animal model for Parkinson's that has been extensively characterized involves the systemic administration of 1-methyl-4 phenyl 1,2,3,6-tetrahydropyridine (MPTP). In the CNS, MPTP is taken-up by astrocytes and catabolized by monoamine oxidase B to 1-methyl-4-phenyl pyridine (MPP⁺) and released. Subsequently, MPP⁺ is actively accumulated in dopaminergic neurons by the high-affinity reuptake transporter for dopamine. MPP⁺ is then concentrated in mitochondria by the electrochemical gradient and selectively inhibits nicotidamide adenine disphosphate: ubiquinone oxidoreductionase (complex I), thereby interfering with electron transport and eventually generating oxygen radicals.

[1151] It has been demonstrated in tissue culture paradigms that FGF-2 (basic FGF) has trophic activity towards nigral dopaminergic neurons (Ferrari et al., Dev. Biol. 1989). Recently, Dr. Unsicker's group has demonstrated that administering FGF-2 in gel foam implants in the striatum results in the near complete protection of nigral dopaminergic neurons from the toxicity associated with MPTP exposure (Otto and Unsicker, J. Neuroscience, 1990).

[1152] Based on the data with FGF-2, agonists or antagonists of the invention can be evaluated to determine whether it has an action similar to that of FGF-2 in enhancing dopaminergic neuronal survival in vitro and it can also be tested in vivo for protection of dopaminergic neurons in the striatum from the damage associated with MPTP treatment.

[1153] The potential effect of an agonist or antagonist of the invention is first examined in vitro in a dopaminergic neuronal cell culture paradigm. The cultures are prepared by dissecting the midbrain floor plate from gestation day 14 Wistar rat embryos. The tissue is dissociated with trypsin and seeded at a density of 200,000 cells/cm² on polyorthinine-laminin coated glass coverslips. The cells are maintained in Dulbecco's Modified Eagle's medium and F12 medium containing hormonal supplements (N1). The cultures are fixed with paraformaldehyde after 8 days in vitro and are processed for tyrosine hydroxylase, a specific marker for dopaminergic neurons, immunohistochemical staining. Dissociated cell cultures are prepared from embryonic rats. The culture medium is changed every third day and the factors are also added at that time.

[1154] Since the dopaminergic neurons are isolated from animals at gestation day 14, a developmental time which is past the stage when the dopaminergic precursor cells are proliferating, an increase in the number of tyrosine hydroxylase immunopositive neurons would represent an increase in the number of dopaminergic neurons surviving in vitro. Therefore, if an agonist or antagonist of the invention acts to prolong the survival of dopaminergic neurons, it would suggest that the agonist or antagonist may be involved in Parkinson's Disease.

[1155] The studies described in this example tested activity of agonists or antagonists of the invention. However, one skilled in the art could easily modify the exemplified studies to test the activity of polynucleotides or polypeptides of the invention (e.g., gene therapy).

### Example 25

### The Effect of Agonists or Antagonists of the Invention on the Growth of Vascular Endothelial Cells

[1156] On day 1, human umbilical vein endothelial cells (HUVEC) are seeded at 2-5×10⁴ cells/35 mm dish density in M199 medium containing 4% fetal bovine serum (FBS), 16 units/ml heparin, and 50 units/ml endothelial cell growth supplements (ECGS, Biotechnique, Inc.). On day 2, the medium is replaced with M199 containing 10% FBS, 8 units/ml heparin. An agonist or antagonist of the invention, and positive controls, such as VEGF and basic FGF (bFGF) are added, at varying concentrations. On days 4 and 6, the medium is replaced. On day 8, cell number is determined with a Coulter Counter.

[1157] An increase in the number of HUVEC cells indicates that the compound of the invention may proliferate vascular endothelial cells, while a decrease in the number of HUVEC cells indicates that the compound of the invention inhibits vascular endothelial cells.

[1158] The studies described in this example tested activity of a polypeptide of the invention. However, one skilled in the art could easily modify the exemplified studies to test the activity of polynucleotides (e.g., gene therapy), agonists, and/or antagonists of the invention.

### Example 26

### Rat Corneal Wound Healing Model

[1159] This animal model shows the effect of an agonist or antagonist of the invention on neovascularization. The experimental protocol includes:

[1160] Making a 1-1.5 mm long incision from the center of cornea into the stromal layer.

[1161] Inserting a spatula below the lip of the incision facing the outer comer of the eye.

[1162] Making a pocket (its base is 1-1.5 mm form the edge of the eye).

[1163] Positioning a pellet, containing 50ng-5ug of an agonist or antagonist of the invention, within the pocket.

[1164] Treatment with an agonist or antagonist of the invention can also be applied topically to the corneal wounds in a dosage range of 20mg -500mg (daily treatment for five days).

[1165] The studies described in this example tested activity of agonists or antagonists of the invention. However, one skilled in the art could easily modify the exemplified studies to test the activity of polynucleotides or polypeptides of the invention (e.g., gene therapy).

### Example 27

### Diabetic Mouse and Glucocorticoid-Impaired Wound Healing Models

[1166] Diabetic db+/db+Mouse Model.

[1167] To demonstrate that an agonist or antagonist of the invention accelerates the healing process, the genetically diabetic mouse model of wound healing is used. The full thickness wound healing model in the db+/db+mouse is a well characterized, clinically relevant and reproducible model of impaired wound healing. Healing of the diabetic wound is dependent on formation of granulation tissue and re-epithelialization rather than contraction (Gartner, M. H. et al., J. Surg. Res. 52:389 (1992); Greenhalgh, D.G. et al., Am. J. Pathol. 136:1235 (1990)).

[1168] The diabetic animals have many of the characteristic features observed in Type II diabetes mellitus. Homozygous (db+/db+) mice are obese in comparison to their normal heterozygous (db+/+m) littermates. Mutant diabetic (db+/db+) mice have a single autosomal recessive mutation on chromosome 4 (db+) (Coleman et al. Proc. Natl. Acad. Sci. USA 77:283-293 (1982)). Animals show polyphagia, polydipsia and polyuria. Mutant diabetic mice (db+/db+) have elevated blood glucose, increased or normal insulin levels, and suppressed cell-mediated immunity (Mandel et al., J. Immunol. 120:1375 (1978); Debray-Sachs, M. et al., Clin. Exp. Immunol. 51(1):1-7 (1983); Leiter et al., Am. J. of Pathol. 114:46-55 (1985)). Peripheral neuropathy, myocardial complications, and microvascular lesions, basement membrane thickening and glomerular filtration abnormalities have been described in these animals (Norido, F. et al., Exp. Neurol. 83(2):221-232 (1984); Robertson et al., Diabetes 29(l):60-67 (1980); Giacomelli et al., Lab Invest. 40(4):460-473 (1979); Coleman, D. L., Diabetes 31 (Suppl):1-6 (1982)). These homozygous diabetic mice develop hyperglycemia that is resistant to insulin analogous to human type II diabetes (Mandel et al., J. Immunol. 120:1375-1377 (1978)).

[1169] The characteristics observed in these animals suggests that healing in this model may be similar to the healing observed in human diabetes (Greenhalgh, et al., Am. J. of Pathol. 136:1235-1246 (1990)).

[1170] Genetically diabetic female C57BL/KsJ (db+/db+) mice and their non-diabetic (db+/+m) heterozygous littermates are used in this study (Jackson Laboratories). The animals are purchased at 6 weeks of age and are 8 weeks old at the beginning of the study. Animals are individually housed and received food and water ad libitum. All manipulations are performed using aseptic techniques. The experiments are conducted according to the rules and guidelines of Human Genome Sciences, Inc. Institutional Animal Care and Use Committee and the Guidelines for the Care and Use of Laboratory Animals.

[1171] Wounding protocol is performed according to previously reported methods (Tsuboi, R. and Rifkin, D. B., J. Exp. Med. 172:245-251 (1990)). Briefly, on the day of wounding, animals are anesthetized with an intraperitoneal injection of Avertin (0.01 mg/mL), 2,2,2-tribromoethanol and 2-methyl-2-butanol dissolved in deionized water. The dorsal region of the animal is shaved and the skin washed with 70% ethanol solution and iodine. The surgical area is dried with sterile gauze prior to wounding. An 8 mm full-thickness wound is then created using a Keyes tissue punch. Immediately following wounding, the surrounding skin is gently stretched to eliminate wound expansion. The wounds are left open for the duration of the experiment. Application of the treatment is given topically for 5 consecutive days commencing on the day of wounding. Prior to treatment, wounds are gently cleansed with sterile saline and gauze sponges.

[1172] Wounds are visually examined and photographed at a fixed distance at the day of surgery and at two day intervals thereafter. Wound closure is determined by daily measurement on days 1-5 and on day 8. Wounds are measured horizontally and vertically using a calibrated Jameson caliper. Wounds are considered healed if granulation tissue is no longer visible and the wound is covered by a continuous epithelium.

[1173] An agonist or antagonist of the invention is administered using at a range different doses, from 4mg to 500 mg per wound per day for 8 days in vehicle. Vehicle control groups received 50 mL of vehicle solution.

[1174] Animals are euthanized on day 8 with an intraperitoneal injection of sodium pentobarbital (300 mg/kg). The wounds and surrounding skin are then harvested for histology and immunohistochemistry. Tissue specimens are placed in 10% neutral buffered formalin in tissue cassettes between biopsy sponges for further processing.

[1175] Three groups of 10 animals each (5 diabetic and 5 non-diabetic controls) are evaluated: 1) Vehicle placebo control, 2) untreated group, and 3) treated group.

[1176] Wound closure is analyzed by measuring the area in the vertical and horizontal axis and obtaining the total square area of the wound. Contraction is then estimated by establishing the differences between the initial wound area (day 0) and that of post treatment (day 8). The wound area on day 1 is 64mm², the corresponding size of the dermal punch. Calculations are made using the following formula:

[Open area on day 8]−[Open area on day 1]/[Open area on day 1]

[1177] Specimens are fixed in 10% buffered formalin and paraffin embedded blocks are sectioned perpendicular to the wound surface (5 mm) and cut using a Reichert-Jung microtome. Routine hematoxylin-eosin (H&E) staining is performed on cross-sections of bisected wounds. Histologic examination of the wounds are used to assess whether the healing process and the morphologic appearance of the repaired skin is altered by treatment with an agonist or antagonist of the invention. This assessment included verification of the presence of cell accumulation, inflammatory cells, capillaries, fibroblasts, re-epithelialization and epidermal maturity (Greenhalgh, D. G. et al., Am. J. Pathol. 136:1235 (1990)). A calibrated lens micrometer is used by a blinded observer.

[1178] Tissue sections are also stained immunohistochemically with a polyclonal rabbit anti-human keratin antibody using ABC Elite detection system. Human skin is used as a positive tissue control while non-immune IgG is used as a negative control. Keratinocyte growth is determined by evaluating the extent of reepithelialization of the wound using a calibrated lens micrometer.

[1179] Proliferating cell nuclear antigen/cyclin (PCNA) in skin specimens is demonstrated by using anti-PCNA antibody (1:50) with an ABC Elite detection system. Human colon cancer served as a positive tissue control and human brain tissue is used as a negative tissue control. Each specimen included a section with omission of the primary antibody and substitution with non-immune mouse IgG. Ranking of these sections is based on the extent of proliferation on a scale of 0-8, the lower side of the scale reflecting slight proliferation to the higher side reflecting intense proliferation.

[1180] Experimental data are analyzed using an unpaired t test. A p value of <0.05 is considered significant.

[1181] Steroid Impaired Rat Model

[1182] The inhibition of wound healing by steroids has been well documented in various in vitro and in vivo systems (Wahl, Glucocorticoids and Wound healing. In: Anti-Inflammatory Steroid Action: Basic and Clinical Aspects. 280-302 (1989); Wahl et al., J. Inmunol. 115: 476-481 (1975); Werb et al., J. Exp. Med. 147:1684-1694 (1978)). Glucocorticoids retard wound healing by inhibiting angiogenesis, decreasing vascular permeability (Ebert et al., An. Intern. Med. 37:701-705 (1952)), fibroblast proliferation, and collagen synthesis (Beck et al., Growth Factors. 5: 295-304 (1991); Haynes et al., J. Clin. Invest. 61: 703-797 (1978)) and producing a transient reduction of circulating monocytes (Haynes et al., J. Clin. Invest. 61: 703-797 (1978); Wahl, “Glucocorticoids and wound healing”, In: Antiinflammatory Steroid Action: Basic and Clinical Aspects, Academic Press, New York, pp. 280-302 (1989)). The systemic administration of steroids to impaired wound healing is a well establish phenomenon in rats (Beck et al., Growth Factors. 5: 295-304 (1991); Haynes et al., J. Clin. Invest. 61: 703-797 (1978); Wahl, “Glucocorticoids and wound healing”, In: Antiinflammatory Steroid Action: Basic and Clinical Aspects, Academic Press, New York, pp. 280-302 (1989); Pierce et al., Proc. Natl. Acad. Sci. USA 86: 2229-2233 (1989)).

[1183] To demonstrate that an agonist or antagonist of the invention can accelerate the healing process, the effects of multiple topical applications of the agonist or antagonist on full thickness excisional skin wounds in rats in which healing has been impaired by the systemic administration of methylprednisolone is assessed.

[1184] Young adult male Sprague Dawley rats weighing 250-300 g (Charles River Laboratories) are used in this example. The animals are purchased at 8 weeks of age and are 9 weeks old at the beginning of the study. The healing response of rats is impaired by the systemic administration of methylprednisolone (17 mg/kg/rat intramuscularly) at the time of wounding. Animals are individually housed and received food and water ad libitum. All manipulations are performed using aseptic techniques. This study is conducted according to the rules and guidelines of Human Genome Sciences, Inc. Institutional Animal Care and Use Committee and the Guidelines for the Care and Use of Laboratory Animals.

[1185] The wounding protocol is followed according to section A, above. On the day of wounding, animals are anesthetized with an intramuscular injection of ketamine (50 mg/kg) and xylazine (5 mg/kg). The dorsal region of the animal is shaved and the skin washed with 70% ethanol and iodine solutions. The surgical area is dried with sterile gauze prior to wounding. An 8 mm full-thickness wound is created using a Keyes tissue punch. The wounds are left open for the duration of the experiment. Applications of the testing materials are given topically once a day for 7 consecutive days commencing on the day of wounding and subsequent to methylprednisolone administration. Prior to treatment, wounds are gently cleansed with sterile saline and gauze sponges.

[1186] Wounds are visually examined and photographed at a fixed distance at the day of wounding and at the end of treatment. Wound closure is determined by daily measurement on days 1-5 and on day 8. Wounds are measured horizontally and vertically using a calibrated Jameson caliper. Wounds are considered healed if granulation tissue is no longer visible and the wound is covered by a continuous epithelium.

[1187] The agonist or antagonist of the invention is administered using at a range different doses, from 4mg to 500 mg per wound per day for 8 days in vehicle. Vehicle control groups received 50 mL of vehicle solution.

[1188] Animals are euthanized on day 8 with an intraperitoneal injection of sodium pentobarbital (300 mg/kg). The wounds and surrounding skin are then harvested for histology. Tissue specimens are placed in 10% neutral buffered formalin in tissue cassettes between biopsy sponges for further processing.

[1189] Three groups of 10 animals each (5 with methylprednisolone and 5 without glucocorticoid) are evaluated: 1) Untreated group 2) Vehicle placebo control 3) treated groups.

[1190] Wound closure is analyzed by measuring the area in the vertical and horizontal axis and obtaining the total area of the wound. Closure is then estimated by establishing the differences between the initial wound area (day 0) and that of post treatment (day 8). The wound area on day 1 is 64 mm2, the corresponding size of the dermal punch. Calculations are made using the following formula:

[Open area on day 8]−[Open area on day 1]/[Open area on day 1]

[1191] Specimens are fixed in 10% buffered formalin and paraffin embedded blocks are sectioned perpendicular to the wound surface (5 mm) and cut using an Olympus microtome. Routine hematoxylin-eosin (H&E) staining is performed on cross-sections of bisected wounds. Histologic examination of the wounds allows assessment of whether the healing process and the morphologic appearance of the repaired skin is improved by treatment with an agonist or antagonist of the invention. A calibrated lens micrometer is used by a blinded observer to determine the distance of the wound gap.

[1192] Experimental data are analyzed using an unpaired t test. A p value of <0.05 is considered significant.

[1193] The studies described in this example tested activity of agonists or antagonists of the invention. However, one skilled in the art could easily modify the exemplified studies to test the activity of polynucleotides or polypeptides of the invention (e.g., gene therapy).

### Example 28

### Lymphadema Animal Model

[1194] The purpose of this experimental approach is to create an appropriate and consistent lymphedema model for testing the therapeutic effects of an agonist or antagonist of the invention in lymphangiogenesis and re-establishment of the lymphatic circulatory system in the rat hind limb. Effectiveness is measured by swelling volume of the affected limb, quantification of the amount of lymphatic vasculature, total blood plasma protein, and histopathology. Acute lymphedema is observed for 7-10 days. Perhaps more importantly, the chronic progress of the edema is followed for up to 3-4 weeks.

[1195] Prior to beginning surgery, blood sample is drawn for protein concentration analysis. Male rats weighing approximately ˜350 g are dosed with Pentobarbital. Subsequently, the right legs are shaved from knee to hip. The shaved area is swabbed with gauze soaked in 70% EtOH. Blood is drawn for serum total protein testing. Circumference and volumetric measurements are made prior to injecting dye into paws after marking 2 measurement levels (0.5 cm above heel, at mid-pt of dorsal paw). The intradermal dorsum of both right and left paws are injected with 0.05 ml of 1% Evan's Blue. Circumference and volumetric measurements are then made following injection of dye into paws.

[1196] Using the knee joint as a landmark, a mid-leg inguinal incision is made circumferentially allowing the femoral vessels to be located. Forceps and hemostats are used to dissect and separate the skin flaps. After locating the femoral vessels, the lymphatic vessel that runs along side and underneath the vessel(s) is located. The main lymphatic vessels in this area are then electrically coagulated or suture ligated.

[1197] Using a microscope, muscles in back of the leg (near the semitendinosis and adductors) are bluntly dissected. The popliteal lymph node is then located. The 2 proximal and 2 distal lymphatic vessels and distal blood supply of the popliteal node are then ligated by suturing. The popliteal lymph node, and any accompanying adipose tissue, is then removed by cutting connective tissues.

[1198] Care is taken to control any mild bleeding resulting from this procedure. After lymphatics are occluded, the skin flaps are sealed by using liquid skin (Vetbond) (AJ Buck). The separated skin edges are sealed to the underlying muscle tissue while leaving a gap of 0.5 cm around the leg. Skin also may be anchored by suturing to underlying muscle when necessary.

[1199] To avoid infection, animals are housed individually with mesh (no bedding). Recovering animals are checked daily through the optimal edematous peak, which typically occurred by day 5-7. The plateau edematous peak are then observed. To evaluate the intensity of the lymphedema, the circumference and volumes of 2 designated places on each paw before operation and daily for 7 days are measured. The effect of plasma proteins on lymphedema is determined and whether protein analysis is a useful testing perimeter is also investigated. The weights of both control and edematous limbs are evaluated at 2 places. Analysis is performed in a blind manner.

[1200] Circumference Measurements: Under brief gas anesthetic to prevent limb movement, a cloth tape is used to measure limb circumference. Measurements are done at the ankle bone and dorsal paw by 2 different people and those 2 readings are averaged. Readings are taken from both control and edematous limbs.

[1201] Volumetric Measurements: On the day of surgery, animals are anesthetized with Pentobarbital and are tested prior to surgery. For daily volumetrics animals are under brief halothane anesthetic (rapid immobilization and quick recovery), and both legs are shaved and equally marked using waterproof marker on legs. Legs are first dipped in water, then dipped into instrument to each marked level, then measured by Buxco edema software (Chen/Victor). Data is recorded by one person, while the other is dipping the limb to marked area.

[1202] Blood-plasma protein measurements: Blood is drawn, spun, and serum separated prior to surgery and then at conclusion for total protein and Ca²⁺ comparison.

[1203] Limb Weight Comparison: After drawing blood, the animal is prepared for tissue collection. The limbs are amputated using a quillitine, then both experimental and control legs are cut at the ligature and weighed. A second weighing is done as the tibio-cacaneal joint is disarticulated and the foot is weighed.

[1204] Histological Preparations: The transverse muscle located behind the knee (popliteal) area is dissected and arranged in a metal mold, filled with freezeGel, dipped into cold methylbutane, placed into labeled sample bags at −80 EC until sectioning. Upon sectioning, the muscle is observed under fluorescent microscopy for lymphatics.

[1205] The studies described in this example tested activity of agonists or antagonists of the invention. However, one skilled in the art could easily modify the exemplified studies to test the activity of polynucleotides or polypeptides of the invention (e.g., gene therapy).

### Example 29

[1206] Suppression of TNF Alpha-induced Adhesion Molecule Expression by a Agonist or Antagonist of the Invention

[1207] The recruitment of lymphocytes to areas of inflammation and angiogenesis involves specific receptor-ligand interactions between cell surface adhesion molecules (CAMs) on lymphocytes and the vascular endothelium. The adhesion process, in both normal and pathological settings, follows a multi-step cascade that involves intercellular adhesion molecule-1 (ICAM-1), vascular cell adhesion molecule-1 (VCAM-1), and endothelial leukocyte adhesion molecule-1 (E-selectin) expression on endothelial cells (EC). The expression of these molecules and others on the vascular endothelium determines the efficiency with which leukocytes may adhere to the local vasculature and extravasate into the local tissue during the development of an inflammatory response. The local concentration of cytokines and growth factor participate in the modulation of the expression of these CAMs.

[1208] Tumor necrosis factor alpha (TNF-a), a potent proinflammatory cytokine, is a stimulator of all three CAMs on endothelial cells and may be involved in a wide variety of inflammatory responses, often resulting in a pathological outcome.

[1209] The potential of an agonist or antagonist of the invention to mediate a suppression of TNF-a induced CAM expression can be examined. A modified ELISA assay which uses ECs as a solid phase absorbent is employed to measure the amount of CAM expression on TNF-a treated ECs when co-stimulated with a member of the FGF family of proteins.

[1210] To perform the experiment, human umbilical vein endothelial cell (HUVEC) cultures are obtained from pooled cord harvests and maintained in growth medium (EGM-2; Clonetics, San Diego, Calif.) supplemented with 10% FCS and 1% penicillin/streptomycin in a 37 degree C. humidified incubator containing 5% CO₂. HUVECs are seeded in 96-well plates at concentrations of 1×10⁴ cells/well in EGM medium at 37 degree C. for 18-24 hrs or until confluent. The monolayers are subsequently washed 3 times with a serum-free solution of RPMI-1640 supplemented with 100 U/ml penicillin and 100 mg/ml streptomycin, and treated with a given cytokine and/or growth factor(s) for 24 h at 37 degree C. Following incubation, the cells are then evaluated for CAM expression.

[1211] Human Umbilical Vein Endothelial cells (HUVECs) are grown in a standard 96 well plate to confluence. Growth medium is removed from the cells and replaced with 90 ul of 199 Medium (10% FBS). Samples for testing and positive or negative controls are added to the plate in triplicate (in 10 ul volumes). Plates are incubated at 37 degree C. for either 5 h (selectin and integrin expression) or 24 h (integrin expression only). Plates are aspirated to remove medium and 100 μl of 0.1% paraformaldehyde-PBS(with Ca++ and Mg++) is added to each well. Plates are held at 4° C. for 30 min.

[1212] Fixative is then removed from the wells and wells are washed 1× with PBS(+Ca,Mg)+0.5% BSA and drained. Do not allow the wells to dry. Add 10 μl of diluted primary antibody to the test and control wells. Anti-ICAM-1-Biotin, Anti-VCAM-1-Biotin and Anti-E-selectin-Biotin are used at a concentration of 10 μg/ml (1:10 dilution of 0.1 mg/ml stock antibody). Cells are incubated at 37° C. for 30 min. in a humidified environment. Wells are washed ×3 with PBS(+Ca,Mg)+0.5% BSA.

[1213] Then add 20 μl of diluted ExtrAvidin-Alkaline Phosphotase (1:5,000 dilution) to each well and incubated at 37° C. for 30 min. Wells are washed ×3 with PBS(+Ca,Mg)+0.5% BSA. 1 tablet of p-Nitrophenol Phosphate pNPP is dissolved in 5 ml of glycine buffer (pH 10.4). 100 μl of pNPP substrate in glycine buffer is added to each test well. Standard wells in triplicate are prepared from the working dilution of the ExtrAvidin-Alkaline Phosphotase in glycine buffer: 1:5,000 (10⁰)>10^{-0.5}>10⁻¹>10^{-1.5}.5 μl of each dilution is added to triplicate wells and the resulting AP content in each well is 5.50 ng, 1.74 ng, 0.55 ng, 0.18 ng. 100 μl of pNNP reagent must then be added to each of the standard wells. The plate must be incubated at 37° C. for 4 h. A volume of 50 μl of 3M NaOH is added to all wells. The results are quantified on a plate reader at 405 nm. The background subtraction option is used on blank wells filled with glycine buffer only. The template is set up to indicate the concentration of AP-conjugate in each standard well [ 5.50 ng; 1.74 ng; 0.55 ng; 0.18 ng]. Results are indicated as amount of bound AP-conjugate in each sample.

[1214] The studies described in this example tested activity of agonists or antagonists of the invention. However, one skilled in the art could easily modify the exemplified studies to test the activity of polynucleotides or polypeptides of the invention (e.g., gene therapy).

### Example 30

### Production Of Polypeptide of the Invention For High-Throughput Screening Assays

[1215] The following protocol produces a supernatant containing polypeptide of the present invention to be tested. This supernatant can then be used in the Screening Assays described in Examples 32-41.

[1216] First, dilute Poly-D-Lysine (644 587 Boelringer-Mannheim) stock solution (1 mg/ml in PBS) 1:20 in PBS (w/o calcium or magnesium 17-516F Biowhittaker) for a working solution of 50 ug/ml. Add 200 ul of this solution to each well (24 well plates) and incubate at RT for 20 minutes. Be sure to distribute the solution over each well (note: a 12-channel pipetter may be used with tips on every other channel). Aspirate off the Poly-D-Lysine solution and rinse with 1ml PBS (Phosphate Buffered Saline). The PBS should remain in the well until just prior to plating the cells and plates may be poly-lysine coated in advance for up to two weeks.

[1217] Plate 293T cells (do not carry cells past P+20) at 2×10⁵ cells/well in 0.5 ml DMEM(Dulbecco's Modified Eagle Medium)(with 4.5 G/L glucose and L-glutamine (12-604F Biowhittaker))/10% heat inactivated FBS(14-503F Biowhittaker)/1×Penstrep(17-602E Biowhittaker). Let the cells grow overnight.

[1218] The next day, mix together in a sterile solution basin: 300 ul Lipofectamine (18324-012 Gibco/BRL) and 5 ml Optimem I (31985070 Gibco/BRL)/96-well plate. With a small volume multi-channel pipetter, aliquot approximately 2 ug of an expression vector containing a polynucleotide insert, produced by the methods described in Examples 8-10, into an appropriately labeled 96-well round bottom plate.

[1219] With a multi-channel pipetter, add 50 ul of the Lipofectamine/Optimem I mixture to each well. Pipette up and down gently to mix. Incubate at RT 15-45 minutes. After about 20 minutes, use a multi-channel pipetter to add 150 ul Optimem I to each well. As a control, one plate of vector DNA lacking an insert should be transfected with each set of transfections.

[1220] Preferably, the transfection should be performed by tag-teaming the following tasks. By tag-teaming, hands on time is cut in half, and the cells do not spend too much time on PBS. First, person A aspirates off the media from four 24-well plates of cells, and then person B rinses each well with 0.5-1 ml PBS. Person A then aspirates off PBS rinse, and person B, using a 12-channel pipetter with tips on every other channel, adds the 200 ul of DNA/Lipofectamine/Optimem I complex to the odd wells first, then to the even wells, to each row on the 24-well plates. Incubate at 37 degree C. for 6 hours.

[1221] While cells are incubating, prepare appropriate media, either 1% BSA in DMEM with 1× penstrep, or HGS CHO-5 media (116.6 mg/L of CaCl2 (anhyd); 0.00130 mg/L CuSO₄-5H₂O; 0.050 mg/L of Fe(NO₃)₃-9H₂O; 0.417 mg/L of FeSO₄-7H₂O; 311.80 mg/L of Kcl; 28.64 mg/L of MgCl₂; 48.84 mg/L of MgSO₄; 6995.50 mg/L of NaCl; 2400.0 mg/L of NaHCO₃; 62.50 mg/L of NaH₂PO₄-H₂O; 71.02 mg/L of Na₂HPO4; 0.4320 mg/L of ZnSO₄-7H₂O; 0.002 mg/L of Arachidonic Acid; 1.022 mg/L of Cholesterol; 0.070 mg/L of DL-alpha-Tocopherol-Acetate; 0.0520 mg/L of Linoleic Acid; 0.010 mg/L of Linolenic Acid; 0.010 mg/L of Myristic Acid; 0.010 mg/L of Oleic Acid; 0.010 mg/L of Palmitric Acid; 0.010 mg/L of Palmitic Acid; 100 mg/L of Pluronic F-68; 0.010 mg/L of Stearic Acid; 2.20 mg/L of Tween 80; 4551 mg/L of D-Glucose; 130.85 mg/ml of L- Alanine; 147.50 mg/ml of L-Arginine-HCL; 7.50 mg/ml of L-Asparagine-H₂O; 6.65 mg/ml of L-Aspartic Acid; 29.56 mg/ml of L-Cystine-2HCL-H₂O; 31.29 mg/ml of L-Cystine-2HCL; 7.35 mg/ml of L-Glutamic Acid; 365.0 mg/ml of L-Glutamine; 18.75 mg/ml of Glycine; 52.48 mg/ml of L-Histidine-HCL-H₂O; 106.97 mg/ml of L-Isoleucine; 111.45 mg/ml of L-Leucine; 163.75 mg/ml of L-Lysine HCL; 32.34 mg/ml of L-Methionine; 68.48 mg/ml of L-Phenylalainine; 40.0 mg/ml of L-Proline; 26.25 mg/ml of L-Serine; 101.05 mg/ml of L-Threonine; 19.22 mg/ml of L-Tryptophan; 91.79 mg/ml of L-Tryrosine-2Na-2H₂O; and 99.65 mg/ml of L-Valine; 0.0035 mg/L of Biotin; 3.24 mg/L of D-Ca Pantothenate; 11.78 mg/L of Choline Chloride; 4.65 mg/L of Folic Acid; 15.60 mg/L of i-Inositol; 3.02 mg/L of Niacinamide; 3.00 mg/L of Pyridoxal HCL; 0.031 mg/L of Pyridoxine HCL; 0.319 mg/L of Riboflavin; 3.17 mg/L of Thiamine HCL; 0.365 mg/L of Thymidine; 0.680 mg/L of Vitamin B₁₂; 25 mM of HEPES Buffer; 2.39 mg/L of Na Hypoxanthine; 0.105 mg/L of Lipoic Acid; 0.081 mg/L of Sodium Putrescine-2HCL; 55.0 mg/L of Sodium Pyruvate; 0.0067 mg/L of Sodium Selenite; 20 uM of Ethanolamine; 0.122 mg/L of Ferric Citrate; 41.70 mg/L of Methyl-B-Cyclodextrin complexed with Linoleic Acid; 33.33 mgl of Methyl-B-Cyclodextrin complexed with Oleic Acid; 10 mg/L of Methyl-B-Cyclodextrin complexed with Retinal Acetate. Adjust osmolarity to 327 mOsm) with 2 mm glutamine and 1x penstrep. (BSA (81-068-3 Bayer) 100 gm dissolved in 1L DMEM for a 10% BSA stock solution). Filter the media and collect 50 ul for endotoxin assay in 15 ml polystyrene conical.

[1222] The transfection reaction is terminated, preferably by tag-teaming, at the end of the incubation period. Person A aspirates off the transfection media, while person B adds 1.5 ml appropriate media to each well. Incubate at 37 degree C. for 45 or 72 hours depending on the media used: 1% BSA for 45 hours or CHO-5 for 72 hours.

[1223] On day four, using a 300 ul multichannel pipetter, aliquot 600 ul in one Iml deep well plate and the remaining supernatant into a 2 ml deep well. The supernatants from each well can then be used in the assays described in Examples 32-39.

[1224] It is specifically understood that when activity is obtained in any of the assays described below using a supernatant, the activity originates from either the polypeptide of the present invention directly (e.g., as a secreted protein) or by polypeptide of the present invention inducing expression of other proteins, which are then secreted into the supernatant. Thus, the invention further provides a method of identifying the protein in the supernatant characterized by an activity in a particular assay.

### Example 31

### Construction of GAS Reporter Construct

[1225] One signal transduction pathway involved in the differentiation and proliferation of cells is called the Jaks-STATs pathway. Activated proteins in the Jaks-STATs pathway bind to gamma activation site “GAS” elements or interferon-sensitive responsive element (“ISRE”), located in the promoter of many genes. The binding of a protein to these elements alter the expression of the associated gene.

[1226] GAS and ISRE elements are recognized by a class of transcription factors called Signal Transducers and Activators of Transcription, or “STATs.” There are six members of the STATs family. Stat1 and Stat3 are present in many cell types, as is Stat2 (as response to IFN-alpha is widespread). Stat4 is more restricted and is not in many cell types though it has been found in T helper class I, cells after treatment with IL-12. Stat5 was originally called mammary growth factor, but has been found at higher concentrations in other cells including myeloid cells. It can be activated in tissue culture cells by many cytokines.

[1227] The STATs are activated to translocate from the cytoplasm to the nucleus upon tyrosine phosphorylation by a set of kinases known as the Janus Kinase (“Jaks”) family. Jaks represent a distinct family of soluble tyrosine kinases and include Tyk2, Jak1, Jak2, and Jak3. These kinases display significant sequence similarity and are generally catalytically inactive in resting cells.

[1228] The Jaks are activated by a wide range of receptors summarized in the Table below. (Adapted from review by Schidler and Darnell, Ann. Rev. Biochem. 64:621-51 (1995).) A cytokine receptor family, capable of activating Jaks, is divided into two groups: (a) Class 1 includes receptors for IL-2, IL-3, IL-4, IL-6, IL-7, IL-9, IL-11, IL-12, IL-15, Epo, PRL, GH, G-CSF, GM-CSF, LIF, CNTF, and thrombopoietin; and (b) Class 2 includes IFN-a, IFN-g, and IL-10. The Class 1 receptors share a conserved cysteine motif (a set of four conserved cysteines and one tryptophan) and a WSXWS motif (a membrane proximal region encoding Trp-Ser-Xaa-Trp-Ser (SEQ ID NO: 2)).

[1229] Thus, on binding of a ligand to a receptor, Jaks are activated, which in turn activate STATs, which then translocate and bind to GAS elements. This entire process is encompassed in the Jaks-STATs signal transduction pathway.

[1230] Therefore, activation of the Jaks-STATs pathway, reflected by the binding of the GAS or the ISRE element, can be used to indicate proteins involved in the proliferation and differentiation of cells. For example, growth factors and cytokines are known to activate the Jaks-STATs pathway. (See Table below.) Thus, by using GAS elements linked to reporter molecules, activators of the Jaks-STATs pathway can be identified.

| | | JAKs | | | | GAS (elements) |
|---|---|---|---|---|---|---|
| Ligand | tyk2 | Jak1 | Jak2 | Jak3 | STATS | or ISRE |
| IFN family | | | | | | |
| IFN-a/B | + | + | − | − | 1,2,3 | ISRE |
| IFN-g | | + | + | − | 1 | GAS (IRF1 > Lys6 > IFP) |
| I1-10 | + | ? | ? | − | 1,3 | |
| gp130 family | | | | | | |
| IL-6 (Pleiotropic) | + | + | + | ? | 1,3 | GAS (IRF1 > Lys6 > IFP) |
| I1-11 (Pleiotropic) | ? | + | ? | ? | 1,3 | |
| OnM (Pleiotropic) | ? | + | + | ? | 1,3 | |
| LIF (Pleiotropic) | ? | + | + | ? | 1,3 | |
| CNTF (Pleiotropic) | −/+ | + | + | ? | 1,3 | |
| G-CSF (Pleiotropic) | ? | + | ? | ? | 1,3 | |
| IL-12 (Pleiotropic) | + | − | + | + | 1,3 | |
| g-C family | | | | | | |
| IL-2 (lymphocytes) | − | + | − | + | 1,3,5 | GAS |
| IL-4 (lymph/myeloid) | − | + | − | + | 6 | GAS (IRF1 = IFP >> Ly6)(IgH) |
| IL-7 (lymphocytes) | − | + | − | + | 5 | GAS |
| IL-9 (lymphocytes) | − | + | − | + | 5 | GAS |
| IL-13 (lymphocyte) | − | + | ? | ? | 6 | GAS |
| IL-15 | ? | + | ? | + | 5 | GAS |
| gp140 family | | | | | | |
| IL-3 (myeloid) | − | − | + | − | 5 | GAS (IRF1 > IFP >> Ly6) |
| IL-5 (myeloid) | − | − | + | − | 5 | GAS |
| GM-CSF (myeloid) | − | − | + | − | 5 | GAS |
| Growth hormone family | | | | | | |
| GH | ? | − | + | − | 5 | |
| PRL | ? | +/− | + | − | 1,3,5 | |
| EPO | ? | − | + | − | 5 | GAS(B − CAS > IRF1 = IFP >> Ly6) |
| Receptor Tyrosine Kinases | | | | | | |
| EGF | ? | + | + | − | 1,3 | GAS (IRF1) |
| PDGF | ? | + | + | − | 1,3 | |
| CSF-1 | ? | + | + | − | 1,3 | GAS (not IRF1) |

[1231] To construct a synthetic GAS containing promoter element, which is used in the Biological Assays described in Examples 32-33, a PCR based strategy is employed to generate a GAS-SV40 promoter sequence. The 5′ primer contains four tandem copies of the GAS binding site found in the IRF1 promoter and previously demonstrated to bind STATs upon induction with a range of cytokines (Rothman et al., Immunity 1:457-468 (1994).), although other GAS or ISRE elements can be used instead. The 5′ primer also contains 18bp of sequence complementary to the SV40 early promoter sequence and is flanked with an XhoI site. The sequence of the 5′ primer is:

| | |
|---|---|
| 5′:GCGCCTCGAGATTTCCCCGAAATCTAGATTTCCC | (SEQ ID NO:3) |
| CGAAATGATTTCCCCGAAATGATTTCCCCGAAATATC | |
| TGCCATCTCAATTAG:3′ | |

[1232] The downstream primer is complementary to the SV40 promoter and is flanked with a Hind III site: 5′:GCGGCAAGCTTTTTGCAAAGCCTAGGC:3′(SEQ ID NO:4.

[1233] PCR amplification is performed using the SV40 promoter template present in the B-gal:promoter plasmid obtained from Clontech. The resulting PCR fragment is digested with XhoI/Hind III and subcloned into BLSK2-. (Stratagene.) Sequencing with forward and reverse primers confirms that the insert contains the following sequence:

| | |
|---|---|
| 5′:CTCGAGATTTCCCCGAAATCTAGATTTCCCCGAAATG | (SEQ ID NO:5) |
| ATTTCCCCGAAATGATTTCCCCGAAATATCTGCCATC | |
| TCAATTAGTCAGCAACCATAGTCCCGCCCCTAACTCC | |
| GCCCATCCCGCCCCTAACTCCGCCCAGTTCCGCCCAT | |
| TCTCCGCCCCATGGCTGACTAATTTTTTTTTATTTAT | |
| GCAGAGGCCGAGGCCGCCTCGGCCTCTGAGCTATTCC | |
| AGAAGTAGTGAGGAGGCTTTTTTGGAGGCCTAGGCTT | |
| TTGCAAAAAGCTT:3′ | |

[1234] With this GAS promoter element linked to the SV40 promoter, a GAS:SEAP2 reporter construct is next engineered. Here, the reporter molecule is a secreted alkaline phosphatase, or “SEAP.” Clearly, however, any reporter molecule can be used instead of SEAP, in this or in any of the other Examples. Well known reporter molecules that can be used instead of SEAP include chloramphenicol acetyltransferase (CAT), luciferase, alkaline phosphatase, B-galactosidase, green fluorescent protein (GFP), or any protein detectable by an antibody.

[1235] The above sequence confirmed synthetic GAS-SV40 promoter element is subcloned into the pSEAP-Promoter vector obtained from Clontech using HindIII a and XhoI, effectively replacing the SV40 promoter with the amplified GAS:SV40 promoter element, to create the GAS-SEAP vector. However, this vector does not contain a neomycin resistance gene, and therefore, is not preferred for mammalian expression systems.

[1236] Thus, in order to generate mammalian stable cell lines expressing the GAS-SEAP reporter, the GAS-SEAP cassette is removed from the GAS-SEAP vector using SalI and NotI, and inserted into a backbone vector containing the neomycin resistance gene, such as pGFP-1 (Clontech), using these restriction sites in the multiple cloning site, to create the GAS-SEAP/Neo vector. Once this vector is transfected into mammalian cells, this vector can then be used as a reporter molecule for GAS binding as described in Examples 32-33.

[1237] Other constructs can be made using the above description and replacing GAS with a different promoter sequence. For example, construction of reporter molecules containing NFK-B and EGR promoter sequences are described in Examples 34 and 35. However, many other promoters can be substituted using the protocols described in these Examples. For instance, SRE, IL-2, NFAT, or Osteocalcin promoters can be substituted, alone or in combination (e.g., GAS/NF-KB/EGR, GAS/NF-KB, Il-2/NFAT, or NF-KB/GAS). Similarly, other cell lines can be used to test reporter construct activity, such as HELA (epithelial), HUVEC (endothelial), Reh (B-cell), Saos-2 (osteoblast), HUVAC (aortic), or Cardiomyocyte.

### Example 32

### High-Throughput Screening Assay for T-cell Activity.

[1238] The following protocol is used to assess T-cell activity by identifying factors, and determining whether supemate containing a polypeptide of the invention proliferates and/or differentiates T-cells. T-cell activity is assessed using the GAS/SEAP/Neo construct produced in Example 31. Thus, factors that increase SEAP activity indicate the ability to activate the Jaks-STATS signal transduction pathway. The T-cell used in this assay is Jurkat T-cells (ATCC Accession No. TIB-152), although Molt-3 cells (ATCC Accession No. CRL-1552) and Molt-4 cells (ATCC Accession No. CRL-1582) cells can also be used.

[1239] Jurkat T-cells are lymphoblastic CD4+Thl helper cells. In order to generate stable cell lines, approximately 2 million Jurkat cells are transfected with the GAS-SEAP/neo vector using DMRIE-C (Life Technologies)(transfection procedure described below). The transfected cells are seeded to a density of approximately 20,000 cells per well and transfectants resistant to 1 mg/ml genticin selected. Resistant colonies are expanded and then tested for their response to increasing concentrations of interferon gamma. The dose response of a selected clone is demonstrated.

[1240] Specifically, the following protocol will yield sufficient cells for 75 wells containing 200 ul of cells. Thus, it is either scaled up, or performed in multiple to generate sufficient cells for multiple 96 well plates. Jurkat cells are maintained in RPMI+10% serum with 1% Pen-Strep. Combine 2.5 mls of OPTI-MEM (Life Technologies) with 10 ug of plasmid DNA in a T25 flask. Add 2.5 ml OPTI-MEM containing 50 ul of DMRIE-C and incubate at room temperature for 15-45 mins.

[1241] During the incubation period, count cell concentration, spin down the required number of cells (10⁷ per transfection), and resuspend in OPTI-MEM to a final concentration of 10⁷ cells/ml. Then add 1 ml of 1×10⁷ cells in OPTI-MEM to T25 flask and incubate at 37 degree C. for 6 hrs. After the incubation, add 10 ml of RPMI+15% serum.

[1242] The Jurkat:GAS-SEAP stable reporter lines are maintained in RPMI+10% serum, 1 mg/ml Genticin, and 1% Pen-Strep. These cells are treated with supernatants containing polypeptide of the present invention or polypeptide of the present invention induced polypeptides as produced by the protocol described in Example 30.

[1243] On the day of treatment with the supernatant, the cells should be washed and resuspended in fresh RPMI +10% serum to a density of 500,000 cells per ml. The exact number of cells required will depend on the number of supernatants being screened. For one 96 well plate, approximately 10 million cells (for 10 plates, 100 million cells) are required.

[1244] Transfer the cells to a triangular reservoir boat, in order to dispense the cells into a 96 well dish, using a 12 channel pipette. Using a 12 channel pipette, transfer 200 ul of cells into each well (therefore adding 100,000 cells per well).

[1245] After all the plates have been seeded, 50 ul of the supernatants are transferred directly from the 96 well plate containing the supernatants into each well using a 12 channel pipette. In addition, a dose of exogenous interferon gamma (0.1, 1.0, 10 ng) is added to wells H9, H10, and H11 to serve as additional positive controls for the assay.

[1246] The 96 well dishes containing Jurkat cells treated with supernatants are placed in an incubator for 48 hrs (note: this time is variable between 48-72 hrs). 35 ul samples from each well are then transferred to an opaque 96 well plate using a 12 channel pipette. The opaque plates should be covered (using sellophene covers) and stored at −20 degree C. until SEAP assays are performed according to Example 36. The plates containing the remaining treated cells are placed at 4 degree C. and serve as a source of material for repeating the assay on a specific well if desired.

[1247] As a positive control, 100 Unit/ml interferon gamma can be used which is known to activate Jurkat T cells. Over 30 fold induction is typically observed in the positive control wells.

[1248] The above protocol may be used in the generation of both transient, as well as stable, transfected cells, which would be apparent to those of skill in the art.

### Example 33

### High-Throughput Screening Assay Identifying Myeloid Activity

[1249] The following protocol is used to assess myeloid activity of polypeptide of the present invention by determining whether polypeptide of the present invention proliferates and/or differentiates myeloid cells. Myeloid cell activity is assessed using the GAS/SEAP/Neo construct produced in Example 31. Thus, factors that increase SEAP activity indicate the ability to activate the Jaks-STATS signal transduction pathway. The myeloid cell used in this assay is U937, a pre-monocyte cell line, although TF-1, HL60, or KG1 can be used.

[1250] To transiently transfect U937 cells with the GAS/SEAP/Neo construct produced in Example 31, a DEAE-Dextran method (Kharbanda et. al., 1994, Cell Growth & Differentiation, 5:259-265) is used. First, harvest 2×10 U937 cells and wash with PBS. The U937 cells are usually grown in RPMI 1640 medium containing 10% heat-inactivated fetal bovine serum (FBS) supplemented with 100 units/ml penicillin and 100 mg/ml streptomycin.

[1251] Next, suspend the cells in 1 ml of 20 mM Tris-HCl (pH 7.4) buffer containing 0.5 mg/ml DEAE-Dextran, 8 ug GAS-SEAP2 plasmid DNA, 140 mM NaCl, 5 mM KCl, 375 uM Na₂HPO₄.7H₂O, 1 mM MgCl₂, and 675 uM CaCl₂. Incubate at 37 degrees C. for 45 min.

[1252] Wash the cells with RPMI 1640 medium containing 10% FBS and then resuspend in 10 ml complete medium and incubate at 37 degree C. for 36 hr.

[1253] The GAS-SEAP/U937 stable cells are obtained by growing the cells in 400 ug/ml G418. The G418-free medium is used for routine growth but every one to two months, the cells should be re-grown in 400 ug/ml G418 for couple of passages.

[1254] These cells are tested by harvesting 1×10⁸ cells (this is enough for ten 96-well plates assay) and wash with PBS. Suspend the cells in 200 ml above described growth medium, with a final density of 5×10⁵ cells/ml. Plate 200 ul cells per well in the 96-well plate (or 1×10⁵ cells/well).

[1255] Add 50 ul of the supernatant prepared by the protocol described in Example 30. Incubate at 37 degee C. for 48 to 72 hr. As a positive control, 100 Unit/ml interferon gamma can be used which is known to activate U937 cells. Over 30 fold induction is typically observed in the positive control wells. SEAP assay the supernatant according to the protocol described in Example 36.

### Example 34

### High-Throughput Screening Assay Identifying Neuronal Activity.

[1256] When cells undergo differentiation and proliferation, a group of genes are activated through many different signal transduction pathways. One of these genes, EGRI (early growth response gene 1), is induced in various tissues and cell types upon activation. The promoter of EGRI is responsible for such induction. Using the EGR1 promoter linked to reporter molecules, activation of cells can be assessed by polypeptide of the present invention.

[1257] Particularly, the following protocol is used to assess neuronal activity in PC12 cell lines. PC12 cells (rat phenochromocytoma cells) are known to proliferate and/or differentiate by activation with a number of mitogens, such as TPA (tetradecanoyl phorbol acetate), NGF (nerve growth factor), and EGF (epidermal growth factor). The EGRI gene expression is activated during this treatment. Thus, by stably transfecting PC12 cells with a construct containing an EGR promoter linked to SEAP reporter, activation of PC12 cells by polypeptide of the present invention can be assessed.

[1258] The EGR/SEAP reporter construct can be assembled by the following protocol. The EGR-1 promoter sequence (−633 to +1)(Sakamoto K et al., Oncogene 6:867-871 (1991)) can be PCR amplified from human genomic DNA using the following primers:

| | |
|---|---|
| 5′ GCGCTCGAGGGATGACAGCGATAGAACCCCGG- | (SEQ ID NO:6) |
| 3′ | |
| 5′ GCGAAGCTTCGCGACTCCCCGGATCCGCCTC-3′ | (SEQ ID NO:7) |

[1259] Using the GAS:SEAP/Neo vector produced in Example 31, EGRI amplified product can then be inserted into this vector. Linearize the GAS:SEAP/Neo vector using restriction enzymes XhoI/HindIII, removing the GAS/SV40 stuffer. Restrict the EGR1 amplified product with these same enzymes. Ligate the vector and the EGRI promoter.

[1260] To prepare 96 well-plates for cell culture, two mls of a coating solution (1:30 dilution of collagen type I (Upstate Biotech Inc. Cat#08-115) in 30% ethanol (filter sterilized)) is added per one 10 cm plate or 50 ml per well of the 96-well plate, and allowed to air dry for 2 hr.

[1261] PC12 cells are routinely grown in RPMI-1640 medium (Bio Whittaker) containing 10% horse serum (JRH BIOSCIENCES, Cat. # 12449-78P), 5% heat-inactivated fetal bovine serum (FBS) supplemented with 100 units/ml penicillin and 100 ug/ml streptomycin on a precoated 10 cm tissue culture dish. One to four split is done every three to four days. Cells are removed from the plates by scraping and resuspended with pipetting up and down for more than 15 times.

[1262] Transfect the EGR/SEAP/Neo construct into PC12 using the Lipofectamine protocol described in Example 30. EGR-SEAP/PC12 stable cells are obtained by growing the cells in 300 ug/ml G418. The G418-free medium is used for routine growth but every one to two months, the cells should be re-grown in 300 ug/ml G418 for couple of passages.

[1263] To assay for neuronal activity, a 10 cm plate with cells around 70 to 80% confluent is screened by removing the old medium. Wash the cells once with PBS (Phosphate buffered saline). Then starve the cells in low serum medium (RPMI-1640 containing 1% horse serum and 0.5% FBS with antibiotics) overnight.

[1264] The next morning, remove the medium and wash the cells with PBS. Scrape off the cells from the plate, suspend the cells well in 2 ml low serum medium. Count the cell number and add more low serum medium to reach final cell density as 5×10⁵ cells/ml.

[1265] Add 200 ul of the cell suspension to each well of 96-well plate (equivalent to 1×10⁵ cells/well). Add 50 ul supernatant produced by Example 30, 37 degree C. for 48 to 72 hr. As a positive control, a growth factor known to activate PC12 cells through EGR can be used, such as 50 ng/ul of Neuronal Growth Factor (NGF). Over fifty-fold induction of SEAP is typically seen in the positive control wells. SEAP assay the supernatant according to Example 36.

### Example 35

### High-Throughput Screening Assay for T-cell Activity

[1266] NF-KB (Nuclear Factor KB) is a transcription factor activated by a wide variety of agents including the inflammatory cytokines IL-1 and TNF, CD30 and CD40, lymphotoxin-alpha and lymphotoxin-beta, by exposure to LPS or thrombin, and by expression of certain viral gene products. As a transcription factor, NF-KB regulates the expression of genes involved in immune cell activation, control of apoptosis (NF-KB appears to shield cells from apoptosis), B and T-cell development, anti-viral and antimicrobial responses, and multiple stress responses.

[1267] In non-stimulated conditions, NF-KB is retained in the cytoplasm with I-KB (Inhibitor KB). However, upon stimulation, I-KB is phosphorylated and degraded, causing NF-KB to shuttle to the nucleus, thereby activating transcription of target genes. Target genes activated by NF-KB include IL-2, IL-6, GM-CSF, ICAM-1 and class 1 MHC.

[1268] Due to its central role and ability to respond to a range of stimuli, reporter constructs utilizing the NF-KB promoter element are used to screen the supernatants produced in Example 30. Activators or inhibitors of NF-KB would be useful in treating, preventing, and/or diagnosing diseases. For example, inhibitors of NF-KB could be used to treat those diseases related to the acute or chronic activation of NF-KB, such as rheumatoid arthritis.

[1269] To construct a vector containing the NF-KB promoter element, a PCR based strategy is employed. The upstream primer contains four tandem copies of the NF-KB binding site (GGGGACTTTCCC) (SEQ ID NO: 8), 18 bp of sequence complementary to the 5′ end of the SV40 early promoter sequence, and is flanked with an XhoI site:

| | |
|---|---|
| 5′:GCGGCCTCGAGGGGACTTTCCCGGGGACTTTCCG | (SEQ ID NO:9) |
| GGGACTTTCCGGGACTTTCCATCCTGCCATCTCAATT | |
| AG:3′ | |

[1270] The downstream primer is complementary to the 3′ end of the SV40 promoter and is flanked with a Hind III site:

[1271] 5′:GCGGCAAGCTTTTTGCAAAGCCTAGGC:3′ (SEQ ID NO:4

[1272] PCR amplification is performed using the SV40 promoter template present in the pB-gal:promoter plasmid obtained from Clontech. The resulting PCR fragment is digested with XhoI and Hind III and subcloned into BLSK2-. (Stratagene) Sequencing with the T7 and T3 primers confirms the insert contains the following sequence:

| | |
|---|---|
| 5′:CTCGAGGGGACTTTCCCGGGGACTTTCCGGGGA | (SEQ ID NO:10) |
| CTTTCCGGGACTTTCCATCTGCCATCTCAATTAGTC | |
| AGCAACCATAGTCCCGCCCCTAACTCCGCCCATCCC | |
| GCCCCTAACTCCGCCCAGTTCCGCCCATTCTCCGCC | |
| CCATGGCTGACTAATTTTTTTTATTTATGCAGAGGC | |
| CGAGGCCGCCTCGGCCTCTGAGCTATTCCAGAAGTA | |
| GTGAGGAGGCTTTTTTGGAGGCCTAGGCTTTTGCAA | |
| AAAGCTT:3′ | |

[1273] Next, replace the SV40 minimal promoter element present in the pSEAP2-promoter plasmid (Clontech) with this NF-KB/SV40 fragment using XhoI and HindIII. However, this vector does not contain a neomycin resistance gene, and therefore, is not preferred for mammalian expression systems.

[1274] In order to generate stable mammalian cell lines, the NF-KB/SV40/SEAP cassette is removed from the above NF-KB/SEAP vector using restriction enzymes SalI and NotI, and inserted into a vector containing neomycin resistance. Particularly, the NF-KB/SV40/SEAP cassette was inserted into pGFP-1 (Clontech), replacing the GFP gene, after restricting pGFP-1 with SalI and NotI.

[1275] Once NF-KB/SV40/SEAP/Neo vector is created, stable Jurkat T-cells are created and maintained according to the protocol described in Example 32. Similarly, the method for assaying supernatants with these stable Jurkat T-cells is also described in Example 32. As a positive control, exogenous TNF alpha (0.1,1, 10 ng) is added to wells H9, H10, and H11, with a 5-10 fold activation typically observed.

### Example 36

### Assay for SEAP Activity

[1276] As a reporter molecule for the assays described in Examples 32-35, SEAP activity is assayed using the Tropix Phospho-light Kit (Cat. BP-400) according to the following general procedure. The Tropix Phospho-light Kit supplies the Dilution, Assay, and Reaction Buffers used below.

[1277] Prime a dispenser with the 2.5×Dilution Buffer and dispense 15 ul of 2.5×dilution buffer into Optiplates containing 35 ul of a supernatant. Seal the plates with a plastic sealer and incubate at 65 degree C. for 30 min. Separate the Optiplates to avoid uneven heating.

[1278] Cool the samples to room temperature for 15 minutes. Empty the dispenser and prime with the Assay Buffer. Add 50 ml Assay Buffer and incubate at room temperature 5 min. Empty the dispenser and prime with the Reaction Buffer (see the Table below). Add 50 ul Reaction Buffer and incubate at room temperature for 20 minutes. Since the intensity of the chemiluminescent signal is time dependent, and it takes about 10 minutes to read 5 plates on a luminometer, thus one should treat 5 plates at each time and start the second set 10 minutes later.

[1279] Read the relative light unit in the luminometer. Set H12 as blank, and print the results. An increase in chemiluminescence indicates reporter activity.

Reaction Buffer Formulation:

| # of plates | Rxn buffer diluent (ml) | CSPD (ml) |
|---|---|---|
| 10 | 60 | 3 |
| 11 | 65 | 3.25 |
| 12 | 70 | 3.5 |
| 13 | 75 | 3.75 |
| 14 | 80 | 4 |
| 15 | 85 | 4.25 |
| 16 | 90 | 4.5 |
| 17 | 95 | 4.75 |
| 18 | 100 | 5 |
| 19 | 105 | 5.25 |
| 20 | 110 | 5.5 |
| 21 | 115 | 5.75 |
| 22 | 120 | 6 |
| 23 | 125 | 6.25 |
| 24 | 130 | 6.5 |
| 25 | 135 | 6.75 |
| 26 | 140 | 7 |
| 27 | 145 | 7.25 |
| 28 | 150 | 7.5 |
| 29 | 155 | 7.75 |
| 30 | 160 | 8 |
| 31 | 165 | 8.25 |
| 32 | 170 | 8.5 |
| 33 | 175 | 8.75 |
| 34 | 180 | 9 |
| 35 | 185 | 9.25 |
| 36 | 190 | 9.5 |
| 37 | 195 | 9.75 |
| 38 | 200 | 10 |
| 39 | 205 | 10.25 |
| 40 | 210 | 10.5 |
| 41 | 215 | 10.75 |
| 42 | 220 | 11 |
| 43 | 225 | 11.25 |
| 44 | 230 | 11.5 |
| 45 | 235 | 11.75 |
| 46 | 240 | 12 |
| 47 | 245 | 12.25 |
| 48 | 250 | 12.5 |
| 49 | 255 | 12.75 |
| 50 | 260 | 13 |

### Example 37

### High-Throughput Screening Assay Identifying Changes in Small Molecule Concentration and Membrane Permeability

[1280] Binding of a ligand to a receptor is known to alter intracellular levels of small molecules, such as calcium, potassium, sodium, and pH, as well as alter membrane potential. These alterations can be measured in an assay to identify supernatants which bind to receptors of a particular cell. Although the following protocol describes an assay for calcium, this protocol can easily be modified to detect changes in potassium, sodium, pH, membrane potential, or any other small molecule which is detectable by a fluorescent probe.

[1281] The following assay uses Fluorometric Imaging Plate Reader (“TLIPR”) to measure changes in fluorescent molecules (Molecular Probes) that bind small molecules. Clearly, any fluorescent molecule detecting a small molecule can be used instead of the calcium fluorescent molecule, fluo-4 (Molecular Probes, Inc.; catalog no. F-14202), used here.

[1282] For adherent cells, seed the cells at 10,000-20,000 cells/well in a Co-star black 96-well plate with clear bottom. The plate is incubated in a CO₂ incubator for 20 hours. The adherent cells are washed two times in Biotek washer with 200 ul of HBSS (Hank's Balanced Salt Solution) leaving 100 ul of buffer after the final wash.

[1283] A stock solution of 1 mg/ml fluo-4 is made in 10% pluronic acid DMSO. To load the cells with fluo-4 , 50 ul of 12 ug/ml fluo-4 is added to each well. The plate is incubated at 37 degrees C. in a CO₂ incubator for 60 min. The plate is washed four times in the Biotek washer with HBSS leaving 100 ul of buffer.

[1284] For non-adherent cells, the cells are spun down from culture media. Cells are re-suspended to 2-5×10⁶ cells/ml with HBSS in a 50-ml conical tube. 4 ul of 1 mg/ml fluo-4 solution in 10% pluronic acid DMSO is added to each ml of cell suspension. The tube is then placed in a 37 degrees C. water bath for 30-60 min. The cells are washed twice with HBSS, resuspended to 1×10⁶ cells/ml, and dispensed into a microplate, 100 ul/well. The plate is centrifuged at 1000 rpm for 5 min. The plate is then washed once in Denley Cell Wash with 200 ul, followed by an aspiration step to 100 ul final volume.

[1285] For a non-cell based assay, each well contains a fluorescent molecule, such as fluo-4 . The supernatant is added to the well, and a change in fluorescence is detected.

[1286] To measure the fluorescence of intracellular calcium, the FLIPR is set for the following parameters: (1) System gain is 300-800 mW; (2) Exposure time is 0.4 second; (3) Camera F/stop is F/2; (4) Excitation is 488 nm; (5) Emission is 530 nm; and (6) Sample addition is 50 ul. Increased emission at 530 nm indicates an extracellular signaling event caused by the a molecule, either polypeptide of the present invention or a molecule induced by polypeptide of the present invention, which has resulted in an increase in the intracellular Ca⁺⁺ concentration.

### Example 38

### High-Throughput Screening Assay Identifying Tyrosine Kinase Activity

[1287] The Protein Tyrosine Kinases (PTK) represent a diverse group of transmembrane and cytoplasmic kinases. Within the Receptor Protein Tyrosine Kinase RPTK) group are receptors for a range of mitogenic and metabolic growth factors including the PDGF, FGF, EGF, NGF, HGF and Insulin receptor subfamilies. In addition there are a large family of RPTKs for which the corresponding ligand is unknown. Ligands for RPTKs include mainly secreted small proteins, but also membrane-bound and extracellular matrix proteins.

[1288] Activation of RPTK by ligands involves ligand-mediated receptor dimerization, resulting in transphosphorylation of the receptor subunits and activation of the cytoplasmic tyrosine kinases. The cytoplasmic tyrosine kinases include receptor associated tyrosine kinases of the src-family (e.g., src, yes, Ick, lyn, fyn) and non-receptor linked and cytosolic protein tyrosine kinases, such as the Jak family, members of which mediate signal transduction triggered by the cytokine superfamily of receptors (e.g., the Interleukins, Interferons, GM-CSF, and Leptin).

[1289] Because of the wide range of known factors capable of stimulating tyrosine kinase activity, identifying whether polypeptide of the present invention or a molecule induced by polypeptide of the present invention is capable of activating tyrosine kinase signal transduction pathways is of interest. Therefore, the following protocol is designed to identify such molecules capable of activating the tyrosine kinase signal transduction pathways.

[1290] Seed target cells (e.g., primary keratinocytes) at a density of approximately 25,000 cells per well in a 96 well Loprodyne Silent Screen Plates purchased from Nalge Nunc (Naperville, Ill.). The plates are sterilized with two 30 minute rinses with 100% ethanol, rinsed with water and dried overnight. Some plates are coated for 2 hr with 100 ml of cell culture grade type I collagen (50 mg/ml), gelatin (2%) or polylysine (50 mg/ml), all of which can be purchased from Sigma Chemicals (St. Louis, MO) or 10% Matrigel purchased from Becton Dickinson (Bedford, Mass.), or calf serum, rinsed with PBS and stored at 4 degree C. Cell growth on these plates is assayed by seeding 5,000 cells/well in growth medium and indirect quantitation of cell number through use of alamarBlue as described by the manufacturer Alamar Biosciences, Inc. (Sacramento, Calif.) after 48 hr. Falcon plate covers #3071 from Becton Dickinson (Bedford, Mass.) are used to cover the Loprodyne Silent Screen Plates. Falcon Microtest III cell culture plates can also be used in some proliferation experiments.

[1291] To prepare extracts, A431 cells are seeded onto the nylon membranes of Loprodyne plates (20,000/200ml/well) and cultured overnight in complete medium. Cells are quiesced by incubation in serum-free basal medium for 24 hr. After 5-20 minutes treatment with EGF (60ng/ml) or 50 ul of the supernatant produced in Example 30, the medium was removed and 100 ml of extraction buffer ((20 mM HEPES pH 7.5, 0.15 M NaCl, 1% Triton X-100, 0.1% SDS, 2 mM Na3VO4, 2 mM Na4P207 and a cocktail of protease inhibitors (# 1836170) obtained from Boeheringer Mannheim (Indianapolis, Ind.)) is added to each well and the plate is shaken on a rotating shaker for 5 minutes at 4° C. The plate is then placed in a vacuum transfer manifold and the extract filtered through the 0.45 mm membrane bottoms of each well using house vacuum. Extracts are collected in a 96-well catch/assay plate in the bottom of the vacuum manifold and immediately placed on ice. To obtain extracts clarified by centrifugation, the content of each well, after detergent solubilization for 5 minutes, is removed and centrifuged for 15 minutes at 4 degree C. at 16,000×g.

[1292] Test the filtered extracts for levels of tyrosine kinase activity. Although many methods of detecting tyrosine kinase activity are known, one method is described here.

[1293] Generally, the tyrosine kinase activity of a supernatant is evaluated by determining its ability to phosphorylate a tyrosine residue on a specific substrate (a biotinylated peptide). Biotinylated peptides that can be used for this purpose include PSK1 (corresponding to amino acids 6-20 of the cell division kinase cdc2-p34) and PSK2 (corresponding to amino acids 1-17 of gastrin). Both peptides are substrates for a range of tyrosine kinases and are available from Boehringer Mannheim.

[1294] The tyrosine kinase reaction is set up by adding the following components in order. First, add 10 ul of 5uM Biotinylated Peptide, then 10 ul ATP/Mg₂₊(5mM ATP/50mM MgCl₂), then 10 ul of 5×Assay Buffer (40 mM imidazole hydrochloride, pH7.3, 40 mM beta-glycerophosphate, 1 mM EGTA, 100 mM MgCl₂, 5 mM MnCl₂, 0.5 mg/ml BSA), then 5 ul of Sodium Vanadate (1 mM), and then 5 ul of water. Mix the components gently and preincubate the reaction mix at 30 degree C. for 2 min. Initial the reaction by adding 10 ul of the control enzyme or the filtered supernatant.

[1295] The tyrosine kinase assay reaction is then terminated by adding 10 ul of 120 mm EDTA and place the reactions on ice.

[1296] Tyrosine kinase activity is determined by transferring 50 ul aliquot of reaction mixture to a microtiter plate (MTP) module and incubating at 37 degree C. for 20 min. This allows the streptavidin coated 96 well plate to associate with the biotinylated peptide. Wash the MTP module with 300 ul/well of PBS four times. Next add 75 ul of anti-phospotyrosine antibody conjugated to horse radish peroxidase (anti-P-Tyr-POD(0.5u/ml)) to each well and incubate at 37 degree C. for one hour. Wash the well as above.

[1297] Next add 100 ul of peroxidase substrate solution (Boehringer Mannheim) and incubate at room temperature for at least 5 mins (up to 30 min). Measure the absorbance of the sample at 405 nm by using ELISA reader. The level of bound peroxidase activity is quantitated using an ELISA reader and reflects the level of tyrosine kinase activity.

### Example 39

### High-Throughput Screening Assay Identifying Phosphorylation Activity

[1298] As a potential alternative and/or complement to the assay of protein tyrosine kinase activity described in Example 38, an assay which detects activation (phosphorylation) of major intracellular signal transduction intermediates can also be used. For example, as described below one particular assay can detect tyrosine phosphorylation of the Erk-1 and Erk-2 kinases. However, phosphorylation of other molecules, such as Raf, JNK, p38 MAP, Map kinase kinase (MEK), MEK kinase, Src, Muscle specific kinase (MuSK), IRAK, Tec, and Janus, as well as any other phosphoserine, phosphotyrosine, or phosphothreonine molecule, can be detected by substituting these molecules for Erk-1 or Erk-2 in the following assay.

[1299] Specifically, assay plates are made by coating the wells of a 96-well ELISA plate with 0.1 ml of protein G (1 ug/ml) for 2 hr at room temp, (RT). The plates are then rinsed with PBS and blocked with 3% BSA/PBS for 1 hr at RT. The protein G plates are then treated with 2 commercial monoclonal antibodies (100ng/well) against Erk-1 and Erk-2 (1 hr at RT) (Santa Cruz Biotechnology). (To detect other molecules, this step can easily be modified by substituting a monoclonal antibody detecting any of the above described molecules.) After 3-5 rinses with PBS, the plates are stored at 4 degree C. until use.

[1300] A431 cells are seeded at 20,000/well in a 96-well Loprodyne filterplate and cultured overnight in growth medium. The cells are then starved for 48 hr in basal medium (DMEM) and then treated with EGF (6 ng/well) or 50 ul of the supernatants obtained in Example 30 for 5-20 minutes. The cells are then solubilized and extracts filtered directly into the assay plate.

[1301] After incubation with the extract for 1 hr at RT, the wells are again rinsed. As a positive control, a commercial preparation of MAP kinase (10 ng/well) is used in place of A431 extract. Plates are then treated with a commercial polyclonal (rabbit) antibody (lug/ml) which specifically recognizes the phosphorylated epitope of the Erk-1 and Erk-2 kinases (1 hr at RT). This antibody is biotinylated by standard procedures. The bound polyclonal antibody is then quantitated by successive incubations with Europium-streptavidin and Europium fluorescence enhancing reagent in the Wallac DELFIA instrument (time-resolved fluorescence). An increased fluorescent signal over background indicates a phosphorylation by polypeptide of the present invention or a molecule induced by polypeptide of the present invention.

### Example 40

### Assay for the Stimulation of Bone Marrow CD34+Cell Proliferation

[1302] This assay is based on the ability of human CD34+to proliferate in the presence of hematopoietic growth factors and evaluates the ability of isolated polypeptides expressed in mammalian cells to stimulate proliferation of CD34+cells.

[1303] It has been previously shown that most mature precursors will respond to only a single signal. More immature precursors require at least two signals to respond. Therefore, to test the effect of polypeptides on hematopoietic activity of a wide range of progenitor cells, the assay contains a given polypeptide in the presence or absence of other hematopoietic growth factors. Isolated cells are cultured for 5 days in the presence of Stem Cell Factor (SCF) in combination with tested sample. SCF alone has a very limited effect on the proliferation of bone marrow (BM) cells, acting in such conditions only as a “survival” factor. However, combined with any factor exhibiting stimulatory effect on these cells (e.g., IL-3), SCF will cause a synergistic effect. Therefore, if the tested polypeptide has a stimulatory effect on hematopoietic progenitors, such activity can be easily detected. Since normal BM cells have a low level of cycling cells, it is likely that any inhibitory effect of a given polypeptide, or agonists or antagonists thereof, might not be detected. Accordingly, assays for an inhibitory effect on progenitors is preferably tested in cells that are first subjected to in vitro stimulation with SCF+IL+3, and then contacted with the compound that is being evaluated for inhibition of such induced proliferation.

[1304] Briefly, CD34+cells are isolated using methods known in the art. The cells are thawed and resuspended in medium (QBSF 60 serum-free medium with 1% L-glutamine (500 ml) Quality Biological, Inc., Gaithersburg, Md. Cat# 160-204-101). After several gentle centrifugation steps at 200×g, cells are allowed to rest for one hour. The cell count is adjusted to 2.5×10⁵ cells/ml. During this time, 100 μl of sterile water is added to the peripheral wells of a 96-well plate. The cytokines that can be tested with a given polypeptide in this assay is rhSCF (R&D Systems, Minneapolis, Minn., Cat# 255-SC) at 50 ng/ml alone and in combination with rhSCF and rhIL-3 (R&D Systems, Minneapolis, Minn., Cat# 203-ML) at 30 ng/ml. After one hour, 10 μl of prepared cytokines, 50 μl of the supernatants prepared in Example 30 (supernatants at 1:2 dilution=50 μl) and 20 μl of diluted cells are added to the media which is already present in the wells to allow for a final total volume of 100 μl. The plates are then placed in a 37° C./5% CO₂ incubator for five days.

[1305] Eighteen hours before the assay is harvested, 0.5 μCi/well of [3H] Thymidine is added in a 10 μl volume to each well to determine the proliferation rate. The experiment is terminated by harvesting the cells from each 96-well plate to a filtermat using the Tomtec Harvester 96. After harvesting, the filtermats are dried, trimmed and placed into OmniFilter assemblies consisting of one OmniFilter plate and one OmniFilter Tray. 60 μl Microscint is added to each well and the plate sealed with TopSeal-A press-on sealing film A bar code 15 sticker is affixed to the first plate for counting. The sealed plates are then loaded and the level of radioactivity determined via the Packard Top Count and the printed data collected for analysis. The level of radioactivity reflects the amount of cell proliferation.

[1306] The studies described in this example test the activity of a given polypeptide to stimulate bone marrow CD34+cell proliferation. One skilled in the art could easily modify the exemplified studies to test the activity of polynucleotides (e.g., gene therapy), antibodies, agonists, and/or antagonists and fragments and variants thereof. As a nonlimiting example, potential antagonists tested in this assay would be expected to inhibit cell proliferation in the presence of cytokines and/or to increase the inhibition of cell proliferation in the presence of cytokines and a given polypeptide. In contrast, potential agonists tested in this assay would be expected to enhance cell proliferation and/or to decrease the inhibition of cell proliferation in the presence of cytokines and a given polypeptide.

[1307] The ability of a gene to stimulate the proliferation of bone marrow CD34+cells indicates that polynucleotides and polypeptides corresponding to the gene are useful for the diagnosis and treatment of disorders affecting the immune system and hematopoiesis. Representative uses are described in the “Immune Activity” and “Infectious Disease” sections above, and elsewhere herein.

### Example 41

### Assay for Extracellular Matrix Enhanced Cell Response (EMECR)

[1308] The objective of the Extracellular Matrix Enhanced Cell Response (EMECR) assay is to identify gene products (e.g., isolated polypeptides) that act on the hematopoietic stem cells in the context of the extracellular matrix (ECM) induced signal.

[1309] Cells respond to the regulatory factors in the context of signal(s) received from the surrounding microenviromnent. For example, fibroblasts, and endothelial and epithelial stem cells fail to replicate in the absence of signals from the ECM. Hematopoietic stem cells can undergo self-renewal in the bone marrow, but not in in vitro suspension culture. The ability of stem cells to undergo self-renewal in vitro is dependent upon their interaction with the stromal cells and the ECM protein fibronectin (fn). Adhesion of cells to fn is mediated by the α₅-β₁ and α₄-β₁ integrin receptors, which are expressed by human and mouse hematopoietic stem cells. The factor(s) which integrate with the ECM environment and are responsible for stimulating stem cell self-renewal have not yet been identified. Discovery of such factors should be of great interest in gene therapy and bone marrow transplant applications

[1310] Briefly, polystyrene, non tissue culture treated, 96-well plates are coated with fn fragment at a coating concentration of 0.2 μg/cm². Mouse bone marrow cells are plated (1,000 cells/well ) in 0.2 ml of serum-free medium. Cells cultured in the presence of IL-3 (5 ng/ml ) +SCF (50 ng/ml ) would serve as the positive control, conditions under which little self-renewal but pronounced differentiation of the stem cells is to be expected. Gene products of the invention (e.g., including, but not limited to, polynucleotides and polypeptides of the present invention, and supernatants produced in Example 30), are tested with appropriate negative controls in the presence and absence of SCF(5.0 ng/ml), where test factor supernatants represent 10% of the total assay volume. The plated cells are then allowed to grow by incubating in a low oxygen environment (5% CO₂, 7% O₂, and 88% N₂) tissue culture incubator for 7 days. The number of proliferating cells within the wells is then quantitated by measuring thymidine incorporation into cellular DNA. Verification of the positive hits in the assay will require phenotypic characterization of the cells, which can be accomplished by scaling up of the culture system and using appropriate antibody reagents against cell surface antigens and FACScan.

[1311] One skilled in the art could easily modify the exemplified studies to test the activity of polynucleotides (e.g., gene therapy), antibodies, agonists, and/or antagonists and fragments and variants thereof.

[1312] If a particular polypeptide of the present invention is found to be a stimulator of hematopoietic progenitors, polynucleotides and polypeptides corresponding to the gene encoding said polypeptide may be useful for the diagnosis and treatment of disorders affecting the immune system and hematopoiesis. Representative uses are described in the “Immune Activity” and “Infectious Disease” sections above, and elsewhere herein. The gene product may also be useful in the expansion of stem cells and committed progenitors of various blood lineages, and in the differentiation and/or proliferation of various cell types.

[1313] Additionally, the polynucleotides and/or polypeptides of the gene of interest and/or agonists and/or antagonists thereof, may also be employed to inhibit the proliferation and differentiation of hematopoletic cells and therefore may be employed to protect bone marrow stem cells from chemotherapeutic agents during chemotherapy. This antiproliferative effect may allow administration of higher doses of chemotherapeutic agents and, therefore, more effective chemotherapeutic treatment.

[1314] Moreover, polynucleotides and polypeptides corresponding to the gene of interest may also be useful for the treatment and diagnosis of hematopoietic related disorders such as, for example, anemia, pancytopenia, leukopenia, thrombocytopenia or leukemia since stromal cells are important in the production of cells of hematopoietic lineages. The uses include bone marrow cell ex-vivo culture, bone marrow transplantation, bone marrow reconstitution, radiotherapy or chemotherapy of neoplasia.

### Example 42

### Human Dermal Fibroblast and Aortic Smooth Muscle Cell Proliferation

[1315] The polypeptide of interest is added to cultures of normal human dermal fibroblasts (NHDF) and human aortic smooth muscle cells (AoSMC) and two co-assays are performed with each sample. The first assay examines the effect of the polypeptide of interest on the proliferation of normal human dermal fibroblasts (NHDF) or aortic smooth muscle cells (AoSMC). Aberrant growth of fibroblasts or smooth muscle cells is a part of several pathological processes, including fibrosis, and restenosis. The second assay examines IL6 production by both NHDF and SMC. IL6 production is an indication of functional activation. Activated cells will have increased production of a number of cytokines and other factors, which can result in a proinflammatory or immunomodulatory outcome. Assays are run with and without co-TNFa stimulation, in order to check for costimulatory or inhibitory activity.

[1316] Briefly, on day 1, 96-well black plates are set up with 1000 cells/well (NHDF) or 2000 cells/well (AoSMC) in 100 μl culture media. NHDF culture media contains: Clonetics FB basal media, 1 mg/ml hFGF, 5 mg/ml insulin, 50 mg/ml gentamycin, 2% FBS, while AoSMC culture media contains Clonetics SM basal media, 0.5 μg/ml hEGF, 5 mg/ml insulin, 1 μg/ml hFGF, 50 mg/ml gentamycin, 50 μg/ml Amphotericin B, 5% FBS. After incubation at 37° C. for at least 4-5 hours culture media is aspirated and replaced with growth arrest media. Growth arrest media for NHDF contains fibroblast basal media, 50 mg/ml gentamycin, 2% FBS, while growth arrest media for AoSMC contains SM basal media, 50 mg/ml gentamycin, 50 μg/ml Amphotericin B, 0.4% FBS. Incubate at 37° C. until day 2.

[1317] On day 2, serial dilutions and templates of the polypeptide of interest are designed such that they always include media controls and known-protein controls. For both stimulation and inhibition experiments, proteins are diluted in growth arrest media. For inhibition experiments, TNFa is added to a final concentration of 2 ng/ml (NHDF) or 5 ng/ml (AoSMC). Add ⅓ vol media containing controls or polypeptides of the present invention and incubate at 37 degrees C./5% CO₂ until day 5.

[1318] Transfer 60μl from each well to another labeled 96-well plate, cover with a plate-sealer, and store at 4 degrees C. until Day 6 (for IL6 ELISA). To the remaining 100 μl in the cell culture plate, aseptically add Alamar Blue in an amount equal to 10% of the culture volume (10μl). Return plates to incubator for 3 to 4 hours. Then measure fluorescence with excitation at 530 nm and emission at 590 nm using the CytoFluor. This yields the growth stimulation/inhibition data.

[1319] On day 5, the IL6 ELISA is performed by coating a 96 well plate with 50-100 ul/well of Anti-Human IL6 Monoclonal antibody diluted in PBS, pH 7.4, incubate ON at room temperature.

[1320] On day 6, empty the plates into the sink and blot on paper towels. Prepare Assay Buffer containing PBS with 4% BSA. Block the plates with 200 μl/well of Pierce Super Block blocking buffer in PBS for 1-2 hr and then wash plates with wash buffer (PBS, 0.05% Tween-20). Blot plates on paper towels. Then add 50 μl/well of diluted Anti-Human IL-6 Monoclonal, Biotin-labeled antibody at 0.50 mg/ml. Make dilutions of IL-6 stock in media (30, 10, 3, 1, 0.3, 0 ng/ml). Add duplicate samples to top row of plate. Cover the plates and incubate for 2 hours at RT on shaker.

[1321] Plates are washed with wash buffer and blotted on paper towels. Dilute EU-labeled Streptavidin 1:1000 in Assay buffer, and add 100 μl/well. Cover the plate and incubate 1 h at RT. Plates are again washed with wash buffer and blotted on paper towels.

[1322] Add 100 μl/well of Enhancement Solution. Shake for 5 minutes. Read the plate on the Wallac DELFIA Fluorometer. Readings from triplicate samples in each assay were tabulated and averaged.

[1323] A positive result in this assay suggests AoSMC cell proliferation and that the polypeptide of the present invention may be involved in dermal fibroblast proliferation and/or smooth muscle cell proliferation. A positive result also suggests many potential uses of polypeptides, polynucleotides, agonists and/or antagonists of the polynucleotide/polypeptide of the present invention which gives a positive result. For example, inflammation and immune responses, wound healing, and angiogenesis, as detailed throughout this specification. Particularly, polypeptides of the present invention and polynucleotides of the present invention may be used in wound healing and dermal regeneration, as well as the promotion of vasculogenesis, both of the blood vessels and lymphatics. The growth of vessels can be used in the treatment of, for example, cardiovascular diseases. Additionally, antagonists of polypeptides and polynucleotides of the invention may be useful in treating diseases, disorders, and/or conditions which involve angiogenesis by acting as an anti-vascular agent (e.g., anti-angiogenesis). These diseases, disorders, and/or conditions are known in the art and/or are described herein, such as, for example, malignancies, solid tumors, benign tumors, for example hemangiomas, acoustic neuromas, neurofibromas, trachomas, and pyogenic granulomas; artheroscleric plaques; ocular angiogenic diseases, for example, diabetic retinopathy, retinopathy of prematurity, macular degeneration, corneal graft rejection, neovascular glaucoma, retrolental fibroplasia, rubeosis, retinoblastoma, uvietis and Pterygia (abnormal blood vessel growth) of the eye; rheumatoid arthritis; psoriasis; delayed wound healing; endometriosis; vasculogenesis; granulations; hypertrophic scars (keloids); nonunion fractures; scleroderma; trachoma; vascular adhesions; myocardial angiogenesis; coronary collaterals; cerebral collaterals; arteriovenous malformations; ischemic limb angiogenesis; Osler-Webber Syndrome; plaque neovascularization; telangiectasia; hemophiliac joints; angiofibroma; fibromuscular dysplasia; wound granulation; Crohn's disease; and atherosclerosis. Moreover, antagonists of polypeptides and polynucleotides of the invention may be useful in treating anti-hyperproliferative diseases and/or anti-inflammatory known in the art and/or described herein.

[1324] One skilled in the art could easily modify the exemplified studies to test the activity of polynucleotides (e.g., gene therapy), antibodies, agonists, and/or antagonists and fragments and variants thereof.

### Example 43

### Cellular Adhesion Molecule (CAM) Expression on Endothelial Cells

[1325] The recruitment of lymphocytes to areas of inflammation and angiogenesis involves specific receptor-ligand interactions between cell surface adhesion molecules (CAMs) on lymphocytes and the vascular endothelium. The adhesion process, in both normal and pathological settings, follows a multi-step cascade that involves intercellular adhesion molecule-1 (ICAM-1), vascular cell adhesion molecule-1 (VCAM-1), and endothelial leukocyte adhesion molecule-1 (E-selectin) expression on endothelial cells (EC). The expression of these molecules and others on the vascular endothelium determines the efficiency with which leukocytes may adhere to the local vasculature and extravasate into the local tissue during the development of an inflammatory response. The local concentration of cytokines and growth factor participate in the modulation of the expression of these CAMs.

[1326] Briefly, endothelial cells (e.g., Human Umbilical Vein Endothelial cells (HUVECs)) are grown in a standard 96 well plate to confluence, growth medium is removed from the cells and replaced with 100 μl of 199 Medium (10% fetal bovine serum (FBS)). Samples for testing and positive or negative controls are added to the plate in triplicate (in 10 μl volumes). Plates are then incubated at 37° C. for either 5 h (selectin and integrin expression) or 24 h (integrin expression only). Plates are aspirated to remove medium and 100 μl of 0.1% paraformaldehyde-PBS(with Ca++and Mg++) is added to each well. Plates are held at 4° C. for 30 min. Fixative is removed from the wells and wells are washed 1× with PBS(+Ca,Mg)+0.5% BSA and drained. 10 μl of diluted primary antibody is added to the test and control wells. Anti-ICAM-1-Biotin, Anti-VCAM-1-Biotin and Anti-E-selectin-Biotin are used at a concentration of 10 μg/ml (1:10 dilution of 0.1 mg/ml stock antibody). Cells are incubated at 37° C. for 30 min. in a humidified environment. Wells are washed three times with PBS(+Ca,Mg)+0.5% BSA. 20 μl of diluted ExtrAvidin-Alkaline Phosphatase (1:5,000 dilution, referred to herein as the working dilution) are added to each well and incubated at 37° C. for 30 min. Wells are washed three times with PBS(+Ca,Mg)+0.5% BSA. Dissolve 1 tablet of p-Nitrophenol Phosphate pNPP per 5 ml of glycine buffer (pH 10.4). 100 μl of pNPP substrate in glycine buffer is added to each test well. Standard wells in triplicate are prepared from the working dilution of the ExtrAvidin-Alkaline Phosphotase in glycine buffer: 1:5,000 (10⁰)>10^{-0.5}>10⁻¹>10^{-1.5}.5 μl of each dilution is added to triplicate wells and the resulting AP content in each well is 5.50 ng, 1.74 ng, 0.55 ng, 0.18 ng. 100 μl of pNNP reagent is then added to each of the standard wells. The plate is incubated at 37° C. for 4 h. A volume of 50 μl of 3M NaOH is added to all wells. The plate is read on a plate reader at 405 nm using the background subtraction option on blank wells filled with glycine buffer only. Additionally, the template is set up to indicate the concentration of AP-conjugate in each standard well [5.50 ng; 1.74 ng; 0.55 ng; 0.18 ng]. Results are indicated as amount of bound AP-conjugate in each sample.

### Example 44

### Alamar Blue Endothelial Cells Proliferation Assay

[1327] This assay may be used to quantitatively determine protein mediated inhibition of bFGF-induced proliferation of Bovine Lymphatic Endothelial Cells (LECs), Bovine Aortic Endothelial Cells (BAECs) or Human Microvascular Uterine Myometrial Cells (UTMECs). This assay incorporates a fluorometric growth indicator based on detection of metabolic activity. A standard Alamar Blue Proliferation Assay is prepared in EGM-2MV with 10 ng /ml of bFGF added as a source of endothelial cell stimulation. This assay may be used with a variety of endothelial cells with slight changes in growth medium and cell concentration. Dilutions of the protein batches to be tested are diluted as appropriate. Serum-free medium (GIBCO SFM) without bFGF is used as a non-stimulated control and Angiostatin or TSP-1 are included as a known inhibitory controls.

[1328] Briefly, LEC, BAECs or UTMECs are seeded in growth media at a density of 5000 to 2000 cells/well in a 96 well plate and placed at 37 degrees C. overnight. After the overnight incubation of the cells, the growth media is removed and replaced with GIBCO EC-SFM. The cells are treated with the appropriate dilutions of the protein of interest or control protein sample(s) (prepared in SFM ) in triplicate wells with additional bFGF to a concentration of 10 ng/ ml. Once the cells have been treated with the samples, the plate(s) is/are placed back in the 37° C. incubator for three days. After three days 10 ml of stock alamar blue (Biosource Cat# DAL1100) is added to each well and the plate(s) is/are placed back in the 37° C. incubator for four hours. The plate(s) are then read at 530 nm excitation and 590 nm emission using the CytoFluor fluorescence reader. Direct output is recorded in relative fluorescence units.

[1329] Alamar blue is an oxidation-reduction indicator that both fluoresces and changes color in response to chemical reduction of growth medium resulting from cell growth. As cells grow in culture, innate metabolic activity results in a chemical reduction of the immediate surrounding environment. Reduction related to growth causes the indicator to change from oxidized (non-fluorescent blue) form to reduced (fluorescent red) form (i.e., stimulated proliferation will produce a stronger signal and inhibited proliferation will produce a weaker signal and the total signal is proportional to the total number of cells as well as their metabolic activity). The background level of activity is observed with the starvation medium alone. This is compared to the output observed from the positive control samples (bFGF in growth medium) and protein dilutions.

### Example 45

### Detection of Inhibition of a Mixed Lymphocyte Reaction

[1330] This assay can be used to detect and evaluate inhibition of a Mixed Lymphocyte Reaction (MLR) by gene products (e.g., isolated polypeptides). Inhibition of a MLR may be due to a direct effect on cell proliferation and viability, modulation of costimulatory molecules on interacting cells, modulation of adhesiveness between lymphocytes and accessory cells, or modulation of cytokine production by accessory cells. Multiple cells may be targeted by these polypeptides since the peripheral blood mononuclear fraction used in this assay includes T, B and natural killer lymphocytes, as well as monocytes and dendritic cells.

[1331] Polypeptides of interest found to inhibit the MLR may find application in diseases associated with lymphocyte and monocyte activation or proliferation. These include, but are not limited to, diseases such as asthma, arthritis, diabetes, inflammatory skin conditions, psoriasis, eczema, systemic lupus erythematosus, multiple sclerosis, glomerulonephritis, inflammatory bowel disease, crohn's disease, ulcerative colitis, arteriosclerosis, cirrhosis, graft vs. host disease, host vs. graft disease, hepatitis, leukemia and lymphoma.

[1332] Briefly, PBMCs from human donors are purified by density gradient centrifugation using Lymphocyte Separation Medium (LSM®, density 1.0770 g/ml, Organon Teknika Corporation, West Chester, PA). PBMCs from two donors are adjusted to 2×10⁶ cells/ml in RPMI-1640 (Life Technologies, Grand Island, N.Y.) supplemented with 10% FCS and 2 mM glutamine. PBMCs from a third donor is adjusted to 2×10⁵cells/ml. Fifty microliters of PBMCs from each donor is added to wells of a 96-well round bottom microtiter plate. Dilutions of test materials (50 μl) is added in triplicate to microtiter wells. Test samples (of the protein of interest) are added for final dilution of 1:4; rhuIL-2 (R&D Systems, Minneapolis, Minn., catalog number 202-IL) is added to a final concentration of 1 μg/ml; anti-CD4 mAb (R&D Systems, clone 34930.11, catalog number MAB379) is added to a final concentration of 10 μg/ml. Cells are cultured for 7-8 days at 37° C. in 5% CO₂, and 1 μC of [³H] thymidine is added to wells for the last 16 hrs of culture. Cells are harvested and thymidine incorporation determined using a Packard TopCount. Data is expressed as the mean and standard deviation of triplicate determinations.

[1333] Samples of the protein of interest are screened in separate experiments and compared to the negative control treatment, anti-CD4 mAb, which inhibits proliferation of lymphocytes and the positive control treatment, IL-2 (either as recombinant material or supernatant), which enhances proliferation of lymphocytes.

[1334] One skilled in the art could easily modify the exemplified studies to test the activity of polynucleotides (e.g., gene therapy), antibodies, agonists, and/or antagonists and fragments and variants thereof.

### Example 46

### Assays for Protease Activity

[1335] The following assay may be used to assess protease activity of the polypeptides of the invention.

[1336] Gelatin and casein zymography are performed essentially as described (Heusen et al., Anal. Biochem., 102:196-202 (1980); Wilson et al., Journal of Urology, 149:653-658 (1993)). Samples are run on 10% polyacryamide/0.1% SDS gels containing 1% gelain orcasein, soaked in 2.5% triton at room temperature for 1 hour, and in 0.1M glycine, pH 8.3 at 37° C. 5 to 16 hours. After staining in amido black areas of proteolysis apear as clear areas agains the blue-black background. Trypsin (Sigma T8642) is used as a positive control.

[1337] Protease activity is also determined by monitoring the cleavage of n-a-benzoyl-L-arginine ethyl ester (BAEE) (Sigma B-4500. Reactions are set up in (25 mMNaPO₄, 1 mM EDTA, and 1 mM BAEE), pH 7.5. Samples are added and the change in adsorbance at 260 nm is monitored on the Beckman DU-6 spectrophotometer in the time-drive mode. Trypsin is used as a positive control.

[1338] Additional assays based upon the release of acid-soluble peptides from casein or hemoglobin measured as adsorbance at 280 nm or colorimetrically using the Folin method are performed as described in Bergmeyer, et al., Methods of Enzymatic Analysis, 5 (1984). Other assays involve the solubilization of chromogenic substrates (Ward, Applied Science, 251-317 (1983).

### Example 47

### Identifying Serine Protease Substrate Specificity

[1339] Methods known in the art or described herein may be used to determine the substrate specificity of the polypeptides of the present invention having serine protease activity. A preferred method of determining substrate specificity is by the use of positional scanning synthetic combinatorial libraries as described in GB 2 324 529 (incorporated herein in its entirety).

### Example 48

### Ligand Binding Assays

[1340] The following assay may be used to assess ligand binding activity of the polypeptides of the invention.

[1341] Ligand binding assays provide a direct method for ascertaining receptor pharmacology and are adaptable to a high throughput format. The purified ligand for a polypeptide is radiolabeled to high specific activity (50-2000 Ci/mmol) for binding studies. A determination is then made that the process of radiolabeling does not diminish the activity of the ligand towards its polypeptide. Assay conditions for buffers, ions, pH and other modulators such as nucleotides are optimized to establish a workable signal to noise ratio for both membrane and whole cell polypeptide sources.

[1342] For these assays, specific polypeptide binding is defined as total associated radioactivity minus the radioactivity measured in the presence of an excess of unlabeled competing ligand. Where possible, more than one competing ligand is used to define residual nonspecific binding.

### Example 49

### Functional Assay in Xenopus Oocytes

[1343] Capped RNA transcripts from linearized plasmid templates encoding the polypeptides of the invention are synthesized in vitro with RNA polymerases in accordance with standard procedures. In vitro transcripts are suspended in water at a final concentration of 0.2 mg/mi. Ovarian lobes are removed from adult female toads, Stage V defolliculated oocytes are obtained, and RNA transcripts (10 ng/oocytc) are injected in a 50 nl bolus using a microinjection apparatus. Two electrode voltage clamps are used to measure the currents from individual Xenopus oocytes in response polypeptides and polypeptide agonist exposure. Recordings are made in Ca2+ free Barth's medium at room temperature. The Xenopus system can be used to screen known ligands and tissue/cell extracts for activating ligands.

### Example 50

### Microphysiometric Assays

[1344] Activation of a wide variety of secondary messenger systems results in extrusion of small amounts of acid from a cell. The acid formed is largely as a result of the increased metabolic activity required to fuel the intracellular signaling process. The pH changes in the media surrounding the cell are very small but are detectable by the CYTOSENSOR microphysiometer (Molecular Devices Ltd., Menlo Park, Calif.). The CYTOSENSOR is thus capable of detecting the activation of polypeptide which is coupled to an energy utilizing intracellular signaling pathway.

### Example 51

### Extract/Cell Supernatant Screening

[1345] A large number of mammalian receptors exist for which there remains, as yet, no cognate activating ligand (agonist). Thus, active ligands for these receptors may not be included within the ligands banks as identified to date. Accordingly, the polypeptides of the invention can also be functionally screened (using calcium, cAMP, microphysiometer, oocyte electrophysiology, etc., functional screens) against tissue extracts to identify its natural ligands. Extracts that produce positive functional responses can be sequentially subfractionated until an activating ligand is isolated and identified.

### Example 52

### Calcium and cAMP Functional Assays

[1346] Seven transmembrane receptors which are expressed in HEK 293 cells have been shown to be coupled functionally to activation of PLC and calcium mobilization and/or cAMP stimulation or inhibition. Basal calcium levels in the HEK 293 cells in receptor-transfected or vector control cells were observed to be in the normal, 100 nM to 200 nM, range. HEK 293 cells expressing recombinant receptors are loaded with fura 2 and in a single day >150 selected ligands or tissue/cell extracts are evaluated for agonist induced calcium mobilization. Similarly, HEK 293 cells expressing recombinant receptors are evaluated for the stimulation or inhibition of cAMP production using standard cAMP quantitation assays. Agonists presenting a calcium transient or cAMP fluctuation are tested in vector control cells to determine if the response is unique to the transfected cells expressing receptor.

### Example 53

### ATP-binding Assay

[1347] The following assay may be used to assess ATP-binding activity of polypeptides of the invention.

[1348] ATP-binding activity of the polypeptides of the invention may be detected using the ATP-binding assay described in U.S. Pat. No. 5,858,719, which is herein incorporated by reference in its entirety. Briefly, ATP-binding to polypeptides of the invention is measured via photoaffinity labeling with 8-azido-ATP in a competition assay. Reaction mixtures containing 1 mg/ml of the ABC transport protein of the present invention are incubated with varying concentrations of ATP, or the non-hydrolyzable ATP analog adenyl-5′-imidodiphosphate for 10 minutes at 4° C. A mixture of 8-azido-ATP (Sigma Chem. Corp., St. Louis, Mo.) plus 8-azido-ATP (32p-ATP) (5 mCi/μmol, ICN, Irvine Calif.) is added to a final concentration of 100 μM and 0.5 ml aliquots are placed in the wells of a porcelain spot plate on ice. The plate is irradiated using a short wave 254 nm UV lamp at a distance of 2.5 cm from the plate for two one-minute intervals with a one-minute cooling interval in between. The reaction is stopped by addition of dithiothreitol to a final concentration of 2mM. The incubations are subjected to SDS-PAGE electrophoresis, dried, and autoradiographed. Protein bands corresponding to the particular polypeptides of the invention are excised, and the radioactivity quantified. A decrease in radioactivity with increasing ATP or adenly-5′-imidodiphosphate provides a measure of ATP affinity to the polypeptides.

### Example 54

### Small Molecule Screening

[1349] This invention is particularly useful for screening therapeutic compounds by using the polypeptides of the invention, or binding fragments thereof, in any of a variety of drug screening techniques. The polypeptide or fragment employed in such a test may be affixed to a solid support, expressed on a cell surface, free in solution, or located intracellularly. One method of drug screening utilizes eukaryotic or prokaryotic host cells which are stably transformed with recombinant nucleic acids expressing the polypeptide or fragment. Drugs are screened against such transformed cells in competitive binding assays. One may measure, for example, the formulation of complexes between the agent being tested and polypeptide of the invention.

[1350] Thus, the present invention provides methods of screening for drugs or any other agents which affect activities mediated by the polypeptides of the invention. These methods comprise contacting such an agent with a polypeptide of the invention or fragment thereof and assaying for the presence of a complex between the agent and the polypeptide or fragment thereof, by methods well known in the art. In such a competitive binding assay, the agents to screen are typically labeled. Following incubation, free agent is separated from that present in bound form, and the amount of free or uncomplexed label is a measure of the ability of a particular agent to bind to the polypeptides of the invention.

[1351] Another technique for drug screening provides high throughput screening for compounds having suitable binding affinity to the polypeptides of the invention, and is described in great detail in European Patent Application 84/03564, published on Sep. 13, 1984, which is herein incorporated by reference in its entirety. Briefly stated, large numbers of different small molecule test compounds are synthesized on a solid substrate, such as plastic pins or some other surface. The test compounds are reacted with polypeptides of the invention and washed. Bound polypeptides are then detected by methods well known in the art. Purified polypeptides are coated directly onto plates for use in the aforementioned drug screening techniques. In addition, non-neutralizing antibodies may be used to capture the peptide and immobilize it on the solid support.

[1352] This invention also contemplates the use of competitive drug screening assays in which neutralizing antibodies capable of binding polypeptides of the invention specifically compete with a test compound for binding to the polypeptides or fragments thereof. In this manner, the antibodies are used to detect the presence of any peptide which shares one or more antigenic epitopes with a polypeptide of the invention.

### Example 55

### Phosphorylation Assay

[1353] In order to assay for phosphorylation activity of the polypeptides of the invention, a phosphorylation assay as described in U.S. Pat. No. 5,958,405 (which is herein incorporated by reference) is utilized. Briefly, phosphorylation activity may be measured by phosphorylation of a protein substrate using gamma-labeled ³²P-ATP and quantitation of the incorporated radioactivity using a gamma radioisotope counter. The polypeptides of the invention are incubated with the protein substrate, ³²P-ATP, and a kinase buffer. The ³²p incorporated into the substrate is then separated from free ³²p-ATP by electrophoresis, and the incorporated ³²p is counted and compared to a negative control. Radioactivity counts above the negative control are indicative of phosphorylation activity of the polypeptides of the invention.

### Example 56

### Detection of Phosphorylation Activity (Activation) of the Polypeptides of the Invention in the Presence of Polypeptide Ligands

[1354] Methods known in the art or described herein may be used to determine the phosphorylation activity of the polypeptides of the invention. A preferred method of determining phosphorylation activity is by the use of the tyrosine phosphorylation assay as described in U.S. Pat. No. 5,817,471 (incorporated herein by reference).

### Example 57

### Identification Of Signal Transduction Proteins That Interact With Polypeptides Of The Present Invention

[1355] The purified polypeptides of the invention are research tools for the identification, characterization and purification of additional signal transduction pathway proteins or receptor proteins. Briefly, labeled receptor PTK polypeptide is useful as a reagent for the purification of molecules with which it interacts. In one embodiment of affinity purification, receptor PTK polypeptide is covalently coupled to a chromatography column. Cell-free extract derived from putative target cells, such as carcinoma tissues, is passed over the column, and molecules with appropriate affinity bind to the receptor PTK polypeptides, or specific phosphotyrosine-recognition domains thereof. The receptor PTK polypeptide interacting protein-complex is recovered from the column, dissociated, and the recovered molecule subjected to N-terminal protein sequencing. This amino acid sequence is then used to identify the captured molecule or to design degenerate oligonucleotide probes for cloning the relevant gene from an appropriate cDNA library.

### Example 58

### IL-6 Bioassay

[1356] To test the proliferative effects of the polypeptides of the invention, the IL-6 Bioassay as described by Marz et al. is utilized (Proc. Natl. Acad. Sci., U.S.A., 95:3251-56 (1998), which is herein incorporated by reference). Briefly, IL-6 dependent B9 murine cells are washed three times in IL-6 free medium and plated at a concentration of 5,000 cells per well in 50 μl, and 50 μl of the IL-6-like polypeptide is added. After 68 hrs. at 37° C., the number of viable cells is measured by adding the tetrazolium salt thiazolyl blue (MTT) and incubating for a further 4 hrs. at 37° C. B9 cells are lysed by SDS and optical density is measured at 570 mn. Controls containing IL-6 (positive) and no cytokine (negative) are utilized. Enhanced proliferation in the test sample(s) relative to the negative control is indicative of proliferative effects mediated by polypeptides of the invention.

### Example 59

### Support of Chicken Embryo Neuron Survival

[1357] To test whether sympathetic neuronal cell viability is supported by polypeptides of the invention, the chicken embryo neuronal survival assay of Senaldi et al is utilized (Proc. Natl. Acad. Sci., U.S.A., 96:11458-63 (1998), which is herein incorporated by reference). Briefly, motor and sympathetic neurons are isolated from chicken embryos, resuspended in L15 medium (with 10% FCS, glucose, sodium selenite, progesterone, conalbumin, putrescine, and insulin; Life Technologies, Rockville, Md.) and Dulbecco's modified Eagles medium [with 10% FCS, glutamine, penicillin, and 25 mM Hepes buffer (pH 7.2); Life Technologies, Rockville, MD.], respectively, and incubated at 37° C. in 5% CO₂ in the presence of different concentrations of the purified IL-6-like polypeptide, as well as a negative control lacking any cytokine. After 3 days, neuron survival is determined by evaluation of cellular morphology, and through the use of the colorimetric assay of Mosmann (Mossman, T., J. Immunol. Methods, 65:55-63 (1983)). Enhanced neuronal cell viability as compared to the controls lacking cytokine is indicative of the ability of the inventive purified IL-6-like polypeptide(s) to enhance the survival of neuronal cells.

### Example 60

### Assay for Phosphatase Activity

[1358] The following assay may be used to assess serine/threonine phosphatase (PTPase) activity of the polypeptides of the invention.

[1359] In order to assay for serine/threonine phosphatase (PTPase) activity, assays can be utilized which are widely known to those skilled in the art. For example, the serine/threonine phosphatase (PSPase) activity is measured using a PSPase assay kit from New England Biolabs, Inc. Myelin basic protein (MyBP), a substrate for PSPase, is phosphorylated on serine and threonine residues with cAMP-dependent Protein Kinase in the presence of [³²P]ATP. Protein serine/threonine phosphatase activity is then determined by measuring the release of inorganic phosphate from 32P-labeled MyBP.

### Example 61

### Interaction of Serine/Threonine Phosphatases with other Proteins

[1360] The polypeptides of the invention with serine/threonine phosphatase activity as determined in Example 60 are research tools for the identification, characterization and purification of additional interacting proteins or receptor proteins, or other signal transduction pathway proteins. Briefly, labeled polypeptide(s) of the invention is useful as a reagent for the purification of molecules with which it interacts. In one embodiment of affinity purification, polypeptide of the invention is covalently coupled to a chromatography column. Cell-free extract derived from putative target cells, such as neural or liver cells, is passed over the column, and molecules with appropriate affinity bind to the polypeptides of the invention. The polypeptides of the invention -complex is recovered from the column, dissociated, and the recovered molecule subjected to N-terminal protein sequencing. This amino acid sequence is then used to identify the captured molecule or to design degenerate oligonucleotide probes for cloning the relevant gene from an appropriate cDNA library.

### Example 62

### Assaying for Heparanase Activity

[1361] In order to assay for heparanase activity of the polypeptides of the invention, the heparanase assay described by Vlodavsky et al is utilized (Vlodavsky, I., et al., Nat. Med., 5:793-802 (1999)). Briefly, cell lysates, conditioned media or intact cells (1×10⁶ cells per 35-mm dish) are incubated for 18 hrs at 37° C., pH 6.2-6.6, with ³⁵S-labeled ECM or soluble ECM derived peak I proteoglycans. The incubation medium is centrifuged and the supernatant is analyzed by gel filtration on a Sepharose CL-6B column (0.9×30 cm). Fractions are eluted with PBS and their radioactivity is measured. Degradation fragments of heparan sulfate side chains are eluted from Sepharose 6B at 0.5 <Kₐᵥ<0.8 (peak II). Each experiment is done at least three times. Degradation fragments corresponding to “peak II,” as described by Vlodavsky et al., is indicative of the activity of the polypeptides of the invention in cleaving heparan sulfate.

### Example 63

### Immobilization of biomolecules

[1362] This example provides a method for the stabilization of polypeptides of the invention in non-host cell lipid bilayer constucts (see, e.g., Bieri et al., Nature Biotech 17:1105-1108 (1999), hereby incorporated by reference in its entirety herein) which can be adapted for the study of polypeptides of the invention in the various functional assays described above. Briefly, carbohydrate-specific chemistry for biotinylation is used to confine a biotin tag to the extracellular domain of the polypeptides of the invention, thus allowing uniform orientation upon immobilization. A 50 uM solution of polypeptides of the invention in washed membranes is incubated with 20 mM NaIO4 and 1.5 mg/ml (4mM) BACH or 2 mg/ml (7.5mM) biotin-hydrazide for 1 hr at room temperature (reaction volume, 150 ul). Then the sample is dialyzed (Pierce Slidealizer Cassett, 10 kDa cutoff; Pierce Chemical Co., Rockford Ill.) at 4C first for 5 h, exchanging the buffer after each hour, and finally for 12 h against 500 ml buffer R (0.15 M NaCl, 1 mM MgCl2, 10 mM sodium phosphate, pH7). Just before addition into a cuvette, the sample is diluted 1:5 in buffer ROG50 (Buffer R supplemented with 50 mM octylglucoside).

### Example 64

### TAQMAN

[1363] Quantitative PCR (QPCR). Total RNA from cells in culture are extracted by Trizol separation as recommended by the supplier (LifeTechnologies). (Total RNA is treated with DNase I (Life Technologies) to remove any contaminating genomic DNA before reverse transcription.) Total RNA (50 ng) is used in a one-step, 50 ul, RT-QPCR, consisting of Taqman Buffer A (Perkin-Elmer; 50 mM KCl/10 mM Tris, pH 8.3), 5.5 mM MgCl₂, 240 μM each dNTP, 0.4 units RNase inhibitor(Promega), 8% glycerol, 0.012% Tween-20, 0.05% gelatin, 0.3uM primers, 0.1 uM probe, 0.025 units Amplitaq Gold (Perkin-Elmer) and 2.5 units Superscript II reverse transcriptase (Life Technologies). As a control for genomic contamination, parallel reactions are setup without reverse transcriptase. The relative abundance of (unknown) and 18S RNAs are assessed by using the Applied Biosystems Prism 7700 Sequence Detection System (Livak, K. J., Flood, S. J., Marmaro, J., Giusti, W. & Deetz, K. (1995) PCR Methods Appl. 4, 357-362). Reactions are carried out at 48° C. for 30 min, 95° C. for 10 min, followed by 40 cycles of 95° C. for 15 s, 60° C. for 1 min. Reaction performed in triplicate.

[1364] Primers (f & r) and FRET probes sets are designed using Primer Express Software (Perkin-Elmer). Probes are labeled at the 5′-end with the reporter dye 6-FAM and on the 3′-end with the quencher dye TAMRA (Biosource International, Camarillo, Calif. or Perkin-Elmer).

### Example 65

### Assays for Metalloproteinase Activity

[1365] Metalloproteinases (EC 3.4.24.-) are peptide hydrolases which use metal ions, such as Zn²⁺, as the catalytic mechanism. Metalloproteinase activity of polypeptides of the present invention can be assayed according to the following methods.

[1366] Proteolysis of alpha-2-macroglobulin

[1367] To confirm protease activity, purified polypeptides of the invention are mixed with the substrate alpha-2-macroglobulin (0.2 unit/ml; Boehringer Mannheim, Germany) in 1×assay buffer (50 mM HEPES, pH 7.5, 0.2 M NaCl, 10 mM CaCl₂, 25 μM ZnCl₂ and 0.05% Brij-35) and incubated at 37° C. for 1-5 days. Trypsin is used as positive control. Negative controls contain only alpha-2-macroglobulin in assay buffer. The samples are collected and boiled in SDS-PAGE sample buffer containing 5% 2-mercaptoethanol for 5-min, then loaded onto 8% SDS-polyacrylamide gel. After electrophoresis the proteins are visualized by silver staining. Proteolysis is evident by the appearance of lower molecular weight bands as compared to the negative control.

[1368] Inhibition of alpha-2-macroglobulin Proteolysis by Inhibitors of Metalloproteinases

[1369] Known metalloproteinase inhibitors (metal chelators (EDTA, EGTA, AND HgCl₂), peptide metalloproteinase inhibitors (TIMP-1 and TIMP-2), and commercial small molecule MMP inhibitors) are used to characterize the proteolytic activity of polypeptides of the invention. The three synthetic MMP inhibitors used are: MMP inhibitor I, [IC₅₀=1.0 μM against MMP-1 and MMP-8; IC₅₀=30 μM against MMP-9; IC₅₀=150 μM against MMP-3]; MMP-3 (stromelysin-1) inhibitor I [IC₅₀=5 μM against MMP-3], and MMP-3 inhibitor II [Kᵢ=130 nM against MMP-3]; inhibitors available through Calbiochem, catalog # 444250, 444218, and 444225, respectively). Briefly, different concentrations of the small molecule MMP inhibitors are mixed with purified polypeptides of the invention (50μg/ml) in 22.9 μl of 1×HEPES buffer (50 mM HEPES, pH 7.5, 0.2 M NaCl, 10 mM CaCl₂, 25 μM ZnCl₂ and 0.05% Brij-35) and incubated at room temperature (24° C.) for 2-hr, then 7.1 μl of substrate alpha-2-macroglobulin (0.2 unit/ml) is added and incubated at 37° C. for 20-hr. The reactions are stopped by adding 4×sample buffer and boiled immediately for 5 minutes. After SDS-PAGE, the protein bands are visualized by silver stain.

[1370] Synthetic Fluorogenic Peptide Substrates Cleavage Assay

[1371] The substrate specificity for polypeptides of the invention with demonstrated metalloproteinase activity can be determined using synthetic fluorogenic peptide substrates (purchased from BACHEM Bioscience Inc). Test substrates include, M-1985, M-2225, M-2105, M-2110, and M-2255. The first four are MMP substrates and the last one is a substrate of tumor necrosis factor-α (TNF-α) converting enzyme (TACE). All the substrates are prepared in 1:1 dimethyl sulfoxide (DMSO) and water.

[1372] The stock solutions are 50-500 μM. Fluorescent assays are performed by using a Perkin Elmer LS 50B luminescence spectrometer equipped with a constant temperature water bath. The excitation λ is 328 nm and the emission X is 393 nm.

[1373] Briefly, the assay is carried out by incubating 176 μl 1×HEPES buffer (0.2 M NaCl, 10 mM CaCI₂, 0.05% Brij-35 and 50 mM HEPES, pH 7.5) with 4 μl of substrate solution (50 μM) at 25° C. for 15 minutes, and then adding 20 μl of a purified polypeptide of the invention into the assay cuvett. The final concentration of substrate is 1 μM. Initial hydrolysis rates are monitored for 30-min.

### Example 66

### Characterization of the cDNA contained in a deposited plasmid

[1374] The size of the cDNA insert contained in a deposited plasmid may be routinely determined using techniques known in the art, such as PCR amplification using synthetic primers hybridizable to the 3′ and 5′ ends of the cDNA sequence. For example, two primers of 17-30 nucleotides derived from each end of the cDNA (i.e., hybridizable to the absolute 5′ nucleotide or the 3′ nucleotide end of the sequence of SEQ ID NO: X, respectively) are synthesized and used to amplify the cDNA using the deposited cDNA plasmid as a template. The polymerase chain reaction is carried out under routine conditions, for instance, in 25 ul of reaction mixture with 0.5 ug of the above cDNA template. A convenient reaction mixture is 1.5-5 mM MgCl₂, 0.01% (w/v) gelatin, 20 uM each of dATP, dCTP, dGTP, dTTP, 25 pmol of each primer and 0.25 Unit of Taq polymerase. Thirty five cycles of PCR (denaturation at 94 degree C. for 1 min; annealing at 55 degree C. for 1 min; elongation at 72 degree C. for 1 min) are performed with a Perkin-Elmer Cetus automated thermal cycler. The amplified product is analyzed by agarose gel electrophoresis. The PCR product is verified to be the selected sequence by subcloning and sequencing the DNA product.

[1375] Use of the above methodologies and/or other methodologies known in the art generates fragments from the clone corresponding to the approximate fragments described in Table 8, below. Accordingly, Table 8 provides a physical characterization of certain clones encompassed by the invention. The first column provides the unique clone identifier, “Clone ID NO: Z”, for cDNA clones of the invention, as described in Table 1A. The second column provides the approximate size of the cDNA insert contained in the corresponding cDNA clone.

TABLE 8

| | cDNA |
|---|---|
| Clone ID | Insert |
| NO: Z | Size: |
| H7MDD72 | 700 |
| HBGMZ39 | 500 |
| HEGAZ61 | 600 |
| HEPBA39 | 700 |
| HEPCU32 | 1500 |
| HLWAR77 | 1300 |
| HPFDV71 | 700 |
| HTECA32 | 800 |
| HTEHC47 | 700 |
| HTLIV78 | 700 |
| HTTCT34 | 600 |
| HUKEP18 | 900 |
| HTEPE35 | 700 |
| HPWCG85 | 1000 |
| HPFCP82 | 700 |
| HOFMU67 | 1400 |
| HBZAI39 | 1100 |
| HBGMG81 | 700 |

[1376] It will be clear that the invention may be practiced otherwise than as particularly described in the foregoing description and examples. Numerous modifications and variations of the present invention are possible in light of the above teachings and, therefore, are within the scope of the appended claims.

[1377] The entire disclosure of each document cited (including patents, patent applications, journal articles, abstracts, laboratory manuals, books, or other disclosures) in the Background of the Invention, Detailed Description, and Examples is hereby incorporated herein by reference. In addition, the CD-R copy of the sequence listing submitted herewith and the corresponding computer readable form are both incorporated herein by reference in their entireties. The specification and Sequence Listing of each of the following U.S. applications are herein incorporated by reference in their entirety: application Ser. No. 60/179,065, filed on Jan. 31, 2000; application Ser. No. 60/180,628, filed on Feb. 4, 2000; application Ser. No. 60/214,886, filed on Jun. 28, 2000; application Ser. No. 60/217,487, filed on Jul. 11, 2000; application Ser. No. 60/225,758, filed on Aug. 14, 2000; application Ser. No. 60/220,963, filed on Jul. 26, 2000; application Ser. No. 60/217,496, filed on Jul. 11, 2000; application Ser. No. 60/225,447, filed on Aug. 14, 2000; application Ser. No. 60/218,290, filed on Jul. 14, 2000; application Ser. No. 60/225,757, filed on Aug. 14, 2000; application Ser. No. 60/226,868, filed on Aug. 22, 2000; application Ser. No. 60/216,647, filed on Jul. 7, 2000; application Ser. No. 60/225,267, filed on Aug. 14, 2000; application Ser. No. 60/216,880, filed on Jul. 7, 2000; application Ser. No. 60/225,270, filed on Aug. 14, 2000; application Ser. No. 60/251,869, filed on Dec. 8, 2000; application Ser. No. 60/235,834, filed on Sep. 27, 2000; application Ser. No. 60/234,274, filed on Sep. 21, 2000; application Ser. No. 60/234,223, filed on Sep. 21, 2000; application Ser. No. 60/228,924, filed on Aug. 30, 2000; application Ser. No. 60/224,518, filed on Aug. 14, 2000; application Ser. No. 60/236,369, filed on Sep. 29, 2000; application Ser. No. 60/224,519, filed on Aug. 14, 2000; application Ser. No. 60/220,964, filed on Jul. 26, 2000; application Ser. No. 60/241,809, filed on Oct. 20, 2000; application Ser. No. 60/249,299, filed on Nov. 17, 2000; application Ser. No. 60/236,327, filed on Sep. 29, 2000; application Ser. No. 60/241,785, filed on Oct. 20, 2000; application Ser. No. 60/244,617, filed on Nov. 1, 2000; application Ser. No. 60/225,268, filed on Aug. 14, 2000; application Ser. No. 60/236,368, filed on Sep. 29, 2000; application Ser. No. 60/251,856, filed on Dec. 8, 2000; application Ser. No. 60/251,868, filed on Dec. 8, 2000; application Ser. No. 60/229,344, filed on Sep. 1, 2000; application Ser. No. 60/234,997, filed on Sep. 25, 2000; application Ser. No. 60/229,343, filed on Sep. 1, 2000; application Ser. No. 60/229,345, filed on Sep. 1, 2000; application Ser. No. 60/229,287, filed on Sep. 1, 2000; application Ser. No. 60/229,513, filed on Sep. 5, 2000; application Ser. No. 60/231,413, filed on Sep. 8, 2000; application Ser. No. 60/229,509, filed on Sep. 5, 2000; application Ser. No. 60/236,367, filed on Sep. 29, 2000; application Ser. No. 60/237,039, filed on Oct. 2, 2000; application Ser. No. 60/237,038, filed on Oct. 2, 2000; application Ser. No. 60/236,370, filed on Sep. 29, 2000; application Ser. No. 60/236,802, filed on Oct. 2, 2000; application Ser. No. 60/237,037, filed on Oct. 2, 2000; application Ser. No. 60/237,040, filed on Oct. 2, 2000; application Ser. No. 60/240,960, filed on Oct. 20, 2000; application Ser. No. 60/239,935, filed on Oct. 13, 2000; application Ser. No. 60/239,937, filed on Oct. 13, 2000; application Ser. No. 60/241,787, filed on Oct. 20, 2000; application Ser. No. 60/246,474, filed on Nov. 8, 2000; application Ser. No. 60/246,532, filed on Nov. 8, 2000; application Ser. No. 60/249,216, filed on Nov. 17, 2000; application Ser. No. 60/249,210, filed on Nov. 17, 2000; application Ser. No. 60/226,681, filed on Aug. 22, 2000; application Ser. No. 60/225,759, filed on Aug. 14, 2000; application Ser. No. 60/225,213, filed on Aug. 14, 2000; application Ser. No. 60/227,182, filed on Aug. 22, 2000; application Ser. No. 60/225,214, filed on Aug. 14, 2000; application Ser. No. 60/235,836, filed on Sep. 27, 2000; application Ser. No. 60/230,438, filed on Sep. 6, 2000; application Ser. No. 60/215,135, filed on Jun. 30, 2000; application Ser. No. 60/225,266, filed on Aug. 14, 2000; application Ser. No. 60/249,218, filed on Nov. 17, 2000; application Ser. No. 60/249,208, filed on Nov. 17, 2000; application Ser. No. 60/249,213, filed on Nov. 17, 2000; application Ser. No. 60/249,212, filed on Nov. 17, 2000; application Ser. No. 60/249,207, filed on Nov. 17, 2000; application Ser. No. 60/249,245, filed on Nov. 17, 2000; application Ser. No. 60/249,244, filed on Nov. 17, 2000; application Ser. No. 60/249,217, filed on Nov. 17, 2000; application Ser. No. 60/249,211, filed on Nov. 17, 2000; application Ser. No. 60/249,215, filed on Nov. 17, 2000; application Ser. No. 60/249,264, filed on Nov. 17, 2000; application Ser. No. 60/249,214, filed on Nov. 17, 2000; application Ser. No. 60/249,297, filed on Nov. 17, 2000; application Ser. No. 60/232,400, filed on Sep. 14, 2000; application Ser. No. 60/231,242, filed on Sep. 8, 2000; application Ser. No. 60/232,081, filed on Sep. 8, 2000; application Ser. No. 60/232,080, filed on Sep. 8, 2000; application Ser. No. 60/231,414, filed on Sep. 8, 2000; application Ser. No. 60/231,244, filed on Sep. 8, 2000; application Ser. No. 60/233,064, filed on Sep. 14, 2000; application Ser. No. 60/233,063, filed on Sep. 14, 2000; application Ser. No. 60/232,397, filed on Sep. 14, 2000; application Ser. No. 60/232,399, filed on Sep. 14, 2000; application Ser. No. 60/232,401, filed on Sep. 14, 2000; application Ser. No. 60/241,808, filed on Oct. 20, 2000; application Ser. No. 60/241,826, filed on Oct. 20, 2000; application Ser. No. 60/241,786, filed on Oct. 20, 2000; application Ser. No. 60/241,221, filed on Oct. 20, 2000; application Ser. No. 60/246,475, filed on Nov. 8, 2000; application Ser. No. 60/231,243, filed on Sep. 8, 2000; application Ser. No. 60/233,065, filed on Sep. 14, 2000; application Ser. No. 60/232,398, filed on Sep. 14, 2000; application Ser. No. 60/234,998, filed on Sep. 25, 2000; application Ser. No. 60/246,477, filed on Nov. 8, 2000; application Ser. No. 60/246,528, filed on Nov. 8, 2000; application Ser. No. 60/246,525, filed on Nov. 8, 2000; application Ser. No. 60/246,476, filed on Nov. 8, 2000; application Ser. No. 60/246,526, filed on Nov. 8, 2000; Application No. PT172, filed on Nov. 17, 2000; application Ser. No. 60/246,527, filed on Nov. 8, 2000; application Ser. No. 60/246,523, filed on Nov. 8, 2000; application Ser. No. 60/246,524, filed on Nov. 8, 2000; application Ser. No. 60/246,478, filed on Nov. 8, 2000; application Ser. No. 60/246,609, filed on Nov. 8, 2000; application Ser. No. 60/246,613, filed on Nov. 8, 2000; application Ser. No. 60/249,300, filed on Nov. 17, 2000; application Ser. No. 60/249,265, filed on Nov. 8, 2000; application Ser. No. 60/246,610, filed on Nov. 8, 2000; application Ser. No. 60/246,611, filed on Nov. 8, 2000; application Ser. No. 60/230,437, filed on Sep. 6, 2000; application Ser. No. 60/251,990, filed on Dec. 8, 2000; application Ser. No. 60/251,988, filed on Dec. 5, 2000; application Ser. No. 60/251,030, filed on Dec. 5, 2000; application Ser. No. 60/251,479, filed on Dec. 6, 2000; Application No. PJ005, filed on Dec. 5, 2000; Application No. PJ006, filed on Dec. 1, 2000; application Ser. No. 60/251,989, filed on Dec. 8, 2000; application Ser. No. 60/250,391, filed on Dec. 1, 2000; and application Ser. No. 60/254,097, filed on Dec. 11, 2000.

[1378] Moreover, the microfiche copy and the corresponding computer readable form of the Sequence Listing of U.S. application Ser. No. 60/179,065, and the hard copy of and the corresponding computer readable form of the Sequence Listing of U.S. application Ser. No. 60/180,628 are also incorporated herein by reference in their entireties.

What is claimed is:

1. An isolated nucleic acid molecule comprising a polynucleotide having a nucleotide sequence at least 95% identical to a sequence selected from the group consisting of:
(a) a polynucleotide fragment of SEQ ID NO: X or a polynucleotide fragment of the cDNA sequence contained in Clone ID NO: Z, which is hybridizable to SEQ ID NO: X;
(b) a polynucleotide encoding a polypeptide fragment of SEQ ID NO: Y or a polypeptide fragment encoded by the cDNA sequence contained in cDNA Clone ID NO: Z, which is hybridizable to SEQ ID NO: X;
(c) a polynucleotide encoding a polypeptide fragment of a polypeptide encoded by SEQ ID NO: X or a polypeptide fragment encoded by the cDNA sequence contained in cDNA Clone ID NO: Z, which is hybridizable to SEQ ID NO: X;
(d) a polynucleotide encoding a polypeptide domain of SEQ ID NO: Y or a polypeptide domain encoded by the cDNA sequence contained in cDNA Clone ID NO: Z, which is hybridizable to SEQ ID NO: X;
(e) a polynucleotide encoding a polypeptide epitope of SEQ ID NO: Y or a polypeptide epitope encoded by the cDNA sequence contained in cDNA Clone ID NO: Z, which is hybridizable to SEQ ID NO: X;
(f) a polynucleotide encoding a polypeptide of SEQ ID NO: Y or the cDNA sequence contained in cDNA Clone ID NO: Z, which is hybridizable to SEQ ID NO: X, having biological activity;
(g) a polynucleotide which is a variant of SEQ ID NO :X;
(h) a polynucleotide which is an allelic variant of SEQ ID NO: X;
(i) a polynucleotide which encodes a species homologue of the SEQ ID NO: Y;
(j) a polynucleotide capable of hybridizing under stringent conditions to any one of the polynucleotides specified in (a)-(i), wherein said polynucleotide does not hybridize under stringent conditions to a nucleic acid molecule having a nucleotide sequence of only A residues or of only T residues.

2. The isolated nucleic acid molecule of claim 1, wherein the polynucleotide fragment comprises a nucleotide sequence encoding a protein.

3. The isolated nucleic acid molecule of claim 1, wherein the polynucleotide fragment comprises a nucleotide sequence encoding the sequence identified as SEQ ID NO: Y or the polypeptide encoded by the cDNA sequence contained in cDNA Clone ID NO: Z, which is hybridizable to SEQ ID NO: X.

4. The isolated nucleic acid molecule of claim 1, wherein the polynucleotide fragment comprises the entire nucleotide sequence of SEQ ID NO: X or the cDNA sequence contained in cDNA Clone ID NO: Z, which is hybridizable to SEQ ID NO: X.

5. The isolated nucleic acid molecule of claim 2, wherein the nucleotide sequence comprises sequential nucleotide deletions from either the C-terminus or the N-terminus.

6. The isolated nucleic acid molecule of claim 3, wherein the nucleotide sequence comprises sequential nucleotide deletions from either the C-terminus or the N-terminus.

7. A recombinant vector comprising the isolated nucleic acid molecule of claim 1.

8. A method of making a recombinant host cell comprising the isolated nucleic acid molecule of claim 1.

9. A recombinant host cell produced by the method of claim 8.

10. The recombinant host cell of claim 9 comprising vector sequences.

11. An isolated polypeptide comprising an amino acid sequence at least 90% identical to a sequence selected from the group consisting of:
(a) a polypeptide fragment of SEQ ID NO: Y or the encoded sequence contained in cDNA Clone ID NO: Z;
(b) a polypeptide fragment of SEQ ID NO: Y or the encoded sequence contained in cDNA Clone ID NO: Z, having biological activity;
(c) a polypeptide domain of SEQ ID NO: Y or the encoded sequence contained in cDNA Clone ID NO: Z;
(d) a polypeptide epitope of SEQ ID NO: Y or the encoded sequence contained in cDNA Clone ID NO: Z;
(e) a full length protein of SEQ ID NO: Y or the encoded sequence contained in cDNA Clone ID NO: Z;
(f) a variant of SEQ ID NO: Y;
(g) an allelic variant of SEQ ID NO: Y; or
(h) a species homologue of the SEQ ID NO: Y.

12. The isolated polypeptide of claim 11, wherein the full length protein comprises sequential amino acid deletions from either the C-terminus or the N-terminus.

13. An isolated antibody that binds specifically to the isolated polypeptide of claim 11.

14. A recombinant host cell that expresses the isolated polypeptide of claim 11.

15. A method of making an isolated polypeptide comprising:
(a) culturing the recombinant host cell of claim 14 under conditions such that said polypeptide is expressed; and
(b) recovering said polypeptide.

16. The polypeptide produced by claim 15.

17. A method for preventing, treating, or ameliorating a medical condition, comprising administering to a mammalian subject a therapeutically effective amount of the polynucleotide of claim 1.

18. A method of diagnosing a pathological condition or a susceptibility to a pathological condition in a subject comprising:
(a) determining the presence or absence of a mutation in the polynucleotide of claim 1; and
(b) diagnosing a pathological condition or a susceptibility to a pathological condition based on the presence or absence of said mutation.

19. A method of diagnosing a pathological condition or a susceptibility to a pathological condition in a subject comprising:
(a) determining the presence or amount of expression of the polypeptide of claim 11 in a biological sample; and
(b) diagnosing a pathological condition or a susceptibility to a pathological condition based on the presence or amount of expression of the polypeptide.

20. A method for identifying a binding partner to the polypeptide of claim 11 comprising:
(a) contacting the polypeptide of claim 11 with a binding partner; and
(b) determining whether the binding partner effects an activity of the polypeptide.

21. The gene corresponding to the cDNA sequence of SEQ ID NO: Y.

22. A method of identifying an activity in a biological assay, wherein the method comprises:
(a) expressing SEQ ID NO: X in a cell;
(b) isolating the supernatant;
(c) detecting an activity in a biological assay; and identifying the protein in the supernatant having the activity.

23. The product produced by the method of claim 20.

24. A method for preventing, treating, or ameliorating a medical condition, comprising administering to a mammalian subject a therapeutically effective amount of the polypeptide of claim 11.

The application's sequence listing, which the Patent Office published only in electronic form, follows.

SEQUENCE LISTING (10231 sequences)

SEQ ID NO: 1 - DNA, 733 bp, Homo sapiens
gggatccggagcccaaatcttctgacaaaactcacacatgcccaccgtgcccagcacctgaattcgagggtgcaccgtcagtcttcctcttccccccaaaacccaaggacaccctcatgatctcccggactcctgaggtcacatgcgtggtggtggacgtaagccacgaagaccctgaggtcaagttcaactggtacgtggacggcgtggaggtgcataatgccaagacaaagccgcgggaggagcagtacaacagcacgtaccgtgtggtcagcgtcctcaccgtcctgcaccaggactggctgaatggcaaggagtacaagtgcaaggtctccaacaaagccctcccaacccccatcgagaaaaccatctccaaagccaaagggcagccccgagaaccacaggtgtacaccctgcccccatcccgggatgagctgaccaagaaccaggtcagcctgacctgcctggtcaaaggcttctatccaagcgacatcgccgtggagtgggagagcaatgggcagccggagaacaactacaagaccacgcctcccgtgctggactccgacggctccttcttcctctacagcaagctcaccgtggacaagagcaggtggcagcaggggaacgtcttctcatgctccgtgatgcatgaggctctgcacaaccactacacgcagaagagcctctccctgtctccgggtaaatgagtgcgacggccgcgactctagaggat

SEQ ID NO: 2 - protein, 5 aa, Homo sapiens
  Site (3): Xaa equals any of the twenty naturally ocurring L-amino acids
WSXWS

SEQ ID NO: 3 - DNA, 86 bp, Artificial Sequence
  Primer_Bind: Synthetic sequence with 4 tandem copies of the GAS binding site found in the IRF1 promoter (Rothman et al., Immunity 1:457-468 (1994)), 18 nucleotides complementary to the SV40 early promoter, and a Xho I restriction site.
gcgcctcgagatttccccgaaatctagatttccccgaaatgatttccccgaaatgatttccccgaaatatctgccatctcaattag

SEQ ID NO: 4 - DNA, 27 bp, Artificial Sequence
  Primer_Bind: Synthetic sequence complementary to the SV40 promter; includes a Hind III restriction site.
gcggcaagctttttgcaaagcctaggc

SEQ ID NO: 5 - DNA, 271 bp, Artificial Sequence
  Protein_Bind: Synthetic promoter for use in biological assays; includes GAS binding sites found in the IRF1 promoter (Rothman et al., Immunity 1:457-468 (1994)).
ctcgagatttccccgaaatctagatttccccgaaatgatttccccgaaatgatttccccgaaatatctgccatctcaattagtcagcaaccatagtcccgcccctaactccgcccatcccgcccctaactccgcccagttccgcccattctccgccccatggctgactaattttttttatttatgcagaggccgaggccgcctcggcctctgagctattccagaagtagtgaggaggcttttttggaggcctaggcttttgcaaaaagctt

SEQ ID NO: 6 - DNA, 32 bp, Artificial Sequence
  Primer_Bind: Synthetic primer complementary to human genomic EGR-1 promoter sequence (Sakamoto et al., Oncogene 6:867-871 (1991)); includes a Xho I restriction site.
gcgctcgagggatgacagcgatagaaccccgg

SEQ ID NO: 7 - DNA, 31 bp, Artificial Sequence
  Primer_Bind: Synthetic primer complementary to human genomic EGR-1 promoter sequence (Sakamoto et al., Oncogene 6:867-871 (1991)); includes a Hind III restriction site.
gcgaagcttcgcgactccccggatccgcctc

SEQ ID NO: 8 - DNA, 12 bp, Homo sapiens
ggggactttccc

SEQ ID NO: 9 - DNA, 73 bp, Artificial Sequence
  Primer_Bind: Synthetic primer with 4 tandem copies of the NF-KB binding site (GGGGACTTTCCC), 18 nucleotides complementary to the 5' end of the SV40 early promoter sequence, and a XhoI restriction site.
gcggcctcgaggggactttcccggggactttccggggactttccgggactttccatcctgccatctcaattag

SEQ ID NO: 10 - DNA, 256 bp, Artificial Sequence
  Protein_Bind: Synthetic promoter for use in biological assays; includes NF-KB binding sites.
ctcgaggggactttcccggggactttccggggactttccgggactttccatctgccatctcaattagtcagcaaccatagtcccgcccctaactccgcccatcccgcccctaactccgcccagttccgcccattctccgccccatggctgactaattttttttatttatgcagaggccgaggccgcctcggcctctgagctattccagaagtagtgaggaggcttttttggaggcctaggcttttgcaaaaagctt

SEQ ID NO: 11 - DNA, 73 bp, Homo sapiens
ctgtgtgtcatcgcggttgacmgstackattcacgctctgctggctgccctacttgaattccaagccgaattc

SEQ ID NO: 12 - DNA, 162 bp, Homo sapiens
aagtagggcagccagcagagsgygaagacctgtacctgagttactgctctcaggccatgttccgcatccgcatcctggagcagcgcctcaatcgacacaaggaactggccccactgaagtasckatcaaccgcratsacacacaggatccgaagccgaattc

SEQ ID NO: 13 - DNA, 606 bp, Homo sapiens
caagaagggcagccagcagagggtgaagacgcctagcacgatggtgaccgtcttgagcagggctagcgtctgcggggcggccatgtcagcgtggcttgagcggaccacgcagtagatgcgcacgaacagggccacgatggccaacaggatgatggagaagatggtcaccacgcacagcacataatgcttggcgtagagaggcaggacagtggagcaggcctcgaggtggcccaggcagttccagccaaggatgggcaggccaccgaggaccagcgagatgagccacgaggccccgatgagcagaagcatgcggcagctcttgtcgctgccatacagcttgaccttggcaatggccacgtggcgctcaatggcgatggccaggaggctgaagacagaggccgagagcgtgatgaaggcagagccctcccgggcaaaccactgcacaggcgtcagcctcagcgtgacagagccagagagcaaggtattggctacgaaggccacgcctgccagtagatcggaggcggccaggttgcccagaaacaggtacattgccgagtggaacttgctgtaccgatcaaccgcaatcacacacaggatccgaagccg

SEQ ID NO: 14 - DNA, 708 bp, Homo sapiens
gtttggactggatatcggtggaactctggtcaagctggtatattttgaacccaaagacatcactgctgaagaagaagaggaagaagtggaaagtcttaaaagcattcggaagtacctgacctccaatgtggcttatgggtctacaggcattcgggacgtgcacctcgagctgaaggacctgactctgtgtggacgcaaaggcaatctgcactttatacgctttcccactcatgacatgcctgcttttattcaaatgggcagagataaaaacttctcgagtctccacactgtcttttgtgccactggaggtggagcgtacaaatttgagcaggattttctcacagtatgcattttttagcttatatacaatttatggtaatttgattgttaaaaataatgccagtagcaagtggtgaaataatttccatctctaatggaacttgaattttcttgagtcaaatgaagattaaaggtacgctagtgataggagttggccatctagaggtggttgtctagttcagatgtatggacgacaatcagagccactaaaagggtagcattttattgctcctttagtatgaaaaattagggcatctgctatacgttgaggaagaaactacctaaaaggaacatcattagatcatgaacaatgagattgaaatataattaaaatcatttcatgtcataaaaaaaaaaaaaaaaaactcc

SEQ ID NO: 15 - DNA, 742 bp, Homo sapiens
  SITE (88): n equals a,t,g, or c
  SITE (716): n equals a,t,g, or c
  SITE (731): n equals a,t,g, or c
ggcagaggtttttagtagagaccaggtttctccatgttggtcacactggtctcgaactcccaacctcaggtggtcctcccaccttggncctcccaaagtgctgggattacaggtgtaagccaccgtgcccagcctacacccttaaaagttattgaggaccccaaataacttgctcattktggattgtatctatccatatttattgtattagaaattaagactgagaaaaagttataaaacacaagaatacagatgcacacgttccattagccatcaaggtgatctttctcccatgccagtagtctctggaaaattcctgagaggatgaaaataaaaaatcacccatacaaaaaaaaaaagtgtcaatattattatgaaaatagttttgaccttgaggaccccctgaaaggtctcagggaccctcgggggccctggaatcttgctttgagaacagctgatctgggctaatgagccttttccagcccctctgtgtgagacctcccagaaaccactaagggccttggaagagcttggcaaagaaagaggtgacaggatgattgaggagagccaccctagggaaagccttcagagaaggctttggggacagccccggtcagtggaggaagtcccagagaggcagtcggaagggctagggaccagctgaggcctgtgacctgaaatccttccaaagaggacgcctggaacctgggaaggcncagtgggtggggtanaaacttgggct

SEQ ID NO: 16 - DNA, 361 bp, Homo sapiens
  SITE (41): n equals a,t,g, or c
cttgcttatagatgcagaatttgcaccccagacctactgantcagaatttaggatcattcgcggtgattgatataaacattaagtgtaggtgggcagaagcatgccttaagtcagtggtccccaacttttttggcaccagggaccagttttgggaagrcaatttttccacggacagggtggcagatgatttacaggaatgaatctgtcccacctcagatcatcaggctttagagtctcataggagtgcacaacctagatccctcgcatgtgcagtccataatagagttcgcactcctatggaaactaatgccaccactgatctgacaggaggtggagctcaggtgcggacgcgtgggtcga

SEQ ID NO: 17 - DNA, 70 bp, Homo sapiens
aagggatgagmccagccaagccaggggaactgacgaccccacacacgtstgcactgctgtggccgtgttg

SEQ ID NO: 18 - DNA, 423 bp, Homo sapiens
  SITE (234): n equals a,t,g, or c
  SITE (256): n equals a,t,g, or c
  SITE (373): n equals a,t,g, or c
tgagcattaaccgtgacagcagagcatattctttgggcgtcagaatcaactcttcaccgccgatccatacctgacggcgacccatgttcagcgtcagattgccaacaatcagctcactttcgccctggattattatggcgtcgtagcagggcgcggatacgggcatgtaactcttccagcgcaaaaggcttcaccagatagtcgtcggcaccgacatccagcccggcgattttntcggtcagcgtatcgcgagcgngtgaggatcagtaccggacagggtatattttttcctgccggatacgggcggagaaaatggcagtcccatcttcgtcgggttaaccctaaaatccagttaccaccaggttgttaattnacctggcctcaaggtttttgttcccggccattccgggggggtttgttcaa

SEQ ID NO: 19 - DNA, 97 bp, Homo sapiens
agagactggccggcatggcgatgacctccgcaacaccaagcatgagaatctctgaagaatgaaccggatgatccagaggctgagaagccgaggattg

SEQ ID NO: 20 - DNA, 724 bp, Homo sapiens
  SITE (708): n equals a,t,g, or c
  SITE (711): n equals a,t,g, or c
  SITE (713): n equals a,t,g, or c
ggcagagctcaggctggctggccagaagaaagccaccactggttccacattgatactgagcactctgcttgcacctggttctggctgcagggcgctgtccctgggaagctcatcattcattggcagggacagaggacagcagaagaccttatgaatgactcacatggccctttcccacccactccaacctcactttccasgattcccctcactctgctctggccatgctaaacctgcttcctgcatcttgcatttgccaagaaatggtcatgcttcagggcctttggcacttggcgttgcctccccctggaatgtggttctcccagctctgtccatggttgttgttttctcctccctggggtttaggaaaaracccyttytcagagacggsaytytcaaacamcagcccctctatcggcagcctgtctgaagttctttgaagcccctgtcactctctgaaatgttctgtcttattcattaagtgattgatggtccctacctccactggaatataacagatgcctggagagcagggaccctgtctgtctggttcactgctcctctcttccagcacctggcacatggcaggggcacgggtctcagatgagagactgcctgggaggatgagctttgctggaaagctggggttggaaggtgttgatgggggaaggccccagccctgggctgaataatgtgttggccaggcanctnancctttgcaggg

SEQ ID NO: 21 - DNA, 135 bp, Homo sapiens
gccatctgctctgcaccgaaattggattctcctacgcakaggagaaggtggagaagattctccgtcttccggaggtagctactgccggtagctccgatttccttcggatcccctttcaaggcaagcagaaggaaa

SEQ ID NO: 22 - DNA, 338 bp, Homo sapiens
  SITE (323): n equals a,t,g, or c
ttgagcccagggtttgaggttacagtgagccattatcacactgctacactccagcctgggtgacagcaagaccctgtctccaaataaaaatgtgtcactttcttaatcagctgaaaaataagtgtttaaaggttataaggcattagttgatagaatataaagataggattttaaaacatgtcatcttcattatgaagggaaaatttgaaaactagtggtatcttttaggactaagggattgaggcacacacacactgatcctcttattgtctccccaaggacatccamcrgttataacaaccttatagcgaaaaatcttctcngaatttggaactttg

SEQ ID NO: 23 - DNA, 506 bp, Homo sapiens
  SITE (356): n equals a,t,g, or c
  SITE (369): n equals a,t,g, or c
  SITE (403): n equals a,t,g, or c
  SITE (467): n equals a,t,g, or c
  SITE (505): n equals a,t,g, or c
tttaatacgactcactatagggaaagctggtacgcctgcaggtaccggtccggaattcccgggtcgacccacgcgtccgattttttattcaaatagaataatatttaacaatcaaggtcatatgacttaaaatcttctgagctgggtttaggattcagatagatagtttattgtcagttgacattaaaacaatgttcttggccaggcacagtggctcatgcctgtaattccagcactttgggaggctgaggcaggtcaatcatctgatgtcaggagttcgagaccagcctggccatcatagcgaaaccccgtctctactaaaaatgcaaaaattaacttggcattgggggcggccntttgtaatcccanctacttaggaggctgaggaagaaactcgcttgancccggaaggcaaagttgagtgagctgaatgcccactgactcagctgccaaacaaaatccgctcnaaaaaaaaagaaaaaaaaaaaggggcgtttaagtcatnt

SEQ ID NO: 24 - DNA, 141 bp, Homo sapiens
gcaccacctgatgagctgggtgccggatcccagtttcgaagatggggaaactgaggtacagaaarattgatgccacttycttacatcactcagggtgttctgggcttaaactgttctggctgccgggctggctgccaaatc

SEQ ID NO: 25 - DNA, 138 bp, Homo sapiens
gggggcttctatgtatagccaaagctggtacgcctgcaggtaccggtccggaattcccgggtcgacccacgcgtccgctagtatgtgagcttgccacggactgggacttctattttttttttttttgaaacggagtct

SEQ ID NO: 26 - DNA, 521 bp, Homo sapiens
  SITE (512): n equals a,t,g, or c
tcaatctggacaaggagatcttgctgagaaaagagctacttgaaaaaattgaaaaagaaacactacaagtagaggaggaccgggccaaagccgaggcagtgaataagaggctccggaagcagctggccgagttccgggcaccacaggtgatgacttacgtccgggagaagatcttaaatgcggacctggagaagagcatcaggatgtgggaaaggaaagtggagatagcagagatgtccttaaaaggccatcgtaaggcttggaatcgaatgaaaataaccaatgagcagttgcaggcagattaccttgctgggaagtagccagaggcaggccacggcttacagaccactacatgacctataaaagtaatcagctcctttctagtcacgggctcctctcactgttccctgtctgcctggwgttcccaaccccccacccaggctgmgtatcatctcctgggccacatctgcccattgggaagttgttttcaaagccttggcccctggaactgnttacccttg

SEQ ID NO: 27 - DNA, 621 bp, Homo sapiens
ttgaggccacagcgattttatttggagaatgaagggcagaaccacagagatctcaggagggagggcaaaggtaactcatcgtcatccacagagaggggactcaggattacgctgtgcgtccaggccatcttccctcccagcccagccttggcacaagtcggccccaggatcatcatgtgatagagcctgaagcctgtctccccaagtccctggaaagtagacatctgtgacaatcctcccgaatcccagggcacagggagcatggctgagcacgccagactgcctgggctcaaattctgtcctgccatgaactgcctgggtgtctttggacaagtcatttgacagctctgagcctccgccttctcatctgaggacaacaggaataatgagggtacccacctcatggggatgtgatgaggcttaaagaagaaaatgcatgcaaagttttagcacagtacctggcagtgagtatatgtgcaataatattaattattactattttatcaagaggcctggattctggtcccagttctgccactgttttccctccctgggcctgcttgagtttctgtctataaagtaggtgttaattgattaaatgagataatggatgccaaaaaa

SEQ ID NO: 28 - DNA, 328 bp, Homo sapiens
  SITE (107): n equals a,t,g, or c
  SITE (151): n equals a,t,g, or c
  SITE (182): n equals a,t,g, or c
aattcggcagagcttggtctagtgcctggagcattgtgggtaccaggtttcgagagaatgtgtgctgccagaaagcagatctttgccacctcctctcccctcagctnctgaaccactgccagcagtgttctgggaatcaacctgtactttncttctgcatcctgggatgtaattctgggtgnttgtaagttggtttatggtctagcttagaattgaggcttctcttgagagagagcatgtgtgtaaaatgtttagcttgttctaatctgtggagcattctccttcatagaaaagatggggaattactggagatgaaaatctccattct

SEQ ID NO: 29 - DNA, 254 bp, Homo sapiens
  SITE (226): n equals a,t,g, or c
aggcagactcagtgccattgtagatgtttctgcatggaaaatacataaacacaaatatctgcagttgccaatccaccaccatcttgcagccccaagagagccccgggaatycaggttcctttggtatttctgctccctgcccttggtgcatagcctccatccccaggacgacaagaaggctgactgagccctaacatcatcccacagtccagctggggaagagagncagcgaccaaagccagagggagctagct

SEQ ID NO: 30 - DNA, 703 bp, Homo sapiens
  SITE (700): n equals a,t,g, or c
gtcggcggcgctgcaccggcgggtagcagctatgcgsgaggcggggacagcgcttccggaccagagctatggatttccttggaggaacaccaggatgctttggaacttatcatgagcaaatatcggaaacagatgttacagttaatggttgctaaaaaagcggtggatgctgaaccagtcctgaaagctcaccagtctcactctgcagaaattgagagtcagattgacagaatctgtgaaatgggagaagtgatgaggaaagcagttcaggtggatgatgaccagttttgtaagattcaggaaaaattagcccaattagagcttgaaaataaggaacttcgagaattattgtccatcagcagtgagtctcttcaagccagaaaggaaaactcaatggacactgcttcccaagccatcaaataactgaactctgaatgatggctggagattgtctatcaaggaaggaagttactgtcttcccattcaagtactgtccattaagtgtcttgcctcagatttgatttaatcttaattaaaggtatcaggtggcaatttagaattccagtcaatattggctgtccacagttctcagatgtgttaatgtgaatactacatgctgaatttcaccattcctttctcaaagagactacttttaattttcaaaaaaaaaacaaaaaaaaaaaaaaaaaaaaaaaaaaanaat

SEQ ID NO: 31 - DNA, 197 bp, Homo sapiens
  SITE (62): n equals a,t,g, or c
tggtcccatgccttccaggcagccctgctgaaggatctaagttggccctgttcctgcaaatnatcaacgtgcctggactcgccagctaaaagcctgggccttccccagccttttttctggggcaccwattcctctgccagtcctgctcccctcaccttccttgggcccgtcagagtcttttgtggtgctgtgcttct

SEQ ID NO: 32 - DNA, 417 bp, Homo sapiens
  SITE (320): n equals a,t,g, or c
  SITE (341): n equals a,t,g, or c
  SITE (374): n equals a,t,g, or c
  SITE (401): n equals a,t,g, or c
aattcggcagagctggcctccgttcactctaccccctgctcccttcatctgttcctcttgcttcctcccagattcttcttttttccctggctctcatcatcctgcccagcttcagtccattccagagtcgaccagaagctgggtctgaggattaccagcctcacggaggtgagaggcaagggcagggagcaacccctggctgagcaagggagggggactctgttctccaaggtcgtsaagaagcaagagggaggtcctgtcctgtctagggtctcccacccaggggagcactttactactgccctcttgcctttcaactnaaagtgactttcagaattatnctgacccacaaggacgtaacagaaaatttgggngacccaatggttagagttccagattgnggggggccacttgggg

SEQ ID NO: 33 - DNA, 332 bp, Homo sapiens
  SITE (85): n equals a,t,g, or c
  SITE (179): n equals a,t,g, or c
gaatgcaaacagtagatataacgctggtggctggcccggcagacactcgcagtccgtccttaagagcaatcggtcatcactgaanggggactataccgatagtgctgaattacgtcttgttctgcacgatatatcaggcaatccgatcaaagtttctggaaggggatgggaatttgtgncaatcaggtactaacgtgccctatatkaaaaattagcgcaattgattacagtctaaatatcaacggtggattacaaagccactgttacaggaggcggagagggtwtcgcaacgytggatccctgtattgaatggtgttccatccaagctggtt

SEQ ID NO: 34 - DNA, 569 bp, Homo sapiens
agcaagctaaggaggggggtggcaggaccagakgctggggtcgagcactgatacccasaagccaaccgcacccatgtgacctgtgtctcatgtcgcccccagcacagtgccaccctacagccctgggagctcaggccccgcaaccccaggggtcaacatggccaacagcatcgccagcctccgtctcaaggccaaggagttcagcctgcaccacagccaggtgcctacggtgaactgaagtccagtcccaccaggacccagacgcctccctgggtggacagcaatagaaaagggggcagacgcccaggaagtgaccttctcctggatgagctctcctggcccgtctgtccagcctggactcccgagcccacgaggctgttgaggcccctgcagccgggcccagctcttctgtccttggccaccagagactgcagcccacaacccttggaggggttgggccggaaggtggaagagcctgccaaggacctcatttagtttgtgtattaaaaccaaaaagcttttgtctttaagaaataaaaccatttttttaagccccaaaaaaaaaaaaa

SEQ ID NO: 35 - DNA, 335 bp, Homo sapiens
  SITE (102): n equals a,t,g, or c
  SITE (105): n equals a,t,g, or c
agaattatggtgcaaggtgagagccactgagaaatgaaagagtatccaggcaggggagagatttcctccatttgggagactctgggaagacttcctggcgtntgnacatttggccatttgagccgagtaggaggtgaatatgtsgggatggcatcctaggcaaagcaaacagtaagaaggaaaaggtggcaggaaagcactagatgtgaattagcagtttagagtaattacttggccatgcatagagaagaggagatgtgagggaagtgaggttggttgagggcgttccatggcagctgttgagtgccaggctgcacttttccagggtcgttctt

SEQ ID NO: 36 - DNA, 507 bp, Homo sapiens
  SITE (360): n equals a,t,g, or c
  SITE (383): n equals a,t,g, or c
  SITE (423): n equals a,t,g, or c
  SITE (449): n equals a,t,g, or c
  SITE (463): n equals a,t,g, or c
aattcggcacgagatggattctacttagctgggtggctccctgcactctgggcttgacacagtgaaagcaaactcttacttccatgaagcaatttcatgggcttttgttttctttttaattacccaattgctgaggcctctcacctaattctcaggctttgaacaaaacattccaccccccaggctgcttttccccactgtgcactccacatggsttcatgctgctgcagactccacccttcccagtggytccccaggcagcactcacaaactgctctcaccagctctcccgcggaggggcctacttctgggggacagaaaatattggaggagaccttggccttggatattccagaggtnaacagcacgttcctggacctcantgttggttggtggaacctgccttttaggcccttccatttnctaaggtgttcaaccccattctggantgtgccccaatttnagcaaacacaaattcaagttcatgggacaatcctattgaaggcc

SEQ ID NO: 37 - DNA, 139 bp, Homo sapiens
  SITE (41): n equals a,t,g, or c
tggctgatgcacgacccggcatacccggagagcctgcccgntgcgccactggtgcggtacacgtatacggaagccggtgaactgctggcggtatatgaccgcagcaattacgcagtgcgcgyttttcamgtatgacgcg

SEQ ID NO: 38 - DNA, 259 bp, Homo sapiens
  SITE (27): n equals a,t,g, or c
gagtggaacaatgcaggacgccgtcgntaacgtgttgagcctcggttgtgtggtgattattgtcgccgctaacatcgtcggcatcggcatggcgaattaatctttctgcgaattgagatgacgccactggctgggcgtcacccggtttcccgggkaaacaccaccgaaaaatagttactatcttcaaagccacattcggtcgaaatatcactgrttaacaggcggctatgctggagaagatattgcgcatgacacaatt

SEQ ID NO: 39 - DNA, 447 bp, Homo sapiens
  SITE (109): n equals a,t,g, or c
ggaagcattgtgggtaaaggcctggaggcaggaaagtgaaggacaatttcaagaaactcagttcatcaattttcatcaacaccttcctgggccatgcctggtactgagnaacccagccctgaatctgacatcattttccctttcagagcatagaatgcaggggatccaggaatgggttaacagaagagaagctggatcaaggagacctttgcgtaccaggtgaaggagtttgaactttgttctgcaggcaggcagagcacgacaggctcctacctgggtcacttcattctcctatttctcttctcttccatcctgtagtcccagctactcgggaggctgaggcaggagaatggtgtgaacccaggaggtggagcttgcagtgagctgagatcgcaccactgcactccagcctaggtgacagagtgagactccatctcaaaaaaaaaa

SEQ ID NO: 40 - DNA, 642 bp, Homo sapiens
  SITE (195): n equals a,t,g, or c
  SITE (205): n equals a,t,g, or c
gagctgcagagtcttcggcagaagcacttgccagaggtggaaacctacaggcactacagaaaaaagaaattgaagatttgtacagccggctggggaagcagcccccaccgggtattgtggccccagctgctatgctgtccagccgccagcgccgcctctccaagggcagcttccccacctcccgccgcaacagcntacagcgctntgagcccccaggccctgtgaattcagaacagaagccatgtatctcccccacaccagggcccaccatggagcttgtgttctcagaatctgatgctttctgatcaacaaaactgagcaaggaagatcccaacactgaaggggtagaaggccaggggggcatggagagtgcagctccattatagtgaagagccaaacatatgtgaactgtttgctgtgtggaggtgttagttctgctgcctaccatcttcatctctagcacctcccctgccaagagtcaaccactaagcaatcccacccaagcctggatgcttctagaggggcccactcccagctgggagagtgtaggggatatgctcacaccacattagcagcaaccaataaaaatgctggaaacaaaaaaaaaaaaaaaaaaaaaaaaaaaaaaagtcgtatcgatgt

SEQ ID NO: 41 - DNA, 589 bp, Homo sapiens
  SITE (356): n equals a,t,g, or c
  SITE (360): n equals a,t,g, or c
  SITE (481): n equals a,t,g, or c
  SITE (486): n equals a,t,g, or c
  SITE (556): n equals a,t,g, or c
gcagacctcctctcagaacagagggccaaggtgctgcggctgcaggcagagctggagaccagtgagcaggtgcagagggatttcgtgcgactgtcccaggccctgcaggtgcgcctagagcggatccgccaggctgagaccctggagcaagtgcgcagcatcatggatgaggcgccactcacggacgtcagggacatcaaggacacctgaggggtcaggatatccccacccccaccctgggaaagacgcctttccccactcctgaaccatgaggcctcgctctggggtcttggatggcttttccaccgtccctgagactggggttgaggggactgacgggggccaccaccgcccgncctncagcgcctcctcccagggtggctgggcctcctgttctcagggatcacacctgggtgagggggcccaaagccccttccggaaccaaaggtgcaggctcagcctgcggctttctggctgctgngctgnctcctggctcagcctccctgccccagccgtccctgccagggcacagcggaccatggggctgagtccatanagcatagggccccggcctggacagcagtgcttt

SEQ ID NO: 42 - DNA, 329 bp, Homo sapiens
  SITE (319): n equals a,t,g, or c
  SITE (323): n equals a,t,g, or c
gctcctctggggcagcctycaataacccttggacaacctycactttttcatcttcagccctgaccactccctggggcccatagccttacatccatctgcccccagcccaaacacttctgcaaacactagaaaaggaggtagcccgtgtgccctcctgcaccgcctcctccactcctgtcttggagaggctttcccgtgggccgagcaacccccttacctttggcacttgccctgattctctggccagcttctacaacctctccttttcagccacacccaggtgggcaggarctacaggagcctggggcctgtgggattnacanacaccg

SEQ ID NO: 43 - DNA, 569 bp, Homo sapiens
tttttttttttcacactgaacaagcattttattccagggattcccaacatgtgagcagggtggaagcctctgacaaggtgggccagaacctttggatttggtttgggggccaaaatcaactaaggctcagagaacatacaaagcctgcgtgaaggtggtgagctgctcccaccttcacaggtctgggggtcctaaacccctggagccatggtcagtcctgtgcccaagcctcttcttttgcaggccctgaaactttcactacagctcagacactgctgcacgggccggggagggagggggtgcttccggcaactgttcacagcccctcactcagcctccctggtgaccaggcacagactagccagggaacggagcaaagccagctggctccagatccagctgagcagcctcccggaaacctcctaacctacgcttaatggggagggtgcacaaggcagctcagaaggtgcatcttcctgggatctgaagcctaaagaaagccacctccagccagctactgggaggtgttgttgggcataatcctcccccctgggggaaagaggtccaaa

SEQ ID NO: 44 - DNA, 342 bp, Homo sapiens
  SITE (294): n equals a,t,g, or c
  SITE (328): n equals a,t,g, or c
  SITE (338): n equals a,t,g, or c
gatgtttcctaaggcgattaagtccacagtgactggactgtgaactttgcgccatttccattcttggcagcgcacgttgcctgcctgggcaaggtttgcattggccattgttcagaagcggagctgttgagtcccgggtgtgcagatgtaaatctgcaatgggtcccatcaggtgccatccagaaaggccaggcattcacatgctgtcacctctggaccttgcaaacctgcagaggtggccggccccgtgccttgtccctggctgctgtgtggactgaatractaacttcgctnttccaccaagagccccgcaaaacaagaaggaggncaaccctaanccct

SEQ ID NO: 45 - DNA, 602 bp, Homo sapiens
ttttttttttttttttttttttttttttgcaatttagggcctttattgaccgaggagggtatggaggtttgagggccagtgagcccaccatagtggagcctgacctcagcaggccactggctggagctggaagtctggggggacactgcccaggccagtgcactgcaggtgaggttgatggtgccagggcgtaccacagggagcaggcagaacctctgtaaggtggccgtaaggaataggaagatacccgagtgggccaggcctgtgcccaggcacatctgctttgccgggtacacaggtgcacagtgagcaccaggtaccccagagccagtccaggctggtccccttcctcctctgcctgcacctgaggcaaagggcatgaaagcatcattgccctggaacttgcccttgtccaggaagttggtagggttgaagcagtctgggtctttgaattgagtggggtcccggtgtgcagtcacaagcaggggaatcacaaaagtgccctggggatacatgcaacttgggttacctgcgggcttggtgagcacctgcaccacctccatccaagacgctttttaaaagcccaagggaataggccgggc

SEQ ID NO: 46 - DNA, 237 bp, Homo sapiens
  SITE (219): n equals a,t,g, or c
  SITE (222): n equals a,t,g, or c
gcctagggccttgaacttattgaaagagttatagtttacagtaaaaccatagctttccagaatgcctgggtctctaaatagccagkgtttcagatagttaaaagtttaatactgcttgttctcattgataaatggaagttaaacagtaggtgcacatgggcatgaagatggtgagacccctggctttacaaaaaaactttaaaaaaattagctgagtgnggnggcacatacctggag

SEQ ID NO: 47 - DNA, 1178 bp, Homo sapiens
  SITE (1070): n equals a,t,g, or c
  SITE (1101): n equals a,t,g, or c
  SITE (1118): n equals a,t,g, or c
  SITE (1127): n equals a,t,g, or c
gggcatgaacatcaccagggacgcgttgtgggcactgggtgtgtgcagggacaacgtgagccggaaagacaggtcccccaagtgccccgaaaacagcttctgggtggtgcagctgtccaaggggaccaagtacttatccaccttctctgccctaaccccggtcatgctgatggagcctcccagccacatgggcatcttcctggacttcgaagccggggaagtgtccttctacagtgtaagcgatgggtcccacctgcacacctactcccaggccaccttcccaggccccctgcagcctttcttctgcctgggggctccgaagtctggtcagatggtcatctccacagtgaccatgtgggtgaaaggatagacacagaccgggggactcgggcactgctcctggctctgcagaaggtgtgggccttctgcttactgcaggccacctgccagggttctctggcatcacgctggcagccattagacacacaggggggtttctcaaattctaaatataattgtgattagaactgtcaaacattaagagggtatactgacagatgcttcctagaggaaacttttgaaagcccctgcgttctgagtggaccgatttctaaatccatacctacacaccaggaacagcgtggtcacgttttttttagccatgcccccacccccactttggaatgacaggaatctgtggctcccagcccccccaggggtttaggttactctgtcaaagaagtakaaatatcctatggtggkgaggagcgggggtggttgctgtgtcakggatggtcccakgctgcccatagaaatgtcctatgcatcctattgggtccttcgatgggggaaaatgggaaaggctgaacccgtaaaaagcctcagagctgccacccccatcccgttcgatccccaaagttgcacgagcaggggcaaaatcccaaagagattaggatttatgtaggggcctcttttcacagcgcccttaccttttccaaggaaccccccacccacccctgcagggtcaagcactttaacagcctgtgtcagtcactagcaaggcagaattncagagtaagcgtacttctacctcgacaaagnccggagtgtctgcgccnaggggctgnctggaacaagcatgcccctttggagtgggttcccgcaaaaaagaatgtggg

SEQ ID NO: 48 - DNA, 331 bp, Homo sapiens
  SITE (297): n equals a,t,g, or c
  SITE (312): n equals a,t,g, or c
gccgcggggaggactcgcccacagtcacatggtcaggaggccacgcggtccctcttcccgagaggtcgcgccctgacctgcttccaagtgccacccgtctcagccttgctgaggagcccttggagcattttgtcactggcaggacccgaccctcacagtagcccaccagccggagcacggcccccccattccgccgtcagggcactcaggagcgcggcccccccccccattccgctgtcagggacccaggagcgcgggcctccgcccattcccccattccaccgtcaggggacccangagcgggggggccgngtgggctccacagtgatct

SEQ ID NO: 49 - DNA, 362 bp, Homo sapiens
  SITE (2): n equals a,t,g, or c
  SITE (15): n equals a,t,g, or c
  SITE (344): n equals a,t,g, or c
cnctgtactaacgtnaacaaaagctggagctccaccgcggtggcggccgctctagaactagtggatcccccgggctgktcttcyggcttcgcatggcgacgaaaaatatgcgcgacatgccagctatccttgcggttaagtacatacggcagatggtaacgggtggtgcttttgccgaagccaataaagggcgcagttgatgaccatgatttcgcccttttaaagggtgggttattttacacctttaacgcaaaagcggaacgtgggttcctaactgggaagtggcccgggtaccccaaattcggcccttataagtggagtcggaattaacaaattcaacttgnccgtcggtttaacaaacg

SEQ ID NO: 50 - DNA, 383 bp, Homo sapiens
  SITE (308): n equals a,t,g, or c
acaactttttggaggaacacggggcctgtgcgtatttcgcgaggtgaggaggggaggatgcagggagcgagtgcaccctgagaagtcccatcctcacagcctggcccgcatggcagatgggacatcggatgctcagagaagcggaaactcccgcacagtggcggaggcccggcttctctgcttctccagatcccggctctgcgcctggggtttgcatcgcccaaccttggccgctgcagcagcagcactgctggctcaagaggccataaggatgaagcaagagaatcgctcgaacccaggagacggangttgcagtgagccaagatcgtgccactgcattccagcctgggcgacagaatgagactccatctcaaaaaaaaaaa

SEQ ID NO: 51 - DNA, 369 bp, Homo sapiens
gaaagcggccgccagcgactgctggtccagaagcggggcgctctccggaggaagttcggcttctcggccgaggactaccgcgagctggagcgcctggcgctccaggctgagccccaccgcgccggccgccagtggaagttccccggctccttctacttcgccatcaccgtcatcactaccatcgatgaacacctgccgcgtaactgcagccacggtcaagacggaacattgccatcaacccccaaaattctaccatgccttctgtagttaagcctgcccccaaccccagctactggcaagcaaccacagatctgttctctgttgccacagttttgtcatttccagagtgtcatttatagggaaccatgc

SEQ ID NO: 52 - DNA, 435 bp, Homo sapiens
  SITE (373): n equals a,t,g, or c
  SITE (404): n equals a,t,g, or c
  SITE (412): n equals a,t,g, or c
ggcaaggcagaattccagagtaagcgtactcctacctcgacaaagccggagtgtctgcgcgaggggctgcctggaacacatgcccctttggagtggttcccgcagaaagaatgtgggcctcctggagagctggtcctggagggatgcccccgtcccatcccccaactccaatcattctgaccttggcctgccaaggctgtgagggccgggccttccgaggatacccgccctgggaagcacgggctgagggggtgaggacgcactaggggtatggcgaagggctcsaatgccccaggctgcggactcccttagtccttgcagttgcttcgtgtgccccgccctgagtccccatccctccttgccctgcccctgntcatcctccctgcgcccgtccctgtcccatnctccctgnccccgccctgtccatccttcctg

SEQ ID NO: 53 - DNA, 479 bp, Homo sapiens
aggaaatgaaatggcgggggggtccttcccttgactccgcggctcaccctcccccaacacacaacacacacacacacacagagcaataagtttctctcactcaaatgtgggcggggcgggcctagcctgtcgctggtggggggagtggtgagggggcgctctcagggatgggggcggggttcggagacagtgtggggaggggaggtctgcaaatcgtccaactctggtgctaatggcgggtcttctcagcccacccgcagggcagggagggaggggtcgcgtggccccttccccaagcctcccccacgcccaccctgggtgcatgaaccgcccaatgcagaagctgccgcatgtcacccccctctccccaaagaaaaagtgtcatgcccccttcccacccaccctcactccccaccaaaataaacgtttccttttcatttaaaaaaaaaaaaaaaaaaaaaaaaaaaaaaaaaaaaaaa

SEQ ID NO: 54 - DNA, 599 bp, Homo sapiens
  SITE (435): n equals a,t,g, or c
  SITE (567): n equals a,t,g, or c
  SITE (597): n equals a,t,g, or c
ggtttccataccctttgcagtggagcctcctagtggccgtgggtgggtactccagggcccctgcctgggctctttgaggggtgggtttctgctagggttggggctgwggttctgcgtccctgactctgacatggagccccaggtctcggcgggagccccacctgagcccacccaccacgtctgtcaggaagtagcctgtgcccggttctcttagcctgggaagcacagaggccccagccctcttccatttcctgctccacagttgcaggctctgtggtcagctacggggtgacgagagtggaagtcggagaaatgcaacaacctctggctcttcctggagaccgggcagctccccaaagacaggagcacagatcagagaagctaggagaagctccagcaggggcacagaggattgggggcaggaggaagtcttgngaacacaagccttcatgccccctgaccccaaggccgacccttcccacaccctaaggtaccccagtccgtatcctcttgtccgcatgtgttggccaaggcctgacaaaacaccttgcaaaatggcttgcttgncccaaccttgggaccttggcccaagaaggntt

SEQ ID NO: 55 - DNA, 635 bp, Homo sapiens
  SITE (18): n equals a,t,g, or c
  SITE (631): n equals a,t,g, or c
  SITE (632): n equals a,t,g, or c
  SITE (633): n equals a,t,g, or c
  SITE (634): n equals a,t,g, or c
  SITE (635): n equals a,t,g, or c
ccagacctctgagactanttggatactccagttacaggttttcagagtgcaaggggccaccctttcctgtaccacatgggttatatgaaattacaggcatgagccaccgcgcgcagccaatggggcttttaataacaggcgccctcggtgaggtcgcagctccttggcttgtagactccaggatgggacttggtgggtgtggcaggcccctctttgaagagtcacggcagatagccctcagtccttgctgcatcccgactccttgcctgcaaaagctctagacagagcacagtcctcagccgcccacacagcccgagttctggagccaggcctcgggggaggccagctccagccccctcttccccytcccccacaccttttcctcctccagtgacacaactggagcaagtttccaggaggagagaagaattccagtgaagcagcagctgcacgtccgaggcttggggaggacccaggactgtktgggtttcttacctgcctgagccacctcaggggaatcttccagcctaatgcaggcatttytgcacctttggggtcatgctttgtagcagtgtctcccttgcgacctcgcaataaattggccccacgggtgattttgaaaaaaaaaaannnnn

SEQ ID NO: 56 - DNA, 463 bp, Homo sapiens
  SITE (28): n equals a,t,g, or c
atgtctatagtgtctttaaattattgtnacctacactgggtaccggagagggggatggctgcggcccycatcccycatcccatcccatccctcatctcatccctcatcccatcccccatcccatccctgaccccatcccccatcccatccctcatccctattccccatacccaccccccatcccatcccccatctcccgaaccaggctcctcctgcttcaacagacccttggggcccctgatgccaccgagacactcgcactgtcccttggctgccgggcaccccactgagcccctgcccaccccaaagtctgccagcaacaggccctttgcctgggtgagacgggggtcagggtggcccagatgggggtgatggcgaccaaggtgctgcgtccccacccttctgacggcagcctcccctggaggggagtgctcggcccaataaaagctggaatcggaaaaaa

SEQ ID NO: 57 - DNA, 494 bp, Homo sapiens
  SITE (488): n equals a,t,g, or c
ggagaagtgttctgccatccttgctgtcccgaatcaccgtgcagagtaagtatagttcccagagggatcacaaggacacagaagtccacagctcccaaggtgaccttgtctgtggtccgtgcagcagcctacgatgtggcccctgcccatagaggagtcctgggagtgaccagaaagacccctcatgagagcaggtccagggagaaggcaagagggtggtgagaatgcctggcctggagatttccagggcggccccagcagggacccagcgagggcagaggcatccgatgacaggccagggcctttcccaaaccacccagaaggktcttctacagaaagagacacataccatgcaaacatmtgakatgctgcaagggagccgaatgaaatgggagtaaacatcacttggaaagcggccagggcaggaacagcgctaacctcacgtgacgcccagccctcggtgcctccctgtggagaggtccgctcanaagaaa

SEQ ID NO: 58 - DNA, 522 bp, Homo sapiens
  SITE (469): n equals a,t,g, or c
  SITE (470): n equals a,t,g, or c
  SITE (471): n equals a,t,g, or c
  SITE (472): n equals a,t,g, or c
  SITE (473): n equals a,t,g, or c
tcttttgtggatgaagttcatatgctgtgtggttggtgactatctgattctatggaggctaaccaaagcctagactgagtgtggatgagaccctcaactggggagtgatggggatatcaaaggacatgctgggtgagaggagctgactgtcatgtagggagtgaaccactgcccccagcagagatacagttcggttttaagaaaaaaggcaaggccaggcgcggtggctcacgcctgcaatcccaacacttttggaggtcaagaggtcgacaccatccttgacaacatggtgaacccggtctctactaaaaatacaaaaattagttgggcatcgtgcctgtagtcccagcttctcggaaggctgacgcaggagaatcacttgaacccggaaggtggaggttgcagtgagccgagatcacatcactgcactccagcctggtgacagtgagactccacctcaaaaaaaaannnnnaaaaaaaaactcgagggggggcccggtacccaattcgccctatagtgag

SEQ ID NO: 59 - DNA, 710 bp, Homo sapiens
  SITE (467): n equals a,t,g, or c
  SITE (491): n equals a,t,g, or c
  SITE (650): n equals a,t,g, or c
  SITE (674): n equals a,t,g, or c
  SITE (675): n equals a,t,g, or c
gggcactatgtagtctgaactactaaccccgaagtgctttggtttgaaacttggccagttaggtggagaaagtggatgttgtgttgctgagcccttggcatttggcagccctgtagacttgaaccatgtcccagccaggctggatgactggcagactatacccttgggggacttgttaattccaggggaggatccgggtggagctccagccttatggggtcctagccctttgtgtgtatctgtctcccatgaggtcacctggctgccttgttggtgacttaagatgctctgtggattcctcaagagatgggctctgtctgcctctgcatgactcgtgatgagtggcggtgggacctggacccatctgctgatgatcaggtggtgttgcagcaaggktcctccagagctccagctctgcgtctgktacgggagctgtgaaggctgcacggtgctcattttcagatggntcttcctggctctctggctgcatncacagaagtctgatgaaacactgtgaaagccggcgtcaggtattgaagcacctggctgaaaacctctttgctgcatgaagacctctggctgaatggggtcacaacacctcggtttatttccattcttgaacttaactctggggctcaagcactttcagnaaaacaatttgacttttctacaannaagaatgtgggtgcattttcctttcttccttaaaa

SEQ ID NO: 60 - DNA, 621 bp, Homo sapiens
  SITE (488): n equals a,t,g, or c
  SITE (579): n equals a,t,g, or c
  SITE (620): n equals a,t,g, or c
caccgcggtggcggccgctctagaactagtggattcaccgggatccagttattgtcgaggttataaaccccctgaccggraagaatataggcaccgtgttcctgaacgtgtgtttcgatataaccgtggctggcacctggtgcaaaagagaggatatgcatgttcatatcaaaacctaactctttgggcagaaaatccagcagaataacatcgtccatgccttcataatgaatgcgttccagttcgctggcattgccagaaaccagccacggtgcatarccttctaccggaacatagcggcgcttatataaaaagatttggctgtcttcggcctgggcgttaacaaacgtcattaaggagcctggcgggcaataaagatagccaccttcgcttaaggcaaatgttttgccttcggctttggcaagtgatatttccagagatcacatacaggaacgtttcaatgccttcggcaccgaaaccctgttggntgccaccgtttgatgcaatgtgaccagataatcaacaaaagaggcacccagctttgcgtggagaggaattgcgcgtcacaattttcaaagnccggaataatattttttaccagaccattccggggtaacaang

SEQ ID NO: 61 - DNA, 370 bp, Homo sapiens
  SITE (272): n equals a,t,g, or c
  SITE (307): n equals a,t,g, or c
  SITE (318): n equals a,t,g, or c
gcacaaatgcccagcagggacaatgtcacagcgtctcagcggccaggcagcaggacgcagagacctctgggaggttcccggggccagccctggccctcctcctccaggggccarccgwgggatgcagaccacactctccctccagggcccatctytggggctgaggcgggcggggccggtgcccagctgcaagaccatgggatagggaaggcaggtgcttggggccacgcagccctgcactgggggcccctccaccccaggcggctcacgangtgtcatctggagctgtcccaaccgggatctgcangttgacctccncacccggggctatctcaaaccctctttctcctgggagatggggaatcccccc

SEQ ID NO: 62 - DNA, 540 bp, Homo sapiens
gcgggtgtctgcggccgcaacgcaacggacactggctggaaccccggaatgagccttcgaccctgaaatccttggggtgcctcgaggacgactggccgaaaagccgcattccctgcctcacaggccggaagtcccagcccagtccccgcgcgcgtccctcttcctcctcatactttcccttgactgagagctcctctaacccctgttctgatgggggagggcggtcttcccacttcctctccagaactccagaaagagcagtgtgcttatgcttcagtccaggctggagaggttggggccggggtagggaggcaggagccatgtcagttctgaaggagggtgaggcggtgggggattgcagggggcggctgagagaaaacctccttgrgggccagggattccctttcccactctgaggctctggccagagggagagaggactctggacctaggaaaagaggcttttggctccaggtggtcaggacagtgggggttgggggtgggrtgggtgggcgctggcggtggggaccaagatccgga

SEQ ID NO: 63 - DNA, 275 bp, Homo sapiens
  SITE (259): n equals a,t,g, or c
gtgggaaccttgtgtggaggagagaggctgtgggctggggtggagtgtgggactcaggtcctgggagaccctcctggggggctgccgagagcatccagctgtgggctgggagagcctgtgaccagggccgcrctgctccagaaagggccctcagaccacagcgtgggggtggggcttggatatgtagactcctgggccttcccttatccagagttggactcagaggagcccaggagtctggttttaactggcttcctgnagcagaaggcagccca

SEQ ID NO: 64 - DNA, 650 bp, Homo sapiens
  SITE (117): n equals a,t,g, or c
gcagagacttaatcagaagctggaagaagggctgtgacgtgtgtgacagcaggaactgctggtcaacccacagccggccagcctgccgggacgccatcttggccccaatcttggcanggagaggggagtgtatcggactctggggagagcagctgcctgcacgggcagggtcctcccgtctcaggattaacgttctcaactgtatttgatttctcctcagccagagggggtaaggtggccttcccagaagcacaggtgggccgcgtgtcakaggccctggacagcctgtgcctctcccaggcctcccagcaggggtggctctcgcccctctggaggggagaccccaggaaccggcccccgccctcagccatagcctcacagggtccttgtttctcggggcctggctctgtgggtgcacaaggcatggtcgggctcccgtccttctggaagtctccagagtggcatgtgggcagctgtgtgaagcggccccccagatcttcatccagcctggcctgcagcagctccctacgccctctgctacctcccctgcctacctttgggtagacgttctcttgacccttccttctgtgataaagcaaaagcgtgtgatctcttttctcaccaaggaataaaacgtctctgaataccaa

SEQ ID NO: 65 - DNA, 767 bp, Homo sapiens
  SITE (625): n equals a,t,g, or c
  SITE (656): n equals a,t,g, or c
  SITE (698): n equals a,t,g, or c
  SITE (723): n equals a,t,g, or c
gaactagtggatcccccgggctgcaggaattcggcacgagcctggcgcagctccgcggggtgctgatgagcatggagccccggcgcctggagcccgcacatctcgcgcagctgctgctcttcgcgcccgacgccgacgaggagcagcgctaccaggccttccgcgaggcgcccggccgcctcagcgagccggaccagttcgtcctgcagatgctgtcagttcccgaatacaagacacgcctgcgcagcctccacttccaggccaccctccaggagaagacagaggagatccgaggcagccttgaatgcttgcgccaggcctccctggagctcaaaaacagtcggaagctcgccaagatcctggagtttgtgttggccatgggcaactatctcaacgatggacagcccaaaaccaacaagactacgggcttcaagatcaactttctgacagagctgaactccaccaagacagtggatgggaagtccaccttcctgcacatccttgccaaatcgctgagccagcacttccctgaactcctgggctttgctcaggacctgcccaccgtgcccctggctgcaaagtgaaccaacgggccctgaccagtgacctggctgaccttcatggnactatcagcgagatacagggatgcctggcanaacattttcccctttaagcgaaggacaaagtttggcaatggncaatgtcgggcattccttttgaacnagcctggttccctgggaccaaggcttgggaaccctgggggtggg

SEQ ID NO: 66 - DNA, 140 bp, Homo sapiens
caactaagggcccccactgtaagcccccggaaccccaccccctgcccagagcaacagctaaaggctgccctgatgttttcttctaccagagtgaaggccacagagtccttcaacttcaaaacaggccttttttcagtttt

SEQ ID NO: 67 - DNA, 281 bp, Homo sapiens
ggggacagcattttcccaaaagtgcattcctaggagcctccctctttgatgtgggtagattttaccaaaagaaactctgagttgaacaaagtttaaaagtgttttgtgctgcagaacttytcagagccttgaatatgtttatgtgtgccaagaatttttcaagcgtttggggttttccaaaactcacttgaccattcatttttttttcactgagtctgagcaaccagggaccatgtggggattcactttgggatgtgctgtatcaaagggataaaggcaag

SEQ ID NO: 68 - DNA, 335 bp, Homo sapiens
  SITE (66): n equals a,t,g, or c
  SITE (70): n equals a,t,g, or c
  SITE (257): n equals a,t,g, or c
gaattcggcacagtgaaagagaaggaattggcgctgccacaactggttagccaggctggcgggtantggngcggtttgcgtcaagttctcggtctggccaatctgggcgagatgccggatgatatcgccttgctggtgttgagcaggaaccttgcatggaatcctgggataagccccggtcgcatccaattcgccgagcaggatgggaaccttcgtcctgaagtttgtcggtgaagtccgtctgacgctgtgttcancttctgggatgccacggattgaaaagattttcaccgcgttgaatttttcggccatcgtcatcgacttggactgaaacg

SEQ ID NO: 69 - DNA, 313 bp, Homo sapiens
  SITE (108): n equals a,t,g, or c
agggggtgcccccctataagcaaatacagcttggattacaacactcaagtcctttcatatatatggaaagccttcccaagaaagatgagaaacaagccctgacagtgnaagacgatgsataaatacctaactcctcaatgcccagatacccaagaacatctactagcgttagacacatccagaaaaacattacctcaccaaatgatttaaataagttaccagggaccaatccttwaggaaacagagatgtggaccttttcagacagattcaaaatagtgaggaaactcagagaaattcaggttaacaaggrga

SEQ ID NO: 70 - DNA, 288 bp, Homo sapiens
  SITE (248): n equals a,t,g, or c
  SITE (288): n equals a,t,g, or c
aattcggcagagctcagtctcaaaaatgtcattatccattcagtcttttcagctacaagcgggctcaactccagactctccttctctcccacttccaacagccaatctgttaccacatcctatctgcctgccctcaaacaggtctcttgtcactgacctctcctctttagacccctccgccagtttttgtttattgtttcccaaagtaaggcacatatgccactggtgagatgcctggtaaaggtaantagatgaaccttttaaaatagccattatggccacacgggn

SEQ ID NO: 71 - DNA, 87 bp, Homo sapiens
gcagaatttgaaatgctcttgggtcatagggatgccctcttgagctttgtcactgccattaggactttatctagctttattttaggt

SEQ ID NO: 72 - DNA, 506 bp, Homo sapiens
  SITE (458): n equals a,t,g, or c
  SITE (475): n equals a,t,g, or c
aattcggcacaggcactaggagcatttgctgtattctcccttttgtatattgggtctctggaagcctacagcgtggttagagctgactgaatattcttagatgtgtggcacatcctacgtgtggctgggtactatggatagttttgcaggccatgatgtgcagtgtccctttagcagtcattaactcacagtgagttatcaatgggtgttagttctctgtgggtctgacaacttagtatwgtgaaaagagtgctggcctgtgctgaacatgytggagaagagcttgcctggccacagggacacagccacgcagatccagcatgtgtctcccatgtgccmagtggagcccccagccaagaaggcagccacactagcagagggtgacaaggacaatgacatttgaccttgttttgttcagcgacaattgagggagggaagacaagggagggcagcccggntttggggagaagttggntgaggttgtattttgggagaagaaggccaag

SEQ ID NO: 73 - DNA, 380 bp, Homo sapiens
aattcggcagagactttgttaaataactaattctcatttcaagaaacagctcttgacttgctatttagccctgggagagactggatgattatcataggaaatcaggagacgtggaaactaggtgttatttgatttcaacaatccataaatacaggtgtgcctaggagcactccattttcaagtggacatagtatttatgaaatcaggcttcaggatgtcctgaaggcataagtcagtggttcacactcatggtgtatccactgcagaagtcttactcttacaggctatgttatgacctctccatctacagacttaaagtttggcgagaagtttgctatggccagttgaccaacaggacatttaagcctgacttacagata

SEQ ID NO: 74 - DNA, 343 bp, Homo sapiens
  SITE (273): n equals a,t,g, or c
  SITE (300): n equals a,t,g, or c
  SITE (337): n equals a,t,g, or c
gggtcgacccacgcgtccggctttccaaatagcatgtttaactcagacaaattccagtttcacagaggatatgagaaggaaaaaaaatccacagcaagaatacaacaaagaaggattcattttacattcgttctgattaagaatatctttcagtttatgataaaatcarcgataatattgttaaaaactggacctaattactttcaaccagatactgtccaaacattaactttttccatcaaaagtatccctgatagttactttgtaaaatgnaaagcacatttggcttccatttctgangtggttaaaataaaggctaccgggttgggataacttnaaaaaa

SEQ ID NO: 75 - DNA, 398 bp, Homo sapiens
  SITE (355): n equals a,t,g, or c
  SITE (372): n equals a,t,g, or c
  SITE (376): n equals a,t,g, or c
  SITE (384): n equals a,t,g, or c
acccacgcgtccgcccacgcgtccgattttatttaaaaaaaaaaactgagatacagagggggaaaatgattttctgagggcattagagataaagccatagtcaaacagatcaaggccccagatccagagtcatttctaatacaccacacactgcctccaaagttttttcatttcaattgttaaattatctcagaaagaaaaaaataatacattaaaggatgcagtatgatcatatgatgagcttcttttctacgtaactttatattgctgttgtaaccttggttttaagaaaagttaaagctctctctttcctgattattattagattttgtgttccatggaatgttttgaaaanttaataactaagacacnggantggagagnttttaaacaaattt

SEQ ID NO: 76 - DNA, 302 bp, Homo sapiens
  SITE (267): n equals a,t,g, or c
  SITE (270): n equals a,t,g, or c
  SITE (294): n equals a,t,g, or c
caactgagtcctctgattgtgtaaacaatttgcctgcaaacaaaacctgagtgcttgaaagggtaagtgatcctgatctgccatagaaaccttcatgcttagggagtttccctagctaattcctcagctaagattctccccaggagtttcactcacctgtttccagtgcctcctttgggctgtcagcatctgtgattccacattccccagagggagattcctccccaaagctggttgtatttactgccagtcctgggctgtagccanggnagtctttgaacacattatcaagantacttttt

SEQ ID NO: 77 - DNA, 353 bp, Homo sapiens
  SITE (138): n equals a,t,g, or c
  SITE (141): n equals a,t,g, or c
  SITE (322): n equals a,t,g, or c
acccacgcgtccggcagttcctacttttagacgcatggtggcgctagggtctcctccggccctgctagcaatctctaaggcacctccgccgccacctgcagtctcaaccaaacctctgggtggggcagcgcgggattnganaggccgagcgtccaatcgactgacagatttccgtccacactactgctctagccaatgggagccgaggagaggcgcggaggaggcgggccccgcgggcaagcctgggcagaggcgcgaggccctcctcccgcctctccgcctaattccagcctccgccgcctcagctttcccgagcgagccntgcggccgttttagagggattccaagtttta

SEQ ID NO: 78 - DNA, 383 bp, Homo sapiens
  SITE (105): n equals a,t,g, or c
  SITE (317): n equals a,t,g, or c
  SITE (352): n equals a,t,g, or c
cacagccagcgggcagctgatggctctgctgtcacactgttaccaagactgagcggctcgtccactccaatgatggcacacggacggcccgcaccaccacagtgnagtgaagtttcgtgaggcgctcggagataaaggccacctggtgtcgccctgtgcctgcctgcctgtccgcccacctcctccggctcttccttgagctctctctccgtgtcttcaactgtgccgtcactttctcttctctgcctgcggctatcaccacccctccatacagcctcccatcccatctcctggatgttccagcccaggccctcacnggtggcccctttccccttttttggcagatgggcantgggcagcaccatgatggcaaaccaagactt

SEQ ID NO: 79 - DNA, 324 bp, Homo sapiens
  SITE (46): n equals a,t,g, or c
  SITE (299): n equals a,t,g, or c
cttttttttttttttttttttttttttttttttttttttttttttnttttatacttacatactatcatacaacttaaagtcacattatgttttgtgccttcttactatagctctgttataactggggaagcgagatgaatacgatagtaacttccttaaagaacagtctctgcttacagtcaaataagggagatagaaatgtgactataacatagtgtgacagctgtaacagtaaaagtatgtacaaggtatagctgggtagcacagagaaggaggtaggtaatgccaggatgacaggnacgctcatctgagttttgaaggaac

SEQ ID NO: 80 - DNA, 522 bp, Homo sapiens
  SITE (236): n equals a,t,g, or c
  SITE (354): n equals a,t,g, or c
  SITE (468): n equals a,t,g, or c
  SITE (487): n equals a,t,g, or c
  SITE (518): n equals a,t,g, or c
gatggcaccagcgtggctgtgaaggtgcagtacatcgacctgcggkaccgctttgatggggacatccacaccctggagctcctgctgcggctcgttgaggtcatgcaccccagctttggcttcagctgggtcctccaggacctgaaggggaccctggcccaggagctggacttcgagaatgagggccgcaacgcakagcgctgtgcgcgggagctggcgcacttcccctacgtcgnggtgccccgcgtgcactgggacaagtccagcaaggtgggttgggccaggcccttggggtgggcacagcgctgggcctgctgagcccagcctcttgctctccccagcgcgtgctcctgncgacttctgcgccggctgcaaaggcaacgaatgtggaggccatcaggagccaggggctgcaagtgcatgacataagcagaaaaagctcatcaaggcctttgctgagcagaatantttacacccgggtttcatncacttcggacccacaatccttggcaaacggnaagg

SEQ ID NO: 81 - DNA, 429 bp, Homo sapiens
ctcctagatggaaggaatgctttgcttttctgtttgccctttgtttttgtttttgaagcctgggcgacaagagtggaaactctgtctcaaaaaaaaaaaaaaaaaattcagtgaaatacacctttatatatgagatccaagtttcactttttgtgatataatgagccagttttctcagtaatgtctactaaaaaaaaagccattaacctttctctaatatttgcatgattctaataaaagtatgtcaacttcttaaaatgttttattgaaatgtggcattcctttgaattttatgacattaaaataatccacgacatggtacagctcttcactttttcagctttttaaatgtccattaataagtttgaatacgttaaaattatatgtttaacctcaacaaaataaatggcaatatgttcaaaaaaaaaa

SEQ ID NO: 82 - DNA, 483 bp, Homo sapiens
  SITE (361): n equals a,t,g, or c
  SITE (403): n equals a,t,g, or c
  SITE (482): n equals a,t,g, or c
  SITE (483): n equals a,t,g, or c
gctgggatggaacccctgcccttggtgccaccactgctctttcataactgtgggctcttccgaaagtgacttcatggctcagtgcctcggcctcccaaagtgctggaattgcagacatgagccggcacgtctggcctatattctgatttatattcaaagtagactttgcagcaagacaataggcttggaagacaggttagtgacgcagttcatgatggggttcacaaaggggctggtgctgaggttcgagatggcatttgtgataggattggtgatgggttcatgatggggttcgtgatgrggstggtgatgggttaccctggggacagtgagaaggaaaggcagagacagaggagctcanatgcctggcttggcttcccttgactcccttcagtgctgtggnggttgtttcaaaaacatctggacagccaggcatggtggctcacatctgcaatcgcagcactttgggaagcccgaggcgnn

SEQ ID NO: 83 - DNA, 444 bp, Homo sapiens
  SITE (21): n equals a,t,g, or c
  SITE (40): n equals a,t,g, or c
  SITE (413): n equals a,t,g, or c
gaaccctttggaagccccacncctgttggtaccggtcccnaattcccgggtcgacccacgcgtccgttgaccaaaccaaggtcacgaagccaactttgagaccatgctcattggtagcctgtgaatgagtcatggtgatgacccasaatgactcatccaaggctgaagatctagccaaccagtctgtgtacaaggagaacaggtgaatattaaataagccaaaattgtaatatgaaagattaagcttacatataatgttaccgtaagggataacaacactacgattggccaaaatatgcataaaatggaagaatttatttttagataattaaaatagggcaaatggaacagaagagggtatatgacctcaaattcctcccttctctaaatcagaatgctaattaagtctcagngatggctacctaaattttaaaatatatagga

SEQ ID NO: 84 - DNA, 275 bp, Homo sapiens
  SITE (239): n equals a,t,g, or c
  SITE (241): n equals a,t,g, or c
tacgcgtccgtttaaagtgaaatcacttttaatttctgtgtttccttcagcaatgtttcctgctttaagtggagtacagaatatgtggacagctaggttcagcaagggtgggccttgccatgtcaacgcgactgagaagcttggacttcatattgagggccctagagagctactgaaggtttgagtaaagaagatttaggtgttagaaagatcattctagctcagtatggtgtgtgtgngngtatgagagaaaggcttattataggtagaacaag

SEQ ID NO: 85 - DNA, 121 bp, Homo sapiens
  SITE (107): n equals a,t,g, or c
taagcctaactgctttaataacactctttaaatggtacacctatgaagcaagagttaaatataaacccattatgttataaaaaaaaaaaaaaaaaaaaaaaaaaaanaaaaaaaaaaaaag

SEQ ID NO: 86 - DNA, 1458 bp, Homo sapiens
  SITE (1163): n equals a,t,g, or c
aatcactcctgctctggccacacccgcctcacccccgacagaaagccaggctgggccccgcaaccagggccagacggccggcagggctcgcggaggggcgcctccccatgcgggcgaargcgaaatggcccarcctgcggattccgagtccggtctgagcctgctgtgtaaaatcaccttcaagtcsaggccctctttggcccctccggcagcctcgakttccttagcarccaaagcttcgctggggggcggcggaggcggcggcctctttgctgcctcaggtgccatctcttacgccgaggtcctgaagcaagggcccctgcctcctggagccgctcgccccttgggagaggtttctcgaggggcacaggaagccgagggaggtgatggagacggcgaagggtgctctggtcctccctcggcgcctgcgtcccaagcccgggccctaccgccgccaccctacaccaccttcccaggctcgaagcccaaattcgactgggttagcgctcccgacggccctgaacgccacttccgcttcaacggggctggcggaggcatcggggcgccgcgacggcgtgcggmcgcactctctgggccttggggctcccctccgccaycaccagagcagatacactcagctcccgggccccggaggcccgcacctgccctgctggcgccgctacgttcatcttcccagcacccaccaatggcgagcccatgcgcccggggcctccaggcctgcaggagttaccaccgctgccaccgcccacaccgycgcccacactgcagccaccagcgctccagccaacgccgctgccggtsgctcccccgctcaccccgggtctgggccacaaggagtcagccctggctcccaccgcagcccctgctctgcccccagccttagccgycgaccaggcccggcccatccccggctccagctcccaccgtggctgarcctcgccgcctgtgtccgcgcccgcacccgcgctgsgccatcaagacccgcacgcgcaggaacaagggttcccgtgcagcccgggggcgacccgtaaggatggcttgcatggagatggtcctcgcgaacgagctacagctaccgtgcctgacagcagtggtggagggggtggtggcagcggggcctctcagactggggcagctaacancccgtgcgcgcactggctgcccttccaggtgcttaactcctgtccctgcaagtgttactgccaccaccagccacgccatcgccgcctgccacgcaacgtctctgcctggctgagcacatccaccaaccacctgggcgagccaccctgggttgccaccatcaagctgtccggctctctggtggccaagctggagcactacgacttgcaggccacccattccaactgagtgtagtcggctcaacaccctccaccttcccctccatgccaataaaataaccaatccagaaaaaaaaaa

SEQ ID NO: 87 - DNA, 185 bp, Homo sapiens
  SITE (5): n equals a,t,g, or c
tctgngaacgcctcctggtaccggtccccaattcccgggtcgacccacgcgtccgccagtacttaaaaaacattatggaaatcacatttatcaaatagcattctcccttttacctgccataattattatcatcatcatctatatatacatctcattaaatgatttatttttgaaatatttaaata

SEQ ID NO: 88 - DNA, 351 bp, Homo sapiens
  SITE (221): n equals a,t,g, or c
  SITE (282): n equals a,t,g, or c
  SITE (342): n equals a,t,g, or c
tagctagaggtcgacggtatacagacatgataagatacattgatgagtttggacaaaccacaactagaatgcagtgaaaaaaatgctttatttgtgaaatttgtgatgctattgctttatttgtaaccattataagctgcaataaacaattggggtgggcgaaraactccagcatgagatycccgcgstggargatcatccagccggcgtcccggaaacgnttccgaagcccaacctttcatagaargcggcsgtggaatcgaatctcgtgatggcaagttnggcgtcgcctggtcggtcattcgaaccccagagtcccgctcagaaggactcgtcaagaangcgatagaa

SEQ ID NO: 89 - DNA, 230 bp, Homo sapiens
gttgtgagcaatggaagttcaaaggaactccctctccagctcttctgaatcttgggacacagcctaaaaaggacaaaaagttagaagacagcatagcaactcagctcagggagctaccagagaaaaatagcaactgatgtgggtgctttttttttttttttttaatttgaataaaaagaattagaagtgaaaaaaaaaaaaaaaaaaaaaaaaaaaaaaaaaaaaaaagg

SEQ ID NO: 90 - DNA, 460 bp, Homo sapiens
  SITE (391): n equals a,t,g, or c
aactattgtctgttctgctttgttcttaataacactgaaacggttctaccattaaagtcccttgtttcatcacataccaatcctggtcttcctgggtctgaagtccctccctctctccctgccctttcccacttactgaacccaaatcagaagcatccctgggcattctgcagccgtgtctgtccctgcaaattaagtgtgtttgaagtctgcgggccaccttcagatctcaatggctgcacctccctccttcaattcgggtctcactcaacctcagctttcccctcttgccacaggtttttcccactcggctttcacgtttggggattgagagccacatcagccagtccaacatcaatgggacgctagtgccaacgggcggcctcatctncatctccagaagggctgcagtatgtagaaggccgagatcagtatcaacggagggatgggaacagtgttc

SEQ ID NO: 91 - DNA, 320 bp, Homo sapiens
  SITE (150): n equals a,t,g, or c
gggggcaaggtacgggcgtctgccgtcgctaagtgcccccttccacttaaggcacaccttcgcctccgattccgaaccgcccggggacagaggcaagtggcaaagcagggagggcggaggactctgccaccctccctcaggatgcctganggccccgagctgcacctggccagccagtttgtgaatgaggcctgcagggcgctggtgttcggcggctgcgtggagaagtcctctgtcagccgcaaccctgaggtgccctttgaragcagtgcctaccgcatctcagcttcagcccgcggcaaggagctgcgcctgatact

SEQ ID NO: 92 - DNA, 504 bp, Homo sapiens
  SITE (4): n equals a,t,g, or c
  SITE (469): n equals a,t,g, or c
taancaagctctagytagaggtcgacggtatacagacatgataagatacattgatgagtttggacaaaccacaactagaatgcagtgaaaaaaatgctttatttgtgaaatttgtgatgctattgctttatttgtaaccattataagctgcaataaacaagttggggtgggcgaagaactccagcatgagatccccgcgctggaggatcatccagccggcgtcccggaaaacgattccgaagcccaacctttcatagaaggcggcggtggaatcgaaatctcgtgatggcargttgggcgtcgcttggtcggtcatttcgaaccccagagtcccgctcagaagaactcgtcaagaaggcgatagaaggcgatgcgctgcgraatcgggagcggcgataccgtaaagcacgaggaagcggtcagcccattcgccgccaagctcttcagcaatatcacgggtagccaacgntatgtcctggtagcggtccgccaaaacccagccgg

SEQ ID NO: 93 - DNA, 549 bp, Homo sapiens
  SITE (42): n equals a,t,g, or c
  SITE (326): n equals a,t,g, or c
  SITE (469): n equals a,t,g, or c
  SITE (510): n equals a,t,g, or c
  SITE (547): n equals a,t,g, or c
gggaaggggcggacagcagcgcctattctggtaggaactggnactgagatgtgaccccggaagtgttaccgcttccaaacgaaatgagggtcacctttcacaccgccccccccccggggttggaaaagccaccgatcgttccagctgccgagcagctcttaaagctttggattcggctgtcgtggagataacgggcaccagaaaaacttgtaggagtagcaacagctatttggtcggatggaggccagaagccaagaataatcgaaacacgctgccagcgcccattagatggatgggaaatgagtgtaactcattgggaaagatantagactttcaaatcacctaaggcaaaccctacttcctggggcgcgggcgcgggcgctggcgtttaggagacgttcacttcccgcggcataactgacatggggccctcttggtcggcgttttccggggcggggtccttccgacngccgccgcggtgattccatcaattcggctttctttcccggnctgccttcgcggcccgtaaccgggctggggccagaanaa

SEQ ID NO: 94 - DNA, 606 bp, Homo sapiens
  SITE (568): n equals a,t,g, or c
  SITE (569): n equals a,t,g, or c
  SITE (583): n equals a,t,g, or c
  SITE (591): n equals a,t,g, or c
caggagcgcggtcagggcgaaaaagccgactcgcgagcgcgcaggcgcagccctgaacgcttccgtggggccacttccttctttgtctcctagcaacggcgggtagcgttgttgacatcccgggaggctgtgccgccggctgagcccagagtttcgcggcctccgcgatggcagaggtggaggaaaccttaaagaggatccagagtcataaaggggttattggaactatggttgtaaatgcagaaggtattcccatccgaacaaccttggacaactcaacaactgttcaatatgcaggccttcttcatcacctgacaatgaaagccaaaagcacagttcgtgatattgatcctcagaacgacctgacttttcttaggatcagatcaaagaaacatgaaatcatggtagctccagataaggaatatcttctgatcgtcattcagaatccatgtgaatagacctgcgatggccaaggctgtttaagcgacactgggttggaaacacttggctctctcatgagtattaaaattctatttcaatctaaaaaaaaaaaaaaaaaaaaaaactnnagggggggcccggncccaattngccctatagggggcg

SEQ ID NO: 95 - DNA, 502 bp, Homo sapiens
agagcaccacctcctgccaccctacgaatgatgaccaacgagtgtgccctctttgtatggggaatgtgcccacccctggaagaccggagggcctctcatagtagaaggggtggttgtggttgtggttcccagagtcctgggtgtggtaaaagtgagctcatgtgccaagcctggcttgcttttaattttaaaaaattgttattgggccgggcgcggtggctcatgcctgtaatcccagcactttgggaggctgaggtgggtggatcacgaggtcaggagatcgagaccatcctggctaacacggtgaaaccctgtctctactaaaaatacaaaaaaatttagctgggcgtggtggcgggcgcctgtagtcccagctacttgggaggctgaggcagaagcatggcgtgaacccgggaggcggagcttgtagtaagtggagatggcgccactgcactccagcctggcagacagagcgagactccgtctaaaaaaaaaaaaaaaa

SEQ ID NO: 96 - DNA, 216 bp, Homo sapiens
  SITE (88): n equals a,t,g, or c
  SITE (156): n equals a,t,g, or c
aggtgcaggagctggaccctgtggtagggtggaggcccgccccaagcctggactatcgcgtgtgcctgccctacgccaacgcagtgcntgctcgagatccagtgcttcatcagcgtggtgcccctggggctgccgcgcaccctcaccctcgacacncacctgcacagccactgtctgcccaaaggtacccactgagtctggggatcccgtgcggga

SEQ ID NO: 97 - DNA, 130 bp, Homo sapiens
  SITE (111): n equals a,t,g, or c
ggacggcctgggacgcgcgggagcatggagccgcgcgccggctgccggctgccggtgcggtrgagcaggtcgtgcaacggcgcgctggtggtcacggtccggcctctttgncctacccccgttggctccg

SEQ ID NO: 98 - DNA, 504 bp, Homo sapiens
  SITE (495): n equals a,t,g, or c
  SITE (500): n equals a,t,g, or c
cgggccgcggcgctccggggtcggcggtgggcggcgggccgcgagccggcgatcgaagcgggcagctcgcgcctgagtcatggacttcccctggcccctcctctaccactcccactccctcgccggacccccccgccggggctagcgtctgccgcggctccgagggggtggggctgctgggaatggctgtgcccccttcggcccctcagccgcgcgcgtcctttcacctgaggaggcacacgccttgcccgcagtgctcatggggcatggaggagaaggcggcggccagcgccagctgccgggagccgccgggccccccgagggccgccgccgtcgcgtacttcggcatttccgtggacccggacgacatccttcccggggccctgcgcctcatccaggagctgcggccgcttctagaggatccaagcttacgtacgcgtgcaatgcgaagtcaataggtcctttctataagggtcacctaaaattcaatttcanctggncggt

SEQ ID NO: 99 - DNA, 1380 bp, Homo sapiens
aggaagcaatcctcttacctccgcttcccaagcagctggggccacagatggagttttgctctagcctgggggagaaagtgaactccctctcaaaaaaaagaccactctcagtatctctgatttctgaagatgtacaaaaaaatatagcttcatatatctggaatgagcactgagccataaaaggttttcagcaagttgtaacttattttggcctaaaaatgaggtttttttggtaaagaaaaaatatttgttcttatgtattgaagaagtgtacttttatataatgattttttaaatgcccaaaggactagtttgaaagcttcttttaaaaagaattcctctaatatgactttatgtgagaagggataatacatgatcaaataaactcagttttttatggttactgtaaaaagactgtgtaaggcagctcagcaccatgcttctcgtaaaagcagcttcaattatccactggggttatcttttgacaacttgccattatctgatgttacacaattcaatagcaagcaagtttgagacaatcgcagtttaaaagcatgaaccatttaacaaaaagtggaataattaaagataaagcacttcttcccaaagggaattatcacctagtgaaaaattatgcatttcatctactcagttaccgactgcaagtctctcctcgctctagctctcaagctttgggtgaatattcctgtgaaatatatcttcaacttgaaagttcatactccaatcaaaaactccttttactgagtttgcagtactgtatttgcactgtttgtattcctctgggcccttattgctacttttgctttcctttgttacacagattttgtgttgcactttttctccagaggggtgttgtagagccttggttgtatgaataataccagtggtagtgtccacgggtctaatgtaagcccatttggcatcactcctctcctctctcttgagaggatttcttgtgcacagagtatgaagcagttgtggagcgctgtgcctttgtcaagataccatcttgkttgatgatttctttctttgctgktttttcttcaaaatgttagtaagctctgtcatgcttctagcaaattgtaagactaattatttgtttccacctcataacctgttgcaataaatattacttctcatacagtttaatattgttgtttgttggagaaaatgaaccataaaaattgatttgctgttcagttttcaattattcaagtacacccaattaaagatgcagttatgtttataaaataagaagaaatagacttgtaaaatgcttatgtgagggttattgaaggtttccctgaagactgactggaaatggtggctgtttttttctatttctgactctgccatgga

SEQ ID NO: 100 - DNA, 361 bp, Homo sapiens
aattcggcacgaggggctctaggccgtggaatctkgggccttaaagccccttcgtctccccagcacccactctctgggggcaggtgggcccggtgacagtaaccttcagggagccctgaagaccatggaggactactgaccaacaacctctgaccttcacccctctggatgggggacgaatcactaggcaaaggggaacaatgggaaggagacaaaatggctgcctttacagctgcagcaagatgtggaaacactggttccctaggcacctccattgtcttcccgccttgggagcatgaaataaataaagtgtgaaggggaacatgaggaagactgatccaagtcaaaaaaaaaaaaaaaa

SEQ ID NO: 101 - DNA, 118 bp, Homo sapiens
  SITE (117): n equals a,t,g, or c
gtagaaacctctatgaaacaatttttattttcctttgcataataccttagaaatgtgttaaggacaagctatattttccttacttgcttttgatagttttttttttttttttaaagna

SEQ ID NO: 102 - DNA, 724 bp, Homo sapiens
  SITE (562): n equals a,t,g, or c
  SITE (642): n equals a,t,g, or c
  SITE (693): n equals a,t,g, or c
  SITE (722): n equals a,t,g, or c
  SITE (723): n equals a,t,g, or c
  SITE (724): n equals a,t,g, or c
gcaaatgctgattttctgtgtcaattgctggggcccagagactaggggtcagagtactatggtcactgygataaataaccttgctattgtctgttagtattttcactcttagcccagagactgggttcccagcttggccctcagtgcccatcccactacccatgacagcccaatggctccacagagcctggagctctaaagaagatgggctgaaaatgtcagatctatgtgaggagccttcctgctctaaaagctctcatccctctggcccagatctctggttttctttgatttattgttcttacaacccagaagcattagatctttttggtggaagccagaaaggcatctcttgtttacccattaacaatcaacgttatgtgtacatatgtttatccattaacatgtatggcttattcatttgctcattcttccaacaaatgcaactgagcttctattagcccaggcatccacgatatacacaatggaggtatattcttgactctggaggttcttacaagtcaaataagggagagagaaaaagtcaaccaatgctttctgngkaccaagaactcagcacacatctagcaggctttggctaatttgatcttcacagaaaatgactcccattttacagaggangagacaggccctggggatattaagcaaggtttttaaaggcatgaatcctgnaatawtaaagccatggaatattaaaaaannn

SEQ ID NO: 103 - DNA, 516 bp, Homo sapiens
  SITE (108): n equals a,t,g, or c
  SITE (516): n equals a,t,g, or c
gtctttatctggtctattcccttgcctttttgtcattttatagttatttctttacattctgtctccacctttttctccttgattaaactttccaagaagtttaattgntttacttgttgttgttttacttttcattttcctaattatttgtatgcatgaacatcctttatcaattagtcattcacatgtctttattcagagctttgtatattcatatcctttgcatgggctaatgatacataccctttgtacctttctgctggctgataracctttttcttattaatgtgtcatattgtggatgcaaattatttatctgaaatgagcttatctaattgacatttatcttacagctttgctcatttagggagttgctgatgtagctgatttttgccacacagaactttcataattatatgaatcccagtcttttcctttatagcatctggatttcctgtcttttgaaaagacctccccatgccaagagtttgaaaataaaattgagaaatgaaatan

SEQ ID NO: 104 - DNA, 570 bp, Homo sapiens
  SITE (561): n equals a,t,g, or c
  SITE (566): n equals a,t,g, or c
  SITE (567): n equals a,t,g, or c
gtagttcttgctgccaccaccactgtcattcccccaggtataggaaggtacactgtgtcttccgattcttggagccagctctgctgtccagacctcctgaagccaggtgtccaggcacccagcacctcctgccaattcatacagaattcaattccccacctggaagggctttcagaagctgacctgcccaacccctggatttcaggcaaactgagaagattggagagggccaaggatttgtcactgagcaaggaggaagccaaagacttagagggcagagaaggatgtaatcaaaatcttcgtcatctccggcttccgaagctcccttccaaagtgccctcaagggcctggaacactctcagtgacagaggcaagagccccatcttgccccagtgctgcccatcaaaatggacccctaaatcctggcccagcctcccagcgcagatctctccttcctcctgtagccccaactaatgtctgtctggaatttgaggggccctggtctggcacactgtggatgcttaaaaaaaaaaaaaaaaaaaaaaaaaaaaaaaaaaaaanggggnnccc

SEQ ID NO: 105 - DNA, 703 bp, Homo sapiens
  SITE (680): n equals a,t,g, or c
  SITE (694): n equals a,t,g, or c
gcggacgcgtgggcttgggtgaccctggccgccaccaagctgttctcctctatacacctgcctggcttgaggtccctgaagcagctgagccggcttcccactgcctcagcctgcctgcaggctgtgtctgctctgtcctcggccctcgtggttgctccttacagggcctgtttttcccacaggctggtttccagccaagttcgtggaagtcctggatgagcgcagcaaagagtactccatcgcgggggatgactcggtgacggagggggtcacagacctcgtgcgagggaccctctgcccggcccttaaggccctgttcgaacatggactgaagaagccatccctgcttgggggcgcctgccacccctggctgtttatcgaggaggctgcaggccgggaggtcgagagagactttgcctccgtgtattcccgtctggtgctctgtaagaccttcaggttggatgaagatggcaaagtcctgaccccggaggagctgctctaccgggctgtgcagtctgtgaacgtgacccacgatgcagtgcatgcacaaatggatgtgaagctccgctcactgatctgcgtggggctcaagtgagtktggaaaaggggttggaggaragccytggartkgggggacccarcccarcatcagggggggtccttacagggacccttaaggnccaaagaaccttangggctaagg

SEQ ID NO: 106 - DNA, 665 bp, Homo sapiens
ggcgcggcggtgccggcgggaggccgagcggggctcgacagagcagcatctggcggaggggccgaggctcgctggaagaaaagggagtcgaccttgacccggcctggagataaaggaacttttacccacttggggccttatccgccccatctgttaaatgggcgccttgatgggtctgccctatgcagaggcccctccggaagatctgcgattcagcgagatgaaaacccacggcagagaaggagcccagggccgtagtttccatccacagcacgtttggaggggctcgggggtcgctcatccagcagcgctcctraggaaggatgcagagacggctccagtcctctgggtatccttgtgggaggagatggctgtgtcaaatatgaaggctggattagagagaccaaggcagcccttgagtctgggagaagattctggaaggccccttggaggaggtggcatctgagtggggcagggaaaggaaaggtggtggttagggcagcgctttggagtccctgctttacccctcagccaaggccgtccaacagtctcgggcaagtccmcmcttttctctatgtttcagtttgatgtggcyccttaaatgaaacaatttctctgacagattaaaccagataactcataaaaaaaaaaaaaaaaaaaaaaaa

SEQ ID NO: 107 - DNA, 839 bp, Homo sapiens
  SITE (1): n equals a,t,g, or c
  SITE (824): n equals a,t,g, or c
ngtatatttatagtaatgaaaagactttttaaattgtacacgtttcagtgcctttcttgtgttatgaaaggcaggtagatattatagccataggtaaaaatccatagttaaattgcacactgaccttaaatctctctgtgtatgcccttgtatcttgcatgttaaaagttggattattgggcatgtgtggcagcctgcctgctacatgctagacaagtgtgctttagtacatagccacaagttcttcattctttaaaatgttttgacagatcatctcataataaaaataattcaggaaaactatggggaaatagttacatttcacaaaagatattttaaactctttgtaaaacttagataatagagcctagcagttactttgtatctaattgatacattttatgttaatttaccaccatacattttattaatcaaaattgtatagcatgtgactcttttggctttcagagttctcaaaaatattattttgttgcatgtactgtatgtttagaggcaaccaattatatactcaatatggttttactgtgccttacacaaagagaaactctatacagaatgtatgtcatggggtggggtaacagagtctttactgcactgttaggtgatggcacacagagcatgtcccagaacatttctgtgcttaattacccaaccaaagagatctgaagtatgtatgtcgtactgtaatgggggtttatgcctggacaattaagtgttttatttgttttctgaaatgatgtgaacttatttttctaaacactatgctaaataaactttatatttatacataaaaaaaaaaaggngccgttaagatcagt

SEQ ID NO: 108 - DNA, 565 bp, Homo sapiens
  SITE (40): n equals a,t,g, or c
  SITE (49): n equals a,t,g, or c
  SITE (81): n equals a,t,g, or c
ttctaactggaaattgactctcggggaaagctggttatanggggatctntctaaagggaatcacctcagggaaagctgttncgcctgcaggtaccggtccggaattcccgggtcgacccacgcgtccgcacaaatgccaaaatggtgcgtattctagcagtagttttatggacatcaaatgcctgaaagaaagatcaggaagttgtatgtacagttgatctgaaatgcaacaacttgattaggaaaagtgatacaggaaacttttcccactgcaccttccagaggcactgaggttcggttcctgccacccctgccagtgctttctgtggtgccaggaccacatccgtcagtgtttctgccaggcgtcatggtgcagtggggtttgagttgatgctctttctgtccactttgctcttccaatgttttatagaactggttagtactgcagaaaaaccacgacttaaagaaggccttatacatgaacaagacacagttgctcagttcggaccacaaaaagaaccagtaagacagcagattcatcgcatgttcctcttaagagtgaagc

SEQ ID NO: 109 - DNA, 438 bp, Homo sapiens
  SITE (193): n equals a,t,g, or c
  SITE (206): n equals a,t,g, or c
  SITE (359): n equals a,t,g, or c
  SITE (375): n equals a,t,g, or c
atggtagaggaaagagtatggtaagtgtggtgtgcaagcccatctagtgggagcacagttgaggagggaacaggaggtggaagccaggtgggaaaggaagtctggggccctgttggaaggaccttgaatgctgtgttgttatgatagacagttttcctccatgattcctgctcataactcccatagcccttgntacagtcttttgntgtaatattgagtgtgttaggccacaggaaacagactctcttcttctcctgcccttctttcacctgccccaggcaggactctaatctttcctggacttttcaatggttggtcttaagaccattcccagagaggtcccaccctataccccgggngaaggaatgcttacgntataaagctttcataaaaacccaagcggacagggttcaaggagctttgggatactgaacacat

SEQ ID NO: 110 - DNA, 2645 bp, Homo sapiens
  SITE (2641): n equals a,t,g, or c
agggaacctccttggtcattggtagaaagctttagaaaagacttagctttttagggaagaactaaaaaatctccaaaacatactagtcccatgacttcgataactgaaaatgtcctgggtgtaaactaaacccagggaatgtgggatcatacatgttttttttaaaaaaaatccctggaatcaatattttcctacaacacaccctaaaattcctatttttgtaattaatggttggacagtgatcagccatttaaacataggctttctggaataaccagacactagaatagtttccaaagtgttttgcgtatcaaaatcctatatacttagaagaagaactcaggataagaaaaaatcgctaggtcccaaagggttcatgactatcatcagatgcaactgcgagtggcctacggtcattttttcaaatgagaagactggagagagagaacaacagtaatcacaaaacctctgttgcccttagtccatgacaatgtttaaggaaactttaaaaaattaagccatcttctgaattgttttctacaccaaatctaaaatattaaaatgaaattattaaatatttaaaatggggtatttagtggaaatgcaatcagtagaaaacattgctttttagtgcctgctaaacaagtaaaggagaaagaatgaagagaaaacagcagtccttcctgtgtgacactcgtgtggaaatgacaggcattcacatgtcattgagtgctaactcaaaagctaggtggcaatgctgtccaatgtttagagatcttttgaaataattttaccaccattcagaggtaagtacttgcttaacagaagtctttaatgktagtgaatgaatgtataaaattataaactatgcattttcaaagagtagcatgtattttgtatcgaatccaagtaaatttttttcatagctacctaccacaactgcaaattattcaaaataaacttggatacatatccttatggggatatgggaagcccatctatattctcctacttgatgtttttaaagattgaaactttattctgaaacatcaggctctaaaaaattccatcattaagatgaataaatgggaaatggtttatttgttacttcgtaagcataaatgggaaatgttggctgttagaaaatgtgcccagttctttaaaggtggatgttctagtaacactggattaacaagcaaacaaaactgcatgaagtgaacgaatatttcattggataaagttagcataggttttatctgctgggttaattctcaatcccagaaaaaaatattcttcaaggggtatcagttatagtttcaaagaacaaaatatgaaaatattgtccagcaaagcaaatcattgatcttttttcaaaattacttatattttggaaagtctatatagaatatccacaaatttcttcagccctcttgttgatttcatattttcatgaaactttttcccctaataatttgtcttcgctctttaatcagtgctttactacattactcagcctgaaaaaatatcttttccttcatctgacaatgtggaaataaagaactccatttctgtcattctggttctcttcagtgtccattgagaaagtttctcaactgtttgtaaaatacggggggaaaaaaacacgcatttctaaacctggtacttaaggttatactggattgtttgctacctaattagaagttattggggaaggggcattgtgtctttttatatgatttttagccaaatccagatgttctgatacacatttctgaatacctgtctgactgtaaatacagcctgtggaggttcaggttgataaacctttcacctgactgctccacagccatgctccttgccagcttctggcacattgtacatagatttgttgaatgtttaaatgatgttgtttttctaaatgctgttctctaaaacaattttttgaatttcttttgctttccattgttttggactttgtgtgttcgtttttwaaaaaaaaaaatgtttcctaaatatttaacaccaggaaaaatatttttaaatacactggtgctaattgaaacagaaggaaattttcagatcgaagatgtacaatgttaaatgttcataccagttaaactgcactttcccaaggggacagctggcatctacttgaaatgggcatcaagagaccaccaaatgtttacagtttctgtggcccgtttaagtgtaaaatgcagaagtggctctgtccccccagagttaaggatttgctacactggtcctctggaagcatttaagtagaagaaaaggcttatagtcagaatcactttagtaatcgtcttctggtccttggacttttctgttctgtaatgcttgtaacaatgaatatggtgttgccaatctagtctgatatcattgttgacctgtacttactttgtggatggttctacctggggttgcactggcacaaacagagccagaacactggactttcaaaagaccattttgacttctacagtgtccacacacatgaatttaaatgcacttgtaactggttaattaccatgaagtaagtctaacttccacttaataaaagtttttgtgtatctgcttctaaaaaaaaaaaaaaaaaaaaaaaacccggggggggccccggtanccaa

SEQ ID NO: 111 - DNA, 274 bp, Homo sapiens
  SITE (37): n equals a,t,g, or c
  SITE (268): n equals a,t,g, or c
agagcaagctgagcccaggactgggtagccccatctngggcctcagtaaattgactccggacagaaagccctctcgaggaaggttgccctccaaaacgaaaaaagagtttatctgcagttttgcgggcagacactttaccaaatcctacaatttgctcatccatgagaggacccacacggacgagaggccgtacacgtgtgacatctgccacaaggccttcccggccctgccttttaccacccacctattccaccccaagcagggggncattgc

SEQ ID NO: 112 - DNA, 362 bp, Homo sapiens
  SITE (199): n equals a,t,g, or c
  SITE (304): n equals a,t,g, or c
  SITE (359): n equals a,t,g, or c
gactttgttctagtatatgaggatgaaagcagaaaagagaccaataaaaagggtacaaatgaaaaacaaagggtaagtttttatgctattttcctttctttttatttcttatattgtaacatgaaaaaactgctattttgtataagtaataaagtgaaactgatgttgaaatatcatacacaaarcagtttcatatttnctctgctcatgttttctcaargcatattaacaaaacgttttttaaatatgaatcagaaacttcctcaggctcttaacctcattkggtttcacagctggaagcagnctttctttccagggattgggactttctattgtacaggaggggtttaccttaggcngcc

SEQ ID NO: 113 - DNA, 273 bp, Homo sapiens
  SITE (235): n equals a,t,g, or c
  SITE (252): n equals a,t,g, or c
ggcacgagcctcaactacagaaacagatccagctacaatgtttaattcttctccattacttaaattaaatgctgccaccattgagtatggcattgtataatcatattccttcagcggttaaaatagaaaaaaaaatgcagatagagatgtgtataattggcacgcatagaaatacagaaccagttacatgacaaaagtaaacaaaactctaaaccttcatattttaaaaacaagnttttccctttaacaggnttaccattcattaaactgggg

SEQ ID NO: 114 - DNA, 352 bp, Homo sapiens
ggcagaggctttaggacagaatgttttcccagaaatctgaaatctagaaatgatttagagtggcattacacaccaatatgttacaacttattttcttcataacaatgaaatagatgatcactactatctgctttaaagtttcactttggaaatattcatattcagttcacagactgtgctgccatgtgtgttcctgtgraaatatagtacgatatacatcttaggtaccctcaagtatttctagacctgaatttaaaattttaaactcacttataagctgcagacaactttcttaaaaacctcacatwggcagcattggggcactgtatttcaaakgrtatgtctctaagtt

SEQ ID NO: 115 - DNA, 441 bp, Homo sapiens
  SITE (18): n equals a,t,g, or c
  SITE (33): n equals a,t,g, or c
  SITE (72): n equals a,t,g, or c
  SITE (100): n equals a,t,g, or c
ctgcggtacaccagacangtcgccattggtacncctgttgtggcctccagttttaagggtggtgtgccgacntcccagtgtgttaacctccaaaccaggnacagttgaaattggacactgtcaggtattaggtgtgtttgtggcaattggcaagtaaaacccagcaattatcaataatatttcaacctacctttgtagatggataggtgtttaatattatttagaagacatgtaagtattcttatttgattattaaaccttgctttctgttctattttcctatctgttaatttccataataaaagtaaatatagttgcttatctattataatgcttttaattccagaatggcttccacaatgtcttaaaaagaaaaccctaaaaaacaaaaattatggatgaaggaagattgttcaatgaaaagtggacaaatgaactttt

SEQ ID NO: 116 - DNA, 265 bp, Homo sapiens
  SITE (250): n equals a,t,g, or c
  SITE (253): n equals a,t,g, or c
ggcacgagtatacattgggctttcctatggtgagaaaaatgaactacctacatctggagcagctggttaggtgttaaaatgaagaaccctggtccaacttcatccagacagactgcatcagtagcactggggaatgraagtctgagraatttgttttttatatttattttttaaataagctcctcaaagtatcctcattcactctgaagtttgaaaaacactgccattaaatttatacaaagcacaggtnggncacaatgggggg

SEQ ID NO: 117 - DNA, 403 bp, Homo sapiens
  SITE (392): n equals a,t,g, or c
  SITE (403): n equals a,t,g, or c
ggagtccagatgaatttctctagataatttcctgccactacaaataaggtctcatacatgacagagtcaaaattttgttaaaatttcggtaaagaattaaatgatcccatctatttgatagcatctttgagtttaatggactttaatttaattttatcttaaaataattttgccatttctcagttgaaaaaacaaatttagrgactttaargcaaaacgatagggacmaatcagttattaaactcmaatattttgactctcaacccttgttgrgagtttttaaccttgtcactwattttaaacttttwaaaatatgcttgctttgctggtttcrgrcccttgattgggagtttccaccttacctttcatttttttgggggggtccttgggantggatggtttn

SEQ ID NO: 118 - DNA, 490 bp, Homo sapiens
  SITE (479): n equals a,t,g, or c
  SITE (486): n equals a,t,g, or c
acactcctttcctgttgtttccattcatgccttaatgaatgaggcctgtgtttatttcattttgagagccttctatgtttcaggcataatgctaggcgtggagaccatgatagacaaaacaccctgctcttgaggagctcccatcagtccccaaagccagcgtaagtgtggatctgtcagattggttggttggattgcttcggtcccagcttcaggcctcctcccttggtttcaggttaaaactattcctttctcagccacctgtctcccaagaactgtggccactgaaaatccttgggacttgccttggttctcacaagcacttttctcagtctgagtctgcacagagtatgggctttttaccttttgtaaagccagagaaccagagaagagagcacggtattgtagracttttaaaagcagggaaggtgtgggkttctaagcactgctatttattagttagggcaagggtactcagnatctttngatt

SEQ ID NO: 119 - DNA, 473 bp, Homo sapiens
  SITE (374): n equals a,t,g, or c
  SITE (393): n equals a,t,g, or c
  SITE (438): n equals a,t,g, or c
  SITE (455): n equals a,t,g, or c
ggcacgagggaatatggagaataaagttggagakgactaatcctggaagcagggagaacatttttgaggaagttgcactattttggtgaaaatgatggtcataaacatgaagaattgtaggtgatcatgacctcctctctaattttccagaagggttttggaagatataacataggaacattgacaggactgacgaaaggagatgaawtacaccatwtaaattgtcmaacacarggccagwtgtctwattattttgcttatgtgttgraattacaaatttttcatcaggaaaccaaaaacttacaaaactttagttttcccaagtcccaggaattcttatctgtccaaacaatctgttaccattccacctattntccctacctttggcatgtntgtcccaaccttcaagtcccggtcttttacacacgggtaagactngggccgtttcaggtttnaggaaatggggaaggggg

SEQ ID NO: 120 - DNA, 361 bp, Homo sapiens
  SITE (146): n equals a,t,g, or c
  SITE (336): n equals a,t,g, or c
  SITE (353): n equals a,t,g, or c
ggcagagtgtgtgtgtgtgtgtgtgtgtgtgtttggggaaggttattctatgctttagccttttttatttttaattcatcttaggaaattctatataatataggcatattgtagaaaactcgaaaaatttagaaatgtatacaganacatcaccacaattccaacactcagagccatatgaaggatattttctagtgtttcttgagatcaaacttagtaattctttttatttcatttaattatttgtattttcccacatcattatttttcagaaaccatttttagtggcaggatgatatttcactgtctgcttgtaccacagtttacttaattggnggatttaggttgtgtcnactatttc

SEQ ID NO: 121 - DNA, 450 bp, Homo sapiens
ataaccatcattttgtgaaggaagaagctctgatttgtagtgtattttcatgatataaatactctgatcatggcctatcaatgggatgctactgaataggaggtagggaagaaatgtcacacttggctctcttgagctggtaggagccagctccagcttaccactgattaaacacttaaaaccatatttraagtcactggccagttgatatcacataaaatgtaaagtataggtgtttattcattttraaatgccttggtatttcaggtgctaaaatgatgtattttctggacaagtcaaggcaggagaaagcaattgctatagccactagactagatgaaactataaaagataaagatgtaaagacattaataaaggtttctgragcactgcttgatggcagctttgggaactgtagttcccaatatgaagaatataggatggcctgtc

SEQ ID NO: 122 - DNA, 147 bp, Homo sapiens
  SITE (116): n equals a,t,g, or c
gtcggattccggtcgaccagctcgacacaaaggtacgtgcgagaaacacaaaggtacgctgcgagaagagacaaaggtacgctgcgagaagacacaaaggtacgctgcgagaaacncaaaggtacgctgcagaaacacaagggtacg

SEQ ID NO: 123 - DNA, 342 bp, Homo sapiens
  SITE (309): n equals a,t,g, or c
  SITE (342): n equals a,t,g, or c
ctttcctcttcctccttctcttcctgcttctttttctcctccatctcttcatttttagaagaaacaagtggctgcaaggaggaaggtaagtgcttggggtcgtaccattcctcatctataagacagtgtgtcccttctgtctgggctatgataaagccttagaagagaagatttcaggtaatcaaggccctgcaggggctttggtacctgaraggctgccttcctgaaggcatccaaagtctgcaagccactgcccctttcacactgctcatgggcatcgaggagacccaacatactgagatgtgagtnggagacatttctatcccagctgctgcttctgtn

SEQ ID NO: 124 - DNA, 343 bp, Homo sapiens
gcctgccctgtgtgctgtgggtatgggtgggtggggatgcctgccctgtgtgctgtgggtatgggtgggtggggatgcctgccctgcgtgctgtggtggttggcttttgctgaagacgattttaagtgtcctttgaagtcacaacccttctaaccaattttcttccattatgtgtgcagtcataagtctcgagttaagggatttttgcgattgaaaatggcctatatgccaaaaaatggaggtcaagatgaagaaaacagtgaccagaggttgcagtgaactgagatcatgccactgcactccagcctgagcaatagaacaagactctatatttaaaaaaaaa

SEQ ID NO: 125 - DNA, 354 bp, Homo sapiens
  SITE (330): n equals a,t,g, or c
  SITE (349): n equals a,t,g, or c
gtccggccagccgctggagtcgttaggtgccgccttgcttctgacgagccacacgtttgcttcttccctgtgttcccagctggagggacatgagtgtccctgggccgtcgtctccggacggggccctgacacggccaccctactgcctggaggccggggagccgacgcctgtttgctgaggctaaacactatcatgccaagttggtgaatataagaaaagagatgctgatgcttcatgaaaaaacatcaaagttaaaagtgagttgaaaattctttcacattctttacaaaagtagaggtttaatgttttttgttgtttttttttttttncagtatccttttttttttnggaaa

SEQ ID NO: 126 - DNA, 549 bp, Homo sapiens
  SITE (4): n equals a,t,g, or c
tacncctcataaagggaacaaagctggagctccaccgcggtggcggccgctctagaactagtggatcccccgggctgcaggaattcggcacgaggacaggggcttcccccagggcctggggctggtgtccccggggctccagggggcaagtcccagggttccagacccccactccagaccgcaggagaaccttgggggtgcaggcaagcccaccccagctgagatgtggctccaaatctggggaagggaccctgtctgggcttggctgcagactttggggtcctgtccgcctgctgctcccagatggtagccaaggctttctctgtgctcactagtggtcagccttggccccaggggcctcgcacttgcctggccaatcactgctcatctctagacccgatggccgcgtcgtggcctaacatcagcggtgtacgagctggttgcacacaccctcgcccatccccaggctcagccccacagatgagcctytggggttagtgtgcctctctagcatgttatataaatgaagccatatatgagcaaactaag

SEQ ID NO: 127 - DNA, 326 bp, Homo sapiens
  SITE (304): n equals a,t,g, or c
ggttatgctggctgggggtggggggtgtaactttaaggaataatgccaagctccataaaggattctaaagagaaactcatactggaaacatgattatccagtgagtaagtggaaactctatttaccaccacagttatagcatttgagaccctccctcacccagatcccaacctgtggaactcaggctagcatcgacatagtgacacctggtggccctaattcatcattgggcaccacggcaccccttccaaagtaaagaaaattatttcaaataggctttcacgtaataggttctgcgtatggntacaagttttaaatcatcctat

SEQ ID NO: 128 - DNA, 307 bp, Homo sapiens
  SITE (250): n equals a,t,g, or c
  SITE (290): n equals a,t,g, or c
  SITE (302): n equals a,t,g, or c
gatttttttcatctttttctgagaatgtgcttatttaaatacatgcagaatttcttgttatggctttgtggaattgtcttaaaatctgaatttccagtttttagaagatgttgatttgaatagctttgatcttgacctcaaattaaatcgcggtccatggaattagggtgacattcttccttcttccctgatgcagagtgagggagccaggggtgagtcacagcctcctctgtgcatcattagcccttangatgacgacggtctcgtcacagcggccaggcggtagtcanggccctgcgctnctggt

SEQ ID NO: 129 - DNA, 347 bp, Homo sapiens
  SITE (326): n equals a,t,g, or c
  SITE (329): n equals a,t,g, or c
gcctaagaggagcacctaccttgaatttaggggttagcagaggcatcctgaaaaaagtcaaagctaagccacaatctataagcagtttaggaattagcagaacgtgcgtggtgaggagatgccaaaggcaagaagagaagagtattccaaacaggagggattccaaagagagaagagtatcccaaacaacatttgcacaaacctgatggggagagagaatgtggggtggggatggatgatgagactgaagaagaaagccaggtctagataatcagtggccttgtacaccatgttaaagagtgtagacttgattctgttgtaacagnaanagcagcacaattcatatg

SEQ ID NO: 130 - DNA, 349 bp, Homo sapiens
  SITE (280): n equals a,t,g, or c
  SITE (345): n equals a,t,g, or c
ggcagagcaggctggttgcacagggctccctctggggtatggagagcttgctgggcagacaaatgctttcttcacttcaaggttgggagatttgtgtgggctgaragttggraggcaggggggatatgtctcatagtttgcttgaaataaagttctaaaatcacagtaccttgcaggtggttatatattttaatcatttacttcctataggcgagacagtgagttttttctagtgctgctcctgggctggtttgtgcagtggagaagggtcataatttcnagagtcacactggggcaagttttaaaatagacactgatgcctggaggccacacccagagcaattnaatc

SEQ ID NO: 131 - DNA, 510 bp, Homo sapiens
  SITE (342): n equals a,t,g, or c
  SITE (473): n equals a,t,g, or c
  SITE (507): n equals a,t,g, or c
gctcgatcctcgtttctaacaagcttccaagtgagatgatgctgctggtttggagacaacaaggagctgtgctaccaatgggtctctcagtggccttttcgggtcccagagtctttggcaagattgctctcttgacaccttgtcttaattttgaggtactgagcacagagcatattgggctccaagggaaaattggtataggtggagacgggttggcgagaggcccagcacacggcaggccctctgacaggggcarccctgaaaggacagcgacaggatgaatagagtccatgcaggcttgatccaraaggytcmaccttggcacararcagcagaagcctnctccgcggggctgagattgtaaactgaaccaggtgggcatctgggttggaagtccttcctcagctctgttccaccctgggatgcctctgctattttcttacaagtactatgtcaccttatccacgtattanatcttccttctctatctgacagtcacttcttaangca

SEQ ID NO: 132 - DNA, 444 bp, Homo sapiens
  SITE (345): n equals a,t,g, or c
  SITE (422): n equals a,t,g, or c
  SITE (443): n equals a,t,g, or c
gggctgctggtcctgcctgcaggtacttctgctagggacgtagctggggcaaggaatgaggagtctagggaaacaggccccacccccggagcttccccttgctgcccttggctcaggggcagcacccgcttcaactggcactccgctccatccatggtgctgctttaccactgcctccctggacctgctgatgccctaccccataccccgcccccagcctgctcctgctgaagccaggccagcatgaagtcctcaggaaggctgggatgaagcctcccatctcatttytgaggggtytgagccccatggcctggggaagagcaacagattcctgatgagggccangggatgggcatgtggcacttgtccgagagtaacaaaagccccaacctgacttagcacctacaatgcctggttctganaccaagtgtgcccctaatggna

SEQ ID NO: 133 - DNA, 386 bp, Homo sapiens
  SITE (361): n equals a,t,g, or c
ggaaatgttaagcattttttgtttgttttctgtttgtttgcttgtttgttttaacttgggcaactagaagaattggtggtggtcaaaaagaagtggaagagttggcaaagggcttggaaggggaaggagctgttagttggaggtgaatggaatatccaagtggagacattttatgggcacttaaaaatgcagacttgaatgcagataaaatttggcctggagtgccaggcacggtggcttatgcctgtaatcccagcactttgggaggtcgaggcaggcggatcacctgaggtcaggagttcgagaccagcctgaccaacatggagaaaccccgtctctactaaaaaaaatagaaaattanccgggcatggtaaccgcatgcctgt

SEQ ID NO: 134 - DNA, 371 bp, Homo sapiens
  SITE (296): n equals a,t,g, or c
gaacaaacctcaggagaccagaagtaagttgcctctttaagaagcagagccgctttgagatgttgcaagggggagctaagagcagggcagaattttccagtgtcttttgacaggaggaagtggttggggacgacttatttttttggcccggagacagcctgtcattattagactaagcattgtatcagatctaagtgtgtagctttcttaatgtaatgcagagcaggagctatacgttttgttttgtttttcattttatcagtaagaatgagtgcattacagcctgggcaatgtancaagacctggctctactaaaaaagtaaaataattacccagcatggtgcacgtgcctttggtcctactacttggga

SEQ ID NO: 135 - DNA, 421 bp, Homo sapiens
  SITE (390): n equals a,t,g, or c
  SITE (400): n equals a,t,g, or c
  SITE (419): n equals a,t,g, or c
ggaaagaggcagcagtcttcacccactgaggctgagtttctcactcatgccaagttttacataagctggggaccatgtgcttcaaggctagaggtcttggtgggcccagggccttggaggggcctggatgaccaaggggtccgtggcttaggccctggctctgcatggggaatcttgggaaggttggaagcccacagcccctactgagaaaggagccacgggccagatcttttgcacaaatcctgcctgtgctccttgactgtctctccccaccggggtcacggtgaccaagcaggcaggaagactccatccgttcacaggactagcatcctggaaagggccctggcctgagcgagctgctgcagggggaccctcatgctggattggttnggccactcancacccttttctctgtgganca

SEQ ID NO: 136 - DNA, 425 bp, Homo sapiens
gggctccccctgcctggaacgcttttttcctgcacacccctcccccgcgcctcttcattcttaggggcctaccagacctccacttcagccacacctcttcaggaagctttccctcatccccgcacccccgccccacataccaagcgtgacggccttggctctccctaagtcggagtgccttgggggggacccgtgggttgttccccgttgtctccctgtggggggtgcacagtacatgccttagggtcgtggaaaggctgacttctgggcggcaggtggctctggaggacgtcttccagggatcccgagggagggaagaatggggcacagccacagtgactctcccctgctttaactactgtgggarcacctggactggctatgtgcaaggcatgtccaactgctggcgcctttctggtaccctt

SEQ ID NO: 137 - DNA, 353 bp, Homo sapiens
  SITE (254): n equals a,t,g, or c
  SITE (340): n equals a,t,g, or c
  SITE (348): n equals a,t,g, or c
gcgatcgggagctactaccagctgttcgcagcggctgtgggcaacgtggaatggctgcgattctgtctgaaccagagcctcagggaaatccccaccgacgacaagggcttcactgccatccacttcgccgcccaatggggcaagcttgcatgcctgcaggtcctggtagaggagtacaagtttcccgtggacctgctgaccaacaatagccagacacccctgcacctcgtcatccacagggacaacaccaccgnggccctcccctgcatctactacctgctggagaaaggcgcagacctcaatgctcagacatgcaacggctccacgcccctgcacctgncagcccgngacgg

SEQ ID NO: 138 - DNA, 614 bp, Homo sapiens
  SITE (597): n equals a,t,g, or c
  SITE (600): n equals a,t,g, or c
tgagggaagtaggaaactccatcatgatacaaatgtctagtaattttaaagtttctttccctttttttctgtgctggaaatgttcacagatttgattcccgccccaagaattacaacaatgtattcatacagtcagttggaatccaaaggcaattaattctattttgcaaaatatgatggtcttcctaaaaaacaagtactgagttctcatttcaaaagttaccaagaactgaattctttaaactagcaaaccgaagtaacatgaccatttttgccttagtgggaggtttcaaatgtgcagctcatggcatttacctgccgaccatcttttgccaagtttagaattcttatgcgtttcaagttctatatagaaagtaattttacttttgatttttctcttgttaaaaaaaaactcctttattctaagaacaatgtctcaaagtctcatttttactttaaaggtwtaagagacttctaaagagacttacgggatataaaagtaattccyggaaatgatatttgatgaggagaatgtaagagaatgaaaaacacattgatgttttcatttttaaaaaatacaactagcatgagaaatcnacnaaataatgtttacc

SEQ ID NO: 139 - DNA, 598 bp, Homo sapiens
  SITE (30): n equals a,t,g, or c
gggaagactaaggacctgaccacccatttnagcatcttcaatgtggagcagtgttctgaggactcttctatcctaggactatgacagtgtgtattaataaaatatttgctaagattctcattgttggagaactgttttcccccttgccctgtgggccggagaaacttcagtggaacattcaacttttgattttcagattggctgcaaagcctwaaatttgkgattccagtcaaggaggtataatctttcctwaaccaaaagcaagatgattttcattatgccaccaggaaatttcctggtgtgttatagtgaatggtcaactgataattttctccttgctttgataataacagaataaaacaacgtaatggggaggaaggcacttcagaagaracccctytccatgtgccattgaatgcatgagtcccccarttgggcttccccaagactcgttgcttttgggggatcatcagtttttgtggtagagaaggtggaccctgaactgcccactgataaagtaaccatgacctagcaaaggctagaaagtgattattctctgatatggccatgtttttcgtcactgagattgtttctcgtg

SEQ ID NO: 140 - DNA, 608 bp, Homo sapiens
  SITE (591): n equals a,t,g, or c
  SITE (607): n equals a,t,g, or c
  SITE (608): n equals a,t,g, or c
gagcagcggcggcgactggctgagctgaagcagaaagcggcagctgaggcacagtgccagtgggatgcccttcacggggcagcacccttcccagcgggcccctcgggcttcccccctctcatgcaccactctatcctacaccacctgcctgcggggcgggagcgtggggaggagggtgagcacgcctatgatacgctgagtctggagagctctgacagcatggagaccagcatctccaccgggggcaactcggcctgctcccctgacaacatgtccaggtacacccgacgcctgggcccgcagcctccctcagccaccgcctcagctccttgatgcacttcctcttccccttctctccccagcgcgagtggtctggacatggggaagatcgaggagatggagaagatgctgaaagaggctcatgcagagaagaaccggctcatggagtcgagggtgagtctgacctggatcggggaggcagaaggtgttggggcacagagctacctactgcatgtcaagggcctgtgctccaccccaagcccttccacccacattagccttgccacattcccttggggtagaaaatgtttnaaaaggttgtattctnn

SEQ ID NO: 141 - DNA, 516 bp, Homo sapiens
caaaggccagaaaggcagggggaaggactgacaaaccaaaggctcctgagtgagtggaccaccaatggatggtggcatcaacacacagtttggtgattttcttcagcagggctgcccatgtgaggcgtagaatggatgctgagagccacaggtctgtaggacagaacagcccaagccatcctccaggggttccaccagattataaacacctagattttaaagctcatgttgcacactggagaaaacatgggctttggaggcggcaaactgaaagtcattacctcctgctaagcgttctgctcacctgagcctgggtcctctagtttgttaggatccatgcctccccctgcccccagaaggcactgtaaagactaaatgagataaggctgtggaagaccccagcatctccccagggtccacagaaggtactgaattaaatgttaatttttttccttgtatgggaagatacttattcctttgtctcttctgactgcataaatactgaattgtaaaaaa

SEQ ID NO: 142 - DNA, 328 bp, Homo sapiens
  SITE (279): n equals a,t,g, or c
  SITE (319): n equals a,t,g, or c
ggaagaacagggcggggcctgaggcagagaagaggcttcgcagagggccggaggaggacggtccctgggggccctgggaccgccgaggggcccgcagccagggcaaaggtcgccgggcccggcccacctcccctgagctcgagtcttcggatgactcctacgtgtccgctggagaagagcccctagaggcccctgtgtttgagatccccctgcagaatgtggtggtggcaccaggggcagatgtgctgctcaagtgtatcatcactgccaaccccccgncccaagtgtcctggcacaaggatgggtcagcgctgcgcancgagggccg

SEQ ID NO: 143 - DNA, 650 bp, Homo sapiens
gccgcctctgtaaccactgcacacaagaaaaccagcttctgggagagggggatgattgttgggactttgcgaattacctaaacagcccagggccgaggcgccgccgctcgcgtcctggtcctcctgccgggtgtggggctcccctgcccgagatggccagcgggcgcgccgagagtatcctggagccatctagtcttgcctcggaggcggggtgggcttatttgtgcggagaagaaacggatctcttaatggggtgagatttttcctccgtacattgttcccatttccgcagtttcacttggcctcggttttctagcagagtaatcaccaaatgaaattagctggagagcgtttgatggcgcagaatcacggtctgaagatgtttacgctgtatgccggacgcgtttgatggtgttctcttcggcacaattaattttgcaaagttcagaaatgtgccagacagasccctggcacgcagtcaggactctacagacacaccttgagtaggaaacaggcttgtttgtttcatctgtgatttatgtgatgcaccagcaccaaggccaacgtgttttttaaagacctttcgatgaaactccaaagcaatttataaattggcaaaatgaagcttgttttgtaaaataactcttccc

SEQ ID NO: 144 - DNA, 468 bp, Homo sapiens
  SITE (357): n equals a,t,g, or c
  SITE (429): n equals a,t,g, or c
  SITE (446): n equals a,t,g, or c
  SITE (455): n equals a,t,g, or c
ggtgggcatagcccaggtagttgaaaaggctgggagctggaggagactcggaacatagggagaagaaagggacaggaagactcccgggcagtttttcctatggagggaaccttgggtaggtttgagcagggggtatagtgtctgctttgcatcttctatcccatgccctagtggtggactaggaggactactggaagacagaaggccagcaagtagattgggtcggctgttttatagacctggtggttacagaccccctgtgaggggaggtcctgaggaggacaaatttgtagccagagcaagctggggccaggactcctargttctgcccaaccttaarcagctyatccatcactnccaaccttccttcaatgtggggtagacacctggatctatctgcctgctctataggggatgggtctctttcangtcacctgtgctatcangtgaatgtnggacaaagtgcaa

SEQ ID NO: 145 - DNA, 550 bp, Homo sapiens
  SITE (425): n equals a,t,g, or c
  SITE (462): n equals a,t,g, or c
  SITE (478): n equals a,t,g, or c
  SITE (496): n equals a,t,g, or c
  SITE (505): n equals a,t,g, or c
gcattgatkktcttctctatactgctctggtcaagaaagctggagtttttgccttcaaagttttgttaccttgggtgattcatttgacctgtgttagacttaacacccttctgtgacatgaggaggttatagaactagggtccttccatcttcaaaattctattcctatgatcatatacaattgtggggagggggagatggctaatataaaacatcaattatatagtggaactagtacttaaaaaaaaaccaacttatgaatgacatcctcatgagagttgctagtacatcataaaattgttggttgggcctaaaacatattcatccttgtcgcctattataattagccagttgccagacccattaccatgctcaagtaagggaaggcagacatgagagtggctggagttaaagcagaataaggntgacagccttaaactttctggaagtattgtccttgtncagaaattgtccaaangtcattgacctttaaagngaattttgncttaatctataaatttataaatggcatttatgttaaataaaattc

SEQ ID NO: 146 - DNA, 683 bp, Homo sapiens
  SITE (543): n equals a,t,g, or c
  SITE (568): n equals a,t,g, or c
  SITE (610): n equals a,t,g, or c
  SITE (660): n equals a,t,g, or c
  SITE (679): n equals a,t,g, or c
ggctgcattcatttgttttcccccagatcagtttcttggtggctcaattttttgccctgtcagtcaaaaacaaattaagtgtctactgggtactcatgtgctaaagaaaaaggaacagtaacaaaaagcttcccatttttccccaatttcatgcaaagaatctgcactgtcactttcagagccatttaggatcctgcttttctgttgctggtggaagccctgaaaattaaatgaatttttagtattgctagtgtctggctaaattcaaggttttaaaacccaccctaactatgctgcaattctagactgaaataatgaacagatgtcatttgaactaacaatatcgagaagacttttcactaacaacacagttgtctgtctagagatggagatttaattttttttgtctgatcacatgtggagtcccatttaattttcccctatcagtcaaaaacaattaagtgaagagaaagaagctattccgtgatattgtccttcgcaaagaaaactctttcctgacccaccaacatggcaacgattcanaagcagaaggtgaagttgtgtgtcnactggctgatcttgaaaaggatgactttgcttgcaaggagancaaggatgaacccaacccaagccaatggtgccattaaaattcaactcctntttggccccttattccaangaaa

SEQ ID NO: 147 - DNA, 196 bp, Homo sapiens
gctggtcaccaccctcggtgcccagctaccccctcaagccccagatgccctctcagagccccactaaccagacctcacccatcagccctacacatccccattccaaagccccccaaatcccaagggaagatggccccagtcccaagttggccctgtggctgccctcaccagctcccacagcagccccaacagccct

SEQ ID NO: 148 - DNA, 204 bp, Homo sapiens
  SITE (204): n equals a,t,g, or c
gcacggctcagttgtcgtctgggatttgagagaagactcaaggctgcattactctgtgacgctgagcgatggcttctggacgttccggaccgccacgttttccaccgatggaatccttacctcagtaaaccaccgaagccctcttcaagcagtagaacctatctcaacgtccgtccacaaaaagcagagctttgtgctttcacn

SEQ ID NO: 149 - DNA, 561 bp, Homo sapiens
gagaaaggtgaactccttttctcaagcacttctgctctcctctaccagaatcactcagaatgcttcccgggtgtatattcttgatgattttactcattcctcaggttaaagaaaagttcatccttggagtagagggtcaacaactggttcgtcctaaaaagcttcctctgatacagaagcgagatactggacacacccatgatgatgacatactgaaaacgtatgaagaagaattgttgtatgaaataaaactaaatagaaaaaccttagtccttcatcttctaagatccagggagttcctaggctcaaattacagtgaaacattctactccatgaaaggagaagcgttcaccaggcatcctcagatcatggatcattgtttttaccaaggatccatagtacacgaatatgattcagctgccagtatcagtacgtgtaatggtctaaggggattcttcagaataaacgmccaaagatacctcattgaaccagtgaaatactcagatgagggagaacatttggtgttcaaatataacctgagggtgccgtatggtgccaatt

SEQ ID NO: 150 - DNA, 327 bp, Homo sapiens
gaaatggctgcccactaaaaccgtgtgttaagatgtgatgctagcatccccctttatcatcgtaagaagcagtgtgatgtgatagcttagagcctggatgccagagctagctggcccagtaaccagctgtgtgacctcaggcaagtgataccagctctctgtttccttatctgtagcatggggatgataataggactttattcctagggttgttctgatgatcaattgatatacagaaagtgcctacccggaagatgctatatgagagttagctattataattttcataaagcttgcctttgaccatggttaatccagttttaaaag

SEQ ID NO: 151 - DNA, 355 bp, Homo sapiens
  SITE (275): n equals a,t,g, or c
  SITE (324): n equals a,t,g, or c
cccccatccccatacgcgcatttcgtagcggtccagctgggagtcgataccggcaaccattttggcgggcggctggtattcgacggtaaaggttatctttttattgctctgggcgaaaacaatcagcgcccgacggsgaggatctggataaattacagggcaaactggtgcgtctgaccgaccagggcgaaatcccggatgataatccttttataaaggaatccggtgcgcgcgccgagatctggtcttatggcattcgtaatccgcaaggaatngcgatgaatccgtggagtaatgcactgtggctgaatgaacatggcccgngcgggtgggtgatgaaattaatatcccgcaa

SEQ ID NO: 152 - DNA, 282 bp, Homo sapiens
  SITE (2): n equals a,t,g, or c
  SITE (250): n equals a,t,g, or c
tnagagtgtgtttggggagggagtcgtctgtatgctgggcagtcctggcctacagcggtgctggccacggaaacacccaggactcaggaatgaagcacaagtgtttccagtccccacacgctaaaaaggcgacaagaaccggtgaaagtaattttaatattctatttaatccagtgtagctaacatattacttcaacgctgattaacataaaattcttcgcgagatcaaaaaaaaaaaaaaaaaactcgnagggggggcccggtaacccaattgggccctat

SEQ ID NO: 153 - DNA, 268 bp, Homo sapiens
  SITE (180): n equals a,t,g, or c
ggaaatagttacacagtaaaatatttgtaaataccacctcttggtgttttgaattctctcaaggatactcttttcccaaaaaatgatggcttcagccgctgattgacaagccttctcaaaatatttcctgaacacagctacattctttccatactttctttttgctctattttaattttngctatctcagcagcttaacaaaagtttacctgcaaattgatcacaaaaatttaaaaattttaactattacactccaataagtgtacca

SEQ ID NO: 154 - DNA, 199 bp, Homo sapiens
gccataatgagttcttgagtcttaacatcaatatgaggaacatcaggggtacagcccaggatgatcttcacttctgctggccttgtttcttttttacagtttttcctctagtgtgaggagattcccgcaaggttgatggtttcaactcctgatctcttgtgatccactcttcagtctaaataaacatttccataagaac

SEQ ID NO: 155 - DNA, 75 bp, Homo sapiens
cacaccactggcaccaggccccggacacccgctctgctgcagcaggacaagttcctggggcgctggttcagcgcg

SEQ ID NO: 156 - DNA, 311 bp, Homo sapiens
  SITE (223): n equals a,t,g, or c
  SITE (225): n equals a,t,g, or c
  SITE (300): n equals a,t,g, or c
ggaaaatgatactgacaaggaatacatctagatcagaaatactgatatcctaagtgagatcttgttttttaaaacaaaaaaaagtttaagaaattgtcatataggctgggcgtggtggctcacacacataatcttagcactttgggtaagttgagtcaggagggccacttgaggccagggagtttgaaaccagactggggcaacacagtgaggaccccacctntnacaaaatattttaaaattagccaggtcgtggtggtgcatgcttgtagtcccagctacttcaggaggtctgaggtnggggggtttag

SEQ ID NO: 157 - DNA, 585 bp, Homo sapiens
  SITE (471): n equals a,t,g, or c
gtggcttgacttcacagtttattcagagcaggtgcaggtgacctggtgggcagggtgccaggaggggcaggggtgggcgggcgctccgaaccttgtggtctgaggcaggaactccattaaatcagctcctgcgacacagaagtgcaggggctcaggccgtgtggtctctggaggccccacgggcttcgatgagggccacacggcgggacttctgtcctcgctgcctggttttgcgcaaacacccagctccctgagcgccttctcaatctgcaaaatggggtaacaggcccagcctctagggccaagacaaagcgaggtgagggagacactgggttctcgcagtgcccaacatgggagccctgaggcagcgcccgcaggatctgtgccccgccgccgacgggacyttcgggggcagaagcagccggcagtcctgcacggaacaccgaagaaaaggcgccatttctgctcccntgccccacccagctctgcaccccgtgaccccagcctcccagggtccctgcctggcagcctagggtcaccaccctggaggttccagctctttccaaaccaggagacagactcatc

SEQ ID NO: 158 - DNA, 403 bp, Homo sapiens
  SITE (103): n equals a,t,g, or c
ggccttgaaagatgtgtgtcccagaagctatataaccaggtataagccacatgagtccctcaatcctcctggagaagtgttccaccctggagagctgcttctnttccagaggactttgaacaagaaagaaactatctttcatgtgataggccactgagagctggaagtttattaccacagtacagcctttcctattctgattaatacagaaattggaaacagaagtgagaattactcacaacaaaaactaagaataattgccattggctgagcagtggggcaagaaggtgagaaaatgaatatcatatttggggaatattaaaatatggggctgcttgtcatgcaatgcttcaatgtattatacattcaaaactgcttaaagggtgggtttaagtgttctcac

SEQ ID NO: 159 - DNA, 409 bp, Homo sapiens
  SITE (314): n equals a,t,g, or c
  SITE (343): n equals a,t,g, or c
attgcatataaaaagttacttttttggaaacataaaagtacgttttaaaacttgaacatgacatcattagcactaattctggtttaaatgaaagtcctgcagaaatgccaaagaaggcagggcagagcggcacggattctaggtaattaaaagtgaaagaggcagaagaatagtggacagaactgcaggatagtccttaaaataatggtggtgggaaaggaaaacacagaatgctcctggcaattctaaattcctaggtttgcctttctagaattccttaagaagctgacagagaaatcagagggttacaagantttcagaaaatttactccaagtgagaggncatactcacaactcctatgaagggtttctaaggtctttgtcctgtgcaatttgacaatgtgccatt

SEQ ID NO: 160 - DNA, 365 bp, Homo sapiens
  SITE (28): n equals a,t,g, or c
aggctgcaacaacagcagcggcaggtgnaaatcaacttgttggcctatcatggggcatgccaccctgccagatctggaggactactccccgtgtgcactacccccagagtctgtaccgcagatctttcccatggggctgtcttccagtgaaggggacatcccataagtagttttgagagggtggatgggttacttgcccaccagaaacagccctagtcccaactccttgcgttcctttggcccctccctgcctacctagaatctgcctgaaagggctggagaggggcagtattgggggactgtgctagctttacccccgcaggacatacacaggagcctttgatctcattaaagagatgtgaacc

SEQ ID NO: 161 - DNA, 312 bp, Homo sapiens
aggctggagctacccagcctgcagtgaaattaaactgtcgtcgctttcactctttctttatagatgatttttttgatgccatcgttctacgtgagagataataaacgttgttagttcttttattgttaagcttatcccaattatctggaattccttatcctgtttttttgggtggagtaataatttctgcacatctaaccattattaaatttaataataagtatcgggtttgttacgatagaatatttctatatcctcaagaatatgctttgccttattgcctgtgacttctgagattcaattatagtatcg

SEQ ID NO: 162 - DNA, 385 bp, Homo sapiens
  SITE (64): n equals a,t,g, or c
  SITE (175): n equals a,t,g, or c
gtgaaaataaaatatacttaatggattggcagtcttttacgttagctcagctggtgtctgagtncctgtttgtattcccacgtactttactaggccccagggatagaaagatgaataaaactcagtgcctgcgcttaagtcaccctcagattggtgaggaacacaggtggttttntgagcgtcagggaaatgtggcaagtctcactcaacagaggttgcattgggcacagaggatgggtaacgaagttccctgggtgacatgaaactgaagttggcctaagggatgaggaagcattggctggataggcagaggtctttctagttacaagctccgaaacagcatgggatatagttctggagctaccagcaagagggggctgctgtg

SEQ ID NO: 163 - DNA, 710 bp, Homo sapiens
ggcacgaggcgcagtgtagacctgggaggatgggcggcctgctgctggctgcttttctggctttggtctcggtgcccagggcccaggccgtgtggttgggaagactggaccctgagcagcttcttgggccctggtacgtgcttgcggtggcctcccgggaaaagggctttgccatggagaaggacatgaagaacgtcgtgggggtggtggtgaccctcactccagaaaacaacctgcggacgctgtcctctcagcacgggctgggagggtgtgaccagagtgtcatggacctgataaagcgaaactccggatgggtgtttgagaatccctcaataggcgtgctggagctctgggtgctggccaccaacttcagagactatgccatcatcttcactcagctggagttcggggacgagcccttcaacaccgtggagctgtacagtctgacggagacagccagccaggaggccatggggctcttcaccaagtggagcaggagcctgggcttcctgtcacagtagcaggcccagctgcagaaggacctcacctgtgctcacaagatccttctgtgagtgctgcgtccccagtagggatggcgcccacagggtcctgtgacctcggccagtgtccacccacctcgctcagcggctcccggggcccagcaccagctcagaataaagcgattccacagcaaaaaaaaaaaaaaaaaa

SEQ ID NO: 164 - DNA, 220 bp, Homo sapiens
  SITE (29): n equals a,t,g, or c
  SITE (52): n equals a,t,g, or c
ataaatattacacatttctatctactttnttaaaatcctaaaagagaaattnctgggtcacagagtataaagaatttaaggttattcgtgaatcggcaaattgtcctctgacgattgcattaccttaccttcccactggcaaaaagaccgctgccagtttcccccactctcatccccattaaactttgtttgtttaaatcatagggcacttattataatt

SEQ ID NO: 165 - DNA, 365 bp, Homo sapiens
aactgtacccagatcaagaagccagacattacctgtaagcccttcttattctccagtgaccgctatcctaacagcataggttagttttgcctgttttatcctttacagaaacaaaatcatatagtgtctgtttttttgggcctgacttcttcactcaacattgtttcagaggttcatctatattaagcatagcagtggttcatgcagtctcattgctgtctgggattccgctttgtgactataccatcacaatgtctgcgatccattctgttggtgggcatctgggtcatttccaatctgggstattgcaaatatactgggtatgatattctagttcatatcctttggkaaacatacacactgtt

SEQ ID NO: 166 - DNA, 358 bp, Homo sapiens
  SITE (8): n equals a,t,g, or c
  SITE (55): n equals a,t,g, or c
tgacgggngctgggctgctcacccagttttacatgggaagtggtagggccctgtntcccctggcccctgcccatgccccgggagaaatgggtatgtttgggtggtaccttcctgcatgggcagaggcaggtgattgtatcgccagccctggagctcagcgtgcacagcttgggcttccatttggaggaacctgatccttggacttgaacactctgctctttgtgttttgcacaacaggagagtcctgctcctcgcttagctcagcacagcgagtcccctggcttcagyttccctcctgagcamctgacggttgtcggtttactgtgactcawtgccattytatctgcctgggtttatg

SEQ ID NO: 167 - DNA, 235 bp, Homo sapiens
  SITE (228): n equals a,t,g, or c
gcctgtttccaggcttggggaaccacatctcggggagaaagcaacagcagtcagggagaagtcagtccctagatggcatcaggtgacctgagagctatggagcacagcaagggtggcaaatgtacttggggaggacacctgcaaatgccagggtcatattgactttttcccagtattcctgccacaaacaaacaaacaattaagtaaagggaagtctaataataaganttagcct

SEQ ID NO: 168 - DNA, 404 bp, Homo sapiens
  SITE (308): n equals a,t,g, or c
  SITE (402): n equals a,t,g, or c
ctcctggaccccagaagcccagttccccaggctctgaaaccctgcagcaatgaaaaggaagcacaggcaaaccataaggaagataatttttctactaaaaaataaatagaaatgcatyttagaggcaggtttcatgaggacacagagaatccggttttgtgtgtgcctgatttcgtttttctgtcaaagagatacaaaacaatcaactgagttatcttgaacttacaaagattaaaaataatcaattcctgttactattttcaatttttcccccatttacttctttaggttgaggaattaggctattnaacctgggttaataaaaccttcattacttttaaaaaaaaaaaaaaccggggggggccccgtccccttggccttggggggggttaaatatggccnta

SEQ ID NO: 169 - DNA, 339 bp, Homo sapiens
  SITE (141): n equals a,t,g, or c
  SITE (237): n equals a,t,g, or c
  SITE (322): n equals a,t,g, or c
aattcggcagagttagcagctgggcttgctttttcttttttaaatcataagttctattagagtttggttatttagccaatagaaatgtgtatagttaaatatgtttggactttggggaaacagtgtttatcaatcttaagnaaatactcttatcgggctgggcatggtggcttacgcctgtaatcccagcactttgggagtctgaggtgggtggatcacggaggtcaagagattgtngaccatcctggccaacatggtgaaccccatcttctacaaaaaatattaaaaattagccaggcgtggtgggcaggcacctgtagtncccagctattcgtgagg

SEQ ID NO: 170 - DNA, 326 bp, Homo sapiens
aattcggcacgagagatcatctgaaaggaaggagaatggtgaaggcagagagaagcatgaggaatcaggacattggacaaagccttcacatgattttagaggattaaactgcttcggcatctagtaaactcctcccagaaggaaaactagagacatgcttttccctaaatactacttcagagcccataataaaggtgcatattgaacaagtggrtcttcatcaagaatgaaagctgtctgcttcaaagtaaaatctgtcacagtgtcatcttaaagggaaagtttcccattttaaaagcatgccagtacatttgagggtggggctc

SEQ ID NO: 171 - DNA, 349 bp, Homo sapiens
aattcggcacgaggagcaatatatatgcttgggatgcaacagaaacacagagggagtttgcctaatcgctgaaaggactgaaagatgaaaatgacccagaaaggtttataagaagaggtggtagttaggcaaatactgttagttgtgtatttaatatttactcttgtccttattaacatgatggcaatttttattcagtgtggcaatatgctcagctgagagattatatttttcagcctaatgaacatatgactacgttttgactagtgagaggtaaatgggcattttgatgagttttccatgaaggctccttacagggagaacagacagactcttttctttttccctt

SEQ ID NO: 172 - DNA, 341 bp, Homo sapiens
aggggaagcaccatcccctatcgcaggactcctgggccacaagcagtcggtcagtgcagacttcaagtgtgtctgtttgatgtggtgtgattgtgctggccttgtcgaaaaagatgtgatgcttctcagaacctgttccatctgtatgccattgttcatgccttaagaaatgcaaagatgtacaataaatcatttttaaaatgtgtgctcataggtttatgtgaagaacagattttttggaatcatggcatgattcactttcttcaatcagggacaattatgrgactaacttaaakgggttttttaaaagtggaacaacacgtgcttttactctgataagt

SEQ ID NO: 173 - DNA, 462 bp, Homo sapiens
  SITE (365): n equals a,t,g, or c
  SITE (415): n equals a,t,g, or c
  SITE (417): n equals a,t,g, or c
  SITE (436): n equals a,t,g, or c
aaagtgttgtggctaaaagtaaatactctggagacagaatacacctaaccagctgggtgaccctggacaaattacataaaatcttcatgctgcagtttcctcatctgtaaaatgaagataaaaacagtaactttagaagattgctgtgaggattaaccaagataatgcctgtcccatggtaaatgttcaataaacgttagctattattattatttcatcaattactatgaaatttcatagaatttcaaatctatgcaatttcaaaatctgatataagtttaaatgcaggttaaaggaccaaacaatcgaaacatgtttaagagggaaattttgggtgcagttacacaattacagatgggatatcnttgtttatgttttagagtggtccaagttattagacactcaactattgccnantcccgtagcccagtttgcnaaacgggttttagttatgcctaaagg

SEQ ID NO: 174 - DNA, 405 bp, Homo sapiens
  SITE (340): n equals a,t,g, or c
  SITE (392): n equals a,t,g, or c
ttcgaatctttgagtatcgcagatagcaaaaaagcgcctttagggcgttttttacattggtgggtcgtgcaggattcgaacctgcgaccaattgattaaaagtcaactgctctaccaactgagctaacgaccccttgcgggattatgctgccttaatcattcaggatggtgggtcgtgcaggatgactcgacttcgtctcgcccttcgggccgttgctaacgcayrttatccttcacgktctctaccagtaaccacctttaaattggtgggtcgtgcaggttcgacctgcgacaattgattaaagcactstctaccactgagtacgccctacggtgtacngaagttttatcgggcattttagttgtgggcgtcagtattgttgtgccaggcntttggaagtatct

SEQ ID NO: 175 - DNA, 445 bp, Homo sapiens
  SITE (423): n equals a,t,g, or c
  SITE (430): n equals a,t,g, or c
  SITE (432): n equals a,t,g, or c
  SITE (439): n equals a,t,g, or c
ctcatgtggggagatgagcgtctttctcctgggaccgaagagggaacaagacggagaaggaagaggcggggctgcgactgtscccagcgtactgccgggctgccgggtccctgctctgggtacttctctgctttcgggcgtctcgtctagaagctgcagcttggcctgtytcacctctacacagaggggctgctggcgcctgacggaaaaaggtccacacamccgatggccggcccggggtggacgctgctgctactgctgctgctgctgctgctkctggggtccatggcagggtatkggccacagaagaattgamctgtcccataagggcatcggggagccatgcaggagacacgaggatgccagagcaattgttgtaaccatcaacagctgggccccacacacgttttgcaaccttaagancatcttncnggcatgnctggcc

SEQ ID NO: 176 - DNA, 299 bp, Homo sapiens
  SITE (5): n equals a,t,g, or c
ggcanagggaaagccaggccaggagagtccgaatgagaatttattgtgaatcgattcccaagctcccttccgggacaagtggtctgggacagggaggagcaacggccccagcgcgcaacgtwctggcgttacctccgaatcccgtcggcttctcgacccacgcagagaagccccgggcttggcggctctagccccagcgccaaaggagacccgccccagggccgggcttgggctcctgctttcatgggcctgggatgcagatctgcgtggctggtgcgtgcgcgggctttctggggaaa

SEQ ID NO: 177 - DNA, 216 bp, Homo sapiens
  SITE (75): n equals a,t,g, or c
  SITE (76): n equals a,t,g, or c
aagattccatgtaataaagtctgaagtgtgcttaacacagtactgggaacttaagcagcactcacacttcatcgnnaaatacgacgaaagtcttttcaaaaaaataaaaattaatgcaatatgacttacttggaaatgtatcaaaaaataaagaccgatgaatggatcgaggcgtagtgtgatagagtaaaattttaaatggttaaaaagttaatg

SEQ ID NO: 178 - DNA, 164 bp, Homo sapiens
  SITE (4): n equals a,t,g, or c
tttnctaggcataaatagatcattttatgttggcatttaagagatatcatttttgttttattgttctgtgtaaaccatattcattgtacactgtgtgtatatttttgtttaaataaatgaattttaattttttaaaaaaaaaaaaaaaaaaaccccgggggggg

SEQ ID NO: 179 - DNA, 857 bp, Homo sapiens
ggacaaccttccttctctattcctatgagtcaagtggagggatgcatgaggaatgtgtctttcctttcacctacaagggatctgtttacttcacttgcacccatattcatagcttatccccttggtgtgccaccagagccgtgtacaacggccagtggaagtactgccagagtgaagattacccacgctgtatcttccctttcatctatcgaggaaaggcttataacagctgcatctcccagggcagcttcttaggcagtctgtggtgtcagtcactctgtcttcgatgagaaacagcagtggaaattctgtgaaacgaatgagtatgggggaaattctctcaggaagccctgcatcttcccctccatctacagaaataatgtggtctctgattgcatggaggatgaaagcaacaagctctggtgcccaaccacagagaacatggataaggatggaaagtggagtttctgtgccgacaccagaatttccgcgttggtccctggctttccttgtcactttccgttcaactataaaaacaagaattattttaactgcactaacaaaggatcaaaggagaaccttgtgtggtgtgcaacttcttacaactacgaccaagaccacacctgggtgtattgctgatgctgaggaaaggagaaatatcttcagaggaagactgccgccatactgaggctgagcacagatttgtctttttcattgcatctgtcaagcttaaakaaccacctttagaaataccctctgcaccacctgsttcaatcagctggtcctttgtgaagaacgtagagagaatgcggcataaccaccaataaaggagtcttgatttaaaaaaaawaaaaaaa

SEQ ID NO: 180 - DNA, 1526 bp, Homo sapiens
  SITE (1408): n equals a,t,g, or c
  SITE (1426): n equals a,t,g, or c
  SITE (1509): n equals a,t,g, or c
ctatgaccatgattacgccaagctcgaaattaaccctcactaaagggaacaaaagctggagctccaccgcggtggcggccgctctagaactagtggatcccccgggctgcaggacagtgggctcacagatgtcttgctgctttgccaccgagcctcacagccatctgctgacctctcagagcccagcaggcccctgcccgggggttcgtggaatgcccctgggggtctcagacccactgctcagctcttggccaggctccgtatctctctagattggaggattctggagggaagtcggtgtggcctccgatcaaagcctggtgctgacggccccgaagcgggtggagggcttgttcctcaccttgagcgggagtaacctgaccgtgaaggttgcatataacagctcaggaagctgtgagatagagaagatcgtgggctcagaaatagacagtacgggaaaattcgcttttcctgacgtctcccccaacgccatggccggctcttgaaggccacagagagatccacgtgctggacaccgactacgagggctacgccatcctgcgggtgtccctgatgtggcggggcaggaactttcgcgtcctcaagtactttactcggagccttgaggacaaggaccggctggggttctggaagtttcgggagctgacagcagacactggtctctacctggcggcccggcctgggcggtgtgccgagctcctgaaggagattgagaaggcgctcagggagctgggtgctttgcgcaaaaccaggcagcgaggacagaagtcccgccgtgtggccctcatcgaagccccgtggggcctccagagaccacacgggcctgagcccctgcacttctgtgtcgcaggagctgatttaatggagttcctgcctcagaccacaaggttcggagcgcccgcccacccctgcccctcctgggcaccctgcccaccaggtcacctgcacctgctctgaataaactgtgaagtcaaaaaaaaaaaaaaaaaactcgagggggggcccggtacccaattcgccctatagtgagtcgtattacaattcactggccgtcgttttacaacgtcgtgactgggaaaaccctggcgttacccaacttaatcgccttgcagcacatccccctttcgccagctggcgtaatagcgaagaggcccgcaccgatcgcccttcccaacagttgcgcagcctgaatggcgaatggcaaattgtaagcgttaatattttgttaaaattcgcgttaaatttttgttaaatcagctcattttttaaccaataggccgaaatcggcaaaatcccttataaatcaaaagaatagaccgagatagggttgagtgttggtccagtttggaacaagagtccactattaaagaacgtggactycaacgtnaaagggcgaaaaaccgtntatyagggcgatggscccaytacktgaaccttaccctaatcaagttttttggggtcgaaggtgccscttaaaggcctttaatngggaacccttaaagggg

SEQ ID NO: 181 - DNA, 162 bp, Homo sapiens
  SITE (155): n equals a,t,g, or c
aattacccaccagaaggtgactgctatgcaccccacgaacgaggagggcgtggatgacatggcgtccttgacagagctccatggsggctccatcatgtataacttattccagcggtataagagaaatcaaatatatacctacatcggctccatcnttggcct

SEQ ID NO: 182 - DNA, 358 bp, Homo sapiens
  SITE (352): n equals a,t,g, or c
  SITE (355): n equals a,t,g, or c
  SITE (356): n equals a,t,g, or c
ggatctggaagcaactgcattccaccagacaaactatcattaagaactccagaacctttatattctcttcctactgataatacttaccttttaacaataacttccactgataatggcagaattttcttggctggaaaggatggctgtttatatgaagtagcctaccaggctgkaagcagggtggtttagccaaagatgtaggaaaataaaccactcaaagagctcactttctttccttgttccttccttgctacaattcacgttctcagaagatgatcctattcttccaattgccaattgataattctagaatattttatatacacgatctggagaaaggggtaataacggngtnngg

SEQ ID NO: 183 - DNA, 436 bp, Homo sapiens
  SITE (435): n equals a,t,g, or c
gccctgtgccctggagggcgcccgcagacggtgctgaccgacgacgagatcgaggagttcctcgagggcttcctgtcagagctagaacctgagccccgggaggacgacgtggaggccccgccgcctcccgagcccaccccgcgggtccgaaaagcccaggcggggggcaagccagggaagcggccagggacggccgcagaagtgcctccggaaaagaccaaagacaaagggaagaaaggcaagaaagacaaaggccccaaggtgcccaaggagtccttttgaggggttcccccaggccgcccaagaaggggaaggagaagccacccaagggccaccaagaagcccaagggagaaagccactttaagggccaccaagaaagcccaagggagaaagccacccaagggccaccaagaaagccccaaaggagaaagccna

SEQ ID NO: 184 - DNA, 759 bp, Homo sapiens
  SITE (38): n equals a,t,g, or c
  SITE (715): n equals a,t,g, or c
  SITE (719): n equals a,t,g, or c
  SITE (721): n equals a,t,g, or c
  SITE (728): n equals a,t,g, or c
agaatttaaataccgacctcacctatagggaaattttnggcccctcgaggcccaagaattaaattaaaccccccggaggcagaggttgccagtgagcccgagatccacmccccactgtacctcccagccccgggtgaccagagcgagactgtcccaaaaaaaaaattgataattaaatgttaaaagtcagcgactccagtaatacgtggtgggctgagtattagactactggcttacatcctctgatgtcattactttcttgttcgtttgtgacttgaggttggattttaagcaaatgtatttgtggctttttaccaaggtcatatggccagataacttttcaaaagcattagttaaagaattctgattagtttgaattagaaacaaaactcaaagaacatgacctaatttaacaggttaatttgaagtgcatctgccaagtagaagaccagcaagaaaaaaaaaatgggttcctaggaagaggtagtaggttgcatagttttagggcagggattttgcccacaaggaggtaactatacgacctgctgcctttcttagggccttattattcaccggattaacctgtttccttggcttactttggctttggtgttaagcagagttcttttctgttaggttttttccaaatggaaaacattggcaaggaatatccaaagaggagcatgtttggcgtttagtggatttataaaacggncagncngggtggncggacatggattaaccggaaagtccaaccaa

SEQ ID NO: 185 - DNA, 699 bp, Homo sapiens
  SITE (186): n equals a,t,g, or c
  SITE (599): n equals a,t,g, or c
  SITE (609): n equals a,t,g, or c
  SITE (670): n equals a,t,g, or c
  SITE (673): n equals a,t,g, or c
tatcacttcaaaaacagctaattaatgtcaaaaaggaatggcaatttgaagtccagagtcagaatgagtatattgctaacctcaaggaccaactgcagagatgaaggcaaaatccaacttggagaaatcgctacatgaaaaaccaataccgagctgcagattgcccagaacccagaaaaaagtgtnacagaaacagaggaactcttggtggaagagattgagaaaactcaggatgaaaaccgaagaagaggcccggactcatacagagattgaaatgttccttagaaaggagcagcagaaacttgaggagaggctggagttctggatggagaaatacgataaggacacagaaatgaaacagaatgaactaaatgctctcaaagccacaaaggccagtgacttagcacaccttcaagacctggcaaagatgataagagagtatgaacaggtcatcattgaagatcgtataggaaaaggagaggagcaagaagaaggtaaaacaggatctcttggaattaaagagcgttattaagctccaggcctggtggcgaggcactattgattacggggagaaattggttggtttcaggttgcctaangccaagttgntagcaggttcaaagggcaaggtaaggcaggttaggggggggcagaggagtcccgttttttnggntttccccgggtttttttgggggttgg

SEQ ID NO: 186 - DNA, 268 bp, Homo sapiens
ccgcgcccggcccccaggcaattttaataataaatcttaatagatggggtaagagctgccttcatcccatacagagaatacaatggtgctagactaagtagagattttatttcagcttaaagattctgtttgatgtctgaaattacatgtttaggcggcatggggaacaggactgttctttagcatcagtttcacaattactttaatctactaggtttcattcaccttataattctgaaatttcatcagcagtggggaacagaaaagg

SEQ ID NO: 187 - DNA, 345 bp, Homo sapiens
  SITE (90): n equals a,t,g, or c
  SITE (190): n equals a,t,g, or c
aaactttctttctacaaaaaatcaaaagcttagctgatagatcatgraaatagattatgaacagtgaaattcctgagaaggctgaaagtncggggaaccaaagcaggggagattagccttagtccggaggagggagaagcagatggaagtcagcagcctgccttgtttttacgtgtaatatttaaatttncaaattgtattacaggagggcctactttctgtttttatcaagagtttttcttttgttcaaagacactggttatgggaatattttgaaagggtaagaaacgctggtataaaaaggtgttgcagattaattttgaaggtccttacggaaccagtccc

SEQ ID NO: 188 - DNA, 514 bp, Homo sapiens
  SITE (460): n equals a,t,g, or c
gaaaagagaagtgaattttactgcatgtgaattgttaaaataaatgctagacagtattttaaaaatcaagcccagatcctgcaagacattatggctccccaccagaaggggagagacggggaaagagaagtgtccccaaagttaacccacgttccctgggacccacctccctccccactgccacttcccaccagcctcacgcacgggccaggccttwccctttgcagctcacagcccagcagatgttaggtcagaatgcgtcccctcacttgactaaaggtttacagccagcagggtgggaaatgaaccagatattaacaccccctcctccatgccctgcccaccttytgggccagtaccagtgaaggcaggaagccayttttcccacccccaggstgttcccaaagccctggaaggacccaaggaaaggcaggagccaagttgggagttgaccttgatnaccaggggccagttggcccagtttcccttgtttagttggggggagggaaccctt

SEQ ID NO: 189 - DNA, 248 bp, Homo sapiens
  SITE (165): n equals a,t,g, or c
  SITE (185): n equals a,t,g, or c
ccgctccagggtccccactgcaccctgtgtgccctagcacttcccagactcttcccggctctgmctscacagggctcctgaaccccctggacagcccccaccacatgcgtcaggatgaggaatccgagttccgagagggcatcgtggtggatcggcccacccggncaggccacggctcctttgtnaactgtggcatgaaaaaggaggtgaagattgacaagaacctggagcccgggcttcgggtgact

SEQ ID NO: 190 - DNA, 349 bp, Homo sapiens
aattatcgggggcaagggtcgagctggggcagtggaggaggtgacgctgttggtggagtcaatactgtgaactctgagacgtctcctgggatgtttaactttgacactttctggaagaattttaaatccaagctgggtttcatcaactgggatgccataaacaagaaccaggtcccgccccccagcacccgagccctcctctacttcagccgactctgggaggatttcaaacagaacactcctttcctcaactggaaagcaattwttgagggtkcsggacgsgtcatcactgcagaaacgtgcaggcagagccatttcaggaacttacatttacaaccagcatgcgtat

SEQ ID NO: 191 - DNA, 366 bp, Homo sapiens
cgaaggcagagttcaacagggatcttttgtaaatgttcaacaagggccacaggagccatttattgaatttatccatcagttaacccaggcaattaagagcacacatggaacatcgaccattccacgggtatctcgtataaccctcaaggacaagccatagtggaacgtgcccattccacgcttaaaaatatgctttaaaaaaagggggaatatgaataaggaccctacaacactactagcacaagttttattcacccttaatttcttaaatttagataatwaatttcaatcagccmtagaaargcactttgctaaaacctccccaggtacaaggcttcagtgttttgggaaggtgttaatagtatc

SEQ ID NO: 192 - DNA, 318 bp, Homo sapiens
aaatacatttatgtttcttgaaatgtgttargtggcctttgtcaaggtgtttataatagaagagtatataaaaatgaatttctctagagatgcagcatactctaaagatccatcattagataattaaaaatatgtaagtcatgctaacatttccatatataaatggagaacattaactctcctactgtttagttataaaataccaaattttgtaattatcctatcttgaattacactatactgcaaaaatgccagttactcacttttaaatttgacaatgtatgtgatgaattataaawtttaatagcctacatcttt

SEQ ID NO: 193 - DNA, 255 bp, Homo sapiens
caaccttcgagactcagccaaatgtcatttctgtaaaatcttccctgagtcttccaagcagtaatttgccttctcctagagtttacctgccattttgtgcacatttgagttacagtagcatgttattttacaattgtgactctcctgggagtctgggagccatataaagtggtcaatagtgtttgctgyctgagagttgaatgacattttctctctgttttggtattactgtagatttcgatcattctttggtta

SEQ ID NO: 194 - DNA, 329 bp, Homo sapiens
  SITE (65): n equals a,t,g, or c
cagctgtctgctccctagcagccggccttcgggtcgggcgtctccgccggctactgccgcttcanttctcccggtgtggccacgagtcgggttgcactgctgtgatccatcctcatctcctaaagatgcatcctgacttatctccacacttgcacactgaagaatgcaacgtcttgattaacttgcttaaggaatgtcacaaaaattacgtagaaaacaggaccaagagcagggagcatggcattgcaatgcgaaagaaactttttaatcctccagaggaatccgaaaaataaattgtattttcactcgatgcctttggttgagagaag

SEQ ID NO: 195 - DNA, 359 bp, Homo sapiens
  SITE (65): n equals a,t,g, or c
cagatctaggggcttcagctgtgtgcagaccccatgccacttcagggaagtgacacaggcctgtntcatctcgctttggcagcaggtgggtggccttcctcaggggaggaggtggcctgagatgtgtttcaggtctttgacccatcactccctacacacacgacgtgaacaccactcctggagcattctcagaatggagatttgaattccatgtggcagcttctcacacacaaacctgccatcattccccacacacccactcacgrcattcaacagccatgagccaaaagaagttccttgtttcagatttgaaggttttatgaatccacttcttccggatgtagctctttaatgatttt

SEQ ID NO: 196 - DNA, 305 bp, Homo sapiens
attaactttcatcaatacaaataagaggctagttttaagtcaatttatttgtcatgagcccaggaacaattaaattctataaagtaatgtattaaaatagtacactttaaaaattattttccttctttttttctctttaaattttaagaccatcataataaattatcattacaaagtcaaacatactatatactactatcagtcaatggggaaaaaataagtcatatgttttatgggtaaaatgctgtaatagattgggattgtccaatttgcttgaaaaaatcmcagcagtttttagtttccct

SEQ ID NO: 197 - DNA, 321 bp, Homo sapiens
  SITE (289): n equals a,t,g, or c
cagagatctgctgtgattattccttttcacaaaccacaatgactctggaaaacctggctgtaaacaccagcactgccaccagctaaggatctgtgatcaggagtgccatctcacggtaacaggcagaagacaaaagtgaaaccgggctgatgcgaatcactgggaaactggctttggcacctccagagaatgaactgtttcatagcctagctgaccatccatgaaaatggctgcctggagaggcagtgatcagcccatccctgcarggtgaagataagcttgtgcaggncactgggttaacacagtttcattcccatgcct

SEQ ID NO: 198 - DNA, 315 bp, Homo sapiens
ctctgctgatctctttgatgatattgctaaagaaatggacattgcaactgagattaccaaaaaatcacaggatattttgttaaaatggggaacatctttggcagaaagtcacccttcagagtctgatttttcactgagatcactttctgaagacttcatccagccttcacaaaaattatccttgcaagcctatctgactctaggcattcaagaacatgctctccaacacctcattttcaatcagattcagratataattttgaaaatagtcaagactttgttccatgttcacagtcaactccaattttcagggtt

SEQ ID NO: 199 - DNA, 310 bp, Homo sapiens
  SITE (48): n equals a,t,g, or c
ctcgccttggcctcccaaagtgctgggattacaggcgtggggcaccgngcctggccactttccatcttttctaagcatatttttaatacttgggatcattctctctatactgtttcttattcaacattaagttatcattttccctgtgttgaatrrtrttcttaggaaaatgrttgttagctcttgatagttatattagtgtatgatttcccttgctaattatttcaattgtttccagctatttgttattataaatcaagattttgtataaatcttcatacttctgkttttttcttaataggatgttccc

SEQ ID NO: 200 - DNA, 811 bp, Homo sapiens
  SITE (697): n equals a,t,g, or c
gggaaatgacacaaattaaacaaaaataaacataaaagccaaaagaaatgtaaaactattctatgttcttgaaacactcttgacgtgtatcagtgatttctttcatgtaagccactaaggtttaagatctattacttgtaacaggaagctggagtatatgtctctgtaataattggccacatcatcattttgacttgatttctaagtggatgcacatccatttctaagtggatgtatctccatagtgaaaataataccacttgccatagtatttttgtttgcctgggtatcagacaaatcagctgtgaagctgcaaggtctgcaggtctgaaggtacactgcccagtgtagtagccacgggccacatacggctactgagcacatgacatgtggccagttggaattgagttgtgctgtaagtttaaaatacgtgctggattttgaagacatagtaccctaaaaaaatgtgaaacatttccttttagtaattatttatattgattacaggttggaatggtaatttttggttaaataaactctattaagattaacttcaccttttaaaaatgtgaccaccagaacattttaaattacacatgtagatcacattatatttctattgatcggtgctaggtggtaggtgaaraaatgtgktcatgttgtttgggggatggtgttggggkgtccctcatttcangtcttgaccctgaggtctctcagaaaatcctgacaaaaaaccctatgcctacttacatccccagcttgaatcaaggaactggctttggggcaggaattttgccctgaaatgaat

SEQ ID NO: 201 - DNA, 327 bp, Homo sapiens
  SITE (288): n equals a,t,g, or c
tctggctgcgcatgatctcaaccggctaatgccgagagtttgggatgacagctttctgcctctagtcggcccccagcttccccagggaaattgaaagtggaagctggttccaggtagaccagcgcttccaacccagaagcgttgggggttgttagaaagccattccccagacagcctcacacttgagtcttaagtctggtggccgccctatcgtttttaaccgtccgacaggtgcctggtattttcctccaattctaaggaagggtagaacagaatagcaagcgaaanaactttggaggtcccttcatgattgccaaaatattacca

SEQ ID NO: 202 - DNA, 239 bp, Homo sapiens
gaagaggcctcaaggtcagcgtctgctgctgaattactgcaacagcaccatgcagggrtaactcgccgattggccttccacctgccaggctgcacatgctcaccagcccagggcatggcccctcccagaacctggtccttgatccagcctcatgccctccactgaaatatgttgggaacaccccactctttcccctatattcatgacatgttcattccccgtgaaatgtgtattcttta

SEQ ID NO: 203 - DNA, 332 bp, Homo sapiens
  SITE (30): n equals a,t,g, or c
  SITE (244): n equals a,t,g, or c
  SITE (250): n equals a,t,g, or c
  SITE (308): n equals a,t,g, or c
cttccttctccacagtgttgctgtgttttnaatctgtgcttctcaaactgtggcacccaggccagtagcatcagtatcacctggaatttgacatgcacgtttattcagccccaagcaaatctgttgaatcagaaactctgaggacaggtagggtccagcaagcaagtcggggacccaaatgcacacatgccaacgtgtgagagccagcgttgcagatcagtaattgttccgggctgagtttcgnctcctnccaccctcctgtgttgacagtcctcatccccgataacccagaatgtgacttgtatttngaaatagggtctttcaatatgtgg

SEQ ID NO: 204 - DNA, 312 bp, Homo sapiens
  SITE (31): n equals a,t,g, or c
  SITE (269): n equals a,t,g, or c
tacctcaacctctggttgctccgtgattttntttgtataatgaagtcacaacccatcagagtaataagggccttccgtaaaaatctccctggttttcaacaatgcccttagacagggagttccctgagctccaaagaagacttgtccccttaggcagagctttagatgtctttattcttatggtccacaatccccctgggcagaaatcttgtcccactgcacaggaactgaggattgggattccactgttccaggaatgaccccacctncactttacatgtaggcatggtagggggtaaatgggcagcccct

SEQ ID NO: 205 - DNA, 496 bp, Homo sapiens
  SITE (442): n equals a,t,g, or c
  SITE (450): n equals a,t,g, or c
  SITE (475): n equals a,t,g, or c
aattcggcagagggagcagcggtctgagagtcccttgtggcacctcgtgggcattagccaaagccgtcctgatcccaagggacagggcagggaaggtgagtagtggtccgagagtcccttgtggcacctcatgggcrtcggtcaaagccgtcatgaccccraggatgtgccaggagtcagggcctctcctcctacgtgggcctgaaggggctgctgtaattcaggagggtaggcttgggatgaagggtctggaatttctgtctgccagcattagcctaatgcaaatcttttcctattcttttctattgagttaaaggtcctggtggcattgtcgggtggggcacattgctgttgtcatagggctgtttgccttgtgtttcgtggagccccatttgctggagcttaacaacgtcactctggttctcagcttcccacgggcctnaaccatgnaccattcctccctggcaggcattgngtttcctgttcaccatttgaa

SEQ ID NO: 206 - DNA, 348 bp, Homo sapiens
  SITE (328): n equals a,t,g, or c
  SITE (331): n equals a,t,g, or c
aattcggcacgagccaaaccgagcttacagaagattatgtcctagaagcacaggcaatacaaaggcagctggcacatcgccaatattgtattgcagaatatagaaagctctgttccttgttatattgaagtcatcagtcctgctctatttgtctgaaaaagtaaacattctctagacgargaaaccaccatccagaatcccatatactgtgcccagcttttaatcttaaattttgagccatgccaagaaaaaagcccctaacccactgattaataagtaamcttagcagagttgctgatacaaggtcagcatacaaaattcaattgtnatnccacatgctagcaggtt

SEQ ID NO: 207 - DNA, 688 bp, Homo sapiens
  SITE (646): n equals a,t,g, or c
  SITE (663): n equals a,t,g, or c
  SITE (670): n equals a,t,g, or c
aattcggcacgagtagaaacatacggagattcttttatgttggatttattataccctccaccattttggtccctgaaaagggaaaagatacacggtcgagtagtacaggtatgtgtttcccactacacattatggctataatggagttgaattgcaaacagtaaaattttgttttggattggtttcccctgatccccccagacaggagcttcctctcccaccctacctgcctgcccttaagttgtgtcctattaaactggacacaaatctcaccggcttttagtctaataattgaatcatagctacacacrgtgacaccagaatagctacttgtttttttatgttaccagtgagtaacttgtttatccttgtatgtagaaactaatttcaccatgatcacagatctgtgtaacatctctagtttgaatttccacacaattttaaaatgtctactagaaaacttacacctttttgttccaaggtgctcttcatctataaaaccgtgggcatacttcagtgttcttctgaggccaaattttgtgctmgtggggacaattttgtataacatacatttattttgtaaattcattctcccaaatttggaaggctttattaaagggtattctatttccactgggccttcccnttaacttggaattaaantttactncccagtggccgtgggggt

SEQ ID NO: 208 - DNA, 458 bp, Homo sapiens
  SITE (449): n equals a,t,g, or c
aattcggcacgagaaaatgcaggatctttgtaaagcctttgcactttcaacctctttatagcttgagttacttttgcagtgggaacaatgtaaatgacatttaaaagatttaaggtttcagaaagctgcatcccacaattgaacacaatgcatttttatttcaattcttggaactggtaggctattctttttaaaagggggtaaacttcgccctaaggctggtagaatgtatgttcacattatagtagacaggatttcatttgccttatatgtttatagattttttataattttcatcctacgktattaaaattagagcattgagtgttaaagamcttaatgaggagtctatatctgagattgctctcttccctgggtgatgttttaactggtagataatttgttcttaaatatgtacttttgaaagataggacagtttttatagtccntgaactgga

SEQ ID NO: 209 - DNA, 1779 bp, Homo sapiens
  SITE (1413): n equals a,t,g, or c
  SITE (1691): n equals a,t,g, or c
aattcggcacgagctcctcgtctgtgcacagactggtggccgactctggagcccaggctgttgcttcctggtctggtgatgaatcctccatagtctggggtctcactttgttgcccaggctggcctattccaggatttgactttgcagttgattccctagacatgtgaagatctgagtctaatcaaagataattcagagatcgtcagggtaacatgcaaggactggaaaggggtctccagtcacctctcatgaggagacgcgtcccactgcctcattgaggtggcctcagggtgaagaatcaggacccacctggtgcaacgaataaacccagactctcagcatcgcgaggagaaaaagtcttgcaacaccgtggcgaccaagtaactctgtgcacatactaaggtctcaaaacacaggcacggcccctggagttcccagtacatcaacatcagcctggggatcatgtcctcatcaaaagctggaaagaggagaaactcgaaccagcctgggaaggaccttacctggtgctcctaacactgaaaccacagtccagatagcagaaaaaggatggacccatcacaccccagtcaagaaagcatcaccacctccggagtcatgggccgttatcccaggggaaaaccctaccaaactaacgctaagaaaagtttaactctccttcatctattctattactccttcttctttcctcattctatggctgaccacctcattattaatgtaaccaggtcaagctcaccccaaactattaccttcgatgcatgtcttgtcataccctgtggagatctccaaagtcaaaagcaactctcagactcagagaagtatctctgcccctttaagataaaaggctccccctatcaagacccttgttccttaacgaatgcaggaaaacaggtctgccatagctggaatgatgttgtgtggacaactgaatatcaaggctggacctcgtcaaccggtggttgtatgtccttaaaaccatacattcacttcactaaagaaagtaccccccataattgccagtataaccaatgtaatccagtgcaaatttctattctcattccaacttctactgaccctaaacctactttaagttgcttatatggcatgggagccgaaatagcaggggcacatcttattggatattttgagatatgttttattactccttcacctcctacattccttctacattatcccccaatgttctgttcttcctccacccaaagataaaaccaaaatagatattgtagaagtaaatgacctaaaacaaactttagcaattgaaacaggatatcaagatgcaaatgcctggatggaatggattaaatattccgtccacactttaaacaaaagcaattgttatgcttgtgcgcacagcaggccagaggccnagattgtcccctttccactcagatggtcctcccgtcgaccaagcatgggctgtatggtagctctcttccaggattctacagcttggggcaatatatcatgccaagctctctctctgctctatcctgaagttcaacamcctgcgggtcagcccccgagggccatccaasttccgtctcccaatgtcagtttcatctcatgtctctcatgacaagggaaaacttggcattccgtgggaagcttaatgggaatgtagtgaagcttaagcccttccaagagncttacccatcagtctgctgttagtcattctcgagcggatgtagcggatgttatgggtggtattgttggtggaccccttaactgggaca

SEQ ID NO: 210 - DNA, 258 bp, Homo sapiens
  SITE (187): n equals a,t,g, or c
  SITE (252): n equals a,t,g, or c
ggcacgaggttatacctgcctaattttagaaagataaattatgaatgtcgaaatgaaaggtaagcagaagaatcagccaacattggcaacattatagaaattaatttaaatttgcattaagccaggaacatattgtttgtaaattatgaggcttctatgtacttttgtacagctttaatgaaaaagnaatcatacttacttgattaagcattggctttgctaaattgtgggaactaaaggaccaaaatagtncatttt

SEQ ID NO: 211 - DNA, 420 bp, Homo sapiens
  SITE (254): n equals a,t,g, or c
  SITE (389): n equals a,t,g, or c
  SITE (407): n equals a,t,g, or c
  SITE (410): n equals a,t,g, or c
aattcggcacgagaagatctagagctataatctccgaaaggaagatttgtaatgcactgcgagttagaaatgtttttctcactgcagcttccttgtttcaaaaagagaatttttgacagcactgcaaaggcacaagaaaccaggcacagtataaaatatacaaataaaacaggtaccaaggaacttaaaacattcaacccataacgtcgtctaggtttttctgctttaagaaaattgactcaattcttccaagnggataaccctattaaaggtcaaattcctggaaatatctggagggtaagaaccagtgaatgaaaagaggtggttaatgctttgcagtgaaggaaagtgactcgcatcagtaggttactatgaggtgcagaggtccncttcactggaggattttnccnattgctggtg

SEQ ID NO: 212 - DNA, 439 bp, Homo sapiens
  SITE (22): n equals a,t,g, or c
  SITE (75): n equals a,t,g, or c
cccctcagactgagaactgttncccagtatatacatcaagtcacctgagggtagggacaaaagattggctacatnccctattattttatgggttattataagtgtmccaggactctaaaagaaacttgtttgtataatgctattctatccaaggtatgtagcccaggaaataaccaacttgatgcgtgttatgacccattttaagcctcccatgatcacagtttttaaaatacaattaaggactggtccttttctaggtgacacaagaaaggtaatagctagaacagaagaaagaggggtccccaaaaatgtaaccttaaaatttgacacttgtgccactattgatagtaagcagcatggatgaggatgtggttctctaaattggaaaaaaaagttacacagtaaaaaaaaataagtatatctgtcaagaatcatattt

SEQ ID NO: 213 - DNA, 439 bp, Homo sapiens
  SITE (387): n equals a,t,g, or c
gaattcggcagagtgactggcatccattcctatgtcagaaaaataatttgcctttgctggactgacactatttgaagaaatgattattgggtatccagagggattttacttgatactgctaaatggtagttatatgtcaacatagtaattaactcatacatggagagataagaataatttggtttattatcaaatcgatattttgaaaccaatttattatattctcaggatgctagtgagaaacttcatctgttatccttttcgtctccttattttcttcatttaaaaatgttctattagtaattataaattaactttcagtttttattcttttatattggratattaactaccmattgccaaactcctccacattttctgcaatgntaaggggaatctaaggcatatggggggtggggggaaaccttggtctgtcggt

SEQ ID NO: 214 - DNA, 366 bp, Homo sapiens
  SITE (306): n equals a,t,g, or c
cattctccccaagggactatctgggagaatgtcagagggggtctttttagttcgctctttcctttgttctgtaggcctagaattcctgtttcccattttcacttagtctctrtgtcaggtttttgctgtgtactcagccccccttactggaggtttcttgcacactccgggttctctgaaaatgccccaataccaaggcagtactgataatccaactttcctaccttggatcatgcaggargttggctggttgccacggtgcctgcttttytccttgtgtcacctccgctgtctcctgaacaaaanttgggttttgtctgtggcttctgcggggaaccaagatttccaaacaggccacataatcaa

SEQ ID NO: 215 - DNA, 398 bp, Homo sapiens
gtgctgcatggagtgagtggcggcatccascstgaggaggagaggagctctgataccctcaggacccgccaggaggggcatcacggaggcttctggacgacttggagctgtgtcctggggagaaaaccgctcctgtctgggccctgagtgctgaggaggaagctgccatgcacttttccctggcatttttcctgcatggttcgtctgtttttttgcaaatracatgttgtcatgaatttttatgcatgaggcatatttcatcatgtctgtatgctgaagtcccttcatcctttcattggttggtggacaggagagagaggtccarggtgccctacatcgtgcgccagtgccgtgggaggagatcgagcgccgaggcatggaggaggtgggcatctacc

SEQ ID NO: 216 - DNA, 659 bp, Homo sapiens
  SITE (575): n equals a,t,g, or c
  SITE (596): n equals a,t,g, or c
  SITE (599): n equals a,t,g, or c
  SITE (604): n equals a,t,g, or c
aattcggcagagcatctgtgcatggatgagtggccgactttggagcccaggctgttacttcctggtctggtggtgaatcctccatagtctgagagtaagatccttgatactggctcagcatggaacatctggcacacagtatgcactgaggaaatacttgttggaataatcagtgaatcatagatgaaaacttaaccttggaattaattatgagactgctcagaggaagagaatgggagacaaaggacctggtgattagacccccaagacactgggctgtctgcttgtgtctcgggtggaacaggcccagcgagagtctttagggccagaactcaagaatttattgagcccttgttctaggcacttgggattcaccagtatacaatggagacaaaaatccctgccctggagcagcttacattctagcatggcaaacaggcagtaaacagcccattctggctgctgtattgagaagagaatgtggtggacagatatagaagcatggaaacctgataggrctattgcaatcactcagaaaagaggcgatggcagcttggacctgttggaagcagtanagtgccctactcttcagcttncangggangagaaaggacctgaaaggttaattttgatcaccaatgggccaatgatgtaatcag

SEQ ID NO: 217 - DNA, 159 bp, Homo sapiens
  SITE (150): n equals a,t,g, or c
aattcggcacgagggtccaccagaggacacactcaggggagaagcattatgtttgtagggagtgtgggcgaggctttagtcataagtcaaatctcatcagacaccakaggacacactgacgggagaaacctgtgtatgcaggggtcatgnacaagacct

SEQ ID NO: 218 - DNA, 274 bp, Homo sapiens
aattcggcacgaggaaatacctttaggtcatataattcctaaggatataatgcaaatgccaacataatgtttatagtatggatacattagaagtatcttaattaattcaagatacatatttggggttttttgtggctaatcataagaagttgttctggttttgtttttctcagtcctcccaccagataattattttagatcagttttagatcaagtgaaaacctttcttagaaggcttaaatatacaattttgttatattataatagggcattt

SEQ ID NO: 219 - DNA, 271 bp, Homo sapiens
gaattcggcacgaggattagtttacactaccagattatagatattagcattatgaaaaatttgaaaattctgttttttattagtaaataaaaacatgagcaactgatgtttctaggaatctagatcctaattaaaggagtctcattccagtctttatatgtgccttaagtttatgtttttcttttatcaaaacatacatttagacattaagcttaaccctaatgtagcaactggctgattattaattcagaatgtatggaaagcgtttacc

SEQ ID NO: 220 - DNA, 295 bp, Homo sapiens
  SITE (17): n equals a,t,g, or c
  SITE (263): n equals a,t,g, or c
  SITE (294): n equals a,t,g, or c
gagccccagacagtcgnttgaagaggtgtgtggatgtctcctagatcttgacttgctcctgaggaaatattgtgtgactgagtttcctgttatactgctctccaatccatcatgaaccagccagagtctgccaacgatcctgaacccctgtktgcagtgtgtggccaagcccactccttggwggaaaaccacttctacagctatccagaggaagtgggatgatgacctcatctgccacatctgcctgcaagctttgctggacnccctggacactccgtgtggaaacacctatgna

SEQ ID NO: 221 - DNA, 802 bp, Homo sapiens
  SITE (3): n equals a,t,g, or c
  SITE (38): n equals a,t,g, or c
  SITE (252): n equals a,t,g, or c
  SITE (475): n equals a,t,g, or c
  SITE (771): n equals a,t,g, or c
  SITE (785): n equals a,t,g, or c
  SITE (789): n equals a,t,g, or c
agnggcggggttagcgggcgtggcgtgcggggacgtcnacttagcttttcgagctgtgtacgtttgcgtaaaggctgggcggcgatagaacgtttccgtggaccagagtcgtggctgttgtctgtgttaacatttgtgtaaaataagatgcccataaaagttgacttgaacactgaggaggaagaactaaatatttaaatttcaactgacatggacacaaacaatggtcaccaagtccctaaacaggttgtnggagccccttgaggcgttcatccagcgctgtttcggagaatctctatttcagtctactcctatacgtcagttattgaaaaacaacaatccgcaaaaacaagttgacctttttgtgttccttgagcccagtcgcaaagggccctcgtgactgggcctcatgctagacaacatgttacaaaaagatctaggggtcccagaccacgccaaaaagcttcatgagacntctcctcgtctgtgcackgacgagtggccgrctctggagcccaggtygttgcttcccagwctggwggtgaatcctccatagtctgactatttaatcagcaggcagatcaacaggccaaaatttccaccataactgcaaacttggaatgcggatgaatggattacaacatggtcaaaccttgcaatgagaggcattataaatggacaaatatggccctgaaaggctccatgagcagacgaggaaggctggacttggcaactgggtcacctttggatccggaactagaggaatgacancgttgtttccgggngganaaaggaaaaggcg

SEQ ID NO: 222 - DNA, 292 bp, Homo sapiens
ggcagaggttcatttctgcttagtcttctccaatctgtgacagttcctcagcctttccttgtcttttgtgacattgatacttttcaagagtactagtctactgttttgtagaatgtttctcactttgggttttctatgattatattgaggtaatacatgttgacaggaataggaaatagcacagaagtgatcttgtgcccttcatagtgcatcctaccaggaggtatgtggtattgatttgtcttgttacctgtgataccagccttattacttggttcaggtgaagtctacc

SEQ ID NO: 223 - DNA, 271 bp, Homo sapiens
  SITE (267): n equals a,t,g, or c
ggcagagtttcaaactaaataattgataaaattggtagtgcaggaaagttctgaagcataatacaaaagaatccaccgatacatttgagaactataatattaccaatactagggtatctattgtttacatttccctgcttcctattcataggtacccaccatttggaattttgtgcccatcagtcttttgggttttgtgggggargggggtggtgtggatagctttgtggggtttttygttgcttttttgasatggattctcattcntgtc

SEQ ID NO: 224 - DNA, 273 bp, Homo sapiens
agggaaaacgaacaaatcaaagaggacatggaagaaattcgaaccgagatgaataagcgaggcaaagaaaattgctctgaaaacatcctagatagcatgccagacatccgstcagccctgcagagggatgcagcagcagcctacgcccacccagagtatgaagagyggtttctgcaggaagaaaccgtgtcccascagatcaactccatcgaacttctgcagacgsgacccctggttctgcctgyaggtggtgaagtcacagcggggccccct

SEQ ID NO: 225 - DNA, 361 bp, Homo sapiens
  SITE (19): n equals a,t,g, or c
  SITE (39): n equals a,t,g, or c
  SITE (291): n equals a,t,g, or c
attattaagacagaatgtnagggcacaagcaggcttctnagccacttgtcagattgtattcaaagcakcaatccaagaaggaggttatgtgtacttcatttattggtgatagttggaagagactgcagactactgctttgaatgagttgaattacataagctaagatcactataggtccatttcttgaacccacttatacataaaatgtaacccatttagaaaaagattctggatatcatcccccttgaaagatagaaagcattcaggatgtcccagttattcacatgttncacacttgggtttaggggtgtttttttttaaaaaccaggcaggtttgctagcccaccctgtgctagtttt

SEQ ID NO: 226 - DNA, 478 bp, Homo sapiens
  SITE (372): n equals a,t,g, or c
  SITE (416): n equals a,t,g, or c
  SITE (441): n equals a,t,g, or c
aaaatagtcacaaaacgtatctaacctccacatcctgtaattagaattattgtggtctggtacactgcacccagtttctgcaggagtactttctgggtgtctctaatgagtaagagagggccccatgggatattcctacagttcccagatgaacagtgggaaagactctacgttgacaaaccccggggacctgaaacctcaggtcctcaaggagggtagaggatacctggaccctgacccagacccctagatgggctgtgccaagagacccagcaagggaagggattccctcctgcctcaggttctctgttcttctgtggttagaagacctgaacccaactccctccccaagcagtggagatagggcttttncaagggctggggatcttgctgtcctaaggacagttgagcaaggnggtcgaggaggtcttgggtggtggnggagaggaaaccgggtaagatgtgtgaagcagtcggt

SEQ ID NO: 227 - DNA, 544 bp, Homo sapiens
  SITE (389): n equals a,t,g, or c
  SITE (474): n equals a,t,g, or c
  SITE (507): n equals a,t,g, or c
  SITE (531): n equals a,t,g, or c
ggcagagctcagtctcttctttwagatattaccccagaaatcaatcccttgcctaaaatagaagtatctgwgtctgttgaatatgaggcaggacatataccatcaccagtgattccccaagagagttctgttgagatcgataatgaaacagaacaaaagtctgagagctttagttctatagagaaaccatctattacctatgaaacaaataaagttaatgagttaatggataatattataaaagaagatgtgaactccatgcaaattttcacaaagctgtctgaaacartagtgccaccaataaatacagccactgtacccgacaatgaagatggggaagccaaaatgaatatagctgrcacagcaaagcaaactttgatttctgatgnggattcttcttcattacctgaagtaaaagaagaagaacagtctccagaagatgcccttttgagagggttacagaggacagctacngatttttatgctgaaatgcaaaattctacaganctaggatatgctaatggaaatctngacatggatcaaa

SEQ ID NO: 228 - DNA, 710 bp, Homo sapiens
  SITE (611): n equals a,t,g, or c
  SITE (665): n equals a,t,g, or c
  SITE (679): n equals a,t,g, or c
ggcacaggcacgagaaaggcatgggggaaaccactaccgtgattcaattacttccacctggtctttctcttgacacatggggattatggggattacaatttaagatgagatttgggtggggacacgaagcctaaccataccagttgtttaatttttcctttcttaaagaaaaaatatttttaaaaatttgccatgcatggtgttcaagaatttgtgggagtgtgaactggggtcctgaaactgcacttttatgacacttgggagtcctacttctcttcttgatgcatttttctctctatttatgcatatttccctcttgcattccaaaagccactggtcagaaattttattattcctgtttcatgggtgagatggctccttctggctcctggtttagttaaagagttcacttatagcatctctgcatccgaaggcctgaggcttcagctccttctaaggcagtgctactwaatctctggcctcagagttagtcttttctttaaaaatgaataaaaaaccaaaagttggattatgaaggtcagaatcagacattcaasgtcaaatctagatwctgtgtttagaagggatcagaaaaagcaaaatttgggtgnttttgatactctcctcattgcaggatttgaaatgtgcccttcttatgggatganggatatgggtaaantaaaaatggtattaattgcatctgggtcaat

SEQ ID NO: 229 - DNA, 972 bp, Homo sapiens
  SITE (769): n equals a,t,g, or c
  SITE (837): n equals a,t,g, or c
  SITE (945): n equals a,t,g, or c
  SITE (952): n equals a,t,g, or c
  SITE (957): n equals a,t,g, or c
  SITE (962): n equals a,t,g, or c
ggcagagctgactcagatgctgaggggccagactgaagggacagtggccattgcatcaagtsagagaacggatctracccatctagtagaagcttattgttttggcagaagcacaagctcttagaggtgcagctgcagggtgtgacctattggggacattgagctcagtgaccatgggccctgagagtctgaaatcctggaatttctcccaaaacgragtccatgtagggaagccaaagtgtgagtcttaccyggctggtttacaactgactgacatttgctgcctgggcagctgctgtgggtgcctggaaaccctattggactaggactggccccggcaaaaaacaagtgttatagctgcccagtgtcctctgagtggatgctggtgattctggtatggagcccagatgtaaggcagcaggtggtccagaaggcaccagaagaggtctcctgtcaaagtcagggccagagaagaaggcacagggaacctactgcacgagactttcacttgcaacgagcaacccatgatgaggagggaggattcctgggggcattgagtcccccagacacaaggacccaagaccttcttgcttggaaagtgaattcctcagaattccgagatgatgccagtcttggaggaagatgacatgaggacccaaaaccttcttgcttggaaagtgaattcctgagaattccgagatgatgccagtcttggagaaagatgacatgaggacccaaaaccttcttgcttggaaagtgaattcctcanaacttcacgaagactccagtcttggaggaagatgacatgaggacccaaaaccttcttgcttggaaagngaattcctaaaacttcacgaagactccagtcttggaggaagatacatgaggacccaaaaccttcttgcttggaaagtgaattcctcagaacttcacgaagacttcaancttgganggaanaccangttgtttaaa

SEQ ID NO: 230 - DNA, 1207 bp, Homo sapiens
  SITE (52): n equals a,t,g, or c
  SITE (75): n equals a,t,g, or c
  SITE (85): n equals a,t,g, or c
  SITE (202): n equals a,t,g, or c
  SITE (1167): n equals a,t,g, or c
  SITE (1180): n equals a,t,g, or c
  SITE (1198): n equals a,t,g, or c
gaacatctggcagctgagacaaaatactcaatttctgaactggagaatgggnaacagacccagaaaagactaganatagaaatgnaatcataccgtggtagactggctgctgctgtacgtgactgtgatcaaagtcagacagcaagagacctaaaacttgatttccagagacaagacaagagtgggttcgtttacatgacanaatgaaggttgatatgtctggcctacaagctaagaatgagattctttctgaaaaactttctaatgctgaaagtaaaattaacagcctacaaattcagctccataacacaagagatgctcttggaagagagagtttgattttggaacgtgtgcaaagagacctcagccaaacacagtgtcagaagaaagaaactgaacaaatgtaccaaattgaacaaagcaaactgaagaaatacatttgccaagcaggaatctgtagaggagagattatctcaactacaaagtgaaaatacgttgcttcgacagcaactggatgatgctcacaagaaagctaacagtcaagaaaagacaagcagtactatccaagaccagtttcattctgctgccaaaaatcttcaagctgagagtgaaaagcagattctttcactacaagagaagaacaaggagctgatggatgaatataatcatttaaaagaaagaatggatcaatgtgagaaagagaaagcaggaagaaaaattgaccttacagaagcacaggaaactgtaccttcacgatgtctacatctggatgcagagaatgaagttcttcaacttcaacagacattattctctatgaaagcaatacaaaagcaatgtgaaacactacagaagaataagaagcagctgaaacaagaagtagtaaacctcaaaagttatatggaaagaaatatgttagaacgtggtaaagctgaatggcataaactgttgattgaagaaagagcaaggaaggagatagaagaaaaattaaacgaagccattctcaccttgcagaaacaagcagcagtatctcatgaacagttagtacagttaagggaggataatactacttcaataaaaactcagatggractcacaatcaaagatctggaatctgaaatcttcagaataaaaacttygcaagccgctttataaaacccgaattggaangwtwtarggactntwcctaraaaagkgaagntagagatct

SEQ ID NO: 231 - DNA, 363 bp, Homo sapiens
  SITE (335): n equals a,t,g, or c
tcaacaggccttgccttatgctgtagaaacagtcttttggttttttttaggagcaaccctattaattgatatatccagtcttaatgtttgttatgatagtcctgagtcatcaagaaaagattcartrtsartataataaactcaataaaatattcatcagcatccataaactatgtttcaattatcttctatatgtgaggcactacaaaatgacaacatggacagacggataccttttttaaaaaattgcccaaatgtaattatttgtaacatttcaatgtttaaagtcggtaactttagttactaggaaaattggttgtagggaacagcttctncttgccagatatggttgggttaatgagg

SEQ ID NO: 232 - DNA, 546 bp, Homo sapiens
gcaaatccagactggaaatgggaacgtcattgtgcatcasctcgaaactgggttggtggcctgctctaaacttgctgaccatgttccatcaaggaaaaaactcacttgcggctctgtacctctctgagatggggttcatgcgttaraggagttagcagcctgtttggaagacaaggggcctgagctgcatcccaggcaggatgttgatggaggggatggcgattgtctgtcaatgatgagggatgggatcccatgtgcaaagaggaccacactctcctgagaatttggggaccagggctggtgactcagggaagtgcagctaccactgttcaagggaaacacaacttgggaacacggctacccagatgcttttattcaatcctcatctttacggaatccaggacatgaaaacctaatttggttaaaaactcaactttcctgctgtgggcatcttaattcacgtgcagtatttctctttagttcatggtatcgggsctaaaaggccaatttagttcttaaggctcttcttttgcaaaaagaatagaa

SEQ ID NO: 233 - DNA, 413 bp, Homo sapiens
  SITE (401): n equals a,t,g, or c
ggcacgagggtaattgtcattcattcatttattcaccaagtatttattgggcatccactgaatgccaggctttgggctaaaccatgagatggagcaatgaataagacaatgaggcccagccacaaaatagtttatcctctagttgggggagacaggcaatgcacacacacaaaacaaacagatcagaaaggtggcaggaggccaggcgcggtggctcatgcctgtaatcccagcactttgggaggccaaggagggggaggcggggggagatcacctgaggtcaggagttcggagaccagccttggccagcttggcgaagacccgtctctattaaaaagttaaaaatttaggttgggcgtggtggtgggcactatggtcccggcttactttggggagggttnaggtgagagatt

SEQ ID NO: 234 - DNA, 128 bp, Homo sapiens
  SITE (61): n equals a,t,g, or c
aaatgttaaacgagtcctgattatgaatgataatgatgatgattttggtggttgcaatagnaaagccttaagtatgaaggagacgtgccagctggaaatacaggtagacaatgaacaactgaatttag

SEQ ID NO: 235 - DNA, 65 bp, Homo sapiens
cggatcatgtctggtggctccccggattataacagcagagaaacatggcggcccaaaggaaatgg

SEQ ID NO: 236 - DNA, 330 bp, Homo sapiens
  SITE (82): n equals a,t,g, or c
gtggtcacttttctcctctttcacatgctctatccctctatcccccacctattcatggcttttatctgccaagttatccggnctctcatcaaccttctcccctagcctactggggatatccatctgggtctgtctctggtgtattggtgtgaagtgatgtctcagggacttgtgcaagtgtattcgtgtggggtcatttctacctacttgtcttttacgtaagaaaaataatcagtgtaatgtgggtataatgtgtctagatgtataaactaaaaacttttattaccactatgtgtcctagatggtattaactaacctttttaactcccg

SEQ ID NO: 237 - DNA, 612 bp, Homo sapiens
  SITE (562): n equals a,t,g, or c
  SITE (606): n equals a,t,g, or c
ggcagagctggacaagcccttttytcttctcacgtcccacctcgatgcactgccctgggagggggccccaagaccttagactggatgcctttgctgggccatgctattctmagacctcccgccttcacccccagggccccaratcgtgtcacatccatatgaacacttggaatgtgaacagggcaggatgtgaatctttggctgtgaaagtgtttgcctaccccatggcctccatcgagtggaggaaggatggcttggacatccagctgccaggggatgacccccacatctctgtgcagtttaggggtggaccccagaggtttgaggtgactggctggctgcagatccaggctgtgcgtcccagtgatgagggcacttaccgctgccttgcccgcaatgccctgggtcaagtggaggcccctgctagcttgacagtgctcacacctgaccagctgaactctacargcatcccccagctgcgatcactaaamctggttcctgargaggaggctgagagtkaagagaatgacgattactactwagtccagaactctgggcccanggggttgggtaaccggctataatgttcatcctggtcttgaaaanaccttg

SEQ ID NO: 238 - DNA, 762 bp, Homo sapiens
  SITE (565): n equals a,t,g, or c
  SITE (744): n equals a,t,g, or c
tcgtgaaagatcggctcactggagtggtactatgaagcatgtraaagcccgcttcagaggttcggaagtgccaaggtcatccggtccctccacgggcggctgcagggtggagctgggcctgaactgatatctgaagagagaagtggagacagcgaccagacagatgaggatggagaacctggctcagaggcccaggccmcagcccagccctttggcagcaaaaaaaagcgcctcctctccgtccacgacttcgacttcgagggagactcagatgactccactcagcctcaaggtcactccctgcacctgtcctcagtccctgaggccagggacagcccacagtccctcacagatgagtcctgctcagagaaggcagcccctcacaaggctgagggcctggaggaggctgatactggggcctctgggtgccactcccatccggaagagcagccgaccagcatctcaccttccagacacggcgccctggctgagctctgcccgcctggaggctcccayaggatggccctggggactgctgctgcactcgggtcgaatgtcatcaggnaatgagcagctgcccctgcagtacttggccgatgtggacacctctgaatgaggaaagcatccggggctcacgtgaatggcctcccaccattccaagcggagaggccgggcgtcttctgagaagtcagatctttgagctgaataagcatatttcagttgtgggaatgcctgctgacctanctgggagaacacattgtg

SEQ ID NO: 239 - DNA, 191 bp, Homo sapiens
tggggagccaggagggaagtaggggatgagtccatcttccaaacggagggggaaggtctccccttttttgggctgggaacccgggggaaggcagtgggccgggcttctggaaaggtcggcctgggaaggyctgcctggggtctgggggatgttcccgtgggttagacccggcgcggcccatgtttcctcca

SEQ ID NO: 240 - DNA, 174 bp, Homo sapiens
  SITE (13): n equals a,t,g, or c
aggctcataaatncttagtgagaacacaccttctctgtttcaaacactgtgcctctgccttgggcatacaaacatgaataagaacactgtgtctgctttcctggaactttagactggcaagagaaggtggattattttagcactacattattggtcttctgatagacacatggg

SEQ ID NO: 241 - DNA, 535 bp, Homo sapiens
  SITE (535): n equals a,t,g, or c
ggcacgagcaaatgtctaatggtgagaagccgcttcaccaccctacagatccgcggtgcagagatttccctgctaaggtcctaactcctgaatgggtacggcgagtacacccgaagaatcgaaaggtacttatcccccactcagttctagaggaagcagcgaggtgggccaagatgcgtggtaaggcccagggactctttgtcaacgaagtccgttaaactttccgccctcccgggggcctcagcgggccaattccactcacttctcggaggctccggcccagcatggtcctcgtgcccagcctgccaccacaggagccaggcaagggggaaaaagaggtcaccggtcgctagtgatgttacatgggcgcagccatctttaattgtcactgagcccttcaacaccgagtacttggattggttgaattgcagcccgaggaaatgatctttgtaggcgattgsttggcgcgcaaagccatcccggcggctaaggagagcggcaggcaaggagattccgggccagggtcgtggcggcn

SEQ ID NO: 242 - DNA, 259 bp, Homo sapiens
  SITE (195): n equals a,t,g, or c
  SITE (229): n equals a,t,g, or c
ggcagagctcaaattgggtaatttgagcagagcttaataaaggcagtatttacaaagtgtgggctaagcctcccatgagagtgcagaaccctggggctagcagtgtggggcgctattcccacccctgggcctgagtggggaaggagttatctttagcagacagaggattgctggaggagtgagaggggcacctgnaaggagctgtgaacctttgcttaaaggatgcagncagttcatgggggaccctccaggggaaatt

SEQ ID NO: 243 - DNA, 641 bp, Homo sapiens
  SITE (441): n equals a,t,g, or c
  SITE (461): n equals a,t,g, or c
  SITE (500): n equals a,t,g, or c
  SITE (628): n equals a,t,g, or c
ggcacaggtttccagcagatgggggaggtgggcaagggggaagacttcaggaaaaaagtcctgtcaggctacaagagaggccacaagacgttagcacataactttgaatgaagaaggctggaggttgttctaggctgaattttcttaaagattgtaactttatgttttacccacctctcatacacacataggaactccacttcaacctgtggtaggtaaggattgggtaattgtgtctataataagattgagcataaggaaagtcttcagtacataagggagcctggaaagggaggatgctgcctcctcctccctaggccaggtgagaaaggaggaccctaaagtgtgggaaactccccccaccccatgagaaagcatcccaattttgtcacaggggcctgggatgaagtctatattactgagaatgacagtctgggtggntcttgcgtctgtgtctctgnttatctaaatttgtaggtgcatatttgactgtatcttgngtctgcttatttatatcaatgtacactgtgcatacatcctagtcatggtgatgaggtagggggaggagtgggtcaaggtaatattgatatgagattttctcacattaaaactaattttactgtcaganggtacttggccaa

SEQ ID NO: 244 - DNA, 599 bp, Homo sapiens
  SITE (100): n equals a,t,g, or c
  SITE (556): n equals a,t,g, or c
  SITE (581): n equals a,t,g, or c
gattcggcacagggctgtaatccccttgcacaaaccggccggacgtaaattgcagaatcaaagagctgctttgaatcagcagatcctgaaagccgtgcgnattgaggaccggagcggaaaaccttctgaaatggccacaaactcaaaggtgcgggacaagtgcggctggagctgagcttcgtcaactcagacctgcagatgctsaaggaagagctggaggggctgaacatctcggtgggcgtctatcagaacacagaggaggcatttacgattcccctgattcctcttggcctgaaggaaacgaaagacgtcgactttgcagtcgtcctcaaggattttatcctgggaacattacagtgaagatggctatttatatgraagatgaaattgcagatcttatggrtctgaggacaagtttgtcggacgcctagccgggatgaggccggggtgggaactgctgatgacatacttcatccagctgggctttgtcgagagtcgattcttcccgcccacacggcagatggggactcctgttccacctggtatggactctctncaccggggttccggttcagtccagncagaaacctgctgctggg

SEQ ID NO: 245 - DNA, 662 bp, Homo sapiens
  SITE (603): n equals a,t,g, or c
  SITE (604): n equals a,t,g, or c
  SITE (650): n equals a,t,g, or c
ggcacaggcagatgctgagaaaaaaaagcccaccagttttcatttccactaaaaaataaaaaaataaataaagactatatgcctttcaagactgcctagatgtagaatctatggcaaaggccattgcttctctcctgcctgtgcactagcccctgacctcccctagtccctctctccctatctctcctccccaactctgggataggatggctcaagggaggggacactaggagactccaaaataaaagcatcatcaacaccctcctctgagcccagaggcttctatgcttccagcctttgcctccttccaagtcggtttaggtctcttgcccaagcaaagtctagcctgaaggaaaaccaaaggatctcctaaaagaacaggcaggagaagcaagttcagcagagaagcttctcttgtgaggtatcctytccacttcccaccactctyccaccaggaagacaacaacagcctgacctagaaacttcctgatgatttttaacctcaagagccagctgaaccgagactcatctgtccatggccctgctgcaggtaccaccaccttcagcccttggctttgctcagccaaacctgggatcgggcanncagtggccctgtggggccccacatggagcaggattggttcaatttnctgggccacgcc

SEQ ID NO: 246 - DNA, 462 bp, Homo sapiens
  SITE (407): n equals a,t,g, or c
ggcagaggctaaggtcccaatgaccaccctctcctcgtgacagagttacagctatccagaccggctggtgctggaccagggaggagagatctttaaaaccttacactacctcagcaacctcatccagagcattaagacgcccctgggcaccaaagagaaccccgcccgggtctgcagggacctcatggactgtgagcagaagatggtggatgggtacctactgggtggatccaaaccttggctgctcctctgacaccatcgaggtctcctgcaacttcactcatggtggacagacgtgtctcaagcccatcacggcctccaaggtcgagtttgccatcagccgggtccagatgaatttcctgcacctgctaagctccgaggtgacccagcacatcaccatccactgncttaacatgaccgtgtggcaggagggcactgggcagaccccaccaagcaggccgg

SEQ ID NO: 247 - DNA, 441 bp, Homo sapiens
  SITE (416): n equals a,t,g, or c
  SITE (426): n equals a,t,g, or c
  SITE (439): n equals a,t,g, or c
  SITE (441): n equals a,t,g, or c
agactgatagcacttctaggttcctccctaataatcagacatccaaatctgtaccaatgaatgtytttratctatcttaataaaagagttgggttgggtggggggaaggaataaattaggcattccttacgcagttggwtagatcagtttccaatctatggaattcctgggggaaaagagggccttagggatagtaacagctaacaattgctaacagccttctatgttctaggtgttattctattttatatttattaactctgggttactttctaaaaccctacgggacaggttttattaatatacatatttaatggacgaggctacattgctggtaggtagcagagccaaggtttcaagcccaggcagtttgatttctgggttcataattactttattggtaataactattttgntaatagtagntaatacttatcangn

SEQ ID NO: 248 - DNA, 223 bp, Homo sapiens
  SITE (188): n equals a,t,g, or c
  SITE (219): n equals a,t,g, or c
gaccaaatggaaataaagctttttgatgcaaggcttgttaggatagttaagaaagctgcctattggctggagggrgggcccggtacccaattcgccctatagtgagtcgtattacaattcactggccgtcgttttacaacgtcgtgactgggaaaaccctggcgttacccaacttaatcgccttgcancacatccccctttcgccagctggcgtaatancgaa

SEQ ID NO: 249 - DNA, 411 bp, Homo sapiens
  SITE (401): n equals a,t,g, or c
gctgaggcccacacgtcattctgatgcccctacaagaaaagaaacacagtgagaaaactaaaccacttcctggcatattggagtttaccatgatgtgtccctgggctttttctgatgcctaagcagggtttgttatccakatgatttctggcaagatttctggcaaaatgcakaggcccaaatggcaggcctctggatgccacgggctctgacttaagggtggctgaatattgktgccctaagacacgttctcttcactaggccttttcctctagaaagcctaagcaaccagacatggttctgagtgggcctatggccacgtggccctggcccggcagtgacctgtggctctccccctgccctttaccccaccaccggcttccccccttcccggccggtgngcccacaaaa

SEQ ID NO: 250 - DNA, 400 bp, Homo sapiens
  SITE (353): n equals a,t,g, or c
  SITE (378): n equals a,t,g, or c
  SITE (381): n equals a,t,g, or c
gcagctactggaggttctgttctcaatgttgctgccctgttggcatcaggaacacaagtaacacctcagatagccatggcagctcagatggcagccctgcaagctaaagctttggcagagacaggaatagctgttcctagctactataacccagccgctgttaatccaatgaaatttgctgaacaagagaaaaaaaggaaaatgctttggcagggcaagaaagaaggggtaagttctcttattctgcttttctgtcgtttattcctaattagtaattgcttagaaaaacaaatttgggttgaaaaatattactttcggcttaactttgtwagaaactggggtgggccaaaacncgggttgggttaatgccttttaatnccnaccacttttggggaatgcc

SEQ ID NO: 251 - DNA, 284 bp, Homo sapiens
  SITE (250): n equals a,t,g, or c
gctcatctgtgcatggatgagtggccgactttggagcccaggctgttacttcctggtctggtggtgaatcctccatastctggtgagtgcagtgtccaactctggggcccaggctgttgcttctcagtctggcaatgaatcctccatartctgagartaaratccttgaatactggctcagsatggaaacatctggcacacagtatgcactgaggaaaatacttgttggaaataatcagtgaaatcatanatgaaaaacttaaaccctttggggaatttaaaat

SEQ ID NO: 252 - DNA, 381 bp, Homo sapiens
aatgattttaggacatgctagagctagatataccaaaagttctttcatgctaaaactttggaaagacttactctccttaagttcagataaatgaaagacataaggagagagggcatttggagactctgtatgctggtatgagagttaataagcaggactgtaaagcatctgttagacaagacaccgcaggagttgggctcctgttgacttgccatttattggctgatttgtcttgggacaggcgctgaacatctcatccatagtttcctgctctgtgaaatagagcatctgttctacagacacattatgaagagccagtgagactgtacagaaatgctgaaaatgtgaggcatccactatgttcatcctccagaggaacca

SEQ ID NO: 253 - DNA, 646 bp, Homo sapiens
  SITE (214): n equals a,t,g, or c
  SITE (281): n equals a,t,g, or c
  SITE (348): n equals a,t,g, or c
  SITE (384): n equals a,t,g, or c
  SITE (516): n equals a,t,g, or c
  SITE (529): n equals a,t,g, or c
gtgggtgccgggcaggtgaggaggggccctggctcttgcgagattccaccgcgggtacgcggcggcccccgatgtgacaccgacggtgctgggggtaaggggggtgttgggggtgcagagtgtggcccaaaagtgtgccctaaaggcagatcagatatggtgcccaagttaargactctagtctgacctttmtaccacctgcatgcctacctangtatggcctaaaggcgggagaaatgtgtgcctttgcagaacaggtggctctgagacctctgaaagangtgacttacacttaagattttcacaactcgtgggcgtgaattttcattaaaaagcctcacttactantgaaggatcgtatatatgtaataaaacaggtctaanaagtatacaattctaaggtaaaaataattacatatatattaaaataccccatttctttttaaaggtcttataaaaatttaataagttaatgttctatatttcactcacgcaacaactacaatatttattgancacttactatgtnccaagcactgaaactaagcacaaaaaatacctgggtgacttcatatttccttggtgggatccacaggaaaaaaaaaattttaaaaattgttgggggcctattacatctaaggctgtt

SEQ ID NO: 254 - DNA, 166 bp, Homo sapiens
  SITE (135): n equals a,t,g, or c
gctgtttctttgcagtacaacgtgggcaagcatctgtgcatatgaaatgctgtttttctaaaagatttctcacattggcaaactgagagattttcttctggaacacaggaaagattatattaatgcttatagccntaccatgtctgaatatgggaggatgacagac

SEQ ID NO: 255 - DNA, 665 bp, Homo sapiens
  SITE (606): n equals a,t,g, or c
  SITE (628): n equals a,t,g, or c
  SITE (665): n equals a,t,g, or c
gctggatttgacctttggcctgaggctgtgccttacttgaagaaacttttgctgatggagaggctgggaatggtgaataattttgttttctaagctagcaaatgttaggtgaatacatttccttaaagagaactggacagttcctttctctcttcctgtaccttatcatgggcagataaacacaccagtccagttgacaaggcagaatttgttctggaaatttccttagccaaatttacaaatttatttaggtttacgttctaccttccgtaagacctcctgtggcagcgttgccaaactttctgctacacagcattagtcccctttctctcgccttcagtagcacttgcctatctatcttccattcacagcctccctcagcaataaccaggccacccttcacgcctccaaccaaagccacatgtccaccagcaccccacttccaggtactggtgtgcatttcatttctctattgctgcccactaagccacccccaaacccactgagggtttaacgtgacaatttattatttctcacacgtctgggarttgactgggctyarctgggtggktctggttttgcagktacctgcacctgggaactyancaraaggctggagcttyccaanaatggcctttcatyccgcaagggctytycctggcatn

SEQ ID NO: 256 - DNA, 651 bp, Homo sapiens
  SITE (140): n equals a,t,g, or c
agaagaggtctcacactattgcccaggctggtctcaaactcccgagctcaagcaatcctcctgcctcggtctcccaaagtgttaggattacaggcgtgagccactgcactcggcctccttcaagtatttttaaattaatntctttttttctgttcaaatttagtgtacatgttccccccaagagttgtaatgaaactaaaactgtcttttgcttttgatgcctttgttcaatatgaaaagcctgaataaatggctggatgtcttcatcttcaaatttaaaaaatgattcaagtatatattattgagttttattagaatggaaagctcttaatttcttgattgtaatagcagtcatgcaagtcacaaatcatgataaaagttaattttgtcaagtgcttttctatatcttgtttgactttaatatttttgktttacataggtctctaattaacagaagatggcaaagcccagccacagcagctatgtccttcagcagctaaacaaccaaagagaatggggttttctctgtgactgctgwattgcaattgatgacattactttcagcacacaaggcagtctagctgctgtagctcctattttagaatgttttcatgaaacccatcagccatagtactgcacaactgaatctca

SEQ ID NO: 257 - DNA, 494 bp, Homo sapiens
  SITE (458): n equals a,t,g, or c
  SITE (493): n equals a,t,g, or c
  SITE (494): n equals a,t,g, or c
gccacattgtcttccccagaagctcaaactggatgcccagccctcagtgtacaaactcaagtatgcaagaaatacatctttattcttttatgaatatacctaatttatatgttggaaggtgtcagcaatgaatttgatcactttggtatttctctacctttaaagatatgtttacatttggggtgggatgaaggtttggtggaggggaaggtggtcaggttgggccaaggyattgggaaatccatttgttcctcatgtcagctgtttgaggaggcaccaacccagatgtccacagttccttctggccttcctttaccgatactgatgcacctgtgcctccttcctgtgtgcatggcccatttgtgcccagcatctccctgctattttggggccactccagggtctgggaagttctgtaggcttataacatacagtcattcttctccccagcttgctgnctcctgagacacagaggtagagaagtaggaaaggnn

SEQ ID NO: 258 - DNA, 614 bp, Homo sapiens
  SITE (373): n equals a,t,g, or c
  SITE (430): n equals a,t,g, or c
  SITE (458): n equals a,t,g, or c
  SITE (517): n equals a,t,g, or c
  SITE (527): n equals a,t,g, or c
gcaggcttttcctgtaaataaacctgtttggccgtggaattgcctcctgttactcgctctctacgtttatatcttcctaacaccttccggctctaatgttttgggtctcgatgaccatctaactcctaaatgctgggggccgctccccatagaaatgcctcgccggatttctccgcctcgcacccagtgggactgggatttttggccccggggtttgcaataagggagtcaccaagcagcagccacctctggaattcctagaaaggaaagagttgcctggcttcagccagtgggctcagaacggctgacgcatttccggcctttgcggttgatcggtcattggggtgctgcagccccgccacctgttccgtancttgccggtgccccgaaggtgagtcttggccccttgtcgcgaccgccaggttcccanaagatttcaggtctgtgccttggagtangcggggagggaacgtctgcgcaggcgtgaccccgcccctacacattcactggcctgaanccccgtggantaggtggaggtcccgccccttatcctgaaaattaaacagctttctttgtctgaaataacgcccggaatttctttgtcctgcctccaa

SEQ ID NO: 259 - DNA, 505 bp, Homo sapiens
  SITE (485): n equals a,t,g, or c
ggtagaatgttggagtgcttgttcatgggcaccataatgctactatgatcagcatttggatgaasagggactatatwgacatattakagttaatatttgattgatttataatagatagggtatagtatttgatcatctgatttttaccttgttctgaattatctacctgtagtcatctgacaatcaaatmactccccatcaacttatcaatatttggctctatcctatctctgcagtttggtcctctgtcatagtctctaatgtcaagttacccatacactccatgattcaacaagccctgaaaatttatagaactctactttttagcacttgtgaccatttcaccttttcaaccaaagtgacttgtcagtgttacaactttgtcattttgacatgtagcttgcaaaggcaatggattcccatcttggtttcttaaagtgtagatgttcaaaaatatgccagatactctaaattatggtgtctgntaaatgggaacttctcaaag

SEQ ID NO: 260 - DNA, 558 bp, Homo sapiens
gccaaagtctaatccttttgtttgagaaagtatagtttcaaccaatatatttattagtctcttggggagaagccagatttatagcattccattttgttttactcacaataaatgcatgaacatgtactgttttatcaatcttttttttcgggcgcatggcctggacattgactcagtggactctcatttattagtgagaaaactaattggaggatatatggagatgcagaactcagtagaaagccagaacatttatttggatgggatcttattctaatctgaggtagcatcatcaagaagaaataaagatctacataagttgctccaggagggggctaaacctgtcatttggctattgygatttcatcaaattgatcactgkaactgtcawctttgkcttgaaagcatctgccactaacaaaggctgtccccttggaaaactatarctctcagtgaatgaaagttattcagcacactgaataaattggctcctgcatgagacagcatttgataattcacacttttatggggaatattgaaagggaaattctacatgac

SEQ ID NO: 261 - DNA, 415 bp, Homo sapiens
  SITE (370): n equals a,t,g, or c
  SITE (388): n equals a,t,g, or c
  SITE (404): n equals a,t,g, or c
tttatgttaatgagagaatttagcctccactcaacaatgttcaattcagcaaggctttcatatccttgctgtgggtcgtggataaggagcttattcaggtttcctgccctagctattarctccacttcacatgctggagactggcgtagggacagatgtattcatcctggtgttactgaaaaacaggtgtgatcctgttagtgatactataagtgacctaaaatgtcactgttcaaattagcaagtgttctaacaaactaaactcttcaaatgcttggaaagatactacaaagccaatctttatagaattgggccaagataaatctatgttgatttgcatggctattggtaagcttcaaaggttcactgngtttctgccgctgtctgnagttgtcaccattgantggcaaggctt

SEQ ID NO: 262 - DNA, 862 bp, Homo sapiens
  SITE (735): n equals a,t,g, or c
  SITE (777): n equals a,t,g, or c
  SITE (810): n equals a,t,g, or c
  SITE (840): n equals a,t,g, or c
gcacgagggagtgccatcagctggcctatgctgatgaagccaagaagcgctctaacccatatgtgaagacttaccttctgcctgacaagtcccgccaaggaaaaagaaaaaccagcatcaagcgggacactgttaatccactatatgatgagacgctgaggtatgagatcccagaatctctcctggcccagaggaccctgcagttctcagtttggcatcatggtcgttttggcagaaacactttccttggagaggcagagatccagatggattcctggaagcttgataagaaactggatcattgcctccctttacatggaaagatcagtgctgagtccccgactggcttgccatcacacaaaggcgagttggtggtttcattgaaatacatcccagcctccaaaacccctgttggaggtgaccggaaaaagagtaaaggtggggaagggggagagctccaggtgtggatcaaagaagccaagaacttgacggctgccaaagcaggagggacttcagacagctttgtcaagggatacctccttcccatgaggaacaaggccagtaaacgtaaaactcctgtgatgaagaagaccctgaatcctcactacaaccatacatttgtctacaatggtgtgaggctggaagatctacagcatatgtgcctggaactgactgtgtgggacccgggagcccctggccagcaatgacttcctgggaaggggtcaggcttggtgntggcactgggatcaggaattgggggaagtggtggactggatngactcgactgggggaagaattgagcctgtgcanaagatgcgacagtccccagggcttgggcanaaggactttggagctccgtcct

SEQ ID NO: 263 - DNA, 617 bp, Homo sapiens
  SITE (518): n equals a,t,g, or c
  SITE (528): n equals a,t,g, or c
  SITE (585): n equals a,t,g, or c
gcccaggttcaagtgattctcctgcctcagcctaccaagtagctgggattacaggtgtgtggcaccatgcccagctaatttttgtatttttagtagagacggcatttcaccatgttggccaggctggtctcgaactcctgacctcaggtgatgcacctgcctcggcctcctaaagtgctgggattacaggcatgagccaccgcacccggcctgccagtgtctttttaatacacatgtgtgttggtatttttaaattgttacagtatctagcatattgcttactctgaatattcagtactttttgaataagcaaatattgcttccttgcttggaatcatcagagtttaaagtagcttcgtggatggaccatgatcctaagatgagttttaattttgtgtttacagtcatcycttgtacaacgtggagaagaaaagatatacttactactttgcttcaggtacacataagaaaacctcttttttaaaaaaatttttatttttttacataatagagacagnggctcgctgnagcttcaggctggcctcaaactcctgggctcaagcaatccttcctgtcttggcctcncaaagtgtcgggatttcaggtatgagacaccg

SEQ ID NO: 264 - DNA, 663 bp, Homo sapiens
  SITE (627): n equals a,t,g, or c
  SITE (635): n equals a,t,g, or c
gcccgaatctctttatgtgtcatgcattgggattgaagtccagtgaacagcgagaatttgtaatggcagctgggacagcaaataccatgcacttattgattaagtaccaaaaacttctgtggacaattcccaagtttattgtaaaccaagtgaggaagcaaaacacggaaaatcataaaaaggataaaagagccatgaagaaattgctgaagaaaatggcttatgaccgagaaaaatatgaaaagcaagataagagtacaaatgattggggttgcccagactctcaagaaaggagaagtttttttgtatgaaattggaggaaatattggggaacgctgccttgatgatgacacttacatgaaggatttatatcagcttaacccaaatgctgagtgggttataaagtcaaagccattgtagaagacttaacaagctgcagataaccatgtggacttctgtcataattcttgctgagtcaagagtgtaaataaaagaaatggcaggactcatattattcagttgtacccaagtatttaaaaatgactctcttaagccttaaaargtcatagatttggctgctgscagaattatattaaatattaataatggtaatattagaaaaaaaanttctggangtgagagtaaagaggctttaattagttg

SEQ ID NO: 265 - DNA, 732 bp, Homo sapiens
  SITE (688): n equals a,t,g, or c
gaaagtctgggcttatctctgcttgcattggttttcattaaggaaagactccatactgaatgaatgaatgcttttcacaacaaagggaggtatggatttattcccaaaggaatattccttgtgtgtgtgtgtttgtgtgtgtgtgagacaaatttccctctctatttctctcactatcttcagagctgaaaaatacagccttttcatctctctcatgatttggacattgtatttgtttttcttttaattattcttagtttataatttctgtgccaatagtactttcttttttggtttctttgtggatatttgtgttttaaaatcctgatttgctttggaagattattttaatcaggaaggcttttcaaaatagctggttcaataccattttgccagaactgatatcaacctgctttcaggtattgcataatcaatgctggctgataattttagatctgatttattcttctttggaagargtaatttattcttctttggaagaggtaatcaagaraggargtgaarattaggagggtgaaracccagtggartctttccttgacgaaaattaatgcaggcggggctkarcctaractttcttcaacttgtatggtaaggatcaatacctctcttccatgctttgtgcccccattctgatgtgtgaataaatatattatattatataatnatatatggtttaatttcactctttgaaggggtggatctggaagt

SEQ ID NO: 266 - DNA, 316 bp, Homo sapiens
  SITE (257): n equals a,t,g, or c
  SITE (291): n equals a,t,g, or c
gtgggtgccgggcaggtgaggaggggccctggctcttgcgagattccaccgcgggtacgcggcggcccccgatgtgacaccgacggtgctgggggtaaggggggtgttgggggtgcakartgtggmccaaaagtgtgccctacctaggtatggcctaaaggcgggagaaatgtgtgcctttgcagaacaggtggctctgagacctctgaaagaggtgacttacacttaagattttcacaactcgtgggcgtgaattntcattaaaaagcctcacttactagtgaaggatcntatatatgtaataaaacaggtctaa

SEQ ID NO: 267 - DNA, 212 bp, Homo sapiens
ccagggcgcagggccgcgcgtccagccccagacccgccggggtccctggggacgcgccagcccggcagtggctcgacgatggaggagccgcagcgcgcccgctcgcacacagtcaccaccaccgccagctccttcgcagagaacttctccaccagcagcagcagcttcgcctacgaccgggagttcctccgcaccctgcccggcttcctcat

SEQ ID NO: 268 - DNA, 744 bp, Homo sapiens
  SITE (597): n equals a,t,g, or c
  SITE (614): n equals a,t,g, or c
  SITE (639): n equals a,t,g, or c
  SITE (655): n equals a,t,g, or c
  SITE (712): n equals a,t,g, or c
  SITE (736): n equals a,t,g, or c
gggaagttttcaggcatgggaacaaggtgatctgatgcaggttttaaaaagatacatggctgcagcatgaaaaataactcacggttatcttttacatttagccctatgatctatttcaaaataatgttgtatatgacaggagcagtgttctacagctttcagtgtacaggtcttacatgtatttcgtcaacgttatctgaactcctcgactgtgtcctctccctattcctctcccaaaggaagagaggaatgatcaccaagagcaaatgaacggccagttgcagtgaagcaacaccggttccatgctcaggagagaatgctgcgcctcctcgtggtttcctgtgccctaaatgttcagagaagcttctctagaaatgacctatagacatgatccctgaaaatacagtcttaatcttcttcttttcaccggcctggtggtactcagatcaaggactacagacaccagacaggcctgaggtcacttggcttatgaacaacagagctgggacctgaaggcagggatcctaacgccaggccaatgctgtccaccacatyctgctgcttgcatctccttcttcaaagagctcgaatcactgnctagcatgcaaacaganggatgtaatgtggcaagactgctgnaactgcaaagctatgntggcctttggaggaaaagggtccttggctaaactctttggcttgcgacagattggcntttggaaccggatgcacatggtgnttctaagc

SEQ ID NO: 269 - DNA, 488 bp, Homo sapiens
  SITE (393): n equals a,t,g, or c
  SITE (467): n equals a,t,g, or c
gccggtgcctctgggagacaaggtccctccaggtgagggctgtgaccctgcagggtggcattgggagctgcccaggtcccctggggttgccgagtggcttggagagtccccgccactgtcccccttcctggggacctctcatctgggcagtgactgtctcctctgtccccagtcccacccctgagctctcatccattctcaagtctcctctcctgcttgtccggtgctgggctatggccatctcttctgtccccggccccaccccagagctctggtccactcttgggtctctccccttgtcctggtgctgggcagtggccatctcctctgtccccagccccacccccgagctctgatccactctcaggcctctccccctgtcctggtgctggnccgtggtcgtctcctttcggcatctgctccctgcagggccgtgccgctgccccacgtcggctacctgccacctnaactgcaggtaggaattctga

SEQ ID NO: 270 - DNA, 694 bp, Homo sapiens
  SITE (657): n equals a,t,g, or c
  SITE (675): n equals a,t,g, or c
  SITE (680): n equals a,t,g, or c
ccatgcagagtctgagaacttcgccttctggcaagatatgaagtggaagaacaagttctggggcaaatccctggagattgtgcctgtgggaacagtsaacgtcagcctgcccaggtttggggaccactttragtggaacaaggtgacatcctgcattcacaatgtcctgagtggtcagcgctggatcgagcactatggggaggtgctcatcsgaaacacacaggacagctcctgccactgcaagatcaccttctgcaaggccaagtactggagttccaatgtccacgaggtgcagggcgctgtgctcagtcggagtggccgtgtcctccaccgactctttgggaagtggcacgaggggctgtaccggggacccacgccaggtggccagtgcatctggaaacccaactcaatgccccccgaccatgagcgaaacttcggcttcacccagtttgccttggagctgaatgagctgacagcagagctgaaacggtcgctgccttccaccgacacgagactccggccagaccagaggtacctggaggaggggaacatacaggccgctgaggcccagaagagaaggatcgagcagctgcagcgagacaggcgcaaagtcatggaggaaaacacatcgtacaccaagctcgcttcttcagcggnagacagatagcaacgggnaaaantggtgggtgaccaa

SEQ ID NO: 271 - DNA, 321 bp, Homo sapiens
gaactgcttggttcaggactgctgcttcagatgatctggctcttgtaatttgagtaatgctagctcctataatcaatgaactgcatatcagcggtggcttaatccagaaraaatttctttctttctcacatgatgtttttggtcagtaggtgactctcctgtcatgtgccaaggttcccttcctctcaggctctaccatattcaacttggatcttaaaaagtcacacttgagatcatctctattcttttcatactgaagtgggaaaaaacatggaagattgtgcatgggagattttagtgcttgyctgaatgtggtgcaca

SEQ ID NO: 272 - DNA, 622 bp, Homo sapiens
  SITE (619): n equals a,t,g, or c
gccagccttctggccctaagggcctagagccaccagaagaagagaagaatccctacaaagaagtgtacacggacatgtgggtggaacctgaggcagctgcctacgcaccacctycaccagccaaaaagccccggaagagcacagcggagaagcccaaggtcaaggagattattgatgagcgcacaagagagcggctggtgtacgaggtgcggcagaagtgccggaacattgaggacatctgcatctcctgtgggagcctcaatgttaccctggaacaccccctcttcgttggaggaatgtgccaaaactgcaagaactgctttctggagtgtgcgtaccagtacgacgacgacggctaccagtcctactgcaccatctgctgtgggggccgtgaggtgctcatgtgcggaaacaacaactgctgcaggtgcttttgcgtggagtgtgtggacctcttggtggggccgggggctggcaagcagscattaaggaaagaccctggaactgctacatgtgcggcacaagggtacctacggctgctgcggcggcaraggatggcctccggttcarargtctttgtataccacgacaggaattggacctcaagggtaaccactgncca

SEQ ID NO: 273 - DNA, 1387 bp, Homo sapiens
  SITE (624): n equals a,t,g, or c
  SITE (1384): n equals a,t,g, or c
gctccccagcgcagcagcccggctgtgggcctgcggcagccgggtcttcctggtccccacctcctggggccgacgggcggcaggaaggggctcggcgggacgcgccgtcagggacctgaggaggaacaacggaacgcgttcggaacggcctggactcccgagactcacccgactcgtggccacaccgggagaactgaagcggcagtagccggcggagacgcccgacccgaaggccggctgctagggagcagacagctgaaccgcttgccagacgccgaaacccagtgacgccctccaccgctccaccgtgctcccggctccccgcccccgccgccgcgggccccaaggcgcatgcgccgcctgtcctggaggggcccatttccgtccgtcgtggggggaggcacagtgagtccactggggcacggcagcgtctaagccacaagccgactgacataagccaggtcctaacggagcctatgtgtaagtccactactggtgcaaggttgcacacttctaagaagagcggcgtggggggctcggcgaccttcgcttcagtcgctcccccgtgcagtcccctgtgcccaagacacagcctgatgcttgtgctccggtgggcggacttgngaggcggcgggaactgcaattggtggctttgaaggcgcggcgaggggaacagctcttgaggagtgagactgcaggagatgtgggccgtgccaaagagatggatgagactgttgctgagttcatcaagaggaccatcttgaaaatccccatgaatgaactgacaacaatcctgaaggcctgggattttttgtctgaaaatcaactgcagactgtaaatttccgacagagaaaggaatctgtagttcagcacttgatccatctgtgtgaggaaaagcgtgcaagtatcagtgatgctgccctgttagacatcatttatatgcaatttcatcagcaccagaaagtttgggatgtttttcagatgagtaaaggaccaggtgaagatgttgacctttttgatatgaaacaatttaaaaattcgttcaagaaaattcttcagagagcattaaaaaatgtgacagtcagcttcagagaaactgaggagaatgcagtctggattcgaattgcctggggaacacagtacacaaagccaaaccagtacaaacctacctacgtggtgtactactcccagactccgtacgccttcacgtcctcctccatgctgaggcgcaatacaccgcttctgggtcaggagttagaagctactgggaaaatctacctccgacaagaggagatcattttagatattaccgaaatgaagaaagcttgcaattagtgaacatgaaaggaaaataaaaattcctcacagtcaaaaaaaaaaaanaaa

SEQ ID NO: 274 - DNA, 263 bp, Homo sapiens
  SITE (183): n equals a,t,g, or c
  SITE (218): n equals a,t,g, or c
aaacattgcttctgaaccagccaaccttctgctcctgaagaatatctctgctatgggcctgtactgtggtcaatacaaagatatgaactttcccgtcttctccaagagcctatcttcagtgcttcagtactgccagcaagggtgcatccagctatatgtcagaatggttttcaagctggacgnggtcaatgatgccttccttcatgtgatacaggggnaatccgtgggcaaggtgcttctcgctcttaaataaatccttgcct

SEQ ID NO: 275 - DNA, 443 bp, Homo sapiens
  SITE (436): n equals a,t,g, or c
  SITE (440): n equals a,t,g, or c
gcctaaatggccaccctcaattggtgaaaacttccaaggtagagacagtactcaatcaatagaattctcattgtttcttctctgtccacagctccccacagcccttataacacaaggcagacactaaatcactgcataaaagtggaaagaatcaaaggctgaatctccatcctgttatcttctctactcaaagcttctgtggacatgcacgtgtgtcttctggttttcctgcccccttgatgaaggacaaatggtgtttccattgctcattgtgttcaaggaaggagggcttagttctgcragtttctggggtttaatttgatgaattcatctgctcattgcttactgattagaaatttctgtcacattgtaggatagcagagagttcaagawtattgggactattagcatatcaattttggtccatttaaaatgntatnaaa

SEQ ID NO: 276 - DNA, 306 bp, Homo sapiens
  SITE (3): n equals a,t,g, or c
  SITE (262): n equals a,t,g, or c
tgngttggccctgggaatggggaaccgcgggtggccttccggaagggttttcggcagtggcatccggggccgggggtcgcggccgtggracgggggccgggkgccgaggccgcggaacttcgcggaggscaaggccgagggataaaggaagtggaatgcccggtcacccaagtttggggccgctttgggtcaaagggacatkgaaagattcmaagttcccytgggaagggaagattcttattcttctttcttccccttgggnccaatttaaaagggaaattccagtaggattccattttggatttt

SEQ ID NO: 277 - DNA, 412 bp, Homo sapiens
  SITE (273): n equals a,t,g, or c
  SITE (372): n equals a,t,g, or c
  SITE (384): n equals a,t,g, or c
  SITE (388): n equals a,t,g, or c
caggggtcggcgccgggtgagagcgtgcggccgggtaagggcgtstkccrgattcaccacaacatggcaaatctttttataaggaaaatggtgaaccctctgctctatctcagtcgtcacacggtgaagcctcgarccctctccacatttctatttggatccattcgargtgcarcccccgtggctgtggaacccggggcarcartgcgctcacttctctcacccggcctcctggccccatctgctgcctgcgctggggttcaaaaacaagantgtccttaagaagcgctgcaaggactgttaactggttgaagaggcgggtccgtggtaagttctaatgtaaaaaccatccgaggcacaagcagagacagntttagacctttncctnccaaattcaaggaaaaattcgtca

SEQ ID NO: 278 - DNA, 671 bp, Homo sapiens
  SITE (3): n equals a,t,g, or c
  SITE (162): n equals a,t,g, or c
  SITE (671): n equals a,t,g, or c
aangtacgcctgcaggtaccggtccggaaattcccgggtcgacccacgcgtccgcataagtttaagtccttacagacaggctgacacaggcttgtctggcctgaggatattctgtgctgaggggtgtttctccacccctgtgatggatttgctacttctcanagactgtgcaggcacaacttctctgggacctgcacaaggaaatttctcctgtctccccaacccccaggtcattcctgtcccaatcagctgctctactactgatgacattaaagatgccttcattacccaggcacaggagcagcagatagagctgttggaaatcccagagcactctgacatcaagcagattgcacagccaggagcagcatatttttatgttgaacttgacacaggagaaaagcttttccacagaattaaaaagaattttcctttgcagtttggaagggaggtcctggccagtgaagccatccttaatgttcctgataagtctgactggaggcagtgtcagatcagcaaggaagacgaggagaccctggctcgccgcttccggaaagactttgagccctatgactttactctggatgactaaaacaaagggaagaactttttatgaactccacaggaagtagtaaagctttttttttttttaattaaaagaattttttttn

SEQ ID NO: 279 - DNA, 252 bp, Homo sapiens
  SITE (218): n equals a,t,g, or c
  SITE (244): n equals a,t,g, or c
ggcacgagcttggaacagagtttattttccatcactgtaaaacattctcagtgaggttactggcattaaaaaggtgggagaaatggaagaaaatggggttgaagaaaaaaaaagcctttgctcttgacagctaggcagccacagcggaggccgccaagctgcragggcagcgtatgggggcagagcccggttctggcggcacaggccccggagtgganggggcaagggaaggtctctgtaagtnggaaaagg

SEQ ID NO: 280 - DNA, 367 bp, Homo sapiens
ggcaaaagtgtccatgggcctctacctcccactgtggaattacacattcctacagccagtgggctccgggaacccaatggcagcatccccaggcccctgggcccactccacacatcacaggctagagacttcttgtctgcctcctttctcacgtctctccccctgagatagcatgctctcccctccctccttccctctcataatttgttcccaacaggtagctttgtgcagttactccaagagaagcccgaaytccctggggagcctctgcccargtggaaragtctcgaktggcwatattaggggtgattgctgggaagctggttgccatggcaacgcagaggccagtgctgaaatcccaagctgc

SEQ ID NO: 281 - DNA, 296 bp, Homo sapiens
ccgtttgccatctgtaactaaattctcatggtcatgagcataaacttacatgtaaatttcttttattagaatgccatgcctgcttatgttatgcatgtattttataataatttaatctattttacaattttaaactcaaatatgatttagtattatgcacataatacaaacagtagtggtgagcaaacgtgtgtttcccccacatgtgcagaatatgatggattttatgaaaataaatattcttaactccaggaaatatgatctatatggttccttaaaagattttccaatacact

SEQ ID NO: 282 - DNA, 1726 bp, Homo sapiens
  SITE (1618): n equals a,t,g, or c
  SITE (1683): n equals a,t,g, or c
agccgscacacccagccaatgtgccgaagaaagaaagaaaaacatgctcatcctttgagtcaggttcaaattttttctcctctttaacccccagtcactccagttataagtgatttttaactcttctcacactttaatgcatctggcaagaagatccacgtggtgttaggaacaatacaggaccttaaggatgggggaatcagcaggtgtcagcgtgccctgtatgctcagggcagctgtttccactggacattctccctttgcctctctgggcagcaactcctaggccagccgacctgctgtgtcgagtaaccaggatttctcaatcttggcatggttgccattttggaccagatcgttctttgttgtgggggctgccctgtacggcaaagaatgccgagcagcacttccagtctccacccacaggrcgccagtagcaccctctaagttgtgagaactcaaaatgtccccagaggatgccagatgtcccctggggtggggacacaatcaccccaggttgagatccatggagccaggtctgtttgccaccaaggggtaaagctccattcccaccttaggagggctaggaggcagcatcgtggggccacagaaggcctgggtttgcagtcagaggacaggatgcacattccttcaagatacagacccagattgttgggcatctagttcttgggttttctgttgttgctgttccgttttgtctgtcttccctcctttgtttactagcagcctggaatttgccactttttctaaacgaagatttatggaacacttaccacacggctgacgctgcgcaggctaaggttctaatacaccgcagctcacttaactctcgcaataccataaacgcacactgtttcatcttgaccctttcttgggaaggtgacagagaggtaggagggcaaacatcttgtgtgccccgtcccaagggtattactggtggaataatatccgccccccaccccagtttctaatttgctgtaggctgtgacgctgtggggcaagactaggagtcctgttgaaattaggaataagtgtgctgtgagggaagggctgccttattttagagcacagattttctgaatatctattttgacaggttcgatcctctccccttcctgccttccttctgtcgattttcaatgtcttgatggtgtcccacctgagtggcctttagagatgtgagttgtgaggcactggggaggcaggcacacgtcctccagcccaagactgcctaatttaacagggatttctgcattctggaacaagcctccattttccccaagcaggattactccagagggcaaaacacagcccaatagtatcacatttcctttctgctttagcaaaaataaccactgtctcattcatgggaaaaggccgccaaacaaatttgttactggaaccatttgtaacaacttctagtttgcactgccttggagcaagcacactttgtagaggagggatttgcagttacttgggcaacaaggtaaccactgatcattacaggaagcttcagaaaccgtgggaccagtgtagaagaatggagtatctgtccaaactaagaataaaaagaatgacacttgtattttgtatgttnttttcactttgcctttctaagtaattcatttttcttgatatttacaccttgtggccccgtgatanactggaaatctcaaaaacacacgttcagcaccaagattttcaa

SEQ ID NO: 283 - DNA, 960 bp, Homo sapiens
  SITE (890): n equals a,t,g, or c
  SITE (918): n equals a,t,g, or c
  SITE (940): n equals a,t,g, or c
gtgacactatagaaggtacgcctgcaggtaccggtccggaattcccgggtcgacccacgcgtccggtcgattcaccaatgcctccccagtaactggactggaacttgtaccataggctatgtaaccccagacatcttcatagcccctggcaatctctctcttccaataccaatctatgggaattccccgttgcccagggtgaggagggcaatccatttcattccccttctcgcgggactcggcattctagctggtacgggaaccggaattgctggaatcacaaaagcttccctcacctatagccagctctcaaaggaaatagccaacaacattgacaccatggctaaagccttaacgaccatgcaagaacaaatcgactctttagcagccgtagtccttcaaaatcgtcgaggactagacatgttaacggcagcacagggaggaatttgtttggccttagatgaaaaatgttgcttttgggtaaatcaatcaggaaamgtacaagacaacatcagacaactcctaaatcaagcctccagtttacgggaacgagccactcagggttggttaaattgggaaggaacttggaaatggktctcttgggttcttccccttacaggcccacttgktagtctcctacttttgctcctttttggtccatgtctcctaaatctaataacccaatttgtctcctctcgccttcaggccataaagctccagacgaatctcagtgcaggacgccatcctcgcaatattcaagagtcacccttctaaggaggacccctagactgctcgstagtgggaacagacagaggcgaaatcctgccccgtyttcccgtgggacckggstggatatggtttwwgrccaatccacagagccatcctggccntgtacagctaggcaagagggccaagganccacaggaacaaccattacagncccttttgttcaggcaggga

SEQ ID NO: 284 - DNA, 883 bp, Homo sapiens
aattgctttattgatgtttcaacaggcacttattcaaataagttatatatttgaaaacagccatggtaagcatccttggcttctcacmcattcctcatgtggcatgctttctagactttaaaatgaggtaccctgaatagcactaagtgctctgtaagctcaaggaatctgtgcagtgctacaaagcccacaggcagagaaagaactcctcaagtgcttgtggtcagagactaggttccatatgaggcacacctatgatgaaggtcttcacctccagaaggtgacactgttcagagatcctcatttcctgsagagtgggagaaaatccctcctttgggraatcccttttcccagcagcagagcccacctcattgcttagtgatcatttggaaggcactgagagccttcaggggctgacagcagagaaatgaaaatgagtacagttcagatggtggaagaagcatggcagtgacatcttccatgctctttttctcagtgtctgcaactccaaagatcaaggccataacccaggagaccatcaacggaagattagttctttgtcaagtgaatgaaatccaaaagcacgcatgagaccaatgaaagtttccgcctgttgtaaaatctattttcccccaaggaaagtccttgcacagacaccagtgagtgagttctaaaagatacccttggaattatcagactcagaaacttttattttttttttctgtaacagtctcaccagacttctcataatgctcttaatatattgcacttttctaatcaaagtgcgagtttwtgrgggtaaagctctactttcctactgcagccttcagattctcatcattttgcatctattttgtagccaatacaactccgcactagcaaa

SEQ ID NO: 285 - DNA, 381 bp, Homo sapiens
  SITE (320): n equals a,t,g, or c
  SITE (345): n equals a,t,g, or c
  SITE (369): n equals a,t,g, or c
ctttacataatacaatatcttgataaattcattacttaatgaaaaccaaaaggggaaacggggagggagatgtaaagccgttaaatgatcatgcttcttattgttttctagcaatcatctggaaatccatcttctattgcatcagaaacaaaacccaagggacaataaggactgtgtttttttgtcggttttttttttttttttttttgagacagagtctcgctctgttgcccaggctggaatgcaatggcgtgatctcggctcactgcaacctccgcctcttggggtcaagcgatctcctgcctcagcctcccgaatantgggacataggtgtgcgccacaagnccagcaattttggatttttaaaanaggggggggtcc

SEQ ID NO: 286 - DNA, 565 bp, Homo sapiens
  SITE (112): n equals a,t,g, or c
  SITE (522): n equals a,t,g, or c
  SITE (537): n equals a,t,g, or c
  SITE (542): n equals a,t,g, or c
  SITE (560): n equals a,t,g, or c
ctggagaaaaaccctgttggtctgaagaagatagtaaaaggttcattatggttcagctctggtcacccaccagagaatccacactggagagcagcaccattatgaacgtatntgtgagggaaggcctttatttggaagctagcacttaccaatcatcagaatacccatgctggagagaaaatttataaatgtaaaaatgtaaaaaagctcaatcttatacatcagaaaatccacactggaacaaaactgtatgcatatgaccatagggaagctaacagtgttagctcattgcttaaagggcatcaagattcccgcatggggaaaagcyctttgtaaattatgtgggaaaaccttcagtcaaagttcagatcttatccagcatcagagtccacactagatagaagctttatgacttggacaaatgtaagaaaacattttgatgaactccatctttactaagcaacaaagggtacccaccaaaatggacctcataatccatatgtggagagagatagtagaggnttttccatgcaccgncatgnttagggaagcccttaatngaggg

SEQ ID NO: 287 - DNA, 408 bp, Homo sapiens
tgaatagttacatatcacaagtatgtagttcatgtttgtgttggtggggtaaggcatcaggaaaaatgtagttagtcttttcttaacttataccaaattaaccaactatattataggaaatatgtgaaattagttcattagctttattcactattatgcattcacatgatattaaaacgtacactcacatgttagaatgaaaagagcagtagttatcttagattttaaaaacatggatatcttcttgaattccttcaagattgaggtagagaataagagcaaatcattctggaagtaccttaaggaaacaaacagcagcagatatttaggttaaacttattttccataattgtttaataacttttgtataatcttccttgctatttatgaggrgagatgtatatattc

SEQ ID NO: 288 - DNA, 1289 bp, Homo sapiens
gcggccgccctttttttttttttttttttttttttttttaactgttctctagaaatatatttattcatgcaaacatgtctaagtcactctacgtatttttatacaacataagattgtttatgatcttatgaccatttttgtttatttttaatttttttgccagagagggctttcagtaaatgttttatttagaacattctttgaaaaatttgaagtgcaaagccacaaaaagcaatggatttaaatatataatgcgtagtagagttaggattatcacactagctctttttaaatctcactgctgttagtagtttcttttaattcttccatcactaattcctgttggggtttttcagcacttttcctataaagcaaggtttccccatgagggttttgaaatgtagattcctggacaagctgattagatgtgtttatgagcacatggcttttagcttttagggcataagcttccataggctttgctcttttttggcagagctggagctggaaagcttcttggaaaccacggcggaaattctcgttgaagaaaccataaatgatgggattgacactgctgttgccgaatgccagccagtgtgcaaaagggtagatgtagatgttgatgatctgcagttcatttggagaaaggtcagcgtagtctgagagcatcattagagtccacaggggcagccatgagagaataaaaagcagggccacaatcaggagcatcttaatgatcttctgcttcttcctggacaccacgtgccactgctcctggttcttcctgcctgtgtgaggaactgcagccctgaagagtgaaattccaatccttccatacatgatgacaatgagggagaggggagccaggtagatgttggcaaacagcacagtggtgtagatcttcctcatttcctgatttggccagtcttcccggcaccagtagactggactggttttattctgggagttgagtctcactcggtaatatttttcttcttgcacatgtaacattactgcagatggagacataatggtgatggctaggacccagatgatcataataatgacaaacgctgtcttgatagtgagctttggtttaaaagggtagaccacacactggaacctatctacagcaattgcaactaacgtaaagactgaagctgcgacagatattccctggaccaatccactgatcttgcacatcgtgtttccaaatggccatcctgctataatattgtccagcagtgttataggcatgcagaatatgccaactagtaaatcacttatgc

SEQ ID NO: 289 - DNA, 509 bp, Homo sapiens
  SITE (116): n equals a,t,g, or c
  SITE (434): n equals a,t,g, or c
  SITE (436): n equals a,t,g, or c
  SITE (446): n equals a,t,g, or c
  SITE (448): n equals a,t,g, or c
tcaagcacaagcccccaactaaaagccttgtctggaaaatctgcttggtgccataacagattatctggtgagccaggtaggagcacaaggagtaatttccctccctgcaggggagnctttgtgagcctgcgagccggaggaggccccactgattcagcgctgccaccgcgactggcgagttttcctctagtctcgcgactggacactggtcagtagaacctggacctgctgtaaggctgaagaagaaaaagaaaccatccaagctggcactcggttttggggagttctcttcactgctcacgccggccctcttgtgtgacctgtactgttgtgctgtgtggggctgggagccaactctcttttcgtcgcctgaaaactgtgcttgcaccctgcccctggttcctttaaataagacaagcagacacaggggctanantcatgggcangncccaggcatcttccaaattcaacctgggatggtacatttcaaatgggaggatcccaatcaa

SEQ ID NO: 290 - DNA, 453 bp, Homo sapiens
  SITE (411): n equals a,t,g, or c
  SITE (446): n equals a,t,g, or c
  SITE (449): n equals a,t,g, or c
tgagtagctgggattactggcacccaccaccacgaccagctaatttttgtatttttagtagagacgggttttcaccatgttggccaggatggtctcaatctcctgacctcaggcgatctgccttcctcagcttcccaaagtgctgggattacaggtgtgagccaccgcacccggccagtgctgagctgttttgacaacttggaccccgggtctctgtgggtaggaaaatcagctccctctttgctcctctgggggcagctgcacctcgggccagctttctgcctgtctgcctgccggcaatgctgggtcgctgtacccaaacgcacagcggtgccccgtgctaaraagtcttcarttttccagaagagccaagcattttggggacctacttaagggaaggactgcctgtanactttgccctgtcctggagggtccaatttggggtnaanggga

SEQ ID NO: 291 - DNA, 352 bp, Homo sapiens
  SITE (350): n equals a,t,g, or c
gctggctcagatatttgttttcttctggataagtagcatcaaaacaaatagtaattatattatttaatagacttaaaacacggcaactacatttgtataggaaaaaccacattagtaacattacatggagaaaagcattttatgtaactatagttccagcaaataccactatgccttcattaatgccttaaaaccatcttatttacatctgtagaaccactggccatttaatagggcattcaggagcatcattaaaaccagttgcagttttcattaggtttccccggtttatccaatatgtaactggaattaaaagtaatccttcagggtccatccttaaaaaaagtaancc

SEQ ID NO: 292 - DNA, 454 bp, Homo sapiens
  SITE (431): n equals a,t,g, or c
tgcttcaccaaaattggacaatggggagtaaacactcaggtgcttgaggacataaagagagaacagattatagccaaagccaaagcctcaaaaccaacaactccccctgaaaatcgccygcggatttccattcctttatacaaaaactataagcagatgcatcccttcctaagccaggaaaaaatctgtttgtagatctaggagaaccattgtgcttaccatgaatgtgtccaattgttgggtatgcgggggagctttatgagtgaacagtggctgtgggacgggatagacattcccccttacttacaggcatcccaaaacyccagactcactttcactcctcaggaatgcccgcagtcctggacacttaccaactcagtatgagggacggtgtgcatatcccgcaagtgggmtgrttaaaaccatygcgncgtagtgaaaacccgtcaccaaa

SEQ ID NO: 293 - DNA, 343 bp, Homo sapiens
  SITE (297): n equals a,t,g, or c
  SITE (321): n equals a,t,g, or c
  SITE (325): n equals a,t,g, or c
gaggtgggagggcagaggtttccaaatatttattgttcatctactatgtgcctggcaccgaggagatgtgaaagcaagcatagttggatgtggctcctgcttccatctagtgtagaaagaacaggtatcaaacaaccatacagagaaaggtaagcagagaagctttattatggacttaattgcccctggaaggaggtcagagaagatttcccagaaccaaagatctttaagtctcacatctgaagaatgaaagggattaatcaggcaaacagggaacggggaacaatgtaccagacntcctggaacagcaacgggcaaggnctcntgggcagggtgggagctt

SEQ ID NO: 294 - DNA, 519 bp, Homo sapiens
  SITE (31): n equals a,t,g, or c
  SITE (434): n equals a,t,g, or c
  SITE (453): n equals a,t,g, or c
  SITE (472): n equals a,t,g, or c
  SITE (497): n equals a,t,g, or c
atgaggaggttggacgtggtggtggctttgncttggatattcctcttcctctatcaaggccttctcttcttctctgtgtcccacaactctggcctcatcgccctgggactcccatctgctaagatagtggctttggaggttctggaagggcttagtgaggaggccagaagtatcagggaaagttgctggtgatggggtgggcggtgtcagaagcagccactgttttcccctcttcagacactgagagattaatcagggaatgaaatccaggtggaaattatttattgtgaagcagacgactgtctgtcctgtttatgacaaacccaaatggagattgggagggactaccagtaagtggtctctttcatgctctccccatcccatttttaaggatgaattttagagctggccttttggggttgcttgcaccaatncggatgtcccaggggaaancaggttcccaaaaagggancctttttttttttttttgggaaaancctttaaccttaacgctttttt

SEQ ID NO: 295 - DNA, 385 bp, Homo sapiens
  SITE (128): n equals a,t,g, or c
  SITE (129): n equals a,t,g, or c
ctttcttccctaaccttaggggaagaaagaatcgggctcacgaatgccagaggcagygatgtcccatmctggaggagaggaaacagtgactaaaagctggggacccacagaggggttggcagcttctnntgtcgggacaggtgtcctttgctgggcctctggatggccctgccctgactggggctgctcctccctcctgtcctgggaccccgcagagcccacgctctcactgctgcctcctgctggccgctgcctccttagaaagctgtgaccaggcagctaagagcctctgggctgcagggtcagcctctcccaagactgaagtgcagaggctggacttggggctctctcccccagcttctaaacctgggctccaagtctgagt

SEQ ID NO: 296 - DNA, 446 bp, Homo sapiens
  SITE (444): n equals a,t,g, or c
taaattagtaccatatcaattttctgtgatgatgtttaccaactataaagcactatgttggtttactacttcagtaaattattcttagtgaattattttctaaattaaaaaaaatgacttggcttttggtattgattaatagtattcacaacctgcatctgttaagatgtttgatctttaacccacacaatgtaagggtactgttgtcattgttctcaggtaggtgattctgccttccaagagtatatgtttctttaatcagtttaaaagataaaggcattttgggttttaagacccctgctttacatctcaggtaatgtgtagattgtacttctctggaaccaaatgtagttttctacactcagttgtaaatgttaatctttctcaaatgtgcacattctttaaaagtgtgtccctaagtagaaatatacctaaatgagatcnct

SEQ ID NO: 297 - DNA, 1100 bp, Homo sapiens
  SITE (983): n equals a,t,g, or c
  SITE (1051): n equals a,t,g, or c
  SITE (1056): n equals a,t,g, or c
ttcactcggcacgcactaggcacagaataaatgccattcatccctacttttacttcagggtacattttagagatctaagatttggtgtatctttcccattatccattcttattgcctcaaggtctcctcttataaatctagtggtatgcattactttgggggtaaggacaaatttatccagaacagagaagatttagttcagtctttagttttaaaataagcatttttaagtaatagcagagacaaaagtctgaaagccaacatagttttaatttaaaagaaatttgattttgctacagctttttggccaggagtaagtgaggatgctgtttcgaaagctggtcttgcatcttaagcagtacggtgtgggtcttaggggctggagtgtatcttgcaggaaacacagagtaggcaagaatgtgaggtggtgtaagactagtttgtctggttcaaaaagtaaaaaagaagactgaaaaaagtaggaaatctaacccaaagcaatcaatctttgagaagagcccagcacacttcccttccaattgatttgtcctacacccctccatgagcctaagcattagagcagaaatgactgagggtagcatccaagccactgggccaaggggcactggtacgatgaggataccgtgtcccacaattccagggtagtctgggaaaaacaaagcagagttcctgagaagaatgcagtagtggctgacagaaccagaaagggtgttgtagtgatatgtggccatgacatcagaagactaaaatgaggctatkgatattccctagcaaatgtctggggaacagaggccaaagccgwaagctcaagaattaatggaatgactacacctcaacgaaggttatagattagtgaggactgatgagtacaaaccagactcacacatccatcctcatcctcactccccacccccagggctacaatattacatattatgtcccctactcctgaggggatgggnaaagaggatgggtagggttaagtttcaaactgcttttaatgggctaaccaaaattcacctttatttcnttttnattttttagtttgaccttgtaaaattgtacatttttattgggct

SEQ ID NO: 298 - DNA, 235 bp, Homo sapiens
  SITE (217): n equals a,t,g, or c
  SITE (221): n equals a,t,g, or c
aaaaagattgtggttgtaaattctctgcatataggcaaaacttacctgattaataagtaagtagttaaaagtagctttctacagaatatgrcaagtaaaacaatatatatttttgtagggtacagaaagtggtgagagtgttggraggagatcaaggagattttatgggagttgtattttaaggratgaattagacagataatactagtaaagagantaantagtatgttccaaa

SEQ ID NO: 299 - DNA, 265 bp, Homo sapiens
  SITE (261): n equals a,t,g, or c
  SITE (264): n equals a,t,g, or c
aaaaggagaagaagaaaaagaaggaaaaagagaaggagaagaaggagaaggaaagagagaaagagaagagagagcgagagaagagagaaaaagagaaggagaaacacaagcatgaaaaaataaaagtggaaccagtcgctctggccccgagtccagttatccccagattaactctccgagtcggtgctggccaagacaagattgtcatcagcaagtggtccctgcccccgaggccaagccggcgccctcgcagaacaagcngang

SEQ ID NO: 300 - DNA, 489 bp, Homo sapiens
tttcccggtcgacccacgcgtccggttcattttataactctcagtttccagtaaaactttccgttatggtcagtagtttataaaggagcagttctgagtcattgttaagagtggaggctcgcaggcagattgcctagattcaaattttggttctacccctcaccagccatgttggttagaaggttactcaacttcaatttcctcttctgtgacatggggaatagtcataaaaatgccttcctcataattgtkgtgaagattagaaataagataacatattaaaagcacttagattgggaggccgaggtgggcggatcacctgaggtggggaattcaagaccagtctgatgaacatggaggaaccccttctctactaaaagtacaaagtttgctgggcgtggtggtgcatgtctgtaatcccagctactcaggaggctgaggcaggagaattgcttgaacccggaaggtggagtttgtggtgagccgaga

SEQ ID NO: 301 - DNA, 285 bp, Homo sapiens
  SITE (277): n equals a,t,g, or c
  SITE (280): n equals a,t,g, or c
gctacgtgcatgaggtatacatgaaacataaatgaactttgagtttagccttgggtcccatccctaggatatcttactrtgtatatgcggatattccaaaatctgaaagcatctgaattctgaaacacttctggtcttgagcttttttttttttttgggggggccaaggactgagtttccatggaggatgtggtgtgaaaggaaggaatggtgataggaccaatacagacactgggaaaaaatgtggagggtgtgatacagagatgataagattacnccngtatg

SEQ ID NO: 302 - DNA, 462 bp, Homo sapiens
  SITE (336): n equals a,t,g, or c
ggtatatattagaaaaagacaattttgttctttactgctcaaactcaacacagaacatttctgtgaccccagatgtgtatgtttgtgtgtttttttccccacattgaccaattctccaacactagcctgttgggctataattaaattcagtcctggcatgatctacctagagcgagagtcaaattccacagatgaaggcctcagtcctacaagactgtaccctacttcagatttaatcataagtccaagtctccatctccaatacatctgatcaattgggctacatattggggcttcccataaccctctcctcagcttccatcatttgatctaatnggcttatggaaatcaaggaaatgctttgcttactactgcctattwatttcaatggawakgttaaaggataccaatgagcagctagakgaagaggkacagacagtgaggtttggaagggyccaagtg

SEQ ID NO: 303 - DNA, 546 bp, Homo sapiens
  SITE (7): n equals a,t,g, or c
  SITE (30): n equals a,t,g, or c
  SITE (35): n equals a,t,g, or c
  SITE (532): n equals a,t,g, or c
cctgggnaaaccgccattttcccaggtttncttcntgtcccaggaatctgacatgctggtttttccagggtattttcaaactgggaagatcgagacagaaactttggtcatcaggaatgcagagattgccccatgaatgacagaattgatcattaggatgcttgttactcaaaaagcccattttttaaagaaggatgtattaaaattattccagcatgctaatgtggcacactcctctggcgctaacggcaggtgttgctattagcagaggaagccttgttctaagaattattctagagggccagaaagaacaggtattgctccacccgagtaaacgctgactcaactctgcagggtggcgcgctctttcctcacctcacccctcctgccaggcacaactgagatccagaaataacaggattagcgagagaaggggaaatatgcaggacggtagtgatgggtatgcacaaaggagtgccaagcagttttaaccgttaatgttcttcgtctattgctagagaaaatgtctttncttggaggaggcat

SEQ ID NO: 304 - DNA, 900 bp, Homo sapiens
  SITE (860): n equals a,t,g, or c
  SITE (878): n equals a,t,g, or c
  SITE (896): n equals a,t,g, or c
gtaacaaggaggtgggggtacaaatcctcagctcctgcttccgcaagcactaacctgctctgaagtgagccaggcagctctggccatcttttcccagccacagaatcaggtgatggtccagaattaagagctgtcacctgtgtcattcactcacaatggaagaaatgaagaagactgccatccggctgcccaaaggcaaacagaagcctataaagacggaatggaattcccggtgtgtccttttcacctacttccaaggggacatcagcagcgtagtggatgaacacttctccagagctctgagcaatatcaagagcccccaggaattgaccccctcgagtcagagtgaaggtgtgatgctgaaaaacgatgatagcatgtctccaaatcagtggcgttactcgtctccatggacaaagccacaaccagaagtacctgtcacaaaccgtgccgccaactgcaacttgcatgtgcctggtcccatggctgtgaatcagttctcaccgtccctggctaggagggcctctgttcggcctggggagctgtggcatttctcctccctggcgggcaccagctccttagagcctggctactctcatcccttccccgctcggcacctggttccagagccccagcctgatgggaaacgtgagcctctcctaagtctcctccagcaagacagatgcctagcccgtcctcaggaatctgccgccaggagaatggcaaccctgggccagatagctggaagaacagggttgctctttcaacctgcctcccggctcagttcactattaagaaactattattgtatcttcgtgggattttgccagttaccagcctttccaaattgaaattttttnagagtttaggagacactngggaaataattaatttanaaca

SEQ ID NO: 305 - DNA, 324 bp, Homo sapiens
  SITE (186): n equals a,t,g, or c
  SITE (217): n equals a,t,g, or c
  SITE (323): n equals a,t,g, or c
ggcaaagcatttcatgtgtgacataaaattttcccgtttcgcctcttcaggtgtgagccatgggaagaacgtggattggatggactctcagggggaagagcagcgcctttggcagaagatggccaacaaccctggaactccctttgagggtgtactcatgcttcgttccagcatgggaaaatgtangctctaaagggaccagttctccaagaatgangccaccaggacctatctggctgtcttttcctaccattagcaaactgagacctgggattctgcttccctgccatttctcacctgacagtgttgggacatgaagggana

SEQ ID NO: 306 - DNA, 357 bp, Homo sapiens
  SITE (323): n equals a,t,g, or c
  SITE (337): n equals a,t,g, or c
ggaaataaaccaggtgtctgtgatttcatttttgttaaagaactcacatgtttgaaaggaacactgaccattaaggtgcatttattagttctttaacaaaaatgaaataaaccaggtgtctgtgatttctaattaatcaccgctggccattacacaggttttgttgtttggggtggggarggggcttttgttcccttttgacataatatartcaatgcactaacaattatgtatattcaaacttgattattttaaattcgatcttcagctgtactgtaaatarggtactgcatgtartcyccatayckgwatwacttttccgnaaaatttaagagtngcttaaaagcatacaaaagg

SEQ ID NO: 307 - DNA, 533 bp, Homo sapiens
gtaataaagcactcatatatttcaaatacaaggaggagaaataaaataacatgccaaaaaaaatatgtgaagtaataatggtcaagaactttttctaaaattcaaactccatgttcagaatggtcaaagaatggcaagcaaggtaaacacaaagaaagcaaaacaaaaatacataggcatatcgtatgcaaactgtaggaaaaaaagataaagagaaattttggaaagaagacaggaaaaaacaccttatttgtagagacacaggataagaatcacaatgaacttctcatcagaaatcatttaagcaagatgacagagaagataaatgtttaaattgttgaaagaaaaaatatcccacccacctaggattccatatgcaaaaaaatagtccctcaaaagtaaagtagattttcagacaatctgaaacctagagaattaatcacctgtggacctgcccagcaatgaatgttaaaagaaactcttcttgcagaaggaaaatgatacaagtcagaaacttagatctgccaaaaaaa

SEQ ID NO: 308 - DNA, 646 bp, Homo sapiens
ttttaaaggcaggggtaaatctcaggaaagcagaagttacagtcgaaagtgtaaatcgacagttggaggttatacattggtttggcctaaaaaaggtggaatatcttgaagcagragctcacaggtcataggtggaatcaaaaattctctgatttgtgactggttagraaagtgaagctttgtctgaaatcctggggtaagccgaaaggaatgktaaggtctggcccgtgcatgacttcttccaggkccttcaggaagaaatttagaacaaaggagggtggtcagaattcagtcctcagtttcccccatctgaggtccacgtgccagcggattcatttggtggggctctaggtttctgaaaaacaactcaaggacacgtgttaagatgttatctttagtttctacagggaaccaaacaccttgtggctctaacttccttgactattctttttaagctacaattacctccttaccaggttgctcatttggttctcagggctagctaggtgtctgttatttactttccttgaaaaactcaagattttgtttccatgtttgcggctggggagggcagcaggcctgtaagagggtgcccctgctccgtctcaatgtgtgtgtattatacatgtatttmttcgctctgccc

SEQ ID NO: 309 - DNA, 838 bp, Homo sapiens
  SITE (18): n equals a,t,g, or c
tcactgctttaccatttnactcctcaaatgaatgagagcgactgctagtggcagaacgcagaaaaggggaaaaacaagccatgaaatgaagttgctttcctgacctgggtttaggtcatcattttaaaatcaaagatgtgtaggagatgaatcaacttatagacccatattttccttctaaaagtttcccaaagaaatgttatagattttgaataacatgccagtgacccagcaggtccaagatggctaaccaagatggctaatttagccacattgaataacttacttttaccctcacatggaaagttggtatctattgctaaatgatttcaaggtcactctgacagtctttgacactgttttttttagggttttattgktttctggtctcctggtgtctgtcctcagaattaaagcatgtcctgcatccctaagatgatagccaaggcctctcttttattaagagtcagcactgatgtagggtaaaatcaacagtttttgcatatgawtttaaaatctttctttgatttgaatttgctttartgtgtgcatgttgagaggaagtaagtgtagaaaccaccctaawttgtaagttgggagttggagatmcttggtggkttttcaaaaataaagrctcaatcytttttttttttttaaacactcactaccatctccttctaaaacaactctgtcagtttaaatggcatataaaatgtgaacaaacacctcattacatgaagtcaaaatggtgaagagcttcagtgaaacatttaaagagtatattgtgtgttgttttgctgttcatcattacttattaaatgcagtaatgttgattgcc

SEQ ID NO: 310 - DNA, 275 bp, Homo sapiens
  SITE (16): n equals a,t,g, or c
  SITE (33): n equals a,t,g, or c
agcgagactccatctnaaaaaaaaggagacttnatgtgcccccaatttttcactattgttatttgaaaaaatatttttatttgtaagagtttttctttatttaaaatgttcattaataaagttgttggacgggaagcaaaaaaaaaaagttgtttaagataaattcccagaagtgaatttgttagatcaaacacttaaaactttttgttatggaagaattcaaatataaataaaaaattgtgagtaataaaatgaactcacagtttcaacaatga

SEQ ID NO: 311 - DNA, 544 bp, Homo sapiens
  SITE (1): n equals a,t,g, or c
nggacaggacaatccaatcggattcctggcatatatcatgttctggctggttttaacatcgagttgcccaccttacattgccatgagcagcatcgatgattataagaacagagctcggtcccagctacggatttccggactctccccttctgcttactggtttgggcaggcgctggtggatgtttccctgtacttcttggtcttcgtttttatatatttaatgagctacatttcaaacttcgaagacatgctacttacaataattcatattattcaaatcccatgtgctgttggttattccttttccctcatcttcatgacatacgtgatttccttcatctttcgcaaggggagaaaaaatagtggcatttggtcattttgtttctatgttgcactgtattctctgtggctggatttgcgttcagtatcttcgaaagtgatattccatttatcttcacttttttaataccacctgccacaatgattggctggtggtcttatcttctcatcttctcttttcttctctcttttctgaagaacgaat

SEQ ID NO: 312 - DNA, 702 bp, Homo sapiens
  SITE (595): n equals a,t,g, or c
  SITE (612): n equals a,t,g, or c
  SITE (613): n equals a,t,g, or c
  SITE (688): n equals a,t,g, or c
gcgtccgggcacctgacccacagccgcagcagcagcaaaggcagtgtggaggagatcatgtcacagccaaagcagaaggagctggcaggcagcgtgcggcagaagatgcttctcgactacagcgtgtacatgggcaggtgtgtcccccaggaaagccgaagcccccagaggagccccctgcagagtgcggagagcagccccacagctgggaagaagttgccagaggttccaccctctgaggaggaagaacaggaagcctgggtgaatgccttgcttggaagaatattttgggacttcttaggagagaaatactggtctgatctggtgtctaagaagatccaaatgaaactcagcaaaataaagctcccctactttatgaatgagctcactctgacggaacttgacatgggcgtggctgtgccaaaaatcctccaggccttcaagccttacgttgatcaccaaggactctggattgatttggaaatgtcctacaatgggtcctttctgatgactctcgagaccaaaatgaatttgaccaaactaggtaaagagcctcttgttgaagccctgaaggttggagaaattggcaaagaangttgcaggcccccgggnncccaaaattctgctgcggacagcgatgaggaatcctcagcgctgcttcttccaggaagacgattgcccccaaagncccaacgggggaga

SEQ ID NO: 313 - DNA, 426 bp, Homo sapiens
gctcccgcctcgtccaggtccacgtagggcccggcgcccttggaaacatctcatccacggccagctacatcttgggctgcggcgctctaggcccacttccggccacggggccgcttcctatttttctattttttaacaactccccatattaatattcattcactcattgactgttaagcccttctatgtatcasgaattgttctaggtactaggacatatcagttaagaaaacatttgttaatccttgccttcatgtagtttattagattgtgaacagatcagaaaaaaacatgtaaaaaattataaaatgttaggtgatcaaagttatggtgaaaaacaggaaagggaagaggcagaaggagtgttgaggtgcagtgttaaatagagtagtcagagaagacctctctgaaatgtcatttgagtta

SEQ ID NO: 314 - DNA, 453 bp, Homo sapiens
  SITE (115): n equals a,t,g, or c
ggtgaccttgtggctacaccggaaactgggacatgcagggggtaaactgatgcaacaattcaataagtgttggggtctgtcccttcccaagcaagacatttgtgaggcttgtcanaaatgcctggcatgtgttcagacatatcctaaaaagaggcagctgcccggtgttatacaacaagtaacaatagggtgagtgcccttgaccaggtgggaagtagactacatcgggccgctgccaaagtcgcgagggtatacgcatgcactaacggctgtaaacatggccacaggcctgttgttcactacccttgcagggtggccaaccaacaraacaccatccakgccctgyaacacttatgttccctgtatggttgtcctctggccattgagartgataggggaacacatttcactggacaacaggtacaatgatgggcacagcaaaatggacataaa

SEQ ID NO: 315 - DNA, 52 bp, Homo sapiens
ccgccctctcccccaacctactcaaggtcctgtggactctcacctaggtgcc

SEQ ID NO: 316 - DNA, 398 bp, Homo sapiens
gaaaatacctacactatttgcaaaaaataataatgacaaaatatgtgaacatacacataataaaagaagatacatgtttggccaaatgcatgtgaaatggtggtcaacatcattagtcatcagagaaatgcaaattaaagtacaattgtatgcctcctagtagaatggtgaaaattagaaagactgatgattccagttgttcgggaagatgtggagtactggaactctgatgccttgttgctgtctttgtttagtgttggtataacagaatacctgaggctggatattttactttaaaaaagaggkttattgggcttatgattgtggtgactagaagagtcaagattgggcagctgcatctgatgaaggcctcatgttgcttcaactcatgacagaaa

SEQ ID NO: 317 - DNA, 559 bp, Homo sapiens
ctggagccgccggcctccgaccccgagctgcagcccgccgagcgcccgctgccatcgccggggtccggggagggcgccccggtcttcctcacggggcctcgatcccagtgggtgctgcggggggcggaggtggtgctgacgtgccgggcggggggcctccccgagcccacactgtactgggagaaggacgggatggccctggacgaagtgtgggacagcagccacttcgcgctccagccgggccgcgccgaggacggccccggcgcgagcctggcaytgcgcatcctggcggctcggctgccggattccggcgtctacgtgtgccacgcccgcaacgcgccacggccacgcgcaggcggggcgctgctccaggtgcaccagccccccgagagcccgcccgcggaccccgacgaaggcccccgcgccggtggtggagcgctcaagtgcgcgcctaagaccttctgggtgaacgagggcaagcacagccaagttccgctgctacgtgatgggcaagcccgagcccgagatcgaatggcactgggagggccgcccgctgctt

SEQ ID NO: 318 - DNA, 717 bp, Homo sapiens
  SITE (3): n equals a,t,g, or c
  SITE (661): n equals a,t,g, or c
  SITE (708): n equals a,t,g, or c
gtnactttagtggagaggtgtgtgaatctccccattgtgtggatgggaggggagccctttgcccagagatggcctggccttacccacagtcacactggttctcagcagagcctagattcggccaggtctcctctggggcctcacactctcctccacgacgccctgggaatgaggacagcttggcctagcttgagcaagctccaagctcagtgctctctcttcgcttgcctccctgcctcactccctgcctggggagggcctcgcttgctctgggtgcccaccctcctcccccacccacccccattcacctccctgttcatttctgtttccagtgcaatgtgccaccccaagccctcccacctcccctgcttccccggctcctccagcaaaccccctgtcgtctgaatccccacggggcgccgacagcagctataccatgcgggtctgagctctgactgcaagccctggctgaggccaatgctgtgaagctccacagagccacattctgaagccgtcctctgcccacctgaggtcctggctccccaccctggccccctgcccctgcactcccatgggaatgccgcagggagccaggctggggccatgggctgctgccagaggaccgtggatacctcagtgtcacacacccaccatgcccagncctggagccatactacttcacaccgtggtcctgggccagggcctganatgacagtg

SEQ ID NO: 319 - DNA, 614 bp, Homo sapiens
  SITE (496): n equals a,t,g, or c
  SITE (536): n equals a,t,g, or c
  SITE (580): n equals a,t,g, or c
  SITE (584): n equals a,t,g, or c
  SITE (586): n equals a,t,g, or c
gcgcggggaggctggtcccaaccttgcgtgggcttcgcgtgggcccggcctcgccgctgcggtcgcccgcctggcatggccaactgggtgttctgtaatcgctgcttccagccgccccacaggacgtcgtgcttcagcctcaccaactgcgggcacgtgtactgcgacgcctgcctcggcaaagaccgacgcagatatccaggcattcttcatgagcatagacagtctgtgtaagaagtactccagggaaacctcccaggtgagctgtgaggggtgtggcttggttccgtgatgagccaggtgcactatcccgagaccatggagctatgaggggtgtgcttggttctgtgatgagccaggtgcactatcccgagaccatggagctgtgaggggtgtgcttggttctgtgatgagccaggtgcactatcccgagaccatggagctgtgggagttgtgcttggttctgtgatgagccaggtgcactatcctgagaccntggagctgtggggggtgtgcttggwtcygtgatragccangtgcgctatccygagaccatggagctgtggggggtgtgcttggnttcngngatgaaccaagtgcgctatcccgagacc

SEQ ID NO: 320 - DNA, 957 bp, Homo sapiens
ggtaccggtccggaattcccgggtcgacccacgcgtccggcaaaktcctkaccccggaggagctgctctaccgggctgtgcagtctgtgaacgtgacccacgatgcagtgcatgcacaaatggatgtgaagctccgctcactgatctgcgtggggctcaatgagcaggtgctgcacctgtggctggaggtgctctgctccagcctgcccaccgtggagaagtggtaccagccctggtccttcctgcgcagcccgggctgggtccagatcaagtgtgagctccgagtcctctgctgctttgccttcagcctctcccaggactgggagctccctgcgaagagagaggtgggtggtgtgggcctcgtagggcctgcactgatggagctgcccaaaccgttcgcggggtggctaaggtgggaaccgaagtgctggtgtcagcggttaggaactaccccagccatgcccaaggcctgtgaggtgaggggctgccctgtttgcaggcgcagcagcccctgaaggagggcgtccgggacatgctggtgaagcaccacctcttcagctgggatgtggacgggtgaccccctcctccccagcccaacctcgggcctgcgtctgaggtggcccaggaccccaagctgcagagcccagggaagagcagctccagagccctggccggggccgcgggatatcaatatcaggctgccccactccacgttccccagcacatcccaggtggtgggagcagagggtaccctgccccaccagggtccttagggatgctctaggccaaaccacagtttgtaccaaaaaccttgtgaggaggtgggggagccatgtctgtgctcaggaagagggaaggggatgggggtggctagtaggctcctggcctctttggtttataaataaactgtgtctgtctttgaaaaagcaaaaaaaaaaaaaaaaacctcgggggggg

SEQ ID NO: 321 - DNA, 242 bp, Homo sapiens
  SITE (203): n equals a,t,g, or c
  SITE (205): n equals a,t,g, or c
gcttcattgacctcaaccatgatcatcccggtgtccctgactcccacactagacaccctaggaaccagacatctctagatcttctagtctgctgttcatctaccatgggctctgccccaacttccacagccccacccaggagtgcctcagccctgccaagaagccatactcctccctggcatctctctgccccttgagcctgngnatatccctctgtctacagagacccaccaagctgaggt

SEQ ID NO: 322 - DNA, 341 bp, Homo sapiens
  SITE (275): n equals a,t,g, or c
  SITE (310): n equals a,t,g, or c
ggacgctgccggaccggccgaattcccggtcgcccacgcgtccgtttgtaattaawacaggatcagagaagtgacttgctcacagtcacaaagcttgtaagtggtagagagccaggaattgagtgtgagctttccttgtttagttttgttcgagtggctaaatcaacttgtctgtggttgttaagaaaaacagtagtcccagctggtcacggtgctcagcctgtaatcccagcactttgggaggccaaggcgggcagatcgcttgaggcaggagntcgagaccagcctggccaacatggtgaaacacagnctctaccaaaaatacaaaaattagctgggtg

SEQ ID NO: 323 - DNA, 483 bp, Homo sapiens
  SITE (355): n equals a,t,g, or c
  SITE (372): n equals a,t,g, or c
  SITE (395): n equals a,t,g, or c
  SITE (420): n equals a,t,g, or c
ggaaagcagggccctccacatgtgaaacaagataggtggtgcttgggagttgggtcaagattgatagctttctagctggtgcagtgggattgcacctgtaatctcagcactttgggagcctaatgcaggatagcttgagctcaggagttaagagacagcagggcaacatagggagatcccgtctctacaaaaaaaacaaaaaaattagccaggtgtggtggtgtgcatctgtgctcccaactactcagcctcccaagtagctgggattacaggcgcctgccaccatgcccagctaatttttgcatttttagtagagacgaggtttcaccacattggccaggctggtgtcgaaaanctggaccttagggaaancaacttgcttaagcttccaaagngctggaattacaggcgtgaaccatngggcctggccttctttttttttaaaaaatgggagacaggggccttggtatattgacaggctgg

SEQ ID NO: 324 - DNA, 456 bp, Homo sapiens
  SITE (452): n equals a,t,g, or c
  SITE (454): n equals a,t,g, or c
  SITE (455): n equals a,t,g, or c
gcccacgcgtccgcagacattakaattaccaatgtaaactttatatctaaaaccaaaatcaattacaaaggatcattattttccaaagtagatacttttttttagtgctgttcagtttttctgaagcttatctttgttcacaaggattgttagcacttccaccaaatcagtgtttagaaaccttaaataatttaacgtctgacttgccagtacattattagagaaacaattccaagaccaaaacatgttgaataagcaggagatatacaccaatttgattttaaaatggacagctttcctgtctctggctctctctcatgttgccttaaacacacatatgctgaagaaatcatatacagatacttgcatgcatttaataaactatccaataagtggtgcttttaataaattctgaatacaatcamwraaaaaaaaaaagggscgcccgtttnanng

SEQ ID NO: 325 - DNA, 300 bp, Homo sapiens
  SITE (277): n equals a,t,g, or c
  SITE (283): n equals a,t,g, or c
  SITE (286): n equals a,t,g, or c
actctattatgcttattatgtatttattcattcaatatttatttactgatttatttacttttagagacaaggtcttactctcgtctcccaggctggagagcagtggcatgatcaaagctcactgtaacttcgaacttctgacctcacgcaattctcctgcctcagcctctggagtagccggtaccacaggcgtgcaacaccatgtctggttaatttttgaattttttgtagaggtgagatctcaccgtgttgcccaggctggtctcgaactcctggnttcaanccntccgcccaccttgg

SEQ ID NO: 326 - DNA, 1595 bp, Homo sapiens
  SITE (1): n equals a,t,g, or c
  SITE (12): n equals a,t,g, or c
  SITE (1586): n equals a,t,g, or c
ncatccttgcantattgttttcctttyttttttctcataaacaggaactttattaaactacatgttacataaaagaacatataaatggaccattaaatacattcagtttattttaaacaaatttacatagatacttatttacatttctccattgtattcttaaattatttttccaagcttactaccgataaaaggtaatacaatgatcatctgctcacacagatgcatagagaagttgtccacagggctaagtaaagcaccacttcccaggaaacacagcttattagatcttccagcaacaactcatgctgaaggtgctctcttctgagcagcccttgaggtgaggcttttgctttagagatgctgggggttggttctgaggagctgacccagggcagagatgggtccttgctgattgacctgacttggactcacagaggtggaaagacctgtggagaccatcatcgaggccatggccccacatctgtgatatgggaaacaggcttgggaagaggtggtgacttcccaaagtcacccagcatccatgatagaggaagggcctgggagcttggtacccagggttcctccaagaggtcccgatccctctgctatccacaaatccacaaacttagaatcacttgcatccattttccaccaccatggaccttatgctttgaactgttttgtctacctgattaaatatataacttcttaggcttcttgagatggtgaaaagcagctcaggattcccataagcaactttgtggagccctggaaatacctactcagggctgtttttacaagaggttttgtggtcaggtgctttactacttcagccataacgtttacctttaaaactcagctgacttatggaagctcagcatttccaattcgcttagatgacaggcaacagtctgcagaagggaggttctaacgtcaaccacgtggattccccacaaacgcatcatatttgcctaaatccatctatctaccaatgtcagatctaaaatgaggtttcactaataagtgacctaaaattaaaaaaaacacaaaaaagtttcttaaaaaaaaaattccaagaatttccccgtttcccaattagtctcagaggagtcgtgaaatgggcattgggtagaaaaagtccatgttttcaactgtttcttttgaataaagcctgattcccccactctgcccccaaacttttcccgatgatatacattcttctgaaagcaatttcatgcttttagtctgctttaaaaaacctgacttggttcttctcaggatttaaaaaccactgtaccaaggaagagatgtccacgttaaaaactattattaagagacagagacaaggagagagagactctctccaggccatgttagaaaagaargaagtgctgggagcacacaaagagagaagaaaggctgggagacagaatggtttgcacctccctgtaaccagagtgaacacaggtcatagcagccttcactcagttttataacagacacacgaatggaggaacatgggattggaaagacgcacactgtcaaacagggctgatkcctcctsaactaaaatatgaagcttntccgtgaga

SEQ ID NO: 327 - DNA, 562 bp, Homo sapiens
  SITE (477): n equals a,t,g, or c
  SITE (485): n equals a,t,g, or c
ttttttttcctttcycataaacaggaactttattaaactacatgttacataaaagaacatataaatggaccattaaatacattcagtttattttaaacaaatttacatagatacttatttacatttctccattgtattcttaaattatttttccaagcttactaccgataaaaggtaatacaatgatcatctgctcacacagatgcatagagaagttgtccacagggctaagtaaagcaccacttcccaggaaacacagcttattagatcttccagcaacaactcatgctgaaggtgctctcttctgagcagcccttgaggtgaggcttttgctttagagatgctgggggttggttctgaggagctgacccagggcagagatgggtccttgctgattgacctgacttggactcacagaggtggaaagacctgtggagaccatcatcgaggccatggccccacatctgtggraaattnaaattggngggcggcaaaaaacagggcyttgggaagaggtgggtgaccttgcaagacaactgaagagctgagtgaccggtctcag

SEQ ID NO: 328 - DNA, 1117 bp, Homo sapiens
  SITE (1111): n equals a,t,g, or c
ggaagaagctgagatgaaacatgactctcataaacaggaactttattaaactacatgttacataaaagaacatataaatggaccattaaatacattcagtttattttaaacaaatttacatagatacttatttacatttctccattgtattcttaaattatttttccaagcttactaccgataaaaggtaatacaatgatcatctgctcacacagatgcatagagaagttgtccacagggctaagtaaagcaccacttcccaggaaacacagcttattagatcttccagcaacaactcatgctgaaggtgctctcttctgagcagcccttgaggtgaggcttttgctttactacttcagccatamcgtttmcctttaaaactcagctgacttatggaagctcagcatttccaattcgcttagatgmcaggcamcagtctgcagaagggaggttctamcgtcaaccacgtggattccccacaaacgcatcatatttgcctaaatccatctatctaccaatgtcagatctaaaatgaggtttcactaataagtgacctaaaattaaaaaaaacacaaaaaagtttcttaaaaaaaaaattccaagaatttccccgtttcccaattagtctcagaggagtcgtgaaatgggcattgggtagaaaaagtccatgttttcaactgtttcttttgaataaagcctgattcccccactctgcccccraacttttcccgatgatatacattcttctgaaagcaatttcatgcttttagtctgctttaaaaaacctgacttggttcttctcagkatttaaaaaccactgtaccaaggaagagatgtccacgttaaaaactattattaagagacagagacaaggagagagagactctctccaggccatgttagaaaagaaggaagtgctgggagcacacaaagagagaagaaaggctgggagacagaatggtttgcacctccctgtaaccagagtgaacacaggtcatagcagccttcactcagttttataacagacacacgaatggaggaacatgggattggaaagacgcacactgtcaaacagggctgatkcctcctaaaataygaggcttttccagtntggaag

SEQ ID NO: 329 - DNA, 752 bp, Homo sapiens
  SITE (732): n equals a,t,g, or c
  SITE (733): n equals a,t,g, or c
  SITE (745): n equals a,t,g, or c
  SITE (748): n equals a,t,g, or c
  SITE (751): n equals a,t,g, or c
cagaaaggacattccccctcccctccccaggtgacctgctctctttcctgggccctgcctctccccacatgtatccctcggtctgaattagacattcctgggcacaggctcttgggtgcattgctcagagtcccaggtcctggcctgaccctcaggcccttcacgtgaggtctgtgaggaccaatttgtgggtagttcatcttccctcgattggttaactccttagtttcagaccacagactcaagattggctcttcccagagggcagcagacagtcaccccaaggcaggtgtagggagcccagggaggccaatcagccccctgaagactctggtcccagtcagcctgtggcttgtggcctgtgacctgtgaccttctgccagaattgtcatgcctctgaggccccctcttaccacactttaccagttaaccactgaagcccccaattcccacagcttttccattaaaatgcaaatggtggtggttcaatctaatctgatattgacatattagaaggcaattagggtgtttccttaaacaactcctttccaaggatcagccctgagagcaggttggtgactttgaggagggcagtcctctgtccagattggggtgggagcaagggacagggagcagggcaggggctgaaaggggcactgattcagaccagggaggcaactacacaccaacctgctggctttagaataaaagcaccaactgaaaaaaaaaacnntttactttttgnaancant

SEQ ID NO: 330 - DNA, 791 bp, Homo sapiens
  SITE (744): n equals a,t,g, or c
  SITE (774): n equals a,t,g, or c
  SITE (776): n equals a,t,g, or c
  SITE (784): n equals a,t,g, or c
gtacgcctgcaggtaccggtccggaattcccgggtcgacccacgcgtccgttagctttcactcttatatctgtgattcattctgagttttcttgtatagtttaaagtcagagtgggtgtttgtttgcttattaatatatttatagatatttctaattctttctagcaccatttattaaaaagtctctttttttacccattgaattattttgtttaaattgttatgtctaaaatcaaattaccaaatacacattgtctattttgaactatttattctgtttcattgatttttatgtgttcctttacacctatatcattgtcttaattactgtagatttgttggaaatatgggagtcaaatttaaggatttcaattttgtccttttatcaagttgttttggctgttctaggtcctttgcatttccctataacatttggaattaggttgtcaatatttccccagaataaagcctgctgggattttgarcaggattgyatggaatctataaatcaatttagtgagaattaataacatattaagtactctaattgatgaacatagtatcatcttccatttatttagtctttgacttctcggaaatgttttatagttttcagtgtgtaggtcttgaagtttgtaaaattctaagtgttttatggttttgactgtaattgtaaatacctcccattgttcattgttagtacatagaaataaaataaattttgtattaaaaaaaaaaaaaaanggggggccgttttaaaggaccaagtttacnancgcgggcnttcgacg

SEQ ID NO: 331 - DNA, 783 bp, Homo sapiens
  SITE (652): n equals a,t,g, or c
  SITE (780): n equals a,t,g, or c
gggcagctcagcaccatgcttctcgtaaaagcagcttcaattatccactggggttatcttttgacaacttgccattatctgatgttacacaattcaatagcaagcaagtttgagacaatcgcagtttaaaagcatgaaccatttaacaaaaagtggaataattaaagataaagcacttcttcccaaagggaattatcacctagtgaaaaattatgcatttcatctactcagttaccgactgcaagtctctcctcgctctagctctcaagctttgggtgaatattcctgtgaaatatatcttcaacttgaaagttcatactccaatcaaaaactccttttactgagtttgcagtactgtatttgcactgtttgtattcctctgggcccttattgctacttttgctttcctttgttacacagattttgtgttgcactttttctccagaggggtgttgtagagccttggttgtatgaataataccagtggtagtgtccacgggtctaatgtaagcccatttggcatcactcctctcctctctcttgagaggatttcttgtgcacagagtatgaagcagttgtggagcgctgtgcctttgtcaagataccatcttggttgatgatttctttctttgctggtttttcttcaaaatgntagtaagctctgcatgcttctagcaaattgtaagactaattatttggttccacctcataacctggtgcaataaatattacttctcatccaaaaaaaaaaaaaaaggggggcccttttaaagggaccantta

SEQ ID NO: 332 - DNA, 700 bp, Homo sapiens
  SITE (624): n equals a,t,g, or c
  SITE (628): n equals a,t,g, or c
  SITE (653): n equals a,t,g, or c
  SITE (691): n equals a,t,g, or c
ggtykggcggcgtgaacttgttcgccaacgacggcagcttcctggagctgttcaagcggaagatggaggaggagcagcggcagcggcaggaggagccgcccccgggtccgcagcgacccgaccagtcggccgccgccgctggccccggggatccgaagaggaagggcggtccgggctccacacttagcttcgtgggcaaacgcagaggcgggaacaaactagccctcaagacgggaatagtagccaagaagcagaagacggaggatgaggtattaacaagtaaaggtgacgcgtgggccaagtacatggcagaagtgaaaaagtacaaagctcaccagtgcggtgacgatgataaaactcggcccctggtgaaatgacgcccctcccccacctgcccatggcctgggactctctgcgatgtacataactatttaatgcagcggcagcggcgacagccttccctgagaggacttaaaagcagaaggaaaccgagatgcttcccgcarcccgtggacgattctycaggactctttttttaccttgagcacttgcctcgtgagacttyatagaacagtggkttactgtccccccyttytamcttcttattctctctggctcttctgncttnctcttctaaccttctccttccttanccatacttytggaagtaaagaacttgacttaatgccgnaaaaaaaaa

SEQ ID NO: 333 - DNA, 115 bp, Homo sapiens
  SITE (10): n equals a,t,g, or c
gcttttgttnctttaatttttaaaaattacattcttctgatgtaacatgtgatacatacaaaagaatatagtttaatatgtattgaaataaaacacaataaaattaaaaaaaaaa

SEQ ID NO: 334 - DNA, 747 bp, Homo sapiens
  SITE (558): n equals a,t,g, or c
  SITE (618): n equals a,t,g, or c
  SITE (638): n equals a,t,g, or c
  SITE (649): n equals a,t,g, or c
  SITE (675): n equals a,t,g, or c
  SITE (688): n equals a,t,g, or c
  SITE (706): n equals a,t,g, or c
ctcccggaattcccgggtcgacccactcgtccgatttactywaattagggcattaaatatcatgtacttcatagtttgagactgttcactcaaatagggcagagtactattctatctagatgtgtaagtgttttttttaaaatcacatggaacggttttttttatactaaaaagtggagggagatttgtttaaacaagtatttctaaaagaaatatgtacatagttctggaaattatttgtggtaaggaaatattctttactccagttgcatttctcagacaataaagtggtgcatccatgctaccttctactttgtcaacaaagatgctatttaccctttacatttttgtatcataatagattttaaaaatctaatgttctttattgcaagacattcttttgttaacaggtttgtttctttttaatgttttacctaaaatttgacatgcttacaggacaggtttgcctcttactttatttaacattgtagaaatgtaattaataaacaatgctcactacacagtttagaaatagacgttctcatttatattatcttncaaatttgatcagttagcaaaacttaatacaccaattaaaatatttctacatatgaaaangttaccaattaaaattttanaacttggtttngatgggaatattgtcccaaaatgggnacactttgctaanctaagaaccgccttaccnaattccggaataaaaggctttgaggatggaaaaaaaaaaaa

SEQ ID NO: 335 - DNA, 616 bp, Homo sapiens
  SITE (451): n equals a,t,g, or c
  SITE (490): n equals a,t,g, or c
  SITE (568): n equals a,t,g, or c
  SITE (579): n equals a,t,g, or c
  SITE (586): n equals a,t,g, or c
  SITE (588): n equals a,t,g, or c
gctttaaaaaaatccacctgtcttcctgaatgacgcaccacccaccccaccccagcccaaagctaaagcatcctggacaagttcttatgcaaaggagcaggcctgtctcaggcctctagaagagtcggctcctgcctggaggcacttcctggctaggtgggagacagtccaatcaccatggcccacaggaagcaatagctcactctgtgccagttaccgctgagggtattcctgctcgggaacacccaaatgaggtataaactttcccccagacacttgaaacttgaaaacttcccaccaacctgaaacatgggagcaggagctagaagacagggtgctgcacacggtgggtgccagtyccaccagcctgaaacatgggagaaggagctaaaagacagtgctggcacacaatgggtgccaawtctgaatggcaaatgrctaatggaattgngacccgaaggtgtgctggcctggaaaatgaacttatgtnagaactaacgattggcaaaatggccctgaatggggaaaagatggctttttagggggttaaggatacgggtttaaggcnatcccaggtgncatctgnanagaaacttggagaggtaacgaggattgg

SEQ ID NO: 336 - DNA, 313 bp, Homo sapiens
  SITE (176): n equals a,t,g, or c
gacaggctattttatctcttgaatcagaacaagtgccattaatgtcagcacactggtgcttaaaaaacaccttcaaagwtggagccgttgcaggaaatgattggttaatttgggatattactcggtccaggtactttcttgatatgtttgtctattacacaccaaaaaaaggcagnaactgttgctaaatgatccactcatccatcctgttatacctgagactatgctgtcaagcgaaagcaagtctttcctatagaaggccagagctataggatttttatataacataaacttgctatgcagatttactctg

SEQ ID NO: 337 - DNA, 504 bp, Homo sapiens
ggcagagtcagaatcttctcttgttctggtccccattctaaattgcaagtctatggattgttcaataattttattagaaatgaacattaaaatgtggcatatattacctcaagagttttaaagggtcccacaaacattgtgtctctcagtgttaacagtggcagaaatgtttcctttactttaaaggtaatattgcaacatgtctcaaatattggacctcagaaatttcactagggtggcagacctttcaatttttgtgaaggctatttctaaccgccttttttattccaactttactgaagtataattgacaaaaagcatatatttaagatgtacaacttgatattttaatatctatatatactgaaataatcaccacaattaaactaattaagatactcatcatctcacatrgttaccttttgtgtgagtgtggtgagaacacctaagatcttaacaaacttcaagtatacattacagtattattgactatagtcaaattgg

SEQ ID NO: 338 - DNA, 591 bp, Homo sapiens
  SITE (395): n equals a,t,g, or c
  SITE (419): n equals a,t,g, or c
  SITE (531): n equals a,t,g, or c
  SITE (591): n equals a,t,g, or c
gatgtagtcttgagaatgtagcagagatggtggttcaaaagtattaggaaactgaggaatttaactctgaccgtgatgccaaagaatgatgaaatgagaagatgcaatggagatggggaagctttctgattaacttagtttataatgggacattttcagaagatggatagtaagggtaaaagcaagcatgaataaaacacagagaaagctgagacttgcaaaaaaaaaatgaggtagattaaaagaacctttasagtttggtttgatgcagtttggtgactargaaaggaatcattgccttggactagttgtgtwatgcccagggtttacagagtggaggtaaaaatttttgttgcttttgttttttatattaagaagaaggacgttcaaaccanaagacagatcctagagcagagaangaatttgtgaagagaattgtggagccctccctgtctgtgatttttgaggagtgctgggagtcttcgaggggagtttaatgacacccatctttcctgcccgcattctgaatgnttaaggcataagaggaaaacatattggggccacagtaccctctttactaccaacaaagcn

SEQ ID NO: 339 - DNA, 238 bp, Homo sapiens
agatcatacaatatctgtccttttgtagtgtggcttatttaatttagcataatgtcttcagggttcatccagattgtagtatgtatcagaatttcattccttttaaaggtggaataatactctctatatatacataccacattttgwgtatccattcatccatgtatggacacttgggctgcttttatgctttgtctgttgtgaataatgccactgtgaacacttgcgtacaatttgt

SEQ ID NO: 340 - DNA, 319 bp, Homo sapiens
  SITE (243): n equals a,t,g, or c
acaggtgcccctgctgaggatcagtgctgatgatgtggagtgtgggcttccagtggcattagggtctgagtgatgcaggcagggtcttctcttgcaggactctgtagtctgggaggcctggtttccatgcccagagtggcccaggcctgccaaaaacccccattacaatgggctctccccgtttcaratgctgacactttgcaaagagttcctggttcaggcagttacctggggtggtcctgnaagcctggctgggacatgagaccctatattctarctgtagttttgtctctagatagctaggtgaccatgaactaag

SEQ ID NO: 341 - DNA, 584 bp, Homo sapiens
  SITE (49): n equals a,t,g, or c
  SITE (302): n equals a,t,g, or c
  SITE (368): n equals a,t,g, or c
  SITE (411): n equals a,t,g, or c
  SITE (493): n equals a,t,g, or c
  SITE (528): n equals a,t,g, or c
ggcagagttgggattaaaagtagactgagtctataatttacataatctnttcaggtaataattcttctctctagggaatgttgctcatctctcagttatctcatgcttttttgtagctctwctccaagatggggaggtatgtgggatagtgggcaggacagaggtgtggagtgcagagtattgaccttgtgctcactgttcctcacccttctctctggggcatcgtttcttgttctcctagttgctgaatgccgtattgacctccagtgctcatggttgcaagtgatgaactcatggtcagntcttcttcatttctctcattgagtaccccctgggttaattccaagcctggctttgcttgttgcggnaccatagaaaccttgaacatctggcttgtgactcccatttggnattgcctgaacattccaccttgcaaaccttattctaaagctacctcaatttatggcaagtgatttccctcttaagaagcttnctggcaaggaattttaagttagaatctgggttggntctacccttgcacaagtaatcttggcactggtcaaggaaatgcttaaaacttcttg

SEQ ID NO: 342 - DNA, 339 bp, Homo sapiens
  SITE (271): n equals a,t,g, or c
  SITE (312): n equals a,t,g, or c
  SITE (325): n equals a,t,g, or c
aggaatatatagaaagctgttttttttaacagttgcttagcattcctttggattattaaccagtctcataaatgagcgctattgaatagccctgtacctacatcagtttttacatatgcagtatatctttgggatgaattcccagaaatggaattgwaattgctgggtcaaagagtaaataggtgtaattttcttaggtattttcacaagaagtgttaattttaactttctgttttgaaatgatttcaaattttcaaaggagttgcaaganttgtacaaggaactgtatctccttcacccggatgcaccggngaatttatatgtnattatatgattggt

SEQ ID NO: 343 - DNA, 324 bp, Homo sapiens
  SITE (38): n equals a,t,g, or c
agtgaattgagggacttagcattggaacttagtgttgncctgtgaacagcggaaagcaacacagggcagaactcagtcatggggtcattttggtgggatcatgttgacgatcctggcaagaggcaattgtkcatccgagcagtcagaacctgagttccagcaagccctgctaccacagacaaaagtgctttggggctytaaataaacttgaagggcaatctatgctacaggactgcaattctaaggcaagacctggtgctgtgcttgagcttagagtcaaggactttgtcttgtggcttgggtttccagcttagccacagtagg

SEQ ID NO: 344 - DNA, 704 bp, Homo sapiens
gaaaaaattgagaagatagtgcagagagctgctgtataccccacgctcagttactcctaatattaatgacatctgacattggggtggtacgtttgtcacaattaatgaaataatatcgatccattagtattaactaaagtctatagtttattcagattgccttagttttgcctaatgtattttactgttccaggatctcatatgacattatgttatcaaatttgataacattctggctccagacatttatattgacaagtaaggagttgtcgtgtctccttaggttcctcttggctagggcagttgctcagactttctttggttttgatgcctactttgatagtttcgaagagttctggtcagacatattatgggatgcccctcagctgggatttgtctgatatttttctcatgattacactggagttacgtgttttttggaggaagacctcaaaggggaagtgtcatttcatcacatatcaaggggacacactgaccacatgattcaccactgtttttgttcatcctgatcacctgtttgtcaagtttctccactttgtaaagctactcttctttctccctttacaccttgtcctctttggaaggaattcactgcacagcctgcatgtaaggagttggggggtttatgctccatctccttgggggcaagggatttacataaattatttggaattcttctgcaa

SEQ ID NO: 345 - DNA, 285 bp, Homo sapiens
  SITE (250): n equals a,t,g, or c
aagaaaacacactgttaaataagaatagcctctcgaagtgctcagaattttcaagttccccctttagccaccaaatatttaaagtagttatgatcctaaggaaactttgcatatccttctatttgagtttgaaatgctttcraaagctcaagaacacctgctgacaaaacaaacactgactgtggccctttatccttaggttatcatcaaataaactatctttgggccaaaattacacaaacaacttcancaatgctagccaattcaggtgtggcccttaaattt

SEQ ID NO: 346 - DNA, 368 bp, Homo sapiens
  SITE (362): n equals a,t,g, or c
  SITE (368): n equals a,t,g, or c
agtgatccccattcgcatgagcccctgaagtgaagaaacgtgatttgatttgtctaagtctcagaggtagagagcagtatactacaacttgcttccaagactgtgttttaaatacccacgctcttaaccacagtgagcatgaggagatggagacactatagtctgacctttttttgaggatgttggagagatgaaggaaagaaaaacagaagacaagctgttaaataacaaagtttaaaagtttgagagtactgtaggaaatttctgtgggttagatagaatgtgtatactmattttgaacatttgtccataatgaactgtgaaaaatttcttcacgttgaaattagrgcmtgagctcggtnggtagn

SEQ ID NO: 347 - DNA, 301 bp, Homo sapiens
  SITE (263): n equals a,t,g, or c
  SITE (267): n equals a,t,g, or c
ggcacgagcaggcatgtccaataatttgcttaagtttatgtttagcccgtagtattgaaaccaggatttgatttctactcttgagcccagcagtctttccatttaaccatgttgcatttattttgtaggacatggaagcctttcaagattttttscctgcaagggagtraaatgataaaactaggccctttttggacccaaatgctcccaaccagtactcacacaaattggctcaagatcatgaaagtatttgtgtgtttgangctnattggaaaagaggttttgccttttgaactttgct

SEQ ID NO: 348 - DNA, 329 bp, Homo sapiens
  SITE (273): n equals a,t,g, or c
  SITE (282): n equals a,t,g, or c
  SITE (300): n equals a,t,g, or c
agccaaaataaaaaaaaagacatctcatgttcatggatctgttggatatccaagtgcaaaagagtgaagttagccccctatatacacgtatataaaaattaagtagatcaaagacttaaatgtaagargaaaaactataaacacaaagrgacacatcatagtaaaaatsctgaaggattaaagagaaaatcttaaaaagcagcaatagaaaagtgttattgcttaaaaggaaacattaaggttaatagctgacttctcatcggaaacaatggnaaatcagangttcagtgagtgggatcncttttcaaaaggctggaaaaaggattttt

SEQ ID NO: 349 - DNA, 517 bp, Homo sapiens
aaatattccaactatctaccagctccaatragcttgctgaggatgggtatgaccccagtctaaggggaaagaatctaaaacacaagtaaacctgtttaaaggccagatctccagatggagatccaagcrgatggcgcctaaggtttgcccttgaaaactaccaaggaagccacagagagggatctttggaccttctggaaaatggtaaggccccaggtagattatggctcctctgccctggaggctgagccgcccctctggttacctcacatcttctggtttcttctgagtgggacttgatctcatttctgcattcacagcaaggtggaactgtctggcaagagcttaaattaggacctgtggtggggactttaatargcargtggargtttgagatccagtgagatgccagagattagtcaataggtgaggaaagatttggcccaaatcaaaagagctaaaaaaaaaataataaaataaaaataaaaataaaatagttgaacaaataaggttcatg

SEQ ID NO: 350 - DNA, 304 bp, Homo sapiens
  SITE (269): n equals a,t,g, or c
  SITE (287): n equals a,t,g, or c
aaatgtgaaaactaaggccttgcaagcctatggttcacccaggggtaggatcaggcaccttaactctagagcccattctcctaaccactgagccatgattgtcttacaattttgaatactgcaaaactggaagaattgtctggctattatctaagctgttcataagctggaacaagtagatctgagggtaagaggagttctgttttaactaggactgagtttcaaatagagatgtttcagactatagagggggaaaaatggcckgggangtccataaatctaagccngtttcatggatgttttt

SEQ ID NO: 351 - DNA, 331 bp, Homo sapiens
  SITE (302): n equals a,t,g, or c
  SITE (309): n equals a,t,g, or c
  SITE (323): n equals a,t,g, or c
ggacatgacagcaattgaaattattatatcatggcaaaaacctcagtaggctacaccttttggagaggactctcattgtaagtagtaaagtttgatttattaagatttttttttatgtttacaaaagtaataaaatttaagaaaaataccatcctaattcatagaaaatgttaacattttagtgtgtctaaccttttctgtgcgagtaaatagaaatatgtatataaaggcacatagaaaattacataaaaattggttcagattctttgaaggctgctttttcttcccctcctgtgtatttngggcatnttcaatgtctgtancacatagg

SEQ ID NO: 352 - DNA, 116 bp, Homo sapiens
  SITE (106): n equals a,t,g, or c
tagaaaaataattgtaattcaaaaatgttattcttagcaaacatatggttcatatgtgtagaaaacatccagagccatgcataacttcaaaagtacaaaaccccantatattttcc

SEQ ID NO: 353 - DNA, 300 bp, Homo sapiens
  SITE (219): n equals a,t,g, or c
  SITE (256): n equals a,t,g, or c
ggtttttttactgtcatattccacatatcgtcttaagctttcttttacaaaatcatcatgcacttcaagaaggaccaaccaaaagcaaccatgcagatgctaggaagggagtgggaagtgctcttaaaacccagaaatcccattcggctggaaacaaagacatgccctgccctgtggggtccagattcctgcaagaaatgaagggttttcaaggatttnttggtgggaccaatgggttagrttgtcaaaggaattnttttattctgtgggtttgggcaagcaaattgctttatgaaggga

SEQ ID NO: 354 - DNA, 170 bp, Homo sapiens
  SITE (98): n equals a,t,g, or c
ccacctccaccactgcaacatgaactcctgtgcctcaaacgtcagagagcaatgccacagcaagyacgccccagtccctggagcccctggccccatgnacagctccatggaacacctgcacgacagactgctgtgctcttagcctggctttgctacttacaagctctgtg

SEQ ID NO: 355 - DNA, 317 bp, Homo sapiens
  SITE (138): n equals a,t,g, or c
  SITE (160): n equals a,t,g, or c
ctgccaccacgcccagctgatttttgtatttttagtagagacagggttttgccatgttggccaggctggtcttgaactcctgaccccaagtgagccgcccgccttggcctctccaagtgctgggaattataggcgtgngcacgcacacccagctgagttnttattttgaagaaaatcttttgtagaaaatcaatatttaagcagataaaaacagatctgctctgtcttctggggttggaaggcttggagacttggctgttaggctctgtagacacagtctggaaaacttgtgcccagcctccccattttaaggtgca

SEQ ID NO: 356 - DNA, 341 bp, Homo sapiens
  SITE (29): n equals a,t,g, or c
  SITE (70): n equals a,t,g, or c
  SITE (117): n equals a,t,g, or c
ggcagagcggcacgagtatacattctttnagcctggtggagcacgtttcctgaggtgatgtggtctcctnagtgtcactgtgaaagagctcagtcaggaaaagccagcagcatctancctgccaccctccaaaccttctgaactttggggagactccagtcccccaggtctttacccagcctgcagatctcattctagcttaacaagggcatgcgtgtgcagaragttgwaactaagagtgggagggaaggccagaggtagggttgggtgtgatactaggtagcagatattacagacttctggaatgcatttcagatttccaaagggttttcctgagacct

SEQ ID NO: 357 - DNA, 344 bp, Homo sapiens
ggcacgagctaaacagtagcaggcactattctaagcagtttacatatattaactaagttaatcctcttaacaaccctgtgaggtaagtactattaattctccttttacagttgaagaaactgacatacgggaaagtttaaataactcgcctaaggtcaaggattcagaacagcacccatgtgactccagagtcatgaacccctggaaaatttttcagatttcctgggatatttgccccaggaatctgmaagatggtggaaagattaactgtatctcaggcacccgaagatacacttatcttgagaaaacatttgactttttgggttttggccctctgccttcag

SEQ ID NO: 358 - DNA, 215 bp, Homo sapiens
tgggggaagctcattttcctagcagcctccaggatcttcaggggtgaatccctcctttcccacgttggtactctgtacacacaacatgcccattccctgcctggggagctgggcattgcttcatggaatcaraggtcaattttttctctattaaagtcacagatgctcattgcaccattgtgaaggaatgaaatgaaggttagtgcttataaaat

SEQ ID NO: 359 - DNA, 270 bp, Homo sapiens
  SITE (270): n equals a,t,g, or c
ggcagaggtaactttacatggatatcagccactgataattgagcaaagcctgggtgaattacataaggaatcaagactgaattggctgcatattcaacaacagagcccattatccactatggtttttggagtgacaaacagtggttataagtctaagggctctttcatatgtttttcaggccagtgaagcagatttattatgaaaacagacaagggtacagggacagccagcgtscatccattgctttggactgatggagaactccattn

SEQ ID NO: 360 - DNA, 781 bp, Homo sapiens
  SITE (748): n equals a,t,g, or c
  SITE (751): n equals a,t,g, or c
gccttttaatgacccaggcgtgtgtagtgtggaaagaagagggctgtgggaagcaggctggtgtttcaggcttcagtctgaccagggccttggagctatggaggagaggtataaggaaatcaaagcaggggcctttgtgattatggggacagggtggctcctgagagaaataggacaatggagttacttaggaaaggtgtcatctctctgccgtcctcctgcccarcctcctcaccagatgcagccacttaaaaaaatttttatratagctttattgagatggtactgacatattataaagtttatccttttaaagtgtgtaattcagtggtttctcgtatagtcacagaattgtgcaacaatcaccagtatctaattctagaacattttcatcaccctaaaaagaaatcctgtacccattagtagtcactccctgtttcccctactccctcccaaccactagtgtactttctgtctctatgaatttgcctagtctggacatttcataaaaatggaatcataatatggcacagccttttttgtctggcttttttcacttaggcataatgtttgccttctcaagagttacccatattgtaggcattgtgtcaatatttcttttaatgtaatgtaattacaatgtaaatgtaataaggtgtaattaccaatgtaatttacattgtaaaaaatgactgagggcggcccttttttaacttcccgtttttcgttttttttagggagttggtcntcnggtaatttcccaaaatggggggggattttt

SEQ ID NO: 361 - DNA, 125 bp, Homo sapiens
gaacaccccttcacccccaacccctcaaccttatattaccttgaaattccaccgrtgctatatccgggtttgtttgcaactttycaagtgggtattatttccgttarctttgggaggaatattct

SEQ ID NO: 362 - DNA, 358 bp, Homo sapiens
  SITE (307): n equals a,t,g, or c
  SITE (338): n equals a,t,g, or c
  SITE (352): n equals a,t,g, or c
ggcacgagctggtttctgagctttccatagtcacagtctggttttaggcagaaactgtacctccatttgcaatcaacccttttgcagctgtgccttacgcttcttactgtgtttttaccaattcatctggaacaaactagaaaaggaacaactattaagtagaaatgaaaccatttgaaggctcaccaaacaaacaaaaacagtgctagtcacaggagtactgtttcccagcctatgactctggagctgactggtggtttgttgttgttgttgcccctggccagatctctgatggtagcctatgtangcaaaatattttaaggctagatggctccttnaaagctaatacatnccaacc

SEQ ID NO: 363 - DNA, 338 bp, Homo sapiens
  SITE (286): n equals a,t,g, or c
  SITE (307): n equals a,t,g, or c
agaaagaaaaaaagcatttgctttatttttagacgtgatctctgatgtcttcaacttttatcgttctgtttttaaccttagattattataaccagccacctacaaaatctgcaattttctctaataagtcagcacctgttaaaaaggaggttgcacaaaacactcccatttgcagtttggaaggattattatctgctttggtctgtgaagtggaaagtcaatgttcttattcaatctgtgtctaatggtgtcattttgaggacaatggaaaacagatcagtttgantcctgaagatgtggccacgcnaattgtggtacaattgtggaccgagagcggc

SEQ ID NO: 364 - DNA, 423 bp, Homo sapiens
ctaaacaagattaagtttgaggctaaagaagctaagattaagaaaataaaggcctcaragcaaaaagaccaggcagctaatgaaggtccagaacagtcctctgaagtaaatgaattgaaccaaattccttctcataaagcattaacattaacccatgacaatgttgtcaccgtgtccccttatgctctcacacacgttgcrgggccctataaccattgggtctgaaggcttttctccccctcttaatgcctttgctagtgcagtgtattttttcaaggtgctgttaaaagaaagtcatgttgtcgtttactatcttcatctcacccatttcaagtctgaggtaaaaaaataataatgataacaaaacggggtgggtattcttaactgtgactatatttgtactgaagtctgatacagaattag

SEQ ID NO: 365 - DNA, 312 bp, Homo sapiens
  SITE (247): n equals a,t,g, or c
  SITE (252): n equals a,t,g, or c
ggcacgaggttggaactcaggtaacaggtaagcttctttractgaagtaacagaaaatccaactcaaattggcatgaaaacgataacaaaaaggcagggagggctctcaggttgatttaatggttcgaagatcaatgaaagatccaggctttcactgtctctctgttctgccatcctkggtattggcttctccaaaggctgcttttcctcttggtcaagatgactgccagagcaacctaagcaatgnttttngtttgtacctagtgggagagtactgacttctccttcccagcaagtttctcctcacatccc

SEQ ID NO: 366 - DNA, 357 bp, Homo sapiens
  SITE (350): n equals a,t,g, or c
gggcacgaggtgatatatattagggtgtggggggatctaacacaaatcttgattcatgtcttgaaaactttttatttcaaaggatggaaaaggttgcattcttcattcaacacattagtcatatgttcttctgtgttaacatatgacaaatttccatcccgaatagactgatgtttttgtaagattggctggttatcatagcaattacaaccacgcgtgtgggtgtgtgcactcacgtatgcatgcttgcttcatacgttaactcataaaataactaggttcaatgtatggcacctaagycacaggttaatttgctgattattaaaccgtgcctctggtgagggcacagnggtctgg

SEQ ID NO: 367 - DNA, 326 bp, Homo sapiens
  SITE (10): n equals a,t,g, or c
gggcacgagncatgaggctatgatcaattcttttccttccccaaccattcccgtagctgtctctatgagtttagtgttaaactgggatgatctgggactctcttctcagtcagcaaaggcagaaggaagtgttttgaattctcccggccgtgagtggctaccatctaccttgctgatgccgcgtgatgcatggcagtaagagttaatgtttcccaagggtcctttagcagtggagatgctggaagagtggtacacgggtttctaagttacttaacagattttatgaactgctaattaccttgtaaagacattttattgagctagcc

SEQ ID NO: 368 - DNA, 335 bp, Homo sapiens
gggcaccaggggtaaactggagtgagaatcttgaaaggttgaagtttgccaaaggtggacaacacctcaagacccagatgcacacagagttttttccattttcaagtgaaaatatttgagaaaagtggcaaggtggagaattctagaagtaaatagaataaaataattcttgttcaggtctcatgtccttagcttgcctcctttcactggccagccaaggaaaccatttattcccaagatttagagctttgcgctgcctggtatcttccaggatgactgctgctggagctgataccaacatcaagaagtccccagctatggatgaggcctgggga

SEQ ID NO: 369 - DNA, 346 bp, Homo sapiens
  SITE (97): n equals a,t,g, or c
ggcacgaggtcccatatgtagcaattgtttccctcccagaagtgtgtttctggaggagggtgctgacttctgtgccctctgtggcagccttaaccanggacttggatgtttgctcagaggtctttcagctatctatccatgaccatggatgtkcagttcacagccctggctgttcctcagagatctaagtraaccactttgaatgatttcagggttctcttagatatttgtaataaaccgattcctttattaccctagttcagttctgtgaggcagctttctcagccctttgttgtttttgttgaggagagagtatgaaaggtttctgtgaaaccttgtttgggat

SEQ ID NO: 370 - DNA, 436 bp, Homo sapiens
  SITE (257): n equals a,t,g, or c
  SITE (319): n equals a,t,g, or c
  SITE (359): n equals a,t,g, or c
ggcagagggrattacaggcgtgacatggtgcgaacggcccaccctgcagtcttaataccccaaagtgatcatgtgctttcagctctgtggcaaatttcagctctgtggcaaggaaacctgactttcccaggatcataaacaatcaaacacttcaggcaggaaggtgccctcacttctcaagtgcaaagcctccgcagccggtgtggtagccatgcagtctgtacctgcgaacggaaccgctggattttgcaacctgncgcaggcccactgttwaatgccgcatccttttcatagtgccacctgcgggggttctgcgggnaggatgtgaggcctgagaaagccgggctcttgaagcgttnctttccaatgggtttctggggagagaaagtcaacacattacagtggtagtaaatcatttgtcaggtttttatggggg

SEQ ID NO: 371 - DNA, 317 bp, Homo sapiens
  SITE (240): n equals a,t,g, or c
  SITE (291): n equals a,t,g, or c
ggcacaggtcctatgtactgggatacagaggcacacatggcaggtaaacacatgctatggtctggatgttagtgtccccttataatttatttgttgagatcctaaccgccaaggtaatggttttaggaggtggggcctttgggaggtgatgaggtcatgagggctccaccttcacgaaatgggattaaatgtccctatgaaaagatcccagagcctttggtagttcatgagccatgatgnttgggtgttcacgcatgggaggtgaagatgtgccgccttcaaaccttgttnacaatgttacaatgtggaacggcatt

SEQ ID NO: 372 - DNA, 372 bp, Homo sapiens
  SITE (44): n equals a,t,g, or c
  SITE (51): n equals a,t,g, or c
  SITE (58): n equals a,t,g, or c
  SITE (328): n equals a,t,g, or c
  SITE (372): n equals a,t,g, or c
ggccctggtggtgaagaggcgagggccgttcaggaagccagccngctccgngcaggcncgcgaggcgaggcgaggctctcgctggggccggggacccagaacttaggctggacctggaattgatgactacccgtcttctcccctttcctccggtgggaaggaggccagaactggtgatgtcgctggcttttctctttgtttcctaattcgcccactgcttttcttagccactacacgctctcatactgagaatttcacaatgcagaactgatacamgttctccttcatcattggacaaggtgatgacaattgtttgaatcamccccancccttttcacacaatttcagatgttaacaaatcaattgtctttn

SEQ ID NO: 373 - DNA, 632 bp, Homo sapiens
  SITE (406): n equals a,t,g, or c
  SITE (521): n equals a,t,g, or c
  SITE (574): n equals a,t,g, or c
  SITE (615): n equals a,t,g, or c
  SITE (622): n equals a,t,g, or c
  SITE (629): n equals a,t,g, or c
ggcacgagggagatggaaaaatcaaatgaggtggtcagggcaggtcttcttgaaaagggggagtagaacaaagattggaagaaggagaacgagttagccaagtagatatcaaagaaactgwtacctaggttggtggaacagctagaataaagaccctaaagccgattggttgatgttcttgaatggttatcctttaaaaacaaacatttgtcttctctctcattrgtttttrtattgatgttttcttttcctgataattttacaactgtcataatatcccattttyattttcttaacaatttatacatataaaagaacatttataatgtgcaaggaagttataaacacagtcataaaataaacaaccgggagcctactctccaaatggaaaatagaaccttattgntacttttaagtcctgtatgccctgagctcatcccctcactgctcctagaggtaaccactattctgactttttgaatcgtaatcaatttgcttttctttataacttttaccatagnggattactaaatagtataaatttttattattaaatggtcacattcttttgaanggttatacaaatggcatttataagactattttttcactcanattctgntacctanatg

SEQ ID NO: 374 - DNA, 361 bp, Homo sapiens
  SITE (28): n equals a,t,g, or c
  SITE (93): n equals a,t,g, or c
  SITE (94): n equals a,t,g, or c
  SITE (354): n equals a,t,g, or c
ggcacgagcgtgaacctgggtggcgganttgcagtgagccgagatggcgccactgcactccagcctgggcgacagagcgagactccgtctcannaaaataaataaataaaaataagactagagcagcgaaatgtgacgatcacttagagaaacaggccattaggaatccttcctcactgtgttcgctctagacaaaacaatggtagattaatgtgttcagaagccaccgtcattactgcttttgccgaagtatagttgtgaagtcacaactacacagagrtttcttcaaccttacaaagtgtgtctgtgacatttcttttttttaataagccttgtttgcagattaaacaaggncttttag

SEQ ID NO: 375 - DNA, 616 bp, Homo sapiens
  SITE (10): n equals a,t,g, or c
  SITE (543): n equals a,t,g, or c
  SITE (574): n equals a,t,g, or c
  SITE (596): n equals a,t,g, or c
  SITE (598): n equals a,t,g, or c
  SITE (603): n equals a,t,g, or c
ggcacgagtnaactatatacctcaaagaattagaaaaagaagaacaaactaagctcaaagttagcagaaggaaggaaatagtaaatattacagcagaagtaaagtagaggctagaaaaataataaaaaagatcaacaaaatggtatttgttctcatactatgataaagacatacttgagaccgcattatttatggggaaaagaagtttaattgactcacagttccacaggctgtacaggaggcatggctagggaggcctcaggaaacttagaatcatggtggaaggtgaagaggaagcatgcaccatcttcacatggcagagcaggagagagagagcaaagttggaagtgctacacacttttaaacaaccagatctcttgagaactcactcactatcacaagaatagcaagggagaaatccacccccatggtccaatcatcttcaccaagcccctcttccaaccttggggattacaattgaacatgagawttgggtgggggaaaaggaaaagcaaaccatatcagagatttgaatcaataatncaaagccttttagcaaagaaaagcctgcacncagatggttttactaggtgaantncccanacattaaaaaaat

SEQ ID NO: 376 - DNA, 351 bp, Homo sapiens
  SITE (326): n equals a,t,g, or c
  SITE (329): n equals a,t,g, or c
  SITE (336): n equals a,t,g, or c
atgcccaatttgggggtgttggccttcaggttctrattctyttcttgtggatctttgtattttktracatacagcatctgcccattagcatgagcctctaggttaattcaraccatctttatgtcttggtaccaggatataaactctctatgtagagtaaacatagaacttgtaacatcttgggtgtatttgaaatgactctatccccagtgatgactggaatagaaacacaattggtcatcttgaagatactgtccataggaaaggggaaaagtaaaggatcttaggtcaaatggagtttgagatatccaaggcaagacattgcntcnggtactnccatgtgggctccac

SEQ ID NO: 377 - DNA, 284 bp, Homo sapiens
  SITE (258): n equals a,t,g, or c
attcacagcttggtatgaatgacaggccttgcgtatttctttgcatgcatgcaccggtcagtactcagctgaatattaaaggaggttctctgcagacctccagagttatctgtcttcctttcttctttcattccttcctttcctttcttttctttccttctccttttctctctctttgctttccttccttcctttttttcttttgacaggagaattgcttgaacctgggaggcggaggttgcgtgaccgagatcacgncattgcactccagcctgggcaataag

SEQ ID NO: 378 - DNA, 356 bp, Homo sapiens
  SITE (311): n equals a,t,g, or c
  SITE (350): n equals a,t,g, or c
aagagtctctgtctgtcaaatggaggtaattgccttggcggtaggtagaaagtgggtgtaatctagaagggccatctttagatacagcggcacctaaatggtaatctgataatatttcaagtagacataattaaactatgggatctctacctcttctgtgccatcaactcctttggtggtctgacaagatttatggaccctttctcagaatgttttaaaataaagaaacaaacagcattacaaaggatagtgactttactttacatagtccaataaaaagctggcattattagttcacatgtggctttttncaatggcattagatagccaagttctagtgggaggggccncagtta

SEQ ID NO: 379 - DNA, 233 bp, Homo sapiens
  SITE (198): n equals a,t,g, or c
  SITE (230): n equals a,t,g, or c
ggcacgagccagagtcaggtagaaagcagaccatgctatatagggttaaaattaaaactcctctgatgagactttatggtttgtaaggcatgactccccaggtgccttgggtagggaatttgggcaagataagaaaaaatcagagtttagtcctcaaagagtagaataagatattaatgtcagaaattaattattgtnccccagactacctttggcaatttataagttantaa

SEQ ID NO: 380 - DNA, 337 bp, Homo sapiens
  SITE (247): n equals a,t,g, or c
  SITE (249): n equals a,t,g, or c
aacgaagaagcctcgttatgcaagcgaaaaacaaagatgctttgcagcctattaaggaagataggactgggaaggcccaggatgatgctttctggcttcaatcacttattacggatgcattccatgataaaggatttcagaaaataaaagaatactttcaacagaaagagagccactttcctcaaaaatataatcgtcttctattataccgtcttgacagatcaataaataaggractagataaaangnaatttcagtctgtgtcactgttgctgaatgtattcagcgattcctcgtggatggcctgaagaagatgaaccttgctaatttcggcagg

SEQ ID NO: 381 - DNA, 369 bp, Homo sapiens
  SITE (361): n equals a,t,g, or c
ggcacgagagccaccacatctaaccgaaagcaataattttaaatgctgaatttggcctagcaaagcaatatccagataacagaaaacatcatttttttcaattatttgcaaaacagcctcatttttaaaaatttgactttatgagtttaaacttagcttcagaccatttgctagacaaagttttcccagacagggtgagctacagcataaaaacctaaaaatggaagaaatggaaaaaaaaatctaccaattgaacatgagactggtgagtcatgcataggaatggacagagggttgtgaaatccatcttcaactacagcttcagagcatgccttgagtcattcaccttattaatctcaantcccattc

SEQ ID NO: 382 - DNA, 269 bp, Homo sapiens
  SITE (250): n equals a,t,g, or c
cctaattacctcctaatgccaccatctccaaatactatcacactgggaattaggtctttaacatgtgaatcatttggggtggagaagacaaacattcagctcataacaggtaaggtagaaaatctcaagaatttatattttgtatatgaaagatcattaatgaggcagaattttaagtttaatgccaattttgaatctatttttatcttttctacggttcttttttactttttgaatttttgaaactttncatgtacaaaggggtgaat

SEQ ID NO: 383 - DNA, 708 bp, Homo sapiens
  SITE (299): n equals a,t,g, or c
  SITE (358): n equals a,t,g, or c
ggcagagctcatcagaccctctttcctcatctctctactaaaaaactacagtgaataacttccactgtcatcaaatagaaactttctgtgctggtttcccctaccccacctttctgtgcttgataacagaagctgttgggagccccaccttcagtcttatttgtccttccttgtgggttttctttggcagttgaatttattcctgctaaatgcagaatgatgcctgaagtgttgctgcaacaacttatgcacacttccatgccaaccgtcacccttctaaacctttttttcatccctgngaactgcagagcttggtctttgtgcagccttcggattaactgtgcacagtgggcttttnccakgttttccctgtttgccttttctggcaggsatggatgtgtaagctgtgccagcatttggcctgtagtacatgtcctaaatagttatttacacagtttgagtccattttagtcaactgggtaaataacagccctcttcaaaagatttataaatccataaatatgtctttatacatacccaatagacagaaataactcaatctgtcaagaacatatcccaaagaggtgtttcccccacagacaggagtaatacatattttaaaactttctctgacatattatttttactgcatttcttttttcctcattccttttccatttttaccacttcattatggcacctgtggtt

SEQ ID NO: 384 - DNA, 501 bp, Homo sapiens
  SITE (301): n equals a,t,g, or c
ttggggtcacttgctagaatttagaagagaagcactttctaagactgcacctggagaacagagtagaagatctgtggagaaagttccaggatgtactcaagaattacactgatgccacagaggatcgaaaggctgcctttgagaccctgcaggtgaaggatgagaagagctccaaagagattgaagtacagatgaaaaaaatacagaaactacaggatgccataactatttcaaaaggcaagatcatgatacacagccgtgagagtgaagatgagaaccggtatatcygtaatgacaaggnaattggtccttgtacaactgcgaaaacttaaggcccaaagaactcaggcccgggcagcatcccagaagaacttagtcagactcaccctggaaagtaatgccaccctcaaggccctgaggaaagattgttgataagggtgaaaagatccttaaacttgctgaaatatgtagggaatttgaaaccgaaggagaaaaagtgct

SEQ ID NO: 385 - DNA, 250 bp, Homo sapiens
  SITE (250): n equals a,t,g, or c
aaaaggtaattaccaagtaaatagtaaacgtgctacttggcctgtargaagaattaaatatatttacacttcaaaaagaagcaattagtggtagttgattcactaaggaaagtgccagaccaggacagaggaaagagtgtaaatagatgaagacagagagatttattattaaattaaagttccttaattactgcaaatgttaaatatgcagttttctgacatttaaatgatgcttttcaccaaaatggan

SEQ ID NO: 386 - DNA, 580 bp, Homo sapiens
  SITE (398): n equals a,t,g, or c
  SITE (404): n equals a,t,g, or c
  SITE (487): n equals a,t,g, or c
  SITE (536): n equals a,t,g, or c
  SITE (556): n equals a,t,g, or c
ggcagagtacacacacacatacatagtgattttaacagacaactcaatagcacacattctttccttttctaagctgtagtagttttgactttttgggaaagatacctgcttactgaggccaaagcaatttttcttcagtgactgtaatttgcctgtgtgactcgggtacagctctgaacataatttttacaaagtctgtgcccacaaaatagactaaaatcatttaaaaatgcaaaagaccaaaaatggaacaggtgacctggtgccttttaggggtgtcggaaatgttctctctcttgcacagagataggaagcccgtttgggaccattttttgctttggtcctagcttccttgctatctgcttagccagcaactgacatggtgaagacaggtttgncactgnaaatatgatgcaaacttcttgggcaactcttggcaaaacagaagcatcaactgtgtcaaaacaatactttggcttgaaattgnggcccataaactgtggaagcccttagggctggttcatgggaaattgganggaaaaaatgggcccctggnaaataccctttaaattggcacttg

SEQ ID NO: 387 - DNA, 371 bp, Homo sapiens
  SITE (332): n equals a,t,g, or c
aggattacagtgtcatacagaacagtttcactgctctaaacatcttccattcaccacatattcatccctccaccctccctaacccctggcaacctctgatcttttgactatctccataagttttgctttttccagaatgttgtatagtcagaatcagtgtgtagccttttcagaatggcttctttcacttagcaatatgcatttatctttcttccacatctttttgtggcttgataggtgtctctttgtattgctgagtkaacattcctttgtgtgggatrtgccatagcttgsttrattttacccattggaagggacatcttgcttgcttnccagctttctggggcaatcacgggattaaagctggcttt

SEQ ID NO: 388 - DNA, 741 bp, Homo sapiens
ggcagaggtccacaaaagtccaccagaacctatacactaaagttaaacaggttgactgcaagctaaagtagaagctccttgtgtaatacctaccctttgagtatgggttggttttagttatttgcttccagagaatagaaatttcttccatgattcagtgcataatattttgacttgtctttcttgctagtagactttcatgctctcactctctctctctccctctctctctgtctctctcactggcagaagaaatcttaaaagtttgagaagaaaatatggtaaataactaagagaaatctctggtcaatactcaacaagtccttcagtccaacaatattccatacatgaaatcctgccaaaaaccaggtgctgtatgagtgagctgtggctgccatagcaagacatcatagattggatggcttaaacaacagaaatttattttttcacagttctggaggccagaaatccaagatcaaggtgtccacggggctggtttcttttgaggcctctctcctggcttgcaggcggccaccttcccaatgtgtttttgtgtggctattttttttaatcttagtgcatgcacacgcctggcatctaactttcctcttctcataaagactccagtgtgaccggatcagcacccaccctaaagagctcattttaacttgatcacctctttaaagaccttatttccaaaggcagtctcatttggagtcattcggaggtgctggaggttag

SEQ ID NO: 389 - DNA, 660 bp, Homo sapiens
  SITE (565): n equals a,t,g, or c
  SITE (583): n equals a,t,g, or c
  SITE (660): n equals a,t,g, or c
ggcagagcattgtcacacgagggaaaaaaataatgccaactggaaagtcaggtgggttggacctgaccaaagtctcatcatggaagaagggaatgaaccaagcaacctcagtatgtttgctggaattttttcatcttgtctatgctattgtattttaataataagcgtttgtcctaaattctctgtgaggtattaaaaaaaattagagcatgaagtggagttttattcttcatccatgacttaaatttaaacctccagatttataaaaataaattttaactagcggttatagagcatagattttatttctttcttagaaaagacttaaatgacagaatggattcataataatacacatttcactgcaatcactgtacacatttcaaataaattatcactatccttgkttcttgggtgaatgactggtatttggggctagtgtgtcatcctgtacgcctgcttacccctcttcttcctttaagctctctgwattattccttttctgkgttcattctttgcttaaaattcacgcctttgttccccacagctgatatgcttgcagccnatattctggggctccaantcactttgttttctccccccctaaaaattttccacatcctacccaaaatacctgaatttggcttcccgggaaccacn

SEQ ID NO: 390 - DNA, 535 bp, Homo sapiens
  SITE (451): n equals a,t,g, or c
  SITE (461): n equals a,t,g, or c
gtttaccacaattacagctctcttttaagcctcagaaaaaaatctcacttccgtcttgaagtcttaatccacgctttttatatccatgtgcctactccttctctgaaatctcctatggtttatctttttattcatttaatatcccacgaattgattttattatatattttttatggttgcatgtggtctttctagttatagcaatatacacatacatgcataaatacatatacacctatgtaaatgtgtgttgggagtatgtattcacacacatacatataccccaaggccatgtgtcatctttatcaatatttaagttttggaattgttttgtttgcctcctatatcatggaataaatggtaaagagggctaatttattactctaagtgggatttcttattacattaatatcagacatatagaatgtactttgttttactatttgtaagntacaaagggnatataaactgacatacatcagcttgaaacctgaggataatgctaaaatgttcctaattattttaaatgtttaag

SEQ ID NO: 391 - DNA, 285 bp, Homo sapiens
  SITE (108): n equals a,t,g, or c
  SITE (157): n equals a,t,g, or c
gaggtaaataagagttattaataatgggttgtttgtattgaaatattactttatctttaagtaaaggcatgagtctgcatttatattattgaatttataaactggaanatattatttctgggtttgtttgttttacctgactgaaatatatgaggtnatcagtactcccagctacaaaatttactttctgagttctggtttcctttgtataacattcctggggccatgcttggcacatagaatagggctcaagtactgctggtggccctacattccagcatctct

SEQ ID NO: 392 - DNA, 389 bp, Homo sapiens
  SITE (386): n equals a,t,g, or c
aggacaccccttacatatcttctgcttcttcctatactgggcagtctcagctgtacgcagcacagcaccaggcctcttcacctacctccagccctgctacttctttccctcctcccccttcctctggagcatccttccagcatggcggaccaggagctccaccatcatcttcagcttatgcactgsctyctggaacmacaggtacactgcctgctgccagtgagctgcctgcgtcccaaagaacaggtctgcgcttgaaagggatttggtttggccccctcctttatttgtttatgaacagatgggtggatggaggggtattatttctaactgtttgtaaactgggtaatgtgaggtgttgactgaggtttgggtttggtttttgngtt

SEQ ID NO: 393 - DNA, 216 bp, Homo sapiens
  SITE (51): n equals a,t,g, or c
  SITE (207): n equals a,t,g, or c
ctgtggtgacttcttttcctcaagggttcacaagggcagcagactgatctncacaaaagggactaagcctggctgcggccgcacctgaatgcctgtccacacctgtccctggtgcaggcccttcccccgmagccccggtgaaccttgtcctgtaaggctcacggtgcctgctcccttctaaaagtcctcatttctccctttaaacgnacgccctgt

SEQ ID NO: 394 - DNA, 355 bp, Homo sapiens
  SITE (204): n equals a,t,g, or c
tttctaaacattccagtctagacaagacatgccttcagaggatgttgtatctttacaagtctctctgaattaatcttgccatgaaatgttaccctgatcgtgtggactatgttgataaagttctagaaacaacagtggagatattcaataagctcaaccttgaacagtaagtcagttacatttttgtaaaaatcctcaaagatntttttgtcctagatttgcttttctttctcaattgttttttgaactgctggcatttgtcttgttttaatcatgcattaaggttgtcatgcttagcactactaggggcagaaagtagtgaccattacttgtttttttaatattaagggaattg

SEQ ID NO: 395 - DNA, 358 bp, Homo sapiens
  SITE (345): n equals a,t,g, or c
ggcacgagtagagcacagccaaatttctatataaaagacacactgatggtgattaatttcctcttatctagagcctggcttatggaacaaagtagattgtctatcttccttattaatctagtaaatgaatttagccttgttcctagtgtccagaaagttttagtaatgaagaaggcaaagcagatacaaatacatctatctgaaattgctgcccattggtatttgttccaaaagtttgattatraaatcagttgttcagaagttgggaagacattttcctttgggrtkaaaatattatataggrtcttgtgtctcttggtgattccwtcaaatccaatataccgnggtatagtattgt

SEQ ID NO: 396 - DNA, 326 bp, Homo sapiens
  SITE (187): n equals a,t,g, or c
  SITE (251): n equals a,t,g, or c
  SITE (301): n equals a,t,g, or c
ggcacgagaaaatatagaaatgggaagaaaatgggatcattatgtccaagtacacaaaaataaatgtatttttgttagaaggaaattgaagggaaagaaataaacacttggaatgtagagattgagagtctaattggatatttttaaagttgaaacagaaggaagcaggcaaatatgagaatcagtnaacccaatttataccacagtatacgcaactggaaatgaaaccaagaataatagatactcatagnaatgttagaagtgaaaagggatcttagagattgattttcactcacctctntcatttgacgtacaagtacacttgg

SEQ ID NO: 397 - DNA, 689 bp, Homo sapiens
  SITE (447): n equals a,t,g, or c
  SITE (686): n equals a,t,g, or c
tggattttctaatgtaagaaaatgttgctgttagtaaaagtttcctcagtgtgccagaaagcagatggtggcagtgaatagtgttttcttttgccaggttttgtatatgctttctaaacctgcaagagattttgcttttccagattcagatttctgatcttttttattttaaaacagaaatagaaacttatatttaaatgtacttgcatcatgtggtctgtttgacatattatggttacttgaaaatgttgagtaacatttgatgttctgcatgaatttcttctctaagagtcttgggacttttaatgttgttctatactctctctctttatggaaataaaratttctgccttgagagtgctacaatggggagttttgagtgatttatgaaaagcaatgggtaagatttttttatgtgaaaatttgtattttgtttcactcccaatnactgtgcaagtaccagcttttcacagtgaggtttcttacagcatgactttgttcattatgacttcagtgtttgtatacagttttgaataatttatttctgtctactactggtgagatgttactttctgctaatttaaaatgttttgcctaacgtttttaatgaaagtccttataaatatgtttgtttaaagtctgaaatctaaacatgtccttaacagtaccaacgaggcagcattaanaca

SEQ ID NO: 398 - DNA, 370 bp, Homo sapiens
  SITE (287): n equals a,t,g, or c
  SITE (369): n equals a,t,g, or c
  SITE (370): n equals a,t,g, or c
gcagcttctgaagtctgcagagttatgtcttttgtcaaatttgggaaattttcagccattgcttctttgatttttcagccccacactttttcccatctcccctggaacccttatgacacagatgtgagatcattgttcatagtcccacaggtccctaaagctctgtccatcttgttttcccatgcattttctattcatttttcagaatgggaaatttctgttctgtcttcaagttcactggttctttcctctgttctgtctattctgccagtgattcctttatagantttttaaaatttcagttatggtatttttcagttctaaaatttccatttgggtccttcattatgtcttctatttatttatttnn

SEQ ID NO: 399 - DNA, 613 bp, Homo sapiens
  SITE (573): n equals a,t,g, or c
  SITE (592): n equals a,t,g, or c
  SITE (602): n equals a,t,g, or c
gaaaaaacactcctcatgccccaagtcatacccgatgccaattaaatcagaatgtctcaagttggaagttaggcagtttttaaagctcctcaggtgattgcagtgtgcagaaagtttgagaaccactgcttaattgaatgtaggaggatgaactgcttctatttggtgggaccttgggcaagtcagttttaagccttggttcccatatctgtaaactgggtgttggattaaatgtcatgtaaggttccgtggtccttttcagcatataacttcaaattctgtaatgttaaaatcaatttggacatgaaaatgtttgaagcactatagaagtatccatcttagatgctaatgttacagactttttaaaaaagtgctaacattgtatggacttaaaattcaratttgccttccctcaattattttgagcctcartttaragactgagggcaaatggaagcatataacttaccttaracaactcctkgtttctgatacacaacatctktgggtaatttaggaatacagtaacatatatcttaaaagtcgtgtctgttcactaatattttacttaanccaatgttggaatacttgncaataatatnacactttgtaa

SEQ ID NO: 400 - DNA, 539 bp, Homo sapiens
  SITE (364): n equals a,t,g, or c
  SITE (519): n equals a,t,g, or c
ggaaaaatggcagagttaagatgatacccccaggatgatgaatacaattgacttcttattggatttggaacgtaattagaaagaaatatgcacaaaggacagtaacgtatccacatatagatgtacccactcagcctcacttcatagccagtcctgatccttttcaaattcagttgaactactttgggccacagtctcccagattaccaggtacttgctaaaaatatttagagtaactaaaagcagatcatcccaagaaacttacttcaagttaattgaaaatccaatattcctgaatcatttgttaatagttctcaaagaataatggtaataagacaattcccacatacctctactctttggntttataaagtataaacctgggcactaaaataatttaactacctgatatggacaagaactcaataaccagcataatcaggaatgagactttatttattcagtaaggacttgcaaccatatccatacaaaagtcttttcctttcattcatgctggantcaaatgaatagcaataaaa

SEQ ID NO: 401 - DNA, 609 bp, Homo sapiens
  SITE (475): n equals a,t,g, or c
  SITE (477): n equals a,t,g, or c
  SITE (492): n equals a,t,g, or c
  SITE (535): n equals a,t,g, or c
  SITE (571): n equals a,t,g, or c
  SITE (589): n equals a,t,g, or c
gccacaacgcccagcctgcttgaacttttaaaaagatttgtcagtcatatgttaaacattttagaggactcttctgttttcttcctgctttatctccaattcatactacctccccaatgtctacctttaaggagaaaccatcccatattgtaagcttgaaagggtcatttataataaacgtaaccagktwtgttcacagatacataawgtgcctctttaagatgactagagatcagatttgccaaattttcctctctgatttctatcaaggtcatcctaggtatgtctcatctgtttaatcttcctttctacgtagcctaatccatagtatatttttttttgtggtccaccacttagttctttttctttatttggactcagatggggtgaaagtattactttcaacttgagtcgctacatttccccaagaagaatttggggagggtgaaggtgaccctgaaaagggccctgtagngnctcccaagttttcgnctttgcttgggtccctcctgggctctctgtcatctttggtcanagtctcaatcactcatgggcttaaatttcatgtcanatctttagtaggaataanatggctgcttaaaagcctgg

SEQ ID NO: 402 - DNA, 1447 bp, Homo sapiens
gcagctgccaggcgcactgtgagccccacaggtggaccaccgtgactgtagaggcgctacacggccccacgcactccgcagacgcagcgtcgcaacctcggcagcccaccccaccccaccccactcaaccgggcccgccgcggcgcccaggcggcaggcagctacctggggctctcccstaggatcagcgccscggggaccsccatcttcggctttctcgcaytgccgccgtctgttagctgcgccgaacccagccaatggcggccgcggcggacggaaagccggaaggcccaagccgcgcagggsccgttttagggctccgggtctcctgcgacccgggcgccgggagacttgtcccgcagtcctggagggcggagagggcagcccagttgccctcccgacactccartcgtgttggagttaagtctgtgcatatatatgtctttatatttatatattatatatgtatgtacatacctggataggggtgtgtgtctgtatttaatagggcaggtttaagcaagtctatgtacagacctggatagatatatgtgtgtatgttcgtgcataaatatatacattattatttttaatagggcagktttaagcaagcccgtgtatacatacttggataaatggtgtgtgcgtgtgtatatttttttaatagggcgggtttaagtgagccygtgtgtacatacytggataggtgatttgtgagtatttttttttccagcgtttgggctacagagaggcaggcatttgagcgagctcccccgagcctgcccaggaagcggcgcatcacccctcaggagaggtggtgcctccagttccaccctawgcactgtgccgtcaacccctcctgtatctgcatctgcagggcttgyagtatgtacgttcaattccttcagcaacgttcaatgaatgagtgcctactgtgtaccamgcactgttctaggcactggagatacaaaaggccaaaattcctgctctcagggtttgccggcagtctaaatggacaagtatttgttgcacccttctttagagtctgacagtgcagagtaggggagatgaatcgctgcagtgagtgatgtcaaagacctcacccaagactagggagacaccatgtttgcataaataccttggtctgcctttgagaaaaacatggagtgagttaaaggaattcagatgtgggagcagtgaaaggcatccgaggtaagatcaggaaaagctccctagggcaggtggcaaatgcggtgggtctgcagagatgtggagggtgaggctgtgtgtttcaggtcagtagagtagaagggcggtttgacgtttgaagaacaggaatttagactagaaaaagcctttaatgactggttgtggcatgtgcacttaatctggtgagaaatgggtaagcattaaatgttttttctatccattaaatgttttgaaccaa

SEQ ID NO: 403 - DNA, 609 bp, Homo sapiens
  SITE (562): n equals a,t,g, or c
  SITE (582): n equals a,t,g, or c
  SITE (603): n equals a,t,g, or c
gaacaaaagctggagctccaccgcggtggcggccgctctagaactagtggatcccccgggctgcaggaattcggcacgaggaagtttcaatttagaaccccgccaacccctcgcctttggcatggaaacaccatcggtggtaccagtaagggtctctcctttgctgccgacatgggggatttggggttctttctccttcccatctttcctgtgccctttgcagacctaggctagccaccctccaccaggctagccagctccaatctgattttcttagattgtaggtcttggtcccccagcggtctgtcgtgccattgggaaggatttgagggtagacctggccttggtgtccctgccattgcctggggaccaggggccctgagggtcccacgtggtgggttaagtcaagtggaccatgtgcttaaacttcttggactagctttttctgctggttggacacatcatcttgkgttcgtgatctgatgcgttagccctaacttttacatctgctattggaattkggaattaaagaaaaatagcccactttagaggagagaagatnagaagaggaggctagataangatgttgaaagctaacaaagnaaaagg

SEQ ID NO: 404 - DNA, 631 bp, Homo sapiens
  SITE (19): n equals a,t,g, or c
  SITE (27): n equals a,t,g, or c
  SITE (28): n equals a,t,g, or c
tttaagggggacccctttntcactaannggaacaaaagctggagctccaccgcggtggcggccgctctagaactagtggatcccccgggctgcaggaattcggcacgaggagtgatgcagttataagccaaagaacaccaaggattgccaggagccgccagaagctggtaggggcaagaaaagatcctcccctagagccttcccagggagcatggctttgccaacgccttgattttggacttctagcctccaggactgagaaagaatgaatttttgttgttttaagccctgaaattcatggtaattcgttatggcagtcctaagaaagtaacctaggagcctagggatagaagagtgggaatggcacagttgcagatggagaagaataaaaagactttatttagattcaaatcaaagkgttaataatcattcataggctactttcttgtcatctacattttgctttttttaatcctgcagtgaggacagagggaggcatgaattttccttgatttcccagttagagctactagaacatgtccctcttttgcattttgaataaggtgtgtcttcccctagtccccctccttactgaatttctttttctctgctgtttgtgaactgacagtat

SEQ ID NO: 405 - DNA, 648 bp, Homo sapiens
  SITE (453): n equals a,t,g, or c
  SITE (520): n equals a,t,g, or c
  SITE (522): n equals a,t,g, or c
  SITE (609): n equals a,t,g, or c
  SITE (627): n equals a,t,g, or c
  SITE (647): n equals a,t,g, or c
gtgttaatatccattatggtaaatgagagattttggtaaatgaagtttcaaccctcttactgctttccccacattccccatcctcctaatgtagttaaatcataatatttagtcaaatcagtgktaagcatttgctttattgtgattatctaaatagtattctctgctgagccatgtagagcactatgtttatgtttccttttttgtacacagttacaaatgtatcacacaataggtcaagtttttgtttgtttgtttagagacaaggtctcactctcttgcccaagctggagtgcagtggtgcaatcaagcttcactgcagcctcaaatacctaggctcaagggatcctcctgcctcagtctctccattagctgggacctcagatgtgcaccaccatgctcttttgtagagatgcatcttttgtagagatgggatctttctgtattggccangatggtctggaacacctggcttcaagcaatcctccctccttggcctcccaaagtgttatgattatangngtgagccactgtgcccagcccagttttgagactggactcctcctggagtcctattctgcctgctctcttccagagctgccacacagntccaagcttgggaggtgnctccctcctactgggtttcnt

SEQ ID NO: 406 - DNA, 143 bp, Homo sapiens
  SITE (142): n equals a,t,g, or c
gctcgtgccgaatcggcacgagttcggcacgagctctggtgtccggctgtgggcggcttctccgtgggctactagcgggcccggcatctaccagctggtctcggcttccagctcgcgggttcagggaagtggtggagacccna

SEQ ID NO: 407 - DNA, 425 bp, Homo sapiens
  SITE (412): n equals a,t,g, or c
  SITE (415): n equals a,t,g, or c
  SITE (422): n equals a,t,g, or c
gtccactctgagagatttcccttcattcttagtgaattatttcatttggctattaatttccaaggtctccttttgatcctgtaattgttccttcttatagccttttattctttttgtgtggatgcatagcccatctctaagaataggaattaaattttatcaaggytttcttcttctccctgccttgcctttgtttcctccagatttcctttctctactgtgwttgttttggtctgtctttcaggtaagatactttcctacaatttctagtgagccatggctatccattcatatttaagagggaggcactaaaagccaatagcaagytgtatgtgcatggatttctcttaggctagtcaatttccaataaagaaatcttttattcttttgcctagaggtggatgggcctagnggngggatgncat

SEQ ID NO: 408 - DNA, 613 bp, Homo sapiens
gtgaaggtgatgctagctgctataacaaataagcacgcctgtgcacagttgctcaaagatagtagaagtttatttcttgtttatataagatccataatgactcttgccaattagcaggctgctctcttccaagtggtaacccagggactcaagctcttttcatcttgtggctcagccatctgacacatgtggcttccagcactgccctgctgttgtctgcacaaagctgatggaagaagtaggaatttgcaggaccatgtgtggagcattttaaggatgaggcctgggagtggcacaaatctttgaactccaggaggctaggaaagagagcataaccttgtgcccaggaagatgcggggcatagtacatctttgcctcacctgatgtattgtttgtttaaaatcactttggattctcatttaccttttccccctcaagatctttggttttgactttggagatwaccagaaataactaagcatgcttcgtccctctacgatttcatcctcatggggaagcaagaccccactcttttattttcatgatgtatatatgatgkatgatgtatgtatgtatgtttgagacagagcgaggactcctctcaaaaaaaaaa

SEQ ID NO: 409 - DNA, 674 bp, Homo sapiens
  SITE (541): n equals a,t,g, or c
  SITE (630): n equals a,t,g, or c
  SITE (651): n equals a,t,g, or c
gctgagcttgaaataagttgatacacaaaaggagatgtcagttagccagttggatatgttagtctcaaggaagagattggagttggagataataatttgccaagcaccagtatatagatattatttaaagcaatatatttgaatgaaattaccttgaagatgaatgtagatatagttgaaaggaaaccatagatctgaactctaccagccaccaacattcagatgtccagaaaaggaaaaggatccagcaaagtaaactgagaagaatctgccagtaagtagaaggaaagccagaagagtataaacctcagaagccacatgaagaaattgtttaaagaatgagggagtagtggttgaatgggtcctgagctacagagagatctagtaagttgaggactgagaactcaccattgggtttcataaactaaaagtgtatagtggctttgataagtgtagtttcagtggagaaaaactatgaaagcctgagtggggtaggttaaaagagattagaagggaagtaaccaacaatgtccgtactctncaattaagaacttaaattttaatatttcatctgatttttgccacaggaatttgaatcaagttttctggtacagcatttttaaattttgngaataaaatggaacctcttanaattgggttctttgggactcatt

SEQ ID NO: 410 - DNA, 742 bp, Homo sapiens
  SITE (572): n equals a,t,g, or c
  SITE (656): n equals a,t,g, or c
  SITE (671): n equals a,t,g, or c
  SITE (713): n equals a,t,g, or c
  SITE (730): n equals a,t,g, or c
gtcggcacgagcttagctgtgtcttttactgctcttcaactaccacccattcacttgcccccaaatcgagacctccaaaccaccacccaccctaagctaaaacagagaaatctagctctgtgctacttacgggtgtcctcctgccacctcacactggtcatttctaaaacagaacctgtcatttctctctctctgtatttcccttcagtctctgggacactttctatccaagtggtcaaaccagaaacttgagacgtatggtaaatgcttccaccttctgtgccagtacctcatggcagtacttgctttcatcttggtaatatttctcacatctacctctttttttctgaaacaagatttagctctgttgtccaggctggagtgcattggcacaatcattcacagctcactgcagcctccaccttctgggctcaagtgatcctcccaccccagcctcccgagtagctgggaaaacagctgcccaccaccacacccagctaaactttttaatttttagtagagatggggtctcactctactacctgggctttctcacttggaaaattgaactncttgaactcctgggctcaagtgatcctcctctaggccttccaaagcgttgggattacagatgtgaaccaccggacctgggcctnaaatctacctattgnttctcaatttcctttttaaaagtgagaagagtcaagacttgnataagcataaaaagcanaaagctgagtat

SEQ ID NO: 411 - DNA, 266 bp, Homo sapiens
ggtcattgctgtgtgtctcaccagcaagagtgatgttctaatgacattcattacacttagctggcctctgtaggatgactcagatatggtgtccatattgtcccatgtggttcccatttctttttttcttccctcactttgacagcgcacattctctggtagtttgctgggaaagggtatwtkaaaagtaaatttggaggggatttaatttctaaaaatgtctctattacatccttaagtgattgatgtttttatatggaattcta

SEQ ID NO: 412 - DNA, 593 bp, Homo sapiens
  SITE (464): n equals a,t,g, or c
  SITE (572): n equals a,t,g, or c
  SITE (577): n equals a,t,g, or c
  SITE (592): n equals a,t,g, or c
ggtggaaggaggaatgaaatgtgaaagcccattggaggcagaatcaaaatgccttggtcttaatagtcaactattaaggagaaattattggctgacttaggaagaagtgaaaaatgtgaaataccaataaaacaccaggcttgtgattttagtcagggtaaagcttaagcattgtgtgattctagatagattactgaggagttttgttccatttattttatgtccatatctttgagctatgattctatcctttatttcttgacatacccaaacattttttaaactattgtgatacagcttttatatgataagtctcactctttgaagtgtacagtttggtggkttttagtatattcagagttatgcagccattaccactacctaatttcagaaccttttcttctttttttagttttttacacataaagatttttaaaagkctttttaatgataatatctaatgnaatgaaattgattatttggaattgatgagacttttaatggggcctatttggtggcaagtttggggttcaaagtacttgcaaagctgcttacttctagacatacttcangtcangctttcacataccgnt

SEQ ID NO: 413 - DNA, 178 bp, Homo sapiens
gggcaacagtcattcctcagcagagtggagagggagacacatgttctgccgcgcccatgttcagtctgttctgtgggcagagttgtaggaacacacttagcccaaatcgatgccagcctggcagtgggtgaagggccagtaaggtttgtctatggctcatgaccttaggggaaaatgg

SEQ ID NO: 414 - DNA, 599 bp, Homo sapiens
  SITE (548): n equals a,t,g, or c
  SITE (552): n equals a,t,g, or c
  SITE (558): n equals a,t,g, or c
  SITE (590): n equals a,t,g, or c
gggcatgagccactgtgcctggccatgaaaatgatttttatcagcactggcttccagctctgatataactaaaacctatagttttagtggcacagcttcctgtacagaaagacctcagttcttttttctcatttatggcttgcatgttacagctcaataagggggaaagagctctgtttaggtcatccataggaatgtcaaaaatacctgcgagattaaattggtcatcagaattttgcttgatgagcatgaaacacaacaaaggattttaatgatatcattgaagctttgtaraaacctgctgaaccattcctgatctaaaaagaacactcttttttagatttattcagctgaatctctcttgaataatagtgccagatgattactcaatatgagggaatasagaasgagarggggtgtcarctgctgggggagagttatataccgktaggamcaaagaattatagttggtgktcataaataattataatacagcctagtttgaarcttatgctaatcatctattgctagcagaatatttcaatccntaancccagnccttgagtaaaaaggttcctgggtaacacaanttcttcttc

SEQ ID NO: 415 - DNA, 441 bp, Homo sapiens
  SITE (346): n equals a,t,g, or c
  SITE (355): n equals a,t,g, or c
  SITE (378): n equals a,t,g, or c
ggtatacttcataaagctcttgcgctaattccaaagagaaaaagagtaattttacagtggagaaatctggccaataccaccttaactaagtgatcaagttaacaccagcagtaaaatgttctattctgcatgwtgacatcatgtacacccatgtatgatgtactgaggagggtacaccatcactcctgggacattcctgccaaaaatgcatatcctcagtctgatcatgaagaaacattaggcaaaccccagttcgggacagcatgcaagataattgggctatactcttccaaagtaccaaggtcaagaaagacaaagactgaggagctgtcccaggttaaagganaccaagaanagacaaccactagatgcggtggnatttagttccaggattgaattcctcccttcccctcccctcccctctcttttttcctttccttt

SEQ ID NO: 416 - DNA, 418 bp, Homo sapiens
  SITE (203): n equals a,t,g, or c
  SITE (230): n equals a,t,g, or c
  SITE (409): n equals a,t,g, or c
gatttttatagtgtcactgaggctgagttatggaataacaccttctctttggcccacgttatgtcatttgaactcctaccactctgtgaaatagcctcccctcataaattggacaaacagaatggctgatttgctcactgttaaaactgtgactggtttggtttctttgaatcccaagtgcagtaggcaggagtgaatcatanactcttaatagttggaagggatcttanacatcatcaaatcaaacttctctacaatgwctctgaaaagcaaacatccacactgmttgaacacttccagtgacaagaaactcactatcttacaaagcatccacagggtcaaagcagygktctatttatcaagctgagaactatctcatcctaagkgkcactcactaatctgatcctanaacacatga

SEQ ID NO: 417 - DNA, 452 bp, Homo sapiens
  SITE (404): n equals a,t,g, or c
  SITE (437): n equals a,t,g, or c
gttaatctgcagaagagttctcctaatggatatgtcatcagatatttaccacattggcataccttcagattgtaaaagtaaagaagtaaaataagagcttttgcattgtgcatatatttattgagcatgtactttgagcacagcagtaggccaagcaattattagatatggggagtgaaaacttacgagacttataccctagtgaactacatcccaagacaaacagcattctgagaattcatcactgcttccacttatttttaatttagaaattttgtggctgkttatggtttctttctttggggccttaatggaaaccttaacccaattataacatttataggtttatataattaaatggattataaatcttttacaattttttatcctaattaaattttaanagggctctcacttatggctaggctggaaggaanggctggtccaagcct

SEQ ID NO: 418 - DNA, 530 bp, Homo sapiens
  SITE (401): n equals a,t,g, or c
  SITE (415): n equals a,t,g, or c
  SITE (466): n equals a,t,g, or c
  SITE (499): n equals a,t,g, or c
  SITE (529): n equals a,t,g, or c
gcaacagctctagcctgatgaacacgcaggcgccgccctacagcatggcgcccgccatggtgaacagctcggcaggtaaccttggcagctctgcgctcctgagcccctctctctcccctctcctcctcttaggctccaccagtgaatctgcctaaacggcccgagaaggtggatcagttggcgaaagtgggaatcatactacttttctgcttctcagaaacttgctccatctatttaagacttgagaattacattatattttatgtaaattatttttattcaatctgtgtttgkataacaagtggacatawttcaagtattattggagattgktaaatatgcacactaagttctctttctctttgggaattawtagwattggaagawcctcaaawtctctncatttggtagtggnggagacaaacatttcgaattcacatttcaggggaaatcgctggaagggcanagcaagggggggttgaagtctttttacatttanggaacacctctaaatgtatgcttcggaagna

SEQ ID NO: 419 - DNA, 352 bp, Homo sapiens
  SITE (351): n equals a,t,g, or c
  SITE (352): n equals a,t,g, or c
cttcacagagcaggattaagctatgaagcccgtcatgttgtatcaccagaacaaatagccacaagtgacaaaatgcagcatttcaaaagaactggcacaggaacacctgttaaacgagttagaaaagctatagagaagtctgaaaccacttctgaacacacttgtcagctctgtggtggttggtttgatactaaaattggattatcaaatcatgttagaggccacttgaaaagacttggaaagacgaaatgggatgctcacaaatctccaatctgtgttctgaatgagatgatgcaaaatgaagaaaaatatgaaaaaatcttaaaggcattgaacagtcgtcgtattatnn

SEQ ID NO: 420 - DNA, 934 bp, Homo sapiens
  SITE (118): n equals a,t,g, or c
  SITE (933): n equals a,t,g, or c
gatttttagtagagatggggtttcaccgtcaccatgttggccagcctggtctcaaactcctgacctcaggtgatccacctgccttggcctcccaaagtgctgggattacaggcatganccaccgcacctggccccatttaatttatataataaaacaagtgcaggctttacctgattttattctcaccttctgttttcttcttctgcattatctgtcaccatgggttggctcctccccactttctcttttttattcttttctctcttttttgccacactaaattgtaatgtgtttgaacaactctgacttaatattacctctaacaaaaagctggaaactgcacaaatattctttgtaggctctaaaagtaggttggctgaagtatgatacctgaactaattattcatttgtatgcttgttttataagtttgacttccatttcatgatttttttggtagctttatgttatttctgttttcagcaatgggtactttgacatctttctgtctctgaattgaattttcattttgcaacggaagagaagacaacatatttattccataatgaaagagctaatgaagtagaataactattaaattgagatgttttagcaaaaaaacaaaaacacaaaccccaaacgggttgttttgttttatttttttctaaaacatttctaacaattcccagtaggaatgggtggggccagccttcctcatttacaatccagctgcagtgagtcaagatcctagcttattcctcccaattgtgtaataaatgcagaaaaatgatgtgacggtcacaattctcaaatccattgcattgtattccacaaaggatatcctggcggaaggtggaaatatggggagggtaccatgatgtaaagaattgcctgggaaatttccttgagtcatgcatttttgtaaaaccttacnt

SEQ ID NO: 421 - DNA, 499 bp, Homo sapiens
  SITE (217): n equals a,t,g, or c
  SITE (493): n equals a,t,g, or c
gctcgtgccgaattcggcacgagtgatgttcaacttgtaaatgtgttgcatatgccattatgtttatacattcgtctgtacacactgtttttattaggagtgatatatcacctcacttttgcttgactcctgtatctcagaaaagtgatggcatttcttattctcttcagttctatttagcagacatttactgagtattctgttgttgttgttgaangtagtgtgcaatatgtttctaatatgaatgtaacaaaaagaacctgagaatatcaatgaaatttaggtgaatacttaattcctggtgatcaaagctaatgggtgktctaatgaaaaaaagtctagcctatcatggaataacagcagaatctggagcaataaggcaagaaataattttatttttcagacaagccacattattaatgaaaacatgcaccacacatgaataacattggaatawtacctctttcttgaatagcagtgatgagawggcctnctctga

SEQ ID NO: 422 - DNA, 770 bp, Homo sapiens
  SITE (673): n equals a,t,g, or c
  SITE (678): n equals a,t,g, or c
  SITE (679): n equals a,t,g, or c
  SITE (734): n equals a,t,g, or c
  SITE (743): n equals a,t,g, or c
  SITE (752): n equals a,t,g, or c
gaaaagatcaagaaagcatcatgtatatctcaactgaaaaaagaaaaagaaattagggagttagcttctccctgtgccctactttctgtggccatgccttcggctctctctgtgacaatccattgaacaaggttcttctaggcttctgcagctagggagaaagcatgtgataaagaacagaggccataagtgggcaagagtgtgtcttttctctgtaatgggaatttaaatttagggaaattactctgccagtttgattattccacttaataaaaagaatttagccatttttcattcacaagactattcaagtacaatccacattttaccttcttggcctggggaacagaactcttctgaatagartacagagggctaaatacaatatcccagaaaagtaggaagtactcctarcaatttgcatgcagatagctctccattatgcatgagctgcttctttggtttcgaatgatcagtgtctccgctgttctttcttctcccttctgtttccaccatattggcatttcactgctcattaataattgtgggaaggaaaaararaatgcattaattgaagactgcatcaatcaatacacaactttccactggtgkwaaagtctggtggcatttttaaaaaggtagatatttttggattaaccatacccagtgggangtggnngaagcaggttgtgagtaatcttcttccatcatcagaggaatggagataggcaatnccagctttnctggggacnttaccaaatacccctaaa

SEQ ID NO: 423 - DNA, 387 bp, Homo sapiens
gcagctaggaagataagttgaatgcagaggagagggaggatgatgagaattggagtttcttattcttctcttaagaagtaccagggccctagcaaagaaggaaagaaggttgaaggattgccacagatatttcatccatataatttcaaaggcataatctaagagcaaagtacatttctgttttttatttgtttggatttgagccacagatgcaaagtagatcatgcagtcgtctgtttattcacagttaatatttgcttcctttttcaagaacaccatttaataggcaaaatataacttataggagcctcaagaatgggaacatctagtaaagtagttaccctatggcccaagagaattctgggctcaggtgaggttcagtgtctt

SEQ ID NO: 424 - DNA, 526 bp, Homo sapiens
  SITE (446): n equals a,t,g, or c
  SITE (464): n equals a,t,g, or c
  SITE (490): n equals a,t,g, or c
  SITE (495): n equals a,t,g, or c
ggcagttagagggcctgtctcgccacagcctgtcaaggctgcgttctgtccacaggactcattgctatggatgtggccttgaacacctggctgactgaggtggtgtttgccaagtttctcctcagtaaagttattttcctcctttccgtactccactcgttagaaactgtccctgtgaacggccatacttgaggggtggggagcagcgtcctccctgctggaggaggaggaccacaggcattcctcggactcgtggcgctgggtatttgtctattttctgtttattcagccactgctttatatcagtctggactcatgcatgtttacttgatgcttcgggttataaagcartactattttattttcctggtgtggtccttctacaactttgtcacactcagttagataracacactttattagcttatgaaraaccagtttattgnggccgtaaattggagtgnaagagaagtggtgatgcggctacctncttgnagcttcttttactgctggctggatacagtgc

SEQ ID NO: 425 - DNA, 1114 bp, Homo sapiens
  SITE (544): n equals a,t,g, or c
  SITE (562): n equals a,t,g, or c
  SITE (966): n equals a,t,g, or c
  SITE (1026): n equals a,t,g, or c
  SITE (1078): n equals a,t,g, or c
  SITE (1102): n equals a,t,g, or c
  SITE (1108): n equals a,t,g, or c
gtcacactccctttaggtgggacaggcccgccacagtcagagaacaggtgccagggaacatgaccagcctcttctgccaccactccatgtagaggaagtgatgggttcctggtgggcctcccaggcactataacccaggggcaggtggtcaggcaaaaagccttcctgcacaaggactccagctctatgtgtcttctaggatctataagtaccaggcccacggctatgccttctcgggtgtggaggarctgyttactactgggggagtccacctttgttaacatgacccaggactgaataaaccatgctcgccaccaggcttctttctgacccctcatgtatcaagcatctccaggtgacctactgtctgcctatattaagggtccacacggcggctgctgcttttttttaagggggaaagtaagaaaagagaaggaaatccaagccagtatatttggtttatttattttttttaagaagaaaaaagttcatcttcacaaggtgcttcaaacttgggttcttaactagaaaccagaagactacnggagggaatataaggcanagaactatgagcttattttawtactgkttttcactacctactcccacaatggacaatcaattgaggcaacctacaagaaaacatttacaaccagatggttacaaataaagtagaagggaagatcagaaaacctaagaaatgatcatagctcctggttactgtggacttgatagatttgaggtacctagttcagaactccctagtcaccatctccaagcctgtcaacatcactgcatattggaggagatgactgtggtaggacccaaggaagagatgtgtgcctgaatagtcgtcaccatatctccaagcttcctgggcaaccagtgggaaaagaaacatgcgaggctgtaggaagagggaagctcttccttggcacctagagggaattaagccattctcctccnttatgcaaagattgagggatgcaacaatattaagaagagaagcccccagatggtagagancagcatatcttacccctagatgtcaacccagcaggaggaaggagaaggtgtngggaggatctcagaggtggcgggnacttcncaccag

SEQ ID NO: 426 - DNA, 700 bp, Homo sapiens
  SITE (658): n equals a,t,g, or c
  SITE (669): n equals a,t,g, or c
  SITE (674): n equals a,t,g, or c
  SITE (687): n equals a,t,g, or c
  SITE (693): n equals a,t,g, or c
gctgctttgtaattagtttcaattttaaaaagatccatgttttcctgaatagaaaatatctttcgaaatgaatagaaaacatgacattattaggaattcaattctggtgttttccaatacattaagttttgcctttatattttatgtaacaaagtaatagctttacaaaacactctaggtaattttaagatcacatactatctattgtatctggaatttgcagagtaatgaggatgcccttgaaatggcttcatacctctccgatttgctggaatattttaatattyttcttctaatctgtttcttgagaggcactatgacctgggttgaaagcgtggctggatgtttccatttccagcgatttgattttgggcaagtggcttaacttgtggggatttcgatttcgttatctttaacctgagggtctgaggctaaatggtttctaaggyttctttcaattctaaaaatctgtttccaaaaaataattcctcagttttccaagtggcataactcacccttatctatactaaagaaataatacatgacagtagattcataagctyatggcaatatggctttctaatctattggaagaaccattatgtggctkaagaacttcagaaaattggggcccttcaaggatattggaaaaattggntaaattggggntttcnttttttgagaaanaaccanaatggtg

SEQ ID NO: 427 - DNA, 887 bp, Homo sapiens
  SITE (745): n equals a,t,g, or c
  SITE (747): n equals a,t,g, or c
  SITE (801): n equals a,t,g, or c
  SITE (849): n equals a,t,g, or c
  SITE (882): n equals a,t,g, or c
gaagaattttaaaggaaggtgggtgccctaaaaatacatttatgccaactggattgaatcaccttgaatcacaatgagtacaacaactgctaatgagctaacacttaatgagtaatgaccaggcaccagacactgttctagcactttatacttactgatttctttactcttcatgataaccctatgaggaaagtgcttttttgttaagctccattttcagctgaagaagctgaggcctggagaagttacatagctttctcatggtgtctccactatgaagtagctgagctgagatctcacccaaggccctgcagggttcaggccacactcttaagtactcacagctgcatcacactgaatatcatctccctgcactgccatttcatttgagcagggctttgcctgtcaagaacattcatatcttttgataaacagtgcattttttccctgatagtctgtatgggacagcctccttgtttgcatctgaaggacagggacttcaggacctcctgctgtggtcaccaaggaatcacattcaaacttctcagcaaggtgktatggcctttcagtttgcctacgatccattgaggcaaggttccttctctcaatacaccctctgctttagccagggggacctyccactgtcctctctatgkgttctattkgttcctgactgktagtacccgcttgkgtggkttccatgatccttcttctgcctggaatgaagctcctcttgagtcctganancttcatttctgtctgtcttttgggctgtgccaaagcccctctgccttcgtggantccccactgattcattaccaattttcctctcctctgggctcttcttanatgcaaattgtgcctctggatgggttacaaaanttgca

SEQ ID NO: 428 - DNA, 222 bp, Homo sapiens
gagcagagctcagcagagttttatttatccttttaatgtttttgtttaatgtgctccccaaatttcctttcatctagactatttcaaattaattttacttgttttaatttagggttaaaacagagaaaaaggatttcttctgcccacctttttttttttaaatggaaaaacaaagtacagcgattaagtctaattccacacaacatttaaaactgcttgatg

SEQ ID NO: 429 - DNA, 445 bp, Homo sapiens
  SITE (386): n equals a,t,g, or c
  SITE (389): n equals a,t,g, or c
gcggcacgagcacactttgtactgtatgttcaaaaattaaactaaagtcctgcagtttggcctgtgttataattgaaagaatgtggtagttcactaattgaaagatgtgaacttatttatgtggtcagaggcatatttgccagatgttattaacaacccagaagtacgcaaggataggctgcttactctgacatccagcacaaagctctgccctccatatgcccggtgatcttggcatgccttccacactccatcaggcagagaccagtggcagctcaraaggcccagtatgctgktttgattttaaaatttaagtttgcttttgaatatgcagtataatcaaatagatccaattctgaaaggcacaaaagggaatataataaggnctnctttctatccttgtcccaccccttcaagttctctcccagagacacccatatctctg

SEQ ID NO: 430 - DNA, 641 bp, Homo sapiens
  SITE (633): n equals a,t,g, or c
gaacttgcagtgccacagacaagcaccagagggatcgagagattacaagcaactgaaaagaaactggcagacctctctaattgggacattccatgtacaagcccagagaagattcatccccagaaaaggtttgagaggccccagaatctctagctgagctgattggtgaagttcttctcctgtaccaagccagtccataaagactgggagaggtggctgttttttcagataccccaaatcccagcaaaaaataatgagacatatgaagaaacagagaaatatggcccaattaatggaacaaaataaatctccagaatttgaccctagagaaacagagataaatgaattatctgacaaagaattcaaaatgatcatcttaaagaagcttartatgctgtgagagaacagagatagtcaagcaaatgaaatcagaaaaaatgcaataacaagaatatcaacaagacagaactatwaaaaaagaaccatacaaattctgcatctgagaaataactgaattgaaaaattacctagagggattaaaaagctgacccagtcatgcagaaraatcgkcaaactcaacagctyawttaaattgatcaaatcagaaaaaaaaaatgaaaagtaaagcctaanggaattat

SEQ ID NO: 431 - DNA, 641 bp, Homo sapiens
  SITE (586): n equals a,t,g, or c
  SITE (600): n equals a,t,g, or c
  SITE (623): n equals a,t,g, or c
  SITE (627): n equals a,t,g, or c
  SITE (641): n equals a,t,g, or c
gtgtatgcatttttgtgcttttcttttagaaacatgatttatagcaacatttttcatgaaattatacatttccaattttgcaatgtctctgacaacaggaaaacctgattcatttaacagatacgtatacttcataattagcactttggaaaggcatttgttccattcattgttgtgttctttgagctgagaattttgaaggaacttctttagaagttctgactttagtcagaaggggatagcaataacatgtaacactaacgtagcattactatgtgccaagcctattctgagacctttaccatggtttactttgttgaatttttacagcaatcctgtgaggatgtgtactggtatccctgttttacagataggaaactgagggtcagagaggtaagtaaattacctaaagkttctatacaactagtaagtggaagaactkagatttgatcccagcagtctggctttagagccatgktctttaatccaaaagttaatactgrccttataataataagcttaataccgccacatagkggtttggatataccaggcactcttcttaaccacttttatttaaattcanttaaattcttacanccaactcttttaagggctttaanggtngcaggttttggcan

SEQ ID NO: 432 - DNA, 655 bp, Homo sapiens
  SITE (237): n equals a,t,g, or c
  SITE (569): n equals a,t,g, or c
  SITE (571): n equals a,t,g, or c
  SITE (581): n equals a,t,g, or c
  SITE (591): n equals a,t,g, or c
  SITE (648): n equals a,t,g, or c
gacaaaaacaaaagaaaatcaacatttaccacctaccccacccacctccacacctacactcatacatggtggcaattccaggyaaatattttgttttaatctgaaaatttataacattaaaggaaattgtgtggygctgttttactgcttgaaaagccattttaaatattctctagaacaaatgatattctctaaatattctctagaacaaaggaagtaaatttttaaataaatagncacatttggcgaggaaatttcagacaccaaactttttttggggaatagagagaggcattcctccccaaaggagatcataaccggggattgcaaggggtcctggtgatttaacaagaaaggaaggcaattctgtctccaaaataaaactgcaatagttcctcaggccagtgcatgttggcatgctgtatggtcagccatgtaggagagagctccaagccttgggaccatacagctcaggactggactcaccactcagctcaggactggcttcatgggcattcacgctggcagtaatgaagggcccacacttagaagatcttacattggttaangnttggttttgntatctgaaancttaatctttgaacaaggggcctaaaactttaatatgcatggatttcacaactatgnactgggc

SEQ ID NO: 433 - DNA, 634 bp, Homo sapiens
  SITE (292): n equals a,t,g, or c
  SITE (516): n equals a,t,g, or c
  SITE (553): n equals a,t,g, or c
  SITE (608): n equals a,t,g, or c
  SITE (629): n equals a,t,g, or c
  SITE (631): n equals a,t,g, or c
ggagagatatcatcccctgtaatccgggaggcagaggtgacacggactgcacggaaacagagtgctcagaaaagagttttacgtatcctttgcgatttaagcatcattataaaaattgtaacatgtttggaatcagtgttgtagaattttctttttataagagtattaaatggtagctataataaaatcctgtagaaactttttttcactccacagagctgtcatttggtaaatataatgcaaaaatttaatgagatcgtatttccctaaaaataaagatatttcttactgntkacagcttcttgctgagaattagattcttttaattatttgaaaactgactaaaacatttagttcagtgtgtagttatctaagactgacatctgatcatttaaatggcagaagcaatgaattatttaccctttgcattgaaaaatggtagccctaaaatacttgtcttgaaaaatgtattcacataatttggatagtaaaaagatggttaattctcaatttagngatctcttttctacatggaaaacttttcttaactcgntgtacagtcaagcatcttcaagatgaaaaatttggaatactacaccaggaaaacngggtatcccttgacttcctantnatt

SEQ ID NO: 434 - DNA, 397 bp, Homo sapiens
gttacttgctaaaaataattaaaccctccagctattgctctgtaactatttaccttaatgtgtaagcttcaaaacagatagataacgttgtaaattgttgtgttagaaatgatgagacagagtggaaagtaactgggggaggcagctctatctagagttgtcacagatgtcccagatgtatgtttgccagtttatagatgtaatttctcaaatttaaaagcaggatatttgaggataagttgcatgtgcataatcttcctcctgtgtaattaaggaatttgggggggcattatttttaattttactatattgtacttactagctttaatgttgttgtgtagagcagtgtcacctttagataaacagcatgtacttaaaacagaaggctatgtttaaa

SEQ ID NO: 435 - DNA, 574 bp, Homo sapiens
  SITE (511): n equals a,t,g, or c
  SITE (515): n equals a,t,g, or c
  SITE (524): n equals a,t,g, or c
  SITE (546): n equals a,t,g, or c
gttctgtctctatgaatttagctattctttctataagcttttaatcaggcagcaagacagaccgttaatatatggaactgggaagtctgtgccccactctgatgtgctgtgagatgtttcgttcagtcccatggatggagggattgatacctctgtaccctactgctgccaccccccactgcccgggctaagtgtgtgagcaggacatagacacttcaaatggtaatgaaagctggtgtctcctgctgatctggagggcttcctaaagatgaaggaccaaagtccctggagagttgtcatcgccttgaaaacacaagggcttagaccactgctgtgacccttcaccagctgtttgcccaactcctgtttgacacagcargttttgctgcatcatcaagtccagacttggcatcaaaggcctcaacaaaaagctctcacatcccttgcttcagccttccaacttgctaggggtgcctgatacctgatggttaccaaagagatactgacttgntttnccaggaagngggttccgttttttccaatccnaacaattgaccgagtaaggaacctgggg

SEQ ID NO: 436 - DNA, 401 bp, Homo sapiens
ggatcaattagaacagagatgacaggcacaaagcactcgtattcttccctcactgtgtgtcctgaacatgcttgtttttcaacacagatctttcccctactgagctcagacttggtgctagttcctctgtcagcagggcacaccaggcagatatggtcaattacttaagatgcaactattttgaaatttctttttcccagagtagcatcatttactgctctcgttgtgagtcttgagttttgtcccacagcttccaagttctcagatcacatctctgagatgccatcagaccttcgcctcatcccaccatgcatggggccactctctaggccctcacaggcagttggtgaaatgagtgtgtgtttctccttgagggtttcatccacggtctcttccataga

SEQ ID NO: 437 - DNA, 302 bp, Homo sapiens
  SITE (291): n equals a,t,g, or c
gtctgagtcattttttctgggcctctcagtgatttctggtacatgttaccatcccaggctgtcaaccttgggcaatgtgatttccagaaggaccttggcccagcccatgccatctgtgagcagactaaatatgttcagaggccgggggacggcaagaccagcctcaccatctcatacatggggtcacgttttttcagggacacagacacccaaagctcatggaaaatgtccctgtaaactgagtcccgatttcctgatttttctccttggtccccaaacgcttaacactgnaatgagggcag

SEQ ID NO: 438 - DNA, 537 bp, Homo sapiens
  SITE (316): n equals a,t,g, or c
  SITE (507): n equals a,t,g, or c
  SITE (520): n equals a,t,g, or c
  SITE (523): n equals a,t,g, or c
  SITE (524): n equals a,t,g, or c
gtcttgccaggagagttcttcctaagtcttaagatattaaagatttcatgagaaccgcatgaagaatatcttcttgaatcatttacatttttcccttttgtaggcttatgtaaccatgcagaaaatctaataataagtgtgctattagtgtaccatgtgccatcccgcaggcagctgtgccatggggcaccagtgcccagggcttgtggatagcattaacctgtacaactttctaaagtaaagcccagtgggaaatctgtaggtaattgaacagatagtccatttttatcaagacttccccctgccccttccctgntctgtcttttctcttttcttggccagaaggaaacaccttggccataggcctttcattcacaatggagtatattttccaaagcaaataagcttggactatttcaattccagagcaatctaaggtgggcacacagagcttaatttgggtttgaaagaactcttaaattaagatcataggaaggcaatgagcangaaaaaaaaaaantanngatcccagcattg

SEQ ID NO: 439 - DNA, 294 bp, Homo sapiens
  SITE (24): n equals a,t,g, or c
gcagtaataaaagattgttattgncttcttaactaacttttcacatgattatcttttccacaatctcagaaatccaggaattgaaagaatctcaaaagtcttccactctatttttatggggaagtaggagaccaagaaaactgttttacctagaattatacaactgagatcaatcgtcattatttttaaaggatcttgaaactttataagattaaaagggatgccaatggtgtggagtaaaaagatcctggacttaggagttaggcatcggccgggagctgtggctcatgcctg

SEQ ID NO: 440 - DNA, 535 bp, Homo sapiens
  SITE (380): n equals a,t,g, or c
  SITE (433): n equals a,t,g, or c
  SITE (469): n equals a,t,g, or c
  SITE (510): n equals a,t,g, or c
  SITE (533): n equals a,t,g, or c
gtgtctcttgatgaaaaggttcctctcttgggaatcaggacttctaattcacaaagttgcggggatgagaagtccaaactccccacttgggtcactgggagtgagagtatgtggttatattaatttcctatcactgctatgacactatgaacttagtggtttcaaacaacacaaatttattttcttacagttctggaagcctaaaatcaagatatcaactggactgtttttcctgaagtcttcaagaaaaagtctgtttccttgcctttttcaatttctagaggctacctacatttcttggctcatggccccttactcatatcaccccatcctcctgcttaagtcattgcatctactaggcaaatctgcctctctcttgnaagaatctttatgattatattgggcctattggatagtccaggataatctctgnatcttgagatcattaacttaagcatatccacaaagnctcttttatcttggaagtaaaatattcatagaatccaggantaggatctgacatatttgggggnca

SEQ ID NO: 441 - DNA, 502 bp, Homo sapiens
  SITE (398): n equals a,t,g, or c
  SITE (427): n equals a,t,g, or c
  SITE (442): n equals a,t,g, or c
  SITE (485): n equals a,t,g, or c
  SITE (493): n equals a,t,g, or c
ggaaaaaacaaagtagctagaagaggggacttgaaatgtacccaacacatagtaataccgaatattcaaggtgatggacaccacaaacaccctgattgatcaccacacattctgtgcatgtaagaaatgctcaaatgtactccataaatatgtaaaatgttttatatcaacaagaaaataccttgcctagtgtttccatccaaatgggaataaatccagggcttgatgtacacatttcacccatgagggcatgggtccctgaagccccttggscctgcctggcctggratggcaatgagcaggccatcttgccagctgagacatgaagcccmggctgggcctctgtgccaggtcacacccctctcaggatgtgctagcgcctgcctcaagttgggttncaaaagctcatccagtaaaaccaggtctntcaaagcaattcctncaacaaaagggaattctctggctactttaaaagtttttaaagnggggtggnagcatgcta

SEQ ID NO: 442 - DNA, 742 bp, Homo sapiens
gaagataataaaatagaacatgaagggctgtcagtcagtgtaggtatttccatcccctcacttttcaagtgaggtcacggaggctcagagcgataaggagacttgtccaaggccacacaccggctggtgctcaagccgggacttgaacccacgcagtctgactctagagcccaagctcctaactatgacatcctatttgatacactgttttactggagaaacagatcatttgacagacattctttctgttagcaatttgacaactctttccccagttgtctgtactgaacctggcgctgtgctccgtaatggtgacctagctgtgaataagatagaatcaccttaaactcagaggggtaatgttctgttggggagggagaacctagttttgcatgctaagtagaatgatgaatgaagtatttacaaagggagcatgatgactgatatgattcattggtatatgtattaagagcctatatcatttcactcattcaaagatttagtgaattaagaatagaagcatgggaacaagtaaagatattgctcttgcagaacattttccactgaaagctcatcatattttcctcttttgtgaggataaagaaaaagtattatttctacatggaaatttgatgtaatacatttcaaccctaaaggcttttaatgattgctggaatctctaaaacccacttatgaacttctcctttagggggcaggactcagaataacaatagtaccactt

SEQ ID NO: 443 - DNA, 649 bp, Homo sapiens
  SITE (639): n equals a,t,g, or c
  SITE (646): n equals a,t,g, or c
gcttaaacatgtatcgaagcagaacgtctaaactaatataaggtttcactcatttgcactctccagggagagaaagagagatgaaaactgtgaggggtgaaactccacagaaatgtaactccaccccaaccccatccttgcatatttaccaagaaatggaatttatcatttctttcctattttaggtcttttttctgtcagagattttctcagtccattggtatgtgaaaagtacattgaggaaaggtaataagatcattcaatcaataactgctttattccttcataacatawttgkttaataagggaaaatattgaataagatatataagaaaattgcaatcttctctagcttttctaggaagtgggatggagaaaatggtttgaatttaaataaaagtgaatttagagcaataaggaaaaccatgtaatgaagatcaatactaacattatctattttttattgatgagaaaaatatagcttggagaggttgaatgactaggcacagcttactcarawggtaagtggggaagcacagttaatctarggtyagttccaaggcatgrattctattgacccagcatagctacaaactgctgcatactttctagttcacctcctacatactgaaatctttntgcttangcc

SEQ ID NO: 444 - DNA, 531 bp, Homo sapiens
  SITE (217): n equals a,t,g, or c
  SITE (502): n equals a,t,g, or c
ggtatcttattgcagttgtacctttcctattcccacctgagagctcccactcctttggttcaacccagcttccatcaatcattcctcgagccttgccaattttttgtctctcttccatgtttattgtcgctacctgagtctagacactcttgcgtgccatagattctgtaccagggtttatcgaatagctcagtaaaccaatccaggatgggctcangagtggcccagggccgagttcaacgctattgcctctaacaaataggcctatgattttgatttactagaaaatgctgttgattctgatgaaatccaagttagcactttgtgactttcttatcgtggccatggttccggcgcttgtttgaaatatggttccttgaaaaggtagaatattttaaagagtgtgtttcatgcaacgtaaattgtgaattcctttagccacctcctctctttagaaatagtactcacacatattttaaacataaattgacaaagatggcanagacctcatcttccctgtagcaaattgaa

SEQ ID NO: 445 - DNA, 521 bp, Homo sapiens
  SITE (231): n equals a,t,g, or c
  SITE (485): n equals a,t,g, or c
  SITE (509): n equals a,t,g, or c
gccaagtgggtcttccagttcagtggtgaaattcatgagggggatggggggtgtttatagatgagcttgaggaggcagtgtctgatttacatagggcccagaagattggtcggaccaggtgttccatttacatagggcaggaagaagctggctgcccattccaaactttatcatgcagtaaggtctctacctgctagcgccatgttgcagtacatttactgtacatgtggntaacaaaggaaagatggagctgccatgttgaacatgcctggccccctagccttttcctattggcacagcttcaggcattcacccatgcaagcttccagcttgcttatctatgtctccaactcaattttacaggctgctctttggtagaaaagaaattattttggggctgctttttggtaaaagggaagccttactgaggactctcttactctactaatcttctaaataatggctttttagctccggatcaacanggctttgtcttgttgccaggatgnatgcatggcact

SEQ ID NO: 446 - DNA, 318 bp, Homo sapiens
gaattggttctcataaaaacgatttgtgtgtgtgacttggggagggggatgtttaaagtatatattgtccagagataaagttcctcaaatattcatatcaaattatgtcgttatcacattctattttgtgagaaatcccaagtctctcactggcaagktacacctgtacacagagagcttgaatgcaaaggaaaggattcccatctagatcagagagagcctgcctttttgcacacaccgttgggaggctaccttgtgcctttccccagaccacctgcctctgctttctgtgkgtgtgtgtgtgtgcgcgcgcacaaa

SEQ ID NO: 447 - DNA, 311 bp, Homo sapiens
  SITE (246): n equals a,t,g, or c
  SITE (270): n equals a,t,g, or c
  SITE (273): n equals a,t,g, or c
ggcagaatccatgcccccttcagtctgtctcaaagcccttgcgtcctggtggtagttcttgctgccggttcactttaccctaagaaagagaatcgagataggagcaactctctgggcctctaggatttgaggactactcatgatgaaataaacctctcaagccttcagtctagtgcagtgagttatctaggagggaattcagtgatggggtctctgtgcatagcatgcctccaccagataggaaanttggtgggrargyttagtacgcanatnccaaaggggtgttttcgagggtgcccagttcaaggcat

SEQ ID NO: 448 - DNA, 544 bp, Homo sapiens
  SITE (390): n equals a,t,g, or c
  SITE (478): n equals a,t,g, or c
  SITE (508): n equals a,t,g, or c
  SITE (512): n equals a,t,g, or c
  SITE (532): n equals a,t,g, or c
ggacaacttgagaaatcctaggagtaatttgaaaatcaaagctttagagaatcacatagcgcctttgaataacaaccaacataaacaaaaagtgctagcagagtgattccaaaacaccagatgctttcaaacactgtcatccctataattatttttataatatttctatttgtttctaattataaaactagtacatgcttattttggacaaattggaaagtacagacmaatagaaatatgaaaacmmaacmtatcattgttattcttagaacttttttcagccctagattcagtactaggctcatgtgagatttttagcacagagttcagagacatggcatgaaaactgtcccaaaaagtcatggcaataatgggtgtaaagaaaatagnttcttgggtatttgtaaccgtacaaactatcataaaaattctcctctttcgcatctcactttggctcttctaagtcgggcctcagcancatagcaagactctgtctcaaaaaaaaaanaganattcataggtaatacagggnaatgggaatata

SEQ ID NO: 449 - DNA, 916 bp, Homo sapiens
  SITE (898): n equals a,t,g, or c
  SITE (907): n equals a,t,g, or c
  SITE (916): n equals a,t,g, or c
gatcaaggtaatctgtcaggggtttggttttatataagaaacaaatgagtccccagaacatacaagttaagattattcaatcaagggaggcagtcattaccctttaacctctgaaagaaaactgcagtaggcatcaaactaaccctgagatgggagagagtagaagttcccacacccagtgaattgtaggacattaggtaattattggtgggaagtaaatttgagtggggaactgaatttcaactgacttttatccttgaagatggtgcttctattttctcaaattagaaggttatgaaaattgcatctgaacaacaagttgtattagcataagttctagaagaaactgagaaagcaaggctagtctgaggaaaatttataccgctcacatttcccttctgaattggrgaatagaattgaatagcaaaattgkaacctacctttcaaagatgcattttatagtgaagtatattttgtgaacttttatatcttctattcttatttttctattgccctattttaaaatctatcttgaatttattaaatgtatatgtctctgtttatatatttatgagtaatatggtagtctttttggtatcagatgagaacccaacacacacaaatacatactgacacatacaaagatgtttatactgcctcttacatctgtcggaagagagagggttccaagaattcctgtgatgagggcttaaagccaaatatttttgttatcattttatacatatatattttattttttttctatttgggagaagctagaaaacacacattacttttttttgtatcttttctgttttagactaaaatctgctgctattcaaagaataaattgtatctttgtgtattctgatagacataataataaagttgtgtaagntataaagantggattaan

SEQ ID NO: 450 - DNA, 615 bp, Homo sapiens
  SITE (569): n equals a,t,g, or c
  SITE (606): n equals a,t,g, or c
  SITE (609): n equals a,t,g, or c
  SITE (611): n equals a,t,g, or c
  SITE (613): n equals a,t,g, or c
gaattttaaaaaacccattgtttctttttgtcttcccttgataraatataatcttcctaaracgargggtctttgcctgttttgtttattcctgcatccccaaagcctgagatgatgtctagaacatagtaggagttcaacaaatatgtgttaaatgaatgaatatgcttcacttctcatagttgttcttccaaaaatatctctgcctaacactaactattttgcatacatcttcaagtgtgctgctttatggctaccccaaagaaagacaaccaaaaaagttttgtgaatagttgcattcaactcttaagtacagaatgtctggaatctaatctccaaattttctaatacataaactgaaaatgttaaaatgtatccgtaaacattctatataaaatattgggagaagagaaaacaagagtatgatacagtaaaaggagaaattcaggtagagactataactcttgtttaggtaactggtcacaagattgcaccactgcatcccagcctgggcgacagagcaagcaagactccctcagaaaaaaaaaaaaacccaaaaaccgaataangatgacatttcttaactttccttacagccaggtaaanccntntnag

SEQ ID NO: 451 - DNA, 538 bp, Homo sapiens
  SITE (504): n equals a,t,g, or c
gctggaactctaccacacctggcccagttaattttttgatgagtgaatggtttcacaaggtaggtgttgtttctgtgttggcttccttgatcaagataaggaaattcatgacacttttcccttgaaaacaattatgttcaaaggaaaagagctggaatctggcagaatctgaatttgaattcacatttgtctgattatagagcttcttaaccttttttgtgttatggatccttttggcagtctggtgaagcctatagaccccatctgagcataacattttaaaatgcatacgtggccgggtatggtggcttacgcctgtaatcccagcactttgggaggccaaggtgggtggatcacctgaggtcaggagtttgagaccagcctggccaattagctgggcgtgatggtgtgtgcctgtaatcccagcacctcggaaggctgaggcaggaaaatcccttgaacctggaggttgccatgagctgagattgcgccactgcactgcanactgggccacagagcaagactctgtctcaaaaaa

SEQ ID NO: 452 - DNA, 803 bp, Homo sapiens
  SITE (66): n equals a,t,g, or c
  SITE (69): n equals a,t,g, or c
  SITE (72): n equals a,t,g, or c
  SITE (650): n equals a,t,g, or c
  SITE (714): n equals a,t,g, or c
  SITE (720): n equals a,t,g, or c
  SITE (788): n equals a,t,g, or c
  SITE (792): n equals a,t,g, or c
  SITE (803): n equals a,t,g, or c
ggttttttttttttttttttttttggcctgagataaaataatttcctttatctcccacttaaattnttnttntacaagtgctgactagctcttgctagttttatgtaattgcatggaaagttctggaatacctctctggttgcacttggtggtgaagttattacacaaataaatgccaggaagtcagttatttgctttcctattactatgcactgttggaggcattactatcgtctcttgtttaaataaatttcaccatgtcttcacacccccaggcctaaattaaatcaaagtagttttagagctcaaggacagaataagtcactatgggaaagtgggacaaaggaaatcaagcacgccagatggaaagttcagactggccagtatctttaaaatgtcagtgctgtataaaaaggctttataagccatcagtcaacgatggctctagaaacaggccagtggctacagaaattaggcttttttcactaagccttgaaaatttattttcaaagtgggttgaattttaggtcatttgtgcgggtatatctaatgaagagaaaaacaaagtgatggagaaggaatttctaataagatcttagtattcattagaaatataacctcttgctttcataattaataggatctgaagntaatttaataaaaatttgacttatttactaaaacaggcaagatttgaacctggctttattaagnttttanttaagttacatgttgttcaaacaggattaaaattaagaattaaaaatgatgttggctggattttccanccantattaaatctn

SEQ ID NO: 453 - DNA, 400 bp, Homo sapiens
  SITE (386): n equals a,t,g, or c
  SITE (395): n equals a,t,g, or c
gaggtgatgaaatacacattgaactagaggttacgaagatagtcagggctggagatgtggatctgaagccacagaagccagtagaaagagtgagactggtacatttagagaggtgcggggaaaagaaagaggctggagaaggagaccacgatataaatcagtcttaggaaataaagaaaaatctttctgcacattggagatgacagatttgtaggccatgcttcagacacatacctatacatattcatgtttgtatacatattcatgtacatatttatatatgkattcctatatacattcatatgtattactgyktgtgtttgtatatgyatcttattctgagcatgcgctgktctcttatgctcacatatgtattcttgagagcnttttccacntcagc

SEQ ID NO: 454 - DNA, 639 bp, Homo sapiens
  SITE (638): n equals a,t,g, or c
  SITE (639): n equals a,t,g, or c
ggytattttgatttcactgaatcctaattytcttttcttcaaaatttttgaacattcagacaaatgtgccacttaccttgcacatttgtcttaaggtctaaagggataatctatcatttttgacatatagaggccctcattaaatgtttgytctttcttatctctcaaaaatatctaccataatactttgaaactaagctcaatacataacaataaagttatatgatacccaagacactgagggcctgaactaggtagtgttatgaattaaaaggaaaaggtagatgttgaaaaatgttataagctagaattgatatgagtcaataattttctggggagaagaatgactgagattttaatcctaggaatattatgccatttgattaaaaaaaaagagagaccaagaacttgtttgaggaaatgagtcaaaggaagtaagtctaggcaacaccattctaaacgaaaagttataggagcactagtattttcataggcttcatggaaatgatctggagccccagtcatgaaagggtgtgtttaaaaaaaaaagcattgrtatttatgaacttgartgtcagtttcaaactttgactgktaatagtggaaaaacctggttgacagaacaagacctgtgtccnn

SEQ ID NO: 455 - DNA, 655 bp, Homo sapiens
  SITE (603): n equals a,t,g, or c
  SITE (639): n equals a,t,g, or c
  SITE (649): n equals a,t,g, or c
gattcctcacaaagggagctttgaggcccggaagaggcctttccttgatgatcgagctgtgcacagggagcaaaccccaagccgactgcttgtctgtgccaccctcaaacaatgatttccccaaattggacagcctgggtttgtatccttgagcacagttttgggaagagcattctgcatgaggcattgtagctatgtatatggagtataattctgttttcaggttgctctgccacagaggttaagaactccctcttccaaggtagacattgagaacagagacgaccacactgggttttcactgcagcttttaaacaggatgactcccagcccccatccccgtggctagcagcaagcagggactctgaaacactgcaagccaatggactgagcatcttacttttgctgtccgtgttttggtgttttgtaaacccatctggtaatgaccctgatgccccatgtcccagcaagggcataggtacctgccattgtgcaccaaagtccctttcctcatggccctggctgttctcctgcatggggtcatgtgtgtcccgttaccaagttgtggccccttttcaaccttgagtgccacatctgggctgntgtaggcatggtagtacaagctgggttggtactctnaaaatgaaanggagga

SEQ ID NO: 456 - DNA, 137 bp, Homo sapiens
  SITE (130): n equals a,t,g, or c
ggcaacctaaggtaaaattttttaaccaaatttaacccattcccaatcagattgaataaatgcctagcagcttatgtgttgtgctaaaacacgatatattatctgccaataaaaaacagtattttgtatntatatag

SEQ ID NO: 457 - DNA, 613 bp, Homo sapiens
  SITE (554): n equals a,t,g, or c
  SITE (592): n equals a,t,g, or c
  SITE (595): n equals a,t,g, or c
  SITE (610): n equals a,t,g, or c
  SITE (612): n equals a,t,g, or c
ggtactgacatgtacataaggtatacacataaggatgtctatcatagcagtgtttttattaggaagatccaaacaaaacaaaatagaagtggaaagctcttgagtgttttgcagtattcggaggactagttaaattagggtacatctgtggaatagaatactttttccagttcttaagcagaatgtattagattggcttgcatgcatatggaaagctctttgaaacatattacgaataaaagcaagaaatagtatagcttgtggggtaagtgtccgtttgtgttttaacaaaatatataaactagaatttatacatgttgtctggaaggatgcacaggaaactgttgatggttatctctgggagcttgaagtgtgggatggataatgggctgktttaatcttatagtcccttttgaacagtttgaattctggttattatgggcatgtacaattttcacaataaaaaacaaaggttttttggtttatgtgcattacttatatttttttcttggattttttccagaattctcttgcactttggtttggtgtgatgnttgggaactcaatggtattattatgctgcttctttggnaantaattgggtaaatantnc

SEQ ID NO: 458 - DNA, 421 bp, Homo sapiens
  SITE (311): n equals a,t,g, or c
  SITE (350): n equals a,t,g, or c
  SITE (381): n equals a,t,g, or c
  SITE (384): n equals a,t,g, or c
ggtggaccagaactgagtctccatttcttactgccctgtggagtcttgggtctaaatatataccatgaaatgccctggccttgcatattttttttacttcttgataatagaatcttaaattgttttgatcttgttatcaaggtctgggagacaagtctccacatcttttcatttaatctttattaaacctgtttttcctttttttaaaaaaaaatgataaccactttttgaactttaattttactatatgaggcttgactgtctacactggcataatcaatcaattcaatcagaaatccaattaaatttgntctttgcatcatagaaacaattcatctgataatcattgngaatttttactaaattgatgagctattatgntgnttaagatgaagtcagagggtcactacatctttgactg

SEQ ID NO: 459 - DNA, 790 bp, Homo sapiens
  SITE (683): n equals a,t,g, or c
  SITE (741): n equals a,t,g, or c
  SITE (743): n equals a,t,g, or c
  SITE (786): n equals a,t,g, or c
aagtcttgtggaggtagttgaaatgttacatttttgtttttggtgcgtgataagtcattaccctaattttgacaaaccatggttttgagtttataattgatatccattagacttggatttaatatcagcacatttagacttagacatttgtaatatttgtaaatttatagcagagtccatatacaagtgtcagaactagtttttatgatgtgtggcattagtgaagtaatatgccatcagttgctccttgttctttctttttcccatttatgtcatccatcagattttgatggtcctccttgtttagcataaatacttcacatgaccttgaagttggaaataagagagttaccattttaatgccatgatgttatatagtccatcagtgatgcattttttaatagagatataccagccaataaagctcagttgtgttcctccaatgtgtattttctactataggtagtttataaagttttagctataagaaatgctttttgtgtgtctgattttgaattgttcctggacaggcaaatcacttgatttctaaatgccagggaaaatgtccatattgtcagatattgckaaggcattatttgatatttaggatgctttagagattttgcagattttttcttatgggagcattttaatatcttaaagtgggaaattttaatatttgntagtattaaaaattttttttaaactttttcttcccgtagaattataaaacactatagntnttttcttttctttttttaaaaacattctgtgatcttgtaagtntgat

SEQ ID NO: 460 - DNA, 539 bp, Homo sapiens
  SITE (453): n equals a,t,g, or c
gctgctgtgagccctarcaggacagagcccagactgtgtgctccctgcagcacagtgcccctatgccagctaggagctcagctagagtgggttgcacgagtcgtgagtttggggtcaacctattcctactaataagcactgtctacacctgagagctattcctgaacgattttgtggkttagagagggccatgatgaatatgtttagagtactgataaaatgtgcttcataagaaataaattagaatacctcctgctaatgtttttggaagctgctcccatcaagcatcagcaactctagtgaagcatggtcaacctggagatctgaaaaaaatctgacaggcatttgactaatgkttacctttttgktacttataaaccattgataaataatttaagactttataaatawtattacagkatttctgktaagawgggatatactacgctyyantagccataaatctcaatctcakggtymcctaacaaaggttattaacggccatgtcaagaaccatcttttttttttttttgaaaggg

SEQ ID NO: 461 - DNA, 363 bp, Homo sapiens
  SITE (351): n equals a,t,g, or c
ggtttttcaaacttttaaaaatgtttagctgaagatcctgttagccaggggtttctcagctccggctgcgtatcataatcaccaggagaatgtttcaaatatttatgcgcaagctcagtttgcagggatttggtttcagtttgtctgaggtgggacccaaccatcagcatttgaaaatctgctcaggtgactccgttgagcagmtgggttgagaaccactgcacgtgcaatatgtaaactctccaagtagatctcgaagtggagtgggtgccccctttctyctcccactggcccctaagagggctctactgagcacagtttgataaatcccgtgagggtgcttaagggcancgagcccaattt

SEQ ID NO: 462 - DNA, 215 bp, Homo sapiens
  SITE (191): n equals a,t,g, or c
  SITE (197): n equals a,t,g, or c
gaaattccagaacaraaagtcactaagagttgatcctaggacacacaaggaatgtatgtacaatggattgatccataagtaaagtgcagggttgtttcaagtattcgaagcaaatagaaggtgtaatttaaatcattccagtcaaaagattgccttaagtaaatacacaattcttatattaaagttagganaagganaaccaggctcaaactgca

SEQ ID NO: 463 - DNA, 526 bp, Homo sapiens
gtcaaaagtaggttgtggaagagtaggaagcattgcacctaaacttccatgattaactccatgtgttttactcaaagcatcaggttgctctttagacttcttggttgctttggaaattttgatggtgctttttggagagtggcttgggaagccaaaaaagagttgagggcaattactgctttaaccaaaacaatagaacagcaggaagttcagtgcagtcccctagcttctccccttctttactcatttaatactggagaagtctgtgaattatggtatacactgaatttccaacttcgtggacattggcccttttcattatcttaagctcttttcattgctccgtttctgggccttatgggaaatgattcaagcactccatggaagatgatcaattctcaagctaaccccaggcaagtatgaagaattctcccaaaatcacatgatagcaagctgataagatttctctcatcttcagtcagtgagaagaccaaactgcttcaacaagtttgcttcctcaaggatg

SEQ ID NO: 464 - DNA, 149 bp, Homo sapiens
  SITE (138): n equals a,t,g, or c
gcttctgttcggggaggcgctgccaggaataacccggtgcgtccacagcccgggaggggaggcggccgctgcggctcccgcacgcagacagctgcggcccgggcctcgcggctcccgcctgagcccggcggcccctgncccgggcccat

SEQ ID NO: 465 - DNA, 640 bp, Homo sapiens
  SITE (555): n equals a,t,g, or c
  SITE (634): n equals a,t,g, or c
  SITE (638): n equals a,t,g, or c
gtgaactcctttgaatacccctactaaagggaacaaaagctggagctccaccgcggtggcggccgctctagaactagtggatcccccgggctgcaggaattcggcacgagcagggctgtggaggtcttcaaggggctgtattcaccctacaagtattcctgtgcccaaaagagtatgacatttaatagcaaatggcctctgacttttaagaagccatgtggctacccctcagcagacttaggagaggtcttggctattatttgttgwtttataaggtgtcatcattgagcatctactctggatgaggctctgtgctgggcttgaggggtacagggaagtttcacatgtcccgtcttgttgaatcacacacacttgatctcactacaacaatctttagactatatgtgtcttgatggtagggcaatcaaattgatttcctcagcatatacgagtcatgttttgtaagcatggtgggtacttagtcaatgtctcaatcagatttgcttctgtttagcaagataatcttttgtgggggagtgttatggactgaactgntttccttctccaaacgtatatgatgaaacctacccccatgtactcagattaagaagtgggcctttgggagataattcanggtnaa

SEQ ID NO: 466 - DNA, 631 bp, Homo sapiens
  SITE (624): n equals a,t,g, or c
ccctcctaaagggaacaaaagctggagctccaccgcggtggcggccgctctagaactagtggatcccccgggctgcaggaattcggcacgagtaaagaagaagaaaggaatatcataataataattgaaaatgcttggggacaactacactggaagacataatcagacacacctgtttgtataatcactttgaattgggatgttacaaattattgcagttatattttcagaggattcaaatatcatatgtgccatggatattgatattataattttcaaaaatgattaacaattctcagtaaggttcaaatgaaacaaagtatagtcttcagttagtttacattggatttgcatttatgggaaattaggtgtctattaaaaccatgaaaagaaatatttaattttttatgtaagattgaatttggtcctaggcttaaatcattacatacagattttttaaaaatctacatgaatagttggtgggacagtaaaatctaacatgatatggaacttccccttaccttcctgctactacccactgaatgcagttaacagtcccataataatttatactttgagacaccctttccaagaaaaatgggcctcataaactttcaaaatatnccctaga

SEQ ID NO: 467 - DNA, 552 bp, Homo sapiens
  SITE (499): n equals a,t,g, or c
  SITE (507): n equals a,t,g, or c
  SITE (550): n equals a,t,g, or c
gaagacacagaaagtcaaagagagaaaggaagagagaaagagaagtggtaaagggataaatatctcaacctctcaccctctaatttcctcctgatggctgaacccaactctaacacagaaggagctaggacaatacagttcccaggggtcagcctcccagggaccagggtagggtagaggagtagatctcaagtttctcatctgttgtggactgaattgygtcccccagacaactcatatattgaaaccttaacccccaatgtgactgaatttggagatggggtctccaaggatagaattaaggttaaaggagatcataaggttgggggttgatccaatagaactggtgtccttatcagaagatgaagagaaaccagagatctctctctgtctctgccatgtgaagacacagtgagaagttggccttctataagacaggaaaagacctttcaccaggaaccaacctggctggcacctttgatcttggacttctagcttnccaactgngagaaaaataaatggatattggttaaatcacccagctggggtntt

SEQ ID NO: 468 - DNA, 645 bp, Homo sapiens
  SITE (452): n equals a,t,g, or c
  SITE (505): n equals a,t,g, or c
  SITE (507): n equals a,t,g, or c
  SITE (509): n equals a,t,g, or c
  SITE (551): n equals a,t,g, or c
  SITE (613): n equals a,t,g, or c
gggttcatcaaggataatctcagctgggacaaaacagctctgttccatgtggtgtctcatttaccagcagactagcttggacttgttctcataatgatgacaaggtccaagagagaatggaagtttgtgagatgcgagcctatactcagatgttgtaggatgtcacttatgctgaattctactgtctaaagcaagtcacaaaactggcctagacttaaagtgtgagctaattccacctcctgataggaagacttatacaggtgcattgcagagggtatagataaagggaagagtagggaagtgtggctggttttgtaatctaccatactgactgcagtatagtttggtaagtgtggtgaggaaggcaacatctagattctaaaaagcattaaacaaatttcaacttaagttaattcaatttcagcttagttttcctataacaggggatgctnctaaaggaaaaaagaaaaactgggttggttatcttatattaggatcctactgngngntttctaaaatcattaaggtatcaccagatgatgctgttttgnctacttaatacattactcagttcatcctgagcccattaaggaagttggttactaagggtcgnttatggcttaggaaagttgacccataatcttt

SEQ ID NO: 469 - DNA, 541 bp, Homo sapiens
  SITE (444): n equals a,t,g, or c
  SITE (504): n equals a,t,g, or c
  SITE (519): n equals a,t,g, or c
  SITE (524): n equals a,t,g, or c
  SITE (532): n equals a,t,g, or c
gtatcgtgccttggaaacccagcttcctcaacccctacaaaccctgaactcaggctcctctgattatttcgctcacggtagtctgcataggttatctctcccatgccatggtctgcaagtgcccacgagcagaaagccagagccttcaaggactcacctctttggttcctttctctcagaaatcacagtgctaactgttcttcactgcctgaagtcattgtttcatatgttttgtccaattttctagttgtttataatgggagggcaagtctggtagtagttgcttcatcgtggcctgaagcagaagttgagatctcattcaattcccactgctgacctttaccttgcatatcttttcttatagtaaccattaaaatttttatttctgaatcacacatacggtgattcagtattttgcatttgctgggctacaagcagtttttnattgcttttactctgtttgatgggacttgaatcaggttctttaaaaaaacccttattacncaagtaataatattnttgtnacaattanacatccatt

SEQ ID NO: 470 - DNA, 267 bp, Homo sapiens
  SITE (174): n equals a,t,g, or c
  SITE (186): n equals a,t,g, or c
gaggcaatcagcacataccttcatctagacagggtgacgggcgatcagcacacacctccatctccacagcagcaggaggaatcaacacacaccttcatctccacaggcggacgggggatcagcacacacctccatctccacaggggcacgggagcccgactccccactcccctnggggacacgtantgggcgtgtgttaaatcccacggaagcaagctctggtcactcagcattggtacagctctgtattatttgtcttggaaaatc

SEQ ID NO: 471 - DNA, 534 bp, Homo sapiens
  SITE (398): n equals a,t,g, or c
  SITE (494): n equals a,t,g, or c
  SITE (511): n equals a,t,g, or c
  SITE (530): n equals a,t,g, or c
ggcaaagtggagcacatgaaccagacactcaaacagccactgaagaaatattgccaagagacccatctaaggtgggatcaggtcctacccatggtcctcctccgagtcaggtgcacccttaccaaacaactgggtattcaccctatgaaatcttgktcagccagccacccccaatcataggtcaaattaagggtgatctccgggagctaagggacttaaccttaagaaagcaaatgcagggcttagggatagccatgcaagatgtctatggctgggtacgggaaagaatgcccataacctggcagacccagcacacccctttaaacccggggactctgtttgggtcaagaaattgaatccaaccactttgggacccctatgggatggccccatactgnaatcttgccactcattgagcaagaaaatggcattcctggcttgcaatgtggaaggaaggcttttcttcttcagtgcttgcatggcagactctctgntcttggcccctgaatgncaagctcatgcctcaatgnttaa

SEQ ID NO: 472 - DNA, 700 bp, Homo sapiens
  SITE (535): n equals a,t,g, or c
  SITE (542): n equals a,t,g, or c
  SITE (545): n equals a,t,g, or c
  SITE (651): n equals a,t,g, or c
  SITE (696): n equals a,t,g, or c
  SITE (697): n equals a,t,g, or c
  SITE (699): n equals a,t,g, or c
gcctgcaggtaccagtgctcttggctccacattgtcatggagcctctgctcttcaggaggggccacggtttccccaragaccatccaatctgcccctgggaggaaggcctagggcagtgtccttagaggagcgtagagagggcatcagaggccttgtctgcttctggtcacccgtttcccccactacgggctccagagaacctctcccgggctcgctgcatggctcagaaagaagagctgctggagctgggcacggggatgtagaaaggaaatgctagaaaactttcaccccacctcagtctgcctgcagcaccaggctctgcagacaatgacacagacaatgtccagggagctggaggccactgaccttcttgagcctcttggagttttctgggccgtgaagggagaaccagcttagcccggactgtgagctctccattactctgaggaacgctgtcttcgtatttcttccgcctggggacaagaggcagagcttagggacaggattcccaagtcccaagaaccttctgggttnctctggntgnctaacttcgtccacagatgctttcccctggcccctgcaagggcctgggtggaacaagtgtgtccgtggcaagactgggcttccttcatctatgggttcaattccancttcccaacccagcatggggaggaacagttggcacccagcgaacnnanc

SEQ ID NO: 473 - DNA, 1014 bp, Homo sapiens
  SITE (658): n equals a,t,g, or c
  SITE (687): n equals a,t,g, or c
gctcgtgccgaattcggcacgagcctcagcctccctagtagctgggattacaggcatgtgccaccacgcctggctaatttttgtatttttagtagagatggggtttctccatgttggtcaggctggtctcaaactcccgacctcaggtgatctgcccgcctcagcctcccaaagygctgggattacaggcgtgagccaccgcgccgggctaaacagcatctttttaagcactgaatttggttttaccccaaggaagtattttgctcaggtcagtaagcattggactcaccttgttccactacgataatctgtgttcttattaacctggaggaggttaacatctcctaaataaggagctcagaaagaaaggktactttatgatgttcggattcttttctccgaggaggaatttgwtagcacttaagaaaatatgcatatgamattgtaatgatttgwtttgtcacttaagctccttactactgaaatggyaaactacaaattgcaaccatttaaatccttgacggaagcctttttagaatctattaagtaaatgccactttgtcgctatgttttcttttctgaacctttgcagattagggaggtaaacgattccaaagctgtaggatggcacaaaggataaactgaataaattactctnctttaattttcttaaacttaaaaatttgngtcatgtgggtagattacttaagggttaatgcctgaagacttagatttaaattacatttagaaagkttcactttcttttaagaagacagggaataagacctagaggtaagatctggatgccagagacttgggctgtgtctagatttgcaaaaggagaagaaaaactcagatagtcccccgtgttccttaaaccaaaacattttcatttctaattgagaatcatgaggcttagcaaggcctggggcctagaccatcgtgatcattattcgaggtccctttgattctgagggtgcagacccagccttgagagagagagagagagagaac

SEQ ID NO: 474 - DNA, 613 bp, Homo sapiens
  SITE (448): n equals a,t,g, or c
  SITE (562): n equals a,t,g, or c
  SITE (608): n equals a,t,g, or c
gatgacattcacaatgttgtgcaaccgattactaccatctattctttcccaatccctagtaacttctaatctactttctgtctctaccaatttacctcttctaggtatttaatgtaagtggaataataaaatatttgtatttttgtgtctgactactttcatttagtataatattttcggggttcatctgtgttgcagtatgtaccagaatttcattcctttttaatgctcagtaatactctattcaggtggacattttgcaccttttggctaaactggatactgcagtgaacattggcatacaattattggtttaagtccctatttgcaattcatctgggtatgttccttggaatggaattgctgggttggttttgtaattcgctgtggttagcttcttcaggaactgccatattggttttcacagaacctgcaataatttacattnctaccmacaatggacmccatgtcaatttctctamctccttggccacacttgctawtttctttcttttctatccaacttaaatgggggccctttgggttggaattctctaaccgnaatggtattaagcatcttttcatgggctaattggccattggaagcnttata

SEQ ID NO: 475 - DNA, 566 bp, Homo sapiens
  SITE (474): n equals a,t,g, or c
  SITE (525): n equals a,t,g, or c
  SITE (531): n equals a,t,g, or c
gatttcctgcatgaagaattggtatcttcaggatgctgtagcttttatcttgtataattgccttaaaatttgcatctctgccctcagaatgaatccagtttgactgggttggtaaaccaaagacaactgcagtgctcagggggatgggtttgggtgtacatgtgggagtggacgccttasagaartgttgaggttccaagcccttttcctctggcatgtaaatatctctgacttcccctccctctcccgctcctggtgatttgaggcaaaacccccagtccccarctctycargcagaargggctgggggcctgsctgkctyctttgggaaacttyctctctyctactaaaccctcaggccctttcctaagtagatatcaaatcawtgagttttccgttctagtttggtaactttgatttgcatgataccatttggatcaaagcactgaaagaaaaattaaccaagctcctagnattttcacggtcttaattactttttcctggtcattcaaacttaaaggcagntaaggngaaagagatgagagagatctgaaacagggatgagg

SEQ ID NO: 476 - DNA, 237 bp, Homo sapiens
  SITE (196): n equals a,t,g, or c
  SITE (213): n equals a,t,g, or c
gcagttctgarcctcaagttccatttcctctcacgagaggatgtgacgctctcattcagccactctgccctgtttgggagctttttcccacagtcaagccggtctattgcccatccttggatcatgtggtaggagctgatgwttttaccacccgctctgccatcttcttgtggttacagtgccctggttttcacangaaagcatgccttcctnacccttattttggatggccaaata

SEQ ID NO: 477 - DNA, 359 bp, Homo sapiens
  SITE (277): n equals a,t,g, or c
  SITE (322): n equals a,t,g, or c
  SITE (324): n equals a,t,g, or c
caggtctgctgctaccagctagtccaagccaccaccagctctgccatggagccttttaattggactccctgcttccattcttgtcctttctagagaaatctttaacaaaaagcaagtgaaaattacctctgaaaaaatgaccacttacaaaaggcacaattttcttactgagtatcagatcgttcataatggagaaaaggtgtatgagtgtaaggagtgtaggaagacctttattcgcgctcaacacttagtcaacaccttgagaattcatactggngagaaaccttataagtgtaaggaatgtggcaggcctttagacagngngcacatcttattcgacatcacaaactttacaccgg

SEQ ID NO: 478 - DNA, 404 bp, Homo sapiens
  SITE (237): n equals a,t,g, or c
  SITE (306): n equals a,t,g, or c
  SITE (339): n equals a,t,g, or c
  SITE (346): n equals a,t,g, or c
gatttaaagggtagaaaaatatcaacaataatcaacatcaaacaagaatcttggagatactagagcacagccaagttgtcagtaaatatgaaaatagatgatcagaatgatataattaaagttaaactcaacgaatcaatatggtttgacaggaagatgggttgacatacaaaacaattttgaattaatatatttctaatggtggatgtatttcttgaagctggggcacatttctangcattgaaaggattctttcatgaaaaacaatgttcatttcactttataatcctgaaatgataattttangatttactgtttttgctcatgttaatattttanaaattanaaaaattggcttatttatattaaaaaaattttagtatgttatttattattaatattta

SEQ ID NO: 479 - DNA, 541 bp, Homo sapiens
  SITE (518): n equals a,t,g, or c
gaaagcattaaggacaccaatccagaaaaagggtctcagcatctaggccttcttgtataactccaaacctgtcgcttttctcttcaaggtttaggagttagcagctgtattgataagtcctgatcataaacccatctgcatttgcacaaaatggtagagttagcctatcccttcctcccttgaatcatggtgctcacttctgttcgttactcataaatgtgctttgtggccatttcttttctgagtagggtactttaatctgcattaaaaatctattcaggcagatatcctttctcctarataattttcttcatggcatctaaaactcttctgktgkctcttggcagcaraagctgcttccctgktatcttgacatttttataacccaaacttttcttaaaattatcaaaccatccttgstgamattaccttctccaktttagatccttcaccttcctttgctctaagttgtacataataaggtgggctttttctcaaatccattagactctataggnatggctttcttataacaatcctg

SEQ ID NO: 480 - DNA, 672 bp, Homo sapiens
  SITE (500): n equals a,t,g, or c
  SITE (598): n equals a,t,g, or c
  SITE (610): n equals a,t,g, or c
  SITE (616): n equals a,t,g, or c
  SITE (671): n equals a,t,g, or c
gagggacaatgagactcaaacatacagaaggacaggggcatgcactgacaaaaacatcagaccctcctccaagagccacgtctccaatgacagcagcaacagaacgacctcagacaggctgtgggtggaggtgggaaacaggtccatcttaccttgcaaggggacagggcttgagtaaagaatagaagatggaaaattaactccgtacagaacacacgttggaaacgagcagcggagagaatgcctaaatccagaaaagtgcaaagaggccaggggacatcatcagacacagaactggaccttgctctgctggggatctgcattcactctgccagaacaattccaccactcarctwagggcccgktctcaatgtattctgggtgttagcagcaaatcttgggctctaatattctgaatgaaaatggtttcaaagctactcggcccacagtcaatctaccgaggctggctttttgataggaggwaaaggcattawtactgntctcatctttggcttagaacctagcataacttgaagacttgaagaatgaatagccacgaagcatatgggacacagttgaaaactctatgggtgctctnaactcttaatancccaangttctttctttctcagcagacccaaggtcacataccatcttgtgcggaataggang

SEQ ID NO: 481 - DNA, 406 bp, Homo sapiens
  SITE (279): n equals a,t,g, or c
  SITE (300): n equals a,t,g, or c
  SITE (323): n equals a,t,g, or c
ggttcttcaaagctgcacagcattcattgagagatatggcatcgtggatggaatctatcgcctttctggtgttgcctccaatatccagagactacgccatgaatttgactctgagcacgtccccgacctgacgaaagaacgtatgttcaggacatccattctgtgggttccctatgtaagctgtacttccgggaactcccaaaccctctgcttacctaccagctgtatgagaaattttctgatgcagtttcagcagcaacagattaataaaggctgatnaaaatccacgatgtcatccancagctccccccaccacactacanaacactggagttcctgatgagacacttgtctcttctagctcactattgttccccaaactgcttacttggaaaaaggccaggcc

SEQ ID NO: 482 - DNA, 561 bp, Homo sapiens
  SITE (351): n equals a,t,g, or c
gctcagattttcagcatgcctttctagctgtcattcctagccattgtttctacatgtccacagaccccatgcctccatcctgagccttttggacttatagagtttaggttaagcaatatactatgaataggcacatgggttacagagaacaagagaaaaggatattctcttaggaagagccaagagagaaatgggacacaacagcatgacacagcggtcaacacaggccttggatcagwtgactaaccttgaaaggttccctgtgaaataagaagctccaggttaataccacattgcccctttaggccaataatgaattctgatcaattccacttaagaatcgttcattgnttctttgtcactgctctaacctcatggcaaatgctgagatatgtcttgaggtgatttatcacaagggtttctgaatcatgatatatcacattcattgcatcttccttaccaggcacccatttccaaatattacatatttatctccatttttaacactacagattaggcaatggtgagtgccttttttaaaagtccctactaattaaccgg

SEQ ID NO: 483 - DNA, 567 bp, Homo sapiens
  SITE (308): n equals a,t,g, or c
  SITE (495): n equals a,t,g, or c
  SITE (505): n equals a,t,g, or c
  SITE (541): n equals a,t,g, or c
gattaatactagttcttgagctattgctgttactaataaaccattatacatttgcaatcagttacattgttttgtgggaatgaatttcatttatagaacaacatgcaaatgggtagcatgagttctaatagtaaatgtgccatyttatgtaaggaagawattggtatataatagtgtattaatccctaaaaggaaaccaaattaattacatagctgataaaaggaagtgcatacattgctataatcttcttcaatggcatattaaattttgccatatattttatattacacacatatttgtgtttgtngtgcaactagtttttgatggtctgttatttcatattccaaatctctgggtttcttccttctattgaaaatatagtaatatagttttttaccttcatgccattcaataggtttgttttaagaaattaacactgattttcatgcttaattacaagaaatattttaagaaaacaaatcgttcaataacanttgcaatatnagtcagaaattaattctattaaagtgagggaataanttcaaggaaggaacaattagtcttca

SEQ ID NO: 484 - DNA, 327 bp, Homo sapiens
  SITE (267): n equals a,t,g, or c
  SITE (291): n equals a,t,g, or c
  SITE (304): n equals a,t,g, or c
caatatgagaacgcactaatacaacgtcctgattttgtggttctgttcttgtttttgtttttaggagctaacattgagatgcatttttttgttgttgttcagtaacttcacaatctaagcatagggctttggaaactgctaaaacatgtcatttgcaaaataggatatagaaaaaatgattgagatgatttgggctaccaattaatacgtctttaaatcaaatttttttgtgtgcatcttacatccattctctctcgaagtcatccntgttgctgccctgaataacacatngcatttaaagtgnttaatttaaaatgaattttgttt

SEQ ID NO: 485 - DNA, 270 bp, Homo sapiens
  SITE (218): n equals a,t,g, or c
  SITE (243): n equals a,t,g, or c
ttttttttttctgagacggagtatgcttattctgtyacatttgctacmtaaggcttaacagagagttattacyayaaaataagaaayttgaagaaagttagttctgagaaaagatatyaataacatttatgatttaaaggggaagctttgaagaggaacttttgctttctacatttccttccctttttaatttttataatttttcctttttaaactgntttagcatgttttggcttaattgtnctacttggaccttttaaaaggggaaac

SEQ ID NO: 486 - DNA, 502 bp, Homo sapiens
  SITE (379): n equals a,t,g, or c
  SITE (382): n equals a,t,g, or c
  SITE (459): n equals a,t,g, or c
  SITE (487): n equals a,t,g, or c
  SITE (498): n equals a,t,g, or c
gaaaaagccagatgtttaaaaataggcagtttggccagaaacgttccaaagaatattctccatgtaatacaccaccatcactgaatgatgaccatggtgctagacgcttgcttatctctgtaatcctgttgaccgctttccactaaagaggagggagtagggtttagcagtcacagagctagtcaggaatcaggccaggtctcctaaaawctgcttcaaaatctgggataagtgtccatccagggatgaatggacaaagaacatgtggtatatgactgggtgtggtggctcctgcctttgtgggagctaggtagatggttagcactaagacactcaaagagtggggaacttggcttatgaacagttttagacaaatagntgnattatataaattaatcacatgtcagccatcaataaagaagtcccaggattcagaggcagtccctgctatgggaaganctcggcatctgagtcaccactgatatgngtggaccttangttt

SEQ ID NO: 487 - DNA, 474 bp, Homo sapiens
  SITE (406): n equals a,t,g, or c
  SITE (445): n equals a,t,g, or c
  SITE (458): n equals a,t,g, or c
  SITE (463): n equals a,t,g, or c
gagatgatttcttaaacaaaatacamgatacaaaaatcttaaacgagatacaaaaaaaaaaaagaaaagaaaaaattgataaatttcccagcaraaaaattaaaactgataataataagtaatgtaaacatatgaggcgatggaaggtcactgttgtttgaagtataaactggtatagcctttttggaaaataatcacaatatctcaaaaaattaaaaatgaagattgaaaatacctccaacattttcacttctatgcatataaactagaggaatttctcaaggagattgggtaagaatgtttgttgtgttatttgtaacagtggaaaaagtatactgtaaatctgttcaagactaggtaaatgtaatatccataaaatggataacagtgaaactatatgtattgntttctttttcaagccattaacatggattattttggttgnaggttaaatatgntctgnattataaccct

SEQ ID NO: 488 - DNA, 611 bp, Homo sapiens
gcttaggtggtcatagtcctcccgtgctgtgtcagctcctacatagcattagtctttcacgtgataaagtgcaagcacttttccattttacagtatttggggaaattctaacacactccccagggatttgtgcatgtccttctgcctccccggtgggtcattctgtggattccgcacctggcagtcggtcttcccccttggaagcccctaggatccctgtttctacgggcctggtccttggtttctaccccagtcccttttggccggcacctgcctggaactgcctggagcgccatggtatggggaaggacaggtggaaccctgaccacaacagatccttctaaaacaacagtcacattgatgatgatgagtgcagtggggtgaatgtcgtcacagcatgcatgctgggagctgccaagggcttacaacaaaagcagttcttcctaaggcaccctttgcatcttcccatccacgcctctcagtgcatttggaacttgcttatgcattggaataacttgagtcagctgctcgtttctgtgcctctgcactcacaggttccttcattaacattttaaataagtggttaaaaactcctctggaggttgtttttg

SEQ ID NO: 489 - DNA, 491 bp, Homo sapiens
  SITE (439): n equals a,t,g, or c
  SITE (461): n equals a,t,g, or c
  SITE (462): n equals a,t,g, or c
  SITE (488): n equals a,t,g, or c
gcaaagtgctggcattacaggcatgagccaccgcacccagccacgagtcacagagaatttttctgtagaagaatgacattgtgaaagtagtatcctaggaagttttaatagcactgtgtaagatatattaggcaagggaaaaactgaaggccagaaagccagatgaaaagctatgcagtacttcaatgtatggggcagtgaaaattcagatcaggatgcttactgttggaccagaaggaacatwaggagatgttttgaaggaagtaagaaacaggaggtagtatcagtaactcattggatatagaggagtagagtagaacctgctgaactttaaatagagatttggaagttctctgaagaaggcagagaaaagcagagagcagggaactgagtcttaatccctggctcaaccmtagtagccagggaacaaacacagacnagagaaaaaaaaaaaaaaaaanntcgagggggggcccggccccaattcnccc

SEQ ID NO: 490 - DNA, 547 bp, Homo sapiens
  SITE (512): n equals a,t,g, or c
  SITE (522): n equals a,t,g, or c
  SITE (527): n equals a,t,g, or c
  SITE (545): n equals a,t,g, or c
  SITE (546): n equals a,t,g, or c
ggaaaatagttaccatgaatgaacaggggaaatggaaacgacaaaaagagctaagtagaaattctagagcttaaaaatactctgtcaggattcaaccagagaagtagaacctggaggatataaatatgtagagatttgtttattgattatgtaattcgggggccagctaagcaaatctaaaattcataggataggctgtcaggaagggaagattgcagggaggctggaactcaggggcacaggccaaagttgctctccgtaggtgaaatttgtcatttcacattttactgtaaacagcaagataaaactgggtcacatcttcatttttggaattttcctcaagtaaatatccaacttcatcgtttacaagttctgcttcacaaataactacagggcacaaattcactaagctctctgcaatacataataacaaggatctaccttactcaagtttacattaatggggtttttacttccttctgagccctcactacagcatcttttaagtccanatttctgtangcagntcataagccctgccacanng

SEQ ID NO: 491 - DNA, 330 bp, Homo sapiens
  SITE (229): n equals a,t,g, or c
  SITE (231): n equals a,t,g, or c
gctcgtgccgctcgtgccgattcggcacgagtaaacatacactttttgccacaccacagtatcacatgaggccataagggtggccctggttctatatgactggtgtccttatgagaacagatgaggacacaggcacatgcaggggagacatctgcaagccgaggagaggccaaagaagaagccacgccaacttcttgatgagacgcctcttgatggctctggaacgggngnaaatacattctgtttttcagctgtctggccacggtgccttgttcacagcagcccagctgacctgaggcacagtctgacaagcggaaaagttcctctttt

SEQ ID NO: 492 - DNA, 643 bp, Homo sapiens
  SITE (515): n equals a,t,g, or c
  SITE (521): n equals a,t,g, or c
  SITE (524): n equals a,t,g, or c
  SITE (573): n equals a,t,g, or c
  SITE (605): n equals a,t,g, or c
  SITE (616): n equals a,t,g, or c
gcatccatgagtgacacacttttatagaagggacttccctttttaggaaatatgagagtcgcattccagggataaagtaactctagagtgatccagccaaaggcattttgtttgaaacaatgttatgatcataattcaactgacctttttaggacagttgggataggtcacataaataaagactgctttgttgtgatactaccagtttcagcttcacaaaactcctgatttttataaggtttatcatctgctgctctgcattttgtatttgttaatttccaaaaaaaacttgtacctagtaaactattcatctctcatatgaagtgatttatcagttgagactagaaatgaataacacccttttatgacatataaataataatcatagtacaggttgaatatcccttatctgaaatacttgggaccagaaagtgtttcaaatttcaagatttttgttttcttgggacttttgaaaatttgcaaaagagatatcccaagggaataagacccaagtntaaacntgnaaatttaatttatgaatcccataatattcccttataccaaataggcccnggaaagggaaatttaaatacccataatttttnaaaaaattttnaagggccttgggaaacaatttaagggg

SEQ ID NO: 493 - DNA, 551 bp, Homo sapiens
  SITE (323): n equals a,t,g, or c
  SITE (333): n equals a,t,g, or c
  SITE (461): n equals a,t,g, or c
  SITE (489): n equals a,t,g, or c
  SITE (506): n equals a,t,g, or c
gaagacccccaaataatcttttaggtacctcaaacagctaagtacttattttcctttgaaagacatgccaggtacagagagactgatggacaaaagggttgccggaatgtggcatttacagatttcatgatctgtctcacatgtttatgagccagctttctggctgataaactcatatcctgtatttacattttattactatttgatttctttcttacagttgatccaaagtgtgaaattgggagcctggagcttgccaacacttccatgktagaaaaaatgtacaatgaaagagtttgagttttgtgttttgtgttttgtgnggctttttgntttgktttggtttggtttccctggcaaggacacaaaaccttgtgagctaatctctgagatctctgggccgtcgctgcccactgcctctcatgggacatttgcttacatgtccttgctttagctactgntacaagctgaaggtctttctcatgagangcctgaaactagtgggntaatcctgaataaggctttggaagaaagcagggccaagccagagg

SEQ ID NO: 494 - DNA, 303 bp, Homo sapiens
  SITE (271): n equals a,t,g, or c
gcattttccagccctgtgtgagctttgaggattgttttgcttccttctactggtggttcattttttctgaggcgggagtttattttctcacatgcttagatcagtagtcagccaaacccttagggaacccccacttgaggtggctggagctctctctctgttcagcttcctcctttctgacactctggcacatagattctaaatacctgatctccctgaactcagaggttgtctcaattaagtggaaacttcaggctcttggtttcttctncctggcatttgggctggaaaatggttacaggg

SEQ ID NO: 495 - DNA, 602 bp, Homo sapiens
  SITE (302): n equals a,t,g, or c
  SITE (516): n equals a,t,g, or c
  SITE (545): n equals a,t,g, or c
  SITE (550): n equals a,t,g, or c
  SITE (575): n equals a,t,g, or c
  SITE (580): n equals a,t,g, or c
gctcgtgccgatccaattgccttcttcatagatctactttgatttctaagtagcatctcagacttatccccaaagtgaactagatctctgtctgccaaacatttaccctccagtcttctccatcctagaaagttacactaccatttactcagttcacagaccaaaagtgtaagtgtcattttccctcacattccacatcggcacatcatcaagcaagttggttttatgtttgatgtataccctctatggggtcactaccctctaccgccattgctacccctatctcttgccaaggctgktgncataatagtctcctaatgctttatctaataatctgtctctacagctacctggtaatcttaaacaatatatatctaattggtttatctctaccactacccagatataaaacttaagtggatttctggtaaaattcaaaatccartcagtggtgaattggttaaaaaagtccacaatttgggctggacaaccagtcaaagggtgaataagaagatnggaaaaaatatgtcaggtaaatactttanttcantggaattaatgactttccctggaanaagcnttaataatttatttaatacccc

SEQ ID NO: 496 - DNA, 650 bp, Homo sapiens
  SITE (524): n equals a,t,g, or c
  SITE (590): n equals a,t,g, or c
gctcgtgccggattttcatgtgaagcgtgtaactcttacagatatttgagtaaacctcaggctcattgttggtgtcctgtgtggtcatctcatacagcacggttttgcttacagaacttgccttcttttttatgaaacggtttcactttcacagaaccccagtgttgcacgtgatacagattgagaaacactgtcctatatgtttagcattttgatacttgctactactttttactttcagtggcacaaaattatggtgtcattggtttattgggatggttttccattgkatccarcactgatgggctcttttcttatttctggaagtctgtgtgccaccgttgtatttttttgtgcgtcagaacgtcaacttcataagcttaaaatactcgtcagagagccatatagaagtgtgtaattgaacacaaaatcatagaataagtttgacstggaaaccataaaactccttctagtgacattttacagctggyccatttaaagagacatccttcattccaataaantattctgccctaaaaataatgcttatgctttggtaaggtgctgtasctaccttacagcctcawtgnctactagttgggmcaaagaacgaaaaagtaaaaaacaaaaaaaaaaaaaaaaaaaaaaaa

SEQ ID NO: 497 - DNA, 284 bp, Homo sapiens
  SITE (258): n equals a,t,g, or c
  SITE (267): n equals a,t,g, or c
gcatagatccaaatggtggttttaccatttactagtcatatgattttatgctgcccataattcaatatcatcaagctttgttttattcatgcaatatagataaaacagtatctatctcatttaaaccattgcaaaattaaatgggatattctagataaagctccttttatagtgcctgaaacataacatggacttaaataagaaagggtaattattcttgattatgataaaactatcaagattctggatgtattttanccaaggcanaagtaaaaagagaactg

SEQ ID NO: 498 - DNA, 511 bp, Homo sapiens
  SITE (288): n equals a,t,g, or c
  SITE (319): n equals a,t,g, or c
  SITE (446): n equals a,t,g, or c
  SITE (457): n equals a,t,g, or c
gaataggcacagtcctgaaagagcacagtcctgaaagagcacttctaattgggcatacaagcaagctcataataaagttctcctaggaagttttcctcatgtwttgaagatgatacacttagtccctgactggggatggtttccgcttacactttttcaactttacgatggtgtgaaagtgatacaccgttcagtaccgttcctcaattaacaatgaagctatgtcccgataaacccatcataagttgaaaatatcctaagtccataatgcacttctgatataatggnattttcaacttacagtgctttaccaagatgnggcgcattgtaagtcgaaggagcatccatccctgatgggatatataaggatgagaattatgcacagatggtcctcagcttatgatgggatcatgtccagtaaagacactgtaagttggaaacatctnaagccaaaatncatttgatatactaagctatcaagcatcatagcttaagcctcacctgcttattg

SEQ ID NO: 499 - DNA, 677 bp, Homo sapiens
  SITE (618): n equals a,t,g, or c
  SITE (648): n equals a,t,g, or c
  SITE (666): n equals a,t,g, or c
  SITE (673): n equals a,t,g, or c
  SITE (677): n equals a,t,g, or c
gccgcctagcatttttcattggaaaggtaatggsaaaacagtatgaaagaaccttaaaagctcatacttttgttcattcaacaaacatttcttctgttctgtattacgctttctgctagatatgaaatggatactgccatcatttctcaggtcttttcattctgatatatttctttttattctttatccatatgcaggcatagtctattcattctaaggcatagtggacatacggtttgctttgcctttctgtttggttatattgagaatgtttttctgggttactgtaaggtgtctcattatcatttataatggctatataatgaccctttgagtttcagtatctaaccaaaagttccaaaattggggtaatgattatttattttgaattcttaaaaaaacccagcattgtgttaggttggttacccgataacattgtacttgtcaaaaatgcttagggttctagtcatggccgaagtaaatcatttccacctattaagttgcagtgagttaattgcccagtagatgctggaggctggctttatctctaaggctgaccttgatgacttcttccccctctgagttggtgttccttttggcattcttcagaaaggtcgntttgtggtatatcttaacattatgtctcanaacacatcgccactaggnggcaggnctcn

SEQ ID NO: 500 - DNA, 551 bp, Homo sapiens
  SITE (337): n equals a,t,g, or c
  SITE (369): n equals a,t,g, or c
  SITE (422): n equals a,t,g, or c
  SITE (483): n equals a,t,g, or c
  SITE (538): n equals a,t,g, or c
gtttttaagatcagacataacttccaaatagaagaaaccatgtttaaaaaaaaatccatgctttttaatcattttcttatgtaaaaagcctcaagtggctggaataaggtctaagtaacaaataaagaactaaacttttcagataaaggctccgaaagtccctcttgttttcagctttcaaaattctttctctctctctatcaatatatggytcacgtgtaaaaatgtgcttacctgtgtagggatgaaattaagactgtctgtcatctactcctcacaaaaggaaggaagtgagattattgcctactttttccttatcttttctttttttctctgntggaggtataggatcaaccctcatccctttgntaaatataaatgaatcatttaaaagggtaattattggaaggaggtaacctgancattaacctaattgcaatacccagttgaagaaaatctgatatataatttaccagatggcanggttttttgggtttgggttggaattttgaagggtttttggtttttaaattttccntttaaggaccatt

SEQ ID NO: 501 - DNA, 623 bp, Homo sapiens
  SITE (448): n equals a,t,g, or c
  SITE (577): n equals a,t,g, or c
  SITE (592): n equals a,t,g, or c
  SITE (620): n equals a,t,g, or c
gctaaaatgttgaaaaatatggagacataaaaatctctacaattccataatttaaaatctgctgatcgttcagagttgataaagaccacagaaaacatagatgtgtcaatggacgtgaagccttcctggaccaccagagatgtggcacttacagtgcaccgggctttcaggatgattggtctcttttctcatggattcttggctggctgtgctgtgtggaatattgttgtgatatatgttctagcaggagatcagctatccaacctctcaaaccttctgcaacaatacaagaccctagcgtatccattccagagtcttctgtacttgcttttggctctgagtacaatttcagcttttgacaggattgactttgctaaatatcagtagcaatccgaaattttttggccctggatcctacagctttagcatctttcttggactttactgntcttatactatctctgagtcagcaaatgacaagtgacagaatccacctttacacaccttcttctggtaatggtagcctctgggaagcaggaattgaggaacagatyttcmagccatggawtgggggaanctcggggggttcttntggtggaataacttggtattttggctanagg

SEQ ID NO: 502 - DNA, 264 bp, Homo sapiens
gcaggcatcttgttaaatgttcatgtataaagattaatgaataggactctcctgttctgcaaaaagctcacagtataactcctgttgcaggttgcagcttttctgcttgagctacatttcatttggtcctctatatttatcttataaaatagagaccccagttaggtgctaactagttgtacagtcctgtccagttttgcataccatatattttagggggacactactctttaactttgctattgatcttgaaagatgaattga

SEQ ID NO: 503 - DNA, 634 bp, Homo sapiens
  SITE (60): n equals a,t,g, or c
  SITE (467): n equals a,t,g, or c
  SITE (566): n equals a,t,g, or c
  SITE (584): n equals a,t,g, or c
  SITE (614): n equals a,t,g, or c
  SITE (623): n equals a,t,g, or c
agctttctttatgaattctgatgtgtatatagggagtttcctcttggagacgggcccctnaaaagcattctggagacaagaagagtcttaacccttctctcctgtgtcttccccgtcaggtggccaaaaggtatcaggaagaatgaatcattatcttcagaacaatagcctatgtagaaaaagagaagagggagtttggtgggggatttcatcctatgcaatggwttctaagatacaaaccaagtttttggaaacttgacgggggcaagtaggaaacacatttttctaaacctttcctggagtagtttctgctgttccaaaccatggaggtagtccatgtaggtgatagggcttggcctacactaaaagggtagtgtcaacctctgcatcttttcttccgttccttagacctgttaattaacttctgacctggaattaccaccgggtgtaaaggcacctattctggnggtgattctttcttgcattcagtaacatcagcaagcctgtctctatcataggtggaagtaactgtgattggaccctccgtgaatatgcacagagtctgnaacttttgagtcctacanctgggtgggcaaatctcttctacattatanaagctaagngaaaaagactt

SEQ ID NO: 504 - DNA, 436 bp, Homo sapiens
  SITE (342): n equals a,t,g, or c
  SITE (398): n equals a,t,g, or c
  SITE (415): n equals a,t,g, or c
  SITE (419): n equals a,t,g, or c
cccacgcgtccggtcaagatggcggagaagtagcaggctgagactacctcactagcaggagatcagctagagagcttatctaaggattgcaaacacctgcaaatccatcggcagatcgaagagaagaagarcagcaattctagaaacagaaaaacaaccactttctgaaagtaggactggtggagaagtgaatccaaagcgacgggaagatagaccccggggggaggggccggctcccgcaagcggcggacaacggagcacaaaatcaggacttttaaaatctgttccgatgagggacatcgctccggaggttaaaccggggcgaacacgcggggttcggcntgacttcaggtcccgcggggttcacagaacgttcgggggtgtctgatgttcccaantttgcggatattgggangggnaagccgttgcagagacc

SEQ ID NO: 505 - DNA, 557 bp, Homo sapiens
  SITE (456): n equals a,t,g, or c
  SITE (464): n equals a,t,g, or c
  SITE (477): n equals a,t,g, or c
  SITE (490): n equals a,t,g, or c
  SITE (525): n equals a,t,g, or c
aattcccggtcgacccacgcgtccgactagttctagatcgcgagcggcccgccctttttttttttttttttttttttggtttccagagtttggctttattttgcagtacagaaatcatctggagccgtctgagacagacatccctgaagcggaggctctgtcaaatcaatactgcgtcgcacttrgtccgttgaggaagccacacctggggtacaaaagaagcttctacgtttacccgctgtaccacggatttctttcccctttgctcttaccaattttaccaggtgaaaacaccgcacagaggcttccctcggaatgacgctcgggtctggagttgggttagaattgtgggcccgcgtgacccccacctgtggctgtgttccgtggccctgtcctaaacagctgacgggacacagacgtagaggggcggggccacgcagggatgctgttcccaantcacggantatctggtgggcntcgcaatggccantgggacagatggcacgtgaaaggggccgttccggntctcaagcggcagaagcacaagaccgcggagg

SEQ ID NO: 506 - DNA, 379 bp, Homo sapiens
  SITE (349): n equals a,t,g, or c
  SITE (359): n equals a,t,g, or c
cccacgcgtccgatttaatttgagaaataactgggctcctagccagcaagattttttgtccttgttcctcttaaaccaagtcccttatcatctgtttgacattttcattgttttatttttgtttttctgttgctgagcctcatctttcttgttcaagaaaagtcatgtgttgggatcactgagttaatagatttgactccctgtgcatcaaaatacattaactcaccacctggcacagacctctcactctgagccaggtgtcgggaagttctaaccggtcagtacaaagttgacctgcggccacagaaaacgagttctcccctggatggacttcactgtgtcccctganatccatttcngggattttgagagcatgcag

SEQ ID NO: 507 - DNA, 308 bp, Homo sapiens
  SITE (287): n equals a,t,g, or c
  SITE (292): n equals a,t,g, or c
cccacgcgtccggtgagagcgaggggggcgggggccggggagagtggggcggctgggcgagtggacgcgtgaacagactgacctgcggatgggacagccgggccctaggccttctagccccgcttaacccctgatgcgcggggggaagcagcccctctcgctgggggatgctgcgggattcccggtgccgggcatctgggccgcccgctaaccccctgtgcctaccccgtgcccccggggaaaccggagttccggccgctggaaaagagaagcggctgccgagaagntgcanggtgcccggcggggga

SEQ ID NO: 508 - DNA, 222 bp, Homo sapiens
ggaggaagaggaggaggaggaattagtggatcccctaacaacagtgagagagcaatgcgagcagctggagaaatgtgtaaaggctcgggagcggctagagatgtgtgaccagcgtgtatcctccaggtcacagacagaggaggattgcacggaggagctctttgacttcctgcatgcmaagggaccactgcgtgscccacaaactcttcaacagcttgaaat

SEQ ID NO: 509 - DNA, 386 bp, Homo sapiens
  SITE (250): n equals a,t,g, or c
  SITE (330): n equals a,t,g, or c
  SITE (369): n equals a,t,g, or c
cccacgcgtccggcggccactttggggcgcaagtgcggcggctggtggaggaggtgacagatgacaagactatgcccaagctggagagaaagcggctgcaggtggagcgcgcaccccacagcagccccggggccaaactggtgaagctggcagacaagctgtacaacctgagggacctgaatcgctgcaccccagagggatggtctgaacatcgagtccaggaatacttcgagtgggcagcgcaagtggntgaaggggcttcagggaacaaaccgacagctggaagatgctcttaaagcagctgtttaaggagcggggctgacgctctgnagcagtccttggagccatcaggggcccaaatttccagcntggccggggccagaaag

SEQ ID NO: 510 - DNA, 366 bp, Homo sapiens
  SITE (18): n equals a,t,g, or c
  SITE (346): n equals a,t,g, or c
  SITE (358): n equals a,t,g, or c
cccacgcgtccgcagatntcccttctgggcttcattttggaaacttttcttagggctgtttttattaagtgcccaaatttgatggagggtggaagtaatctgaatgtatttgatttatgatattttctagattaaaagatggttgtagcatttaaaatggaaactttttctccttggtttgctagtatcctgagtgtattctctgtgagtatagctcaaatgggtcagcgtgaaaggtcaaagaaagcaaggtgtccacgtgacgcgggtggttaaggccagcgcctctcctaccactgtggccactggacttgctgtgtgaccctggggcaagtcacttaacganaatgtgcctcanttttgcct

SEQ ID NO: 511 - DNA, 347 bp, Homo sapiens
  SITE (108): n equals a,t,g, or c
  SITE (329): n equals a,t,g, or c
tcgacccacgcgtccggtcaccaggcggctctgggaacctgttttcccccgagcagctatgagcaagcggaaccaggtttcgtacgtgcggccagccgaaccggcgtntcctggctcgcttcaaggaacgggtcggctacagggagggccctaccgtggaaaccaagagaatccagcctcagctcccagaggaagatggtgatcacagtgacaaagaagatgaacagccccaagtggtggttttaaaaaagggagacctgtcagttgaagaagtcatgaagattaaagcagaaataaggctgccaaagcagatgaagaaccggctgtanttgatggaagatttatgt

SEQ ID NO: 512 - DNA, 400 bp, Homo sapiens
  SITE (384): n equals a,t,g, or c
  SITE (399): n equals a,t,g, or c
tcgacccacgcgtccgctctctctctcaggaacacaagatgccgaagggaagaaggcgaagggaagaaggtggccccggcccccgccktcgtgaagaagcaggaggccaagaargtggtcaacccgctgttcgagaagcggcccaagaacttcggcatcggtcaggacatccagcccaagcgggacctgacgcgcttcgtcaagtggccgcgctacatccggctgcagcggcagcgcgatcctctacaagcggctgaaggtgccgcccgccatcaaccagttcacgcaggcgctggaccgccagacggccacgcagctgctgaagtggcgcacaagtaccggcccgagacgaagcaggagaagaagcagcggttgtttgcccgngcggagaagaaagcng

SEQ ID NO: 513 - DNA, 357 bp, Homo sapiens
  SITE (116): n equals a,t,g, or c
  SITE (209): n equals a,t,g, or c
  SITE (212): n equals a,t,g, or c
tcgacccacgcgtccgaaatactctttcccgccccagtggcaaacagaagccggggctgccaggcaggggcccccacggcacccctgctgttcccgccaaagcgagcgcacacccnggaggcccgcagtccttcacagttagttcccagttaagcacatgagcagagaaagagaaataaaaatatctcatgggagtaaagagaatctgngtnacttcctttttatctaaatttctctgagaactagcagtgagcgcactcggcttcggtgagcgtgaaccgtgtccccctgtggcgcctccttttcagtccctgaggcccggcgcggggagggaggacccacggggccgcctgtgca

SEQ ID NO: 514 - DNA, 407 bp, Homo sapiens
  SITE (354): n equals a,t,g, or c
  SITE (391): n equals a,t,g, or c
  SITE (396): n equals a,t,g, or c
  SITE (405): n equals a,t,g, or c
tatgtagctcataattatatgtagctcgtgatttattttattgaagaacacgtgtgttgagtgaattccaaacttttgtacatgctaacctcaaagggacgttccaagcctatgtgccattacaatatgtgtgataaaatttgttggagatctttataacgtgccattgaagttgaagcaacattagaagcatctagaatgttcagttttaggatagaaaggatccactgagtatgtacacttttggaaaattctctgtgttacctaatggaattagtattctctgactttacacttccctcttacctcctgccagtccaacatctttacagagaagttggaaacccaatttcngttccaccaggtagttggatgagcaccggttttgttntggtnttggttttnaa

SEQ ID NO: 515 - DNA, 368 bp, Homo sapiens
  SITE (347): n equals a,t,g, or c
  SITE (359): n equals a,t,g, or c
  SITE (362): n equals a,t,g, or c
tcgacccacgcgtccgctcaaatatttgttaagtgaatgaatgagctggaatgatttggatatatttttaaaagttatctgttgcggggcgcctgggtggctcagtgggttaagccgctgccttcggctcaggtcatgatctcagggtcctgggatcgagtcccgcatcgggctttctgctcagcgggggagcctgcttcctcctctctctctctctgcctgcctctctgcctrcttgtgatctctctctgtcaaataaataaataaaatctttaaaaaaaaaaaaaaagttatctgttgtgttaacctatgaattttatcattgctccagcctggctaagcttttnaagaactttggntcntccagt

SEQ ID NO: 516 - DNA, 448 bp, Homo sapiens
  SITE (412): n equals a,t,g, or c
  SITE (436): n equals a,t,g, or c
tcgacccacgcgtccgatcgactttatcggtacagatccccagacaccctaaatgcatcctccaaaatccacacggcctcagattctacatctcagtgtccgccctaaagaacccacacacccacaggcacccctgcagacaccccgacaggcatgctcacacacgcagacacacacaaccgcacacacactcacacgctcacgcatcgatgcacacacactcacacgctcacgcatcgatgcacacacgcttccacacgcacgcacacccacacacacgcacgcacacgsgcacacgggggagcccggcaccgtgcagtctgtgttctgttcacagacttttcccggamttgsttcattggtgraggttttcatgttctgtgctcccctyctggattctggggastggtcntgggtgggaaaagggcggttccantttcggttgcag

SEQ ID NO: 517 - DNA, 388 bp, Homo sapiens
  SITE (242): n equals a,t,g, or c
  SITE (363): n equals a,t,g, or c
  SITE (373): n equals a,t,g, or c
tcgacccacgcgtccgccgctgtagagtccggctcccgtctccccgctgccgcgcaggctcccggacgcgggctcccggtgggcacggcccccgacacccccaccaggcaccatggactggaagacgctccaggccctcctgagcggcgtgaacaagtactctacggcgttcgggcgcatctggctgtcggtggtgttcgtcttccgcgtgctggtgtatgtagtggccgcagagccgtgtngggggacgagcagaaggactttgactgcaacaccaagcagccgggctcaccaatgtctgctgacgacaattcttccccatttccaacatccgcctctgggccctgcagctcatctttcgtncaagtggccnttcgctgctggtgca

SEQ ID NO: 518 - DNA, 499 bp, Homo sapiens
cccggtccggaattcccgggtcgacccacgcgtccgccgcggcttcccggccaacagcttcttagccggccccgccgccgccgcgctcgctccttcctctgggcagtgggaagatggtgggccggaacagcgccatcgccgccggcgtctgcggggctctcttcatcgggtactgcatctacttcgaccgcaagaggcggagtgaccccaacttcaagaacaggcttcgagaacgaagaaagaaacaaaagcttgccaaggagagagctggactttgcaagttacctgaccttaaagatgccgaagctgttcagaaattcttycttgaagaaatacaacttggggaagagttgctagcccaaggtgaatatgagaaaggkgtagacmatytgacaaatgcaattgctgtgtgtggacagccacagcagttgctgcaagtgttacagcagatctcccaccaacagtgttccagatgttctgaacaagcttccaacattag

SEQ ID NO: 519 - DNA, 478 bp, Homo sapiens
  SITE (344): n equals a,t,g, or c
  SITE (415): n equals a,t,g, or c
  SITE (452): n equals a,t,g, or c
  SITE (469): n equals a,t,g, or c
tcgacccacgcgtccggggaattcaaggagacgggggcgacgcggctgctggcgcctcctcgggtttggggctgccgccatcatgccggggatagtggagctgcctactctggaggatctgaaagtgcaggaggtgaaagtcagttcttcggtgctcaaagctgccgcccatcactatggagttcagtgtgacaagcccaacaaggagttcatgctctgccgctgggaagaaaaagacccccggcggtgtttagaggaaggcaagctcgtcaacaaktgtgctctggayttcttcaggcagataaagctttcactgtgcagagccttttacagactattggacntgcatcgactactccggcctgcagtgttttcgtcgctgccgcaaacagcaggccaatttgacgatgtgtgnggggcaactgggatggtgcggctgaactggggaaaangttccagtcaccaaatngaaaacagt

SEQ ID NO: 520 - DNA, 415 bp, Homo sapiens
  SITE (365): n equals a,t,g, or c
  SITE (393): n equals a,t,g, or c
  SITE (408): n equals a,t,g, or c
tcgacccacgcgtccgctttcctcatcatcaaggatcaggatcgcaagtctcgtcttatgggactggagctctcaagtctcatatcatggcggcaaaggctgtagcaaataccatgagaacatcacttggaccaaatggacttgataaaatgatggtggacaaggacggcgacgtgacggtcacaaacgacggtgccacgattctgagcatgatggatgtcgatcaccagattgccaagctgatggtggagctgtccaaatcccaggatgatgaaatcggagatggggaccacgggggtggttgtcctggccggcgccctgctggaaggaggccgagcagctgctggaccgcggcattcamccgntcaggatcgccgacggttacgagcaggntgcccgcattggccntcgagca

SEQ ID NO: 521 - DNA, 211 bp, Homo sapiens
tcgacccacgcggtccgcttggtggggtcggctgctttctcgcgtttccccccaaccccgtccggcctcgcccagcgtttccacgcggaaccaactgccagaggcgcggcgcggcgtcgagccgggcgagtgtgaggaaaccgccgcctcagccgagcgcgcgggcccgcccagggcgttagttttcggcgcgcagtcgcggtcccccggc

SEQ ID NO: 522 - DNA, 122 bp, Homo sapiens
  SITE (121): n equals a,t,g, or c
cgcctgcaggtaccggtccggaattcccgggtcgacccacgcgtccgggaaatcactccccaagtcatgcctaagtttacagagggttgctagagaaggccctagaactgcaactgctgtng

SEQ ID NO: 523 - DNA, 454 bp, Homo sapiens
  SITE (375): n equals a,t,g, or c
  SITE (414): n equals a,t,g, or c
  SITE (445): n equals a,t,g, or c
  SITE (451): n equals a,t,g, or c
tcgacccacgcgtccgctctctcaggaacacaagatgccgaagggaagaaggcgaaggggaagaaggtggccccggcccccgccgtcgtgaagaagcaggaggccaagaaggtggtcaacccgctgttcgagaagcggcccaagaacttcggcatcggtcaggacatccagcccaagcgggacctgacgcgcttcgtcaagtggccgcgctacatccggctgcagcggcacgcgcgatcctctacaagcggstgaaggtgccgcccgccatcaaccagttcacgcaggcgctggaccgccagacggccacgcagytgctgaagtggcgcacaattaccggcccgagacgaagcaggagaagaagcagcggttgtnggcccgggcggagaagaaagcggccggcaaggggacttnccgaccaagccggccccgttgttgcgaaccngggttnaaa

SEQ ID NO: 524 - DNA, 225 bp, Homo sapiens
  SITE (94): n equals a,t,g, or c
  SITE (152): n equals a,t,g, or c
tcgacccacgcgtccgggcggcgtccaggtggaggtcttgagggggatcaagttggtatggcgttggcatcggggcccgcgaggcggcactggntccgccctgggaggctcggccttggggactgcggggctccgagacgcggggcgtatgnagtggggcgtgcgctctacgcggaagcccgtagcctcgtcccctggacagggtgtacgagatcccgggactgg

SEQ ID NO: 525 - DNA, 399 bp, Homo sapiens
  SITE (364): n equals a,t,g, or c
tcgacccacgcgtccgctggactggccgggattgcgaaaggttcaacatgcctttgctagagatttactacacccgtccttggaagaggagaagaaaaaacataaaaagaaacggctagttcaaagcccaaattcctatttcatggatgtaaaatgcccaggttgctacaagattaccacggttttcagccatgctcagacggtggttctttgtgtaggctgttcaamagtgctgtgccagccaacgggaggaaaggccagactccacagaggggtgttccatttagaagaaagcmaccactaatgattccacaccaacctcttgaattkgtgktctatcgcmgaaagccttatcagttcagtnaattccagtttaatctacccaggataatgtaatta

SEQ ID NO: 526 - DNA, 360 bp, Homo sapiens
  SITE (219): n equals a,t,g, or c
  SITE (357): n equals a,t,g, or c
gggcggggcccgcgccgggcgccataatggacgaggactacttcgggagcgcggccgagtggggcgacgaggcggacggtggccagcaggaggatgattatggagagggagaagatgatgcagaggtccagcaagaatgcctacataaattctctacccgggattatataatggagccctccatctttaacactctgaagaggtattttcaagcagganggtctccggagaatgttatccaactcttatctgagaactacacggcggtggcccagaccgtgaacctgctggctgagtggctcattcagacaagtgtcgaacccgtgcaggtccaggaaacggtggaaaatcacttgnaga

SEQ ID NO: 527 - DNA, 618 bp, Homo sapiens
  SITE (563): n equals a,t,g, or c
  SITE (598): n equals a,t,g, or c
gggtcgacccacgcgtccggcagaaatgaaggaccacctgccaagacgaagagctgggtgggacccacgctgcattttcatcgaaagagtgaacatctagtgggactgaaagttctttgttgtttcagattgtagagtgtgattgatggaattggtctgtggaaattgcattgtttttatttctttatgtaatcagtttaagtaatagggggtatatataatcgtaagtattttagggtgggaggggctattaagtaattaagtgggtggggttagtttaaaagttagcatgatatgtattagataactctataagtggacatgtgtacttacttgtgatcctttaccctatgattgctacccttaacgatttcaaataaactcagagggaactgcagggagatcaaaccatttagggcaaattggacatgaataaaactctagtgggaaaaagttcaaaggtgattgaataaataatttaactttgccctgggtattaagtccagggctcccagattgtggagcagagccttggagagtacaggatgaaggagatagatgcncctttgacttgccgggaatgaaattggattaatgnaaggatggtaaataattcca

SEQ ID NO: 528 - DNA, 419 bp, Homo sapiens
  SITE (375): n equals a,t,g, or c
  SITE (382): n equals a,t,g, or c
  SITE (390): n equals a,t,g, or c
gggtcgacccacgcgtcaggcgggtaagtcttaacaggaagaatctaagaaagagtgccggctgctgtccttcccagcgyccgaagccccgccatgctcgtcctccgaagcggcctgactagggctctggctgcgcggacgctcgccctccaggtgtgctcatcctttgctacaggccccagacaatacgatggaacagtctatgaatttcgtacctattatcttaagccctcaaagatgaatgagttcctggaaaatactaagaaaaacattcatcttcggacagctgcactctggaattggttgggatactgggagtgtagaatttggaggccagaatggaataaatgtttccatatttgggaatgatgatantttggcncatcggantcaagttcgggaaagcatgggcaaaagat

SEQ ID NO: 529 - DNA, 738 bp, Homo sapiens
  SITE (366): n equals a,t,g, or c
  SITE (382): n equals a,t,g, or c
  SITE (404): n equals a,t,g, or c
ggccgcccttttttttttttttttttttttttttttttttttttttaaagtacaaattcacttactttattcctaaattgtaaaaccttattttagctcttgaaaatataaatgaaaagaaaaataattaccaaaaggcaagacaaagttcagccaactcataattctgtgacaagcagcacatctgccactgtaacggagtcttaaatcaatcaataaattgggctttgtcaacttgttttcccccaaaagcagctcttaatattcttaattgtggaggaaatggcagtgattcttttttggacttttaattttgcggctgtatatttcactgtatttatcttgcacacccccatggagtcttgnaaccagttctgaagcnaaagtaagcmaagagtgaggcngtwatctaatctcttaaattactagcagtgaccaaaggatgttctgtaagaacctttaaactaccttcatggtttagggattaggtgtaaaactttgcctctaaacgtgtgtccacagataggcagcgttgcatcaccagaacctgttacaaaatgcgtatccctggtgccatccagaactaccgaatgccagtgggacgtttaacaagatcctgagatgattcctattacgttacacactgaagtttgagaagccctgctctcaaatacaacttctctccttgaaataaaatgtgtgcttggaatagagaagaaaaaaaagttgggcaaactg

SEQ ID NO: 530 - DNA, 306 bp, Homo sapiens
  SITE (275): n equals a,t,g, or c
  SITE (276): n equals a,t,g, or c
  SITE (299): n equals a,t,g, or c
gggtcgacccacgcgtccgcttctggaaggaaataaggtgaaaactctaaagtccttctattctcttcccagacaatgtaaggactttagagttttcaccttatttccttccagaagaagaaaacaaggtgaaaactctaaagtccttacattgtctgggaagagaatagaacagaagcacaattacaattacattctattttgataagtcaggggtgcatgttgtgtagtctaaggtaaccactaggagaagagtgaaagggtttataaccgannaaaaaaacaaagagaacaaatanactatcc

SEQ ID NO: 531 - DNA, 445 bp, Homo sapiens
  SITE (341): n equals a,t,g, or c
  SITE (406): n equals a,t,g, or c
  SITE (438): n equals a,t,g, or c
  SITE (441): n equals a,t,g, or c
gggtcgacccacgcgtccgggcggcggcggcagtcatggcggctcggtgtgtgaggctggcgcggcaaagtctcccagcttacctgtctctcagaccatctcctcgactgctgtgcacagctacaaaacagaagaacagtggccagaacctggaagaggacgtgatcagaaagaacagaagacagatactccttccccagagaagatactcctggacgagaaggtcaagctagaagagcagctgaaggagactgtggaaaaatataagcgagctttggcagacactgagaacttgagacagaggagccagaaattggtggaggaggcaaaattatatggcntccagggctttctgttaaggtttgctggaggttcgcagatatcttgggagaaggcgacgccagantgttcccgaaggaggaggttcagagacgacantcntcac

SEQ ID NO: 532 - DNA, 347 bp, Homo sapiens
  SITE (341): n equals a,t,g, or c
gggtcgacccacgcgtccgggcggtcggtgtaggctgcggccgggccccggcttttcggacccgggacccggggacgraggcggggcctgtgggcaagagtgtcccggcgtgactgcagaacgggcggctttcacggaggtaatgaggaaaatgttagaagtcaaagtgccgaaggtgcggtgaaaagtaggcttcttgccttgccttcagcttccttcatacaacgccatcascctcagataccccgaacttcggatkctgagtttgtaaataagcctacagaggctctcatcttgcagaactctcaagatctcttataaagagattcgtaattcagagnttaagg

SEQ ID NO: 533 - DNA, 451 bp, Homo sapiens
  SITE (256): n equals a,t,g, or c
  SITE (385): n equals a,t,g, or c
  SITE (449): n equals a,t,g, or c
gggtcgacccacgcgtccggtgcagtcttctcttcggctcccactggcgctcctcccagctgctgttgtagcgccccgtcttcagtcctgtggctctgcctgcgttcttctgctccctgatcctgcatgcaaaatgggacctttcgccccaacgctgctgatgctgctgcccccactgctgatgctggtcctgtamggctgctkggcaagcaagaggctgggccggacatcagtatgagcatcamcgcggacctgnggaacagagtgcagcatatttccaggctatgagattcaatgccaacatgtctttccacgcccaaatggttatcaatgaaggtgaagctttccgtgaagggcaaaggaccatcccggctgtgggagaggncggggaagctctgaaggcagagatcatgaaggtgacatttccccgtaatgataccaacaacgtngg

SEQ ID NO: 534 - DNA, 404 bp, Homo sapiens
  SITE (148): n equals a,t,g, or c
  SITE (366): n equals a,t,g, or c
  SITE (369): n equals a,t,g, or c
  SITE (381): n equals a,t,g, or c
gggtcgacccacgcgtccggcgaggcggagagaggcctcggcatgtccctggcagatgagctcctggctgaccttgaggaggcggcagaggaggaggaaggaggaagctatggggaggaagaagaggagccagcaatcgaagatgtgncaggaggagacgcagctggatctttccggggactcggtcaagagcatcgccaagctgtgggacagcaagatgtttgccgagatcatgatgaagattgaggagtatatcagcaagcaggccaaggcttcggaatgatgggaccggttgaggcggcgcccgaataccgggttcatcgtggacgcaaacaacctgacatggagatcgagatgaactgaacntcntccacaatttcntccgagataattattcaaagcgg

SEQ ID NO: 535 - DNA, 352 bp, Homo sapiens
  SITE (343): n equals a,t,g, or c
  SITE (348): n equals a,t,g, or c
tcgacccacgcgtccgctccctctcgagtaatggctgctggctttcccggggaacctccgctgttgagctgtacctcattgctagaaaacgggaactggaaggtctcaaacacggtcccgctttcttagggcggtaacgtcgtgcgctggttgggaagggacggtgcgaggagcggaccgctgtgaaccatgctcgtgagctgtgggtccatctgtgaagaggcccatctctgcgggaccgcgactggaggctccgctggtkgtkgcctktgggggcagcggaaaactacacttyccagcatyctcgcatgccagaactaccttgcccgaaagcctgagctgnatctntaag

SEQ ID NO: 536 - DNA, 594 bp, Homo sapiens
  SITE (572): n equals a,t,g, or c
ggccgccctttttttttttttttttttttttttggaggttccttgagtttattctgtacccaacgttaggatgaaatggttcataaataaggggcataagcccttcctcacgagcatggtccatgatgggggtggggcagggcagaggggacctgggtgggcgtcctttggagagaccaggtgagggacttggatccgcaagcaccagagggtgctcaggaggctgcctgggctggcggccgaaraggcggggccaggcaggctggggaggggtcaagagctgccccggatcctctccatgtagctgcgcagctcctcggggtccttcagtcccatgtcctcacatacccagcggatgtcctcctcgcccgccaccaggatggactgcacggcaggggcccctacgggctcctcaracggctgggctgggggggctgtcgcaaacgtcacgaactctacgcgcttccgccgcccccccggcttccttccgggccaaggttgcttgaagaacttgtggttgcccccaaaaaaagggccttggggccatggttcaaaggttcccccctccctgnccccaattcttcgccaaaggga

SEQ ID NO: 537 - DNA, 516 bp, Homo sapiens
  SITE (360): n equals a,t,g, or c
  SITE (437): n equals a,t,g, or c
  SITE (483): n equals a,t,g, or c
  SITE (516): n equals a,t,g, or c
tcgacccacgcgtccggtcgccttttgcaggccatggcggcgctcggcggcaggtcttcgactggcaccgctggtccccctcacctgggcccatgttgctaggcagacccatcgaggagaacagaaaaggacgtgtccatgtttattgtataaactgaccacagcctccaatggaggggccttgagaagttatcccatgtggaaaccagaacgtacatgcaggaaccggcgtgcaggatgcgtttcactcggtactcccttgagaagcggaggactcccgtgcctccaggatttgtggagcgagagaaggtcatcagttccctcctggacatgggtttcagtgacgtccacattaacggnttgctccatctgtggccaagtacacacactcaacagttgctggacatcattcagaattaatactcttggggttgaanccagagcctgtgtacatggccttgaagcaaaatcctcagttgttgnaactggccaatactgcacatgaagaaggctccn

SEQ ID NO: 538 - DNA, 302 bp, Homo sapiens
cgaccacgcgtccggattctgctggcgctgcactacagaatggccggcggtggcgggaaaccaggcccggcgggaggggcagcagtgtgaaaaaacagttgatgtgaagaaaagtaaatcctgtgaactgatgtctccagtgatcttcggaaagaaatagaaaatcattataagcttctttgcctgaagacttctatcactctggaattctgtgaagamttggatcctgaaaacccactgattcacttccacaagcctggactcgattagtgggtcctatgrtatcctgccgaaaacataaa

SEQ ID NO: 539 - DNA, 518 bp, Homo sapiens
  SITE (364): n equals a,t,g, or c
  SITE (436): n equals a,t,g, or c
  SITE (463): n equals a,t,g, or c
  SITE (509): n equals a,t,g, or c
tcgacccacgcgtccgtccgagctcgtccaagccggtgcaccccactgctgtcgccatggccgcgctcacccagaatccgcagttccagaagctgcagaaatggtaccgcgagcacggctctgacctcaacttgcgccgccttttcgaagggacaaggaacgcttcagccacttcagcttgaacctgaacaccagccatgggcatattctggtggattactcaaaaaaccttgtgaccgacactgtgatgcagatgctggtggacctggccaagtccagggcgtggaggctgcccgggatcgcatgttcagtgggcgagaagattcaatttcacagaggaacggggcagtgctggcactgggcntgcgaaaccggttcaaacacacccattttggtkggatgggcaaggwgtgatggccagaagttcaacagggtncttggagaagttgaatcttttctgttnagcgggttccgcattgggcgaattggaaggggtactccagggaaanccatcaagg

SEQ ID NO: 540 - DNA, 342 bp, Homo sapiens
  SITE (148): n equals a,t,g, or c
  SITE (149): n equals a,t,g, or c
tcgacccacgcgtccgataaagaacaagactgttttattaaaagctttattcaacttgaaaaaaaaaaaaaaaaaaaaaaaaaaaaaaaaaaaaaagggcggccgctctagaggatccctcgaggggcccaagcttacgcgtgcatgnnacgtcatagctctctccctatagtgagtcgtattataagctaggcactggccgtccgttttacaacgtcgtgactggggagatctgctcagcttgggatctttgtggaagggaaccttacttctgtggtgtggacataattgggacaaactacctacagagatttaaagctctaaggtaaatataaatttttt

SEQ ID NO: 541 - DNA, 328 bp, Homo sapiens
  SITE (143): n equals a,t,g, or c
  SITE (145): n equals a,t,g, or c
  SITE (282): n equals a,t,g, or c
aaggcggcggtggcgaccgtggcggtggcggcggcggcggcgggggcggtggcggccgagagtgcagtagggttgttttccagacttcagacttcagctccgaaattaagarctttctccacatcacagtcctcgcttcaagngncaagtcctgtgtggaacctaggtcgactcaatcatgtagcaattgcagtgccagacttggaaaaaagccacagcattttataagaatgttctgggggcccgggtgaagtgaggcggtccctgttcctgagcatggantgtctgttgtttttgtcaacctggggaaacaccaagatggagctgc

SEQ ID NO: 542 - DNA, 374 bp, Homo sapiens
  SITE (343): n equals a,t,g, or c
  SITE (367): n equals a,t,g, or c
tcgacccacgcgtccgggtgctcggaggccatcaggaaggggcccccggcgggctgggggggaaggggccgcagtgtgtgagttgggttccatcgggctggagcaggtggccgccttccgtgcacttggggagccctcccctcgcccctcggtgacagcttgcccgcctgctcagcaccctgtcttgtccccaggaggcttararctctgcarggcttccgggggtycargcarggtgargtcgggraktcggggaagtcargagggtgcaggccccacagagcaggagagtgtgacgacactctgtgcactggggttgctcgggccccgagccacgggtttnggcggtaacgaaccagccaacatntcgaaaa

SEQ ID NO: 543 - DNA, 245 bp, Homo sapiens
  SITE (59): n equals a,t,g, or c
  SITE (238): n equals a,t,g, or c
tccgctggggaggccttaacgcacccttctcagctcccttctccccccaggtgctgggnctgcacacccaccacggagagggccctggccagaccacctggcgccttgtggccatgctgggtggcctctacaccttcttcctgtttgagaacctctttaatctcttgctgcccctggacccagakgactcaaaggatggggcctgcagccacagccatggtggccacagccagggagnttccctg

SEQ ID NO: 544 - DNA, 275 bp, Homo sapiens
  SITE (19): n equals a,t,g, or c
ccacgcgtccgcggctgtnagatkaccttttaatgtttcacattgttttttttccagaagatatgtaacaaaatacatagaatttaatatgaatcatgaatctcagtacagtgggcaattatagaatgtaaataagacaagccgataaagtataatccttcttgtgggggccaaacattccattccactaagagagaatcacaacatgattaggcacgaacatatcatactgcctattgttctaacttctggagactagcaggcttgggaggaaa

SEQ ID NO: 545 - DNA, 404 bp, Homo sapiens
  SITE (333): n equals a,t,g, or c
  SITE (336): n equals a,t,g, or c
  SITE (345): n equals a,t,g, or c
  SITE (368): n equals a,t,g, or c
tcgacccacgcgtccgaaagctgtgtttcaagactcagcgctcatggctgccacgctgcatcctgctaggtgcccagagccagccttgtctcccatctcacagcacagagcatgtcagactcctgtcactccacctcctacctcgtacacagcagacctgtccttctcaggtggacattgccttcaatatttgtccttctccctttcggcaggtcacgcaaaatgagttttgaaggaatgagtgtaagctgatcaaaggcaggaattaggtctttgtattcccagcttctagaaagccctccaagaatatttgcataaatgggatggaagganggntgcttattnaagcacagctgtttgccattcanggcatgagtaggaggagccagaactatgaaaagtac

SEQ ID NO: 546 - DNA, 375 bp, Homo sapiens
  SITE (359): n equals a,t,g, or c
  SITE (368): n equals a,t,g, or c
tcgacccacgcgtccggcatctgtagtatttgtgaaatgccatgacaagtctctgaataaaaagtctggctgaccctgggcaaatctccagaaggaagaacaccagaggaattccttgaagaacgaaataacttttacaaaagatgcttagtgctttggttatttcaaagagaatttttctgaatattaatccctaattaataattgactagttattttaggatacagtcttaaatacccaaaaaagtggctaattcaatgtgaggaatatactggccaaataacacatcttccaacattaaaagatcacagatttggaaaatcactgttttkgcccttagagaaagaagtaagaaacntttgggtcngggtaac

SEQ ID NO: 547 - DNA, 343 bp, Homo sapiens
  SITE (169): n equals a,t,g, or c
tcgacccacgcgtccgggttttgcaaaacgcccttgccagagcttgagctacttggacaatgtcggaaatgaacgagctgtcckagctgtatgaagagagcaacgacctgcagatggacgtgatgtcggcgagggtgaccttccgcagatggaggtaggcagcgggaanggtagccgtccccgaacccctcccgcatcggggccccgccacagctcgaggaggaaggccccatggaggaggaggctgcccagccaatggtggaacccaggggggacgaggcctggctcagcggcccagccctgggggagcagccaggccagctcgcgggccttgactttcgaa

SEQ ID NO: 548 - DNA, 356 bp, Homo sapiens
  SITE (270): n equals a,t,g, or c
  SITE (282): n equals a,t,g, or c
  SITE (350): n equals a,t,g, or c
gcggacgcgtgggctagatcggagcggccgccctttttttttttttttttaaagatttttatgtatttatttgacagagagaaatcacaagtagatggagaggcaggcagagagagagagagggaagcatggacactatcctgktttctctgacacaggaaaactcgaggatccttcttttggttcctataagactttatgtatcaatgcagaatgagatcagtggcaaagatgaggggcagttaactttctctccactgggggattccngaatcccttganggtgcaggatgttacagatgagtactgatctttacatgtcctccataccaagcaacacgcctggcccncagtca

SEQ ID NO: 549 - DNA, 368 bp, Homo sapiens
  SITE (353): n equals a,t,g, or c
  SITE (354): n equals a,t,g, or c
  SITE (367): n equals a,t,g, or c
ggtcgacccacgcgtccgctcattatttcaaaccaggattcagtgaaagtttacaaattgcatttggttctgtctccttagataggacattattatttcaatataatatggaacagattaattagtgcttctaaatggtcacatacgttttggattttagtcactttttaaaaagtagcattatgggractgcctaaagatggttaaataatcttkgtacgatctctatattttcttttcctkgcwctttcctttttcctagtagcattccgtaatagttgtaaatgaaaatttaaagtcatatcagttaaaattggtgtcctgtgtatgcgaataatgaaaaaatactgtanncacccataattgnc

SEQ ID NO: 550 - DNA, 343 bp, Homo sapiens
  SITE (25): n equals a,t,g, or c
  SITE (30): n equals a,t,g, or c
  SITE (343): n equals a,t,g, or c
gggtcgacccacgcgtccgtgaagncagtnacccagggtcattttgggggtgaatggacagcactgaagtggagtccatggactgtcccaacaccgcccctgccaccgccatgacgttccaccccctgcagtggctggtgatccacttaggcccctctcargttgggcagtgggtggcggggatgcttccagaaagcctgacgggggaagagtcctggggacagctgttgcatgcagccgagggcgcttctaggctcttccctgcacggctgaaggccacactggggagccctcgagcaacccagaagcacaaatggtggtttkgggccatgctgggccgggn

SEQ ID NO: 551 - DNA, 447 bp, Homo sapiens
  SITE (314): n equals a,t,g, or c
  SITE (374): n equals a,t,g, or c
  SITE (392): n equals a,t,g, or c
  SITE (419): n equals a,t,g, or c
ggtcgacccacgcgtccgtttttttttttttttttttttttttttttttttttttttccattccacaaacgtttattgagcgcctgtcacgtggcatgagcggttctaggcatttgtgatacagcagtgaataaaacccacaaagcccctgcttctgggaagggggcagggcagtgcacagtgaacaggtgtgggcctttgagtgaggagagtggtggggaagtcccagcagggcttgggggcagcagaagccaggctggggagggcagaggcacaggacccacaggacggactgggctgagctttccctggantgggcaagggtctgtggtccatggtgggcatggggcacactgccttaccgggaactgtcntgtgttccctggtgacgnccccaaccagcatggccccccctcggnaatttgcccccacaacgcaaaaaggttt

SEQ ID NO: 552 - DNA, 409 bp, Homo sapiens
  SITE (334): n equals a,t,g, or c
  SITE (352): n equals a,t,g, or c
  SITE (373): n equals a,t,g, or c
ggcccctcgagggatcctctagagcggccgccctttttttttttttttaaaatttggcacagagattctatccctctctctcatgcaaacgtttcctattagtcacctgcctgacgctgaagttatttatgcatgagtttgtcttcctcaatcaaactgaggagggctggtcaagcgtaagtgacagaacgtgatatgtggcaggaacccaagactgggctggatcttccctccttccaacatgggcttgtttctttttgggtccctgccttcccttccttctcttttcctgtctgctttctggactccttccttggagcctgctgggactcantcctgctgagtgtctttncttgtctctccccattcccancctgggctaatttcattaacttcttcagaaatctcg

SEQ ID NO: 553 - DNA, 444 bp, Homo sapiens
  SITE (414): n equals a,t,g, or c
gggtcgacccacgcgtccgccagaaccgaattggcttagcttagaaacaatcgtgaaagaattagccccctccccttccttctcttcccaggacctcgagtcagattggccgtggctcaggcatcccctccaggagaaaggaagggaccccagatctgcaggtgggcacgtccgggtccgcagccggctcccgcctcctcaggccgatctccggtcgcgccatggggagaattgggcgtcctcaaaccagcaaagccccagactcgttcctcgctctgcttcccatccccaaagtcamcgcggagytagarggggcytcccargggagaccgaaagarggggagaacagaacatgaacgccaaaatttgtgggaatcgactttatcggtaacagattcccccagacaccctaanggcatccttccaaaattccacaagggcttc

SEQ ID NO: 554 - DNA, 226 bp, Homo sapiens
  SITE (21): n equals a,t,g, or c
  SITE (225): n equals a,t,g, or c
ggtcgacccacgcgtccgagnggtgtagcataaagttttatctactacagtggtttatgtgaataacaatttacaagtgaaccagtattaatgtgtccctttatgtatatggacatcactaaactacaaaacatgttcattttaagtttttatacatctccgtatagtagaagcaaacaatacacagcatcagtcctcagttctctgtgtgactggattattaanc

SEQ ID NO: 555 - DNA, 282 bp, Homo sapiens
  SITE (225): n equals a,t,g, or c
  SITE (233): n equals a,t,g, or c
tcgaccacgcgtccgctaaaggccgctccctgcgggcgggtgaccaggtgaccttttctgtgcattcgaaccccgggcccgtcagagaggccgcttctgtgtccacctttccctctgtttgacaaatgactgcgcttgattctataccttagcaataaaaagcataacttatttaatttcttgcacttcattgggggaaaaaatgccaaatagctctgctctgtnggctttantgctgaatggtttattgtcaagagagtctgatgctaagaacatcttggg

SEQ ID NO: 556 - DNA, 275 bp, Homo sapiens
  SITE (246): n equals a,t,g, or c
tcgacccacgcgtccggcgccgtgcagccgagcacttggcctggagtcagaactgaagctacaagatggctgaccaggaccctgggggcattagccytcscagcaaatggtggcctcgggcactggggctgtggtcacctcccttttcatgacgcccctggacgtggtgaaagttcgcctgcagtctcagcgcccctcgatggccagtgagctgatgcctccctccagactctggagcctcccctnacgtggaaatggaagtgcctcctgttaat

SEQ ID NO: 557 - DNA, 166 bp, Homo sapiens
tcgacccacgcgtccggttcctcaccaagcggttcattggtgactatgaaagaaatgcaggtaatctctataccagacaagtgcaaatagaaggtgaaacctggctattcaagttcaagacactccaggtgttcaggtccacgagaacggcctgagctgcggcgaa

SEQ ID NO: 558 - DNA, 426 bp, Homo sapiens
  SITE (393): n equals a,t,g, or c
gggtcgacccacgcgtccgagakggcgtttcgcagcaagaggccggagcacggcgggcccccggagctgttttatgacaagaatgaagcccggaaatacgtgcgcaactcacggatgattgatgtccagaccaaaatggctgggcgagctttggagctcctttgtctgccggagggtcagccctgttacctcttggatattggctgtggttctgggctgagtggagattatctctcggatgaagggcactactgggtaggcatcgacatcagccctgccatgctggatgcggccttggaccgagacactgagggagacctgcttctgggggacatgggccagggcatccccttcaaaccagkttcatttgatggatgtatcarcatttctgcnawtyagyggctctgtaatgcaaaccaagaagtc

SEQ ID NO: 559 - DNA, 378 bp, Homo sapiens
  SITE (332): n equals a,t,g, or c
  SITE (346): n equals a,t,g, or c
  SITE (361): n equals a,t,g, or c
gggtcgacccacgcgtccgctgaaactcagctgccaggagtccaggagagcccacgtcaccctgcgaagtgtcagatccatactggacccctacaggtcgccacatgtgccccagctgatggggcactgtcccagctgatgccccagaggggacacccatttcaggagaggctctgggccctgcccagccgcctcatggcgcacgggccacagcctggaggctgatgcactcttggacctcagcttcctgacggaggaggagcaggaggccattgctgatgtcctgaagcgagatgcccgccttcgccagttgggaggagggccgcgttcanaaagctccggggcntcgctgggcagaccntggggcagctggaagat

SEQ ID NO: 560 - DNA, 363 bp, Homo sapiens
  SITE (326): n equals a,t,g, or c
gggtcgacccacgcgtccggctgagtttcgtcaggaacccaaacctggagacctgattgagattttccgctttggctacaagcactgggctgtctatgtgggacatggttatgtgatccacctggctcctccaagcgaattgcgggactggtgcggctagcatcatgtccaccctgaccgagaaggccgtagtgaagaaggaactactgtgtgatgtggttggcagagacaagtaccaggtcaataacaaacacgacgacaagtacttgccgctgcctcccagcaaaatcgtgcagcgggcggargagctggtggggcaggagtgncctaatcgctgcgctgtgagaaatgcgagcatttctg

SEQ ID NO: 561 - DNA, 407 bp, Homo sapiens
  SITE (359): n equals a,t,g, or c
  SITE (375): n equals a,t,g, or c
  SITE (391): n equals a,t,g, or c
  SITE (396): n equals a,t,g, or c
gggtcgacccacgcgtccggcgagagagagattgtgatggcggctgcgattttagctgagaaggtgccggtggacagcgcagaagagagggagcagcccctggcgtctgcgcggraactggctgcccagaagcgcgaacagaggctgcgcaaattccgggagttgcacctgaagcggaatgaagctcgtaaattaaatcaccaggaagttgttgaagaagataaaagacttaagttacctgctaactgggaagccagaaaagctcgtctagaatgggagctacaggaagaagaaaagaagaaggaatgtgcggctagaagggaggactatgagaaagtgaactgctggagttcatggcngaagatgcagaaagtngggagaggaagaagangaggnaaaaccccgac

SEQ ID NO: 562 - DNA, 516 bp, Homo sapiens
  SITE (429): n equals a,t,g, or c
  SITE (440): n equals a,t,g, or c
  SITE (450): n equals a,t,g, or c
  SITE (457): n equals a,t,g, or c
  SITE (475): n equals a,t,g, or c
gggtcgacccacgcgtccgcccacgcgtccgarcrgatagagcgccatgaaggcctcgggcacactgcgagaatacaaggtggtggggcgctgcctgcccacccccaaatgtcgcactccgccgctgtatcgcatgcgaatctttgcacctaatcacgtggtcgccaagtcccgcttttggtactttgtgtctcagctgaaaaagatgaagaagtcctcaggggaaatcgtctactgtggacaggtgtttgagaaatcccccttgcgagtgaagaacttcggcatctggctgcgctatgactcgagaagcggtacccacaacatgtaccggggagtaccggggacctgaccamcgcgggcgccgtcacccagtggttaccgagacatgggcgcccgacaccgttgcccgagcgcattcgattccagatncttgaagtggnaggagattgncagccancaattgccgccgggccancattcaagcatttccaaggattccaagatcaattcccattg

SEQ ID NO: 563 - DNA, 396 bp, Homo sapiens
  SITE (201): n equals a,t,g, or c
  SITE (351): n equals a,t,g, or c
gggtcgacccacgcgtccgctcgctccgggatcgcccgcgctagagacgcatagcgctctaatcgctcgcacgcaccggccctcgctcgctcgcccgtccgtgccgccgccgcccagcccaccgccaccctttgcagccatgtccaccaggtctgtgtcctcgtcttcctaccgcagatgttcggcggccccggcaccggnagcggccgagctccacgcgcataacgtgaccagtccacccgcacctacagcctgggcagcgcctgcgccccagcaccagccgcagcctctamamctcgtccccgggcggcgcgtatgttcacggctccttccgcggtgcgcctgcggaanatgttgccccggcgttgcgcttgctggcaggattccgtggaattt

SEQ ID NO: 564 - DNA, 226 bp, Homo sapiens
  SITE (42): n equals a,t,g, or c
  SITE (121): n equals a,t,g, or c
  SITE (223): n equals a,t,g, or c
ggggtcgacccacgcgtccgggcggcggtggtacggcgaganagagaaggggaagccggaaggggcgcgagtgaaactgggggagacgatagctcccgagaaggagaggggtgcgcgtgcnccgcctctccccctaactctcgcctggtccctgctgtcctctcttgcggccaggtgacacctaggcccggtccgccacccactgcctgggtgagggcagcgncgc

SEQ ID NO: 565 - DNA, 416 bp, Homo sapiens
  SITE (391): n equals a,t,g, or c
  SITE (395): n equals a,t,g, or c
  SITE (400): n equals a,t,g, or c
  SITE (409): n equals a,t,g, or c
gggtcgacccacgcgtccgataaaagcccaatgtacactgccagattgatcaaaacaccctgcattagtccagattgactttgctcttgttactgccagagttaaaggaggtatcctaggataagatcttcatatgacctgcaaactcctatttgccttctgaaacctactacctgggaagaatcttagctatggcagggtcaatttgtggcagctttgattagtttctaccaactttgttaacaatatagttcctcccagccacctgccagctttttttttcaggagggccgtattgcagccccagtttcaactcccacaatcaacatgggttggctcaagagcagggstcatccctcaccggctaagaaaaccatcataaaccaacatngggntcttnccgggaaanccttaaa

SEQ ID NO: 566 - DNA, 342 bp, Homo sapiens
  SITE (27): n equals a,t,g, or c
  SITE (342): n equals a,t,g, or c
ggggtcgacccacgcgtccgaagaggnaataaaaataaccgtccgcgagccgagccgaaccggacgagcagccaccatgaacagcaaaggtcaatatccaacgcagccaacctaccctgtgcagcctcctgggaatcctgtgtaccctcagaccttgcatcttcctcaggctccaccctatactgatgctccacctgcctactccgagctctatcgtccaagcttcgtgcaccccggggccgccacagtccccaccatgtctgctggcatttcctggcgcctcactgtatcttcccatggcccagtctgtgggctgttgggacctttagtttccacaatccn

SEQ ID NO: 567 - DNA, 481 bp, Homo sapiens
  SITE (432): n equals a,t,g, or c
  SITE (474): n equals a,t,g, or c
tcgacccacgcgtccgggagcacgttgtggcggatgccggggctttcctgcgagacgcggctctgcaggacatcgggaagaacatctatacaatccgggatgtggtgaacgagattcgggataaagccacgcgcaggcggctcgcgtcctgccctacgagctgcgtttcaaggagcccttcccggagtacgtgcggctggtgaccgaattttcaaagaaaactggcgactatcccagcctctctgccacagatattcaagtgctggcactcacctatcagttagaagcagaattgttggggtgtctcacctaaaacaagaaccagaaaargttaaagtgagcttatcaagtcagcacccagaaactcctctccacatttctggtttcccatctcccctcaaagtctaaaaccccacgagaaaccagtacacntggacagccagctggtgaagcctgagaacctagaattcactnccttcat

SEQ ID NO: 568 - DNA, 338 bp, Homo sapiens
  SITE (138): n equals a,t,g, or c
  SITE (296): n equals a,t,g, or c
  SITE (305): n equals a,t,g, or c
tcgacccacgcgtccggtgcgagcggccccggccttcttgccgtcatgaaggacgttcctggtttcttacagcagakccagagctccggccccggccaggctgccgtgtggcaccgtctggaggagctctacacgaanaagttgtggcatcagctgacgctccaggtgcttgactttgtgcaggacccgtgctttgcccaagggagatggcctcattaagctctatgaaaacttcatcagtgagtttgaacacagggtggaatcctttgtccctggtagaaatcattcttcacgtncgtcacagnatggactgatcccaatgtgggctcttacttttc

SEQ ID NO: 569 - DNA, 480 bp, Homo sapiens
  SITE (429): n equals a,t,g, or c
  SITE (432): n equals a,t,g, or c
  SITE (445): n equals a,t,g, or c
  SITE (476): n equals a,t,g, or c
aaagtgggataatcccttattttttaaaaaaaaaaaagagagagagagagaagccctctgaaacattccrcaatccatgttttaagcttatccaaaggtccctgtgtggagttctgtgtgtttgtgttgatcatttataaacaagaaagcaggtttctagatgccacccagaatgttaattgcctctcgactttggctttaattacattttcatggaatgaaattctgtttctcaactaggattgtagtttccatcatttctcatatttcacatgattcctaaagcagttctcacttttctccatttattttcagtggatagaaatcctctctctcttcatgactccatcccaaaataaaccaaagatggtcacaggctagacataaataaaaaatttgttgggtaatgggagactcagaagtcccttnctnaaaaggatgaacntataccaggttcccaggttaacgggggtttnacca

SEQ ID NO: 570 - DNA, 556 bp, Homo sapiens
  SITE (460): n equals a,t,g, or c
  SITE (463): n equals a,t,g, or c
  SITE (487): n equals a,t,g, or c
  SITE (491): n equals a,t,g, or c
  SITE (494): n equals a,t,g, or c
tttaggtgacacgtatagaaggtcgcctgcaggtaccggtccggaattccgsgtcgacccacgcgtccgggaacacaagatgccgaagggaagaaggcgaaggggaagaaggtggccccggcccccgccgtcgtgaagaagcaggaggccaagaaggtggtcaacccgctgttcgagaagcggcccaagaacttcggcatcggtcaggacatccagcccaagcgggacctgacgcgcttcgtcaagtggccgcgctacatccggctgcagcggcacgcgcgatcctctacaagcggctgaaggtgccgcccgccatcaaccagttcacgcaggcgctggaccgccagacggccacgcagcttgcttgaagctggcgcacaattaccggcccgagacgaagcaggagaagaagcagcggttgttggcccgggcggagaagaaarcggccggcaaggggganttnccgaacaagcggsccccgttgttntcgnaancggggttgaaaacggttcaacaagttggttggagaacaagaaggcgccattggttcgttatt

SEQ ID NO: 571 - DNA, 583 bp, Homo sapiens
  SITE (86): n equals a,t,g, or c
  SITE (495): n equals a,t,g, or c
  SITE (508): n equals a,t,g, or c
  SITE (514): n equals a,t,g, or c
  SITE (559): n equals a,t,g, or c
gggtcgacccacgcgtccgctcattttacaagagaattaaaacaattacaaatgagttttatcttaaaggagattcatataaaggnctttcaggacaagtatatcaaatatctatttgtcctgaaagtcctttatatgaatctcctttaagataaaggactttcaggacaaatagatatttgatatacttgaaaatcctaaaactgaaatgggtaagaatttccagaactaactaaaggtgcattcaccagaattagtaacatggaactaaatgaactaamagattataatgttgtgtctcttattttagacatgctggttctctctaatgtttgctcttccagactagggatacyttttcytaagttatctgtaactcacagagatgtaaaagtgcycaaggcattcaacttttctctctatctaaaccctctggaaaccaaaaggtctcaattaagtattctttcttccatgggcaatccagtccatttggcntaaagttccaatnaagaancctgttcctctttgtgaacaggacagcatgggaaactgggttatnttaccaaggctttggaccgggatg

SEQ ID NO: 572 - DNA, 495 bp, Homo sapiens
  SITE (392): n equals a,t,g, or c
  SITE (407): n equals a,t,g, or c
  SITE (438): n equals a,t,g, or c
  SITE (478): n equals a,t,g, or c
gggtcgacccacgcgtcaggccggcaggcggaggttagtcctcgcctgcgaccccccgcggaaataagatgaacgggacacagaactggtgtaccttggtggacgtgcacccggaggcaggccgcggcgggcaggaagacctatgccatggtgtctggccgctcgatcagtcattccttggcctcagaactggtggagtccaatgatggacatgaggagatataaggtgtacctgaaggggcggtctggggataagatgatccatgagaagaatatcaaacagctgaagagtgaggtgcaatacatccaggargcccggaactgcctgcaraagctccgggaggacataagtagcaagcttgacagagatccgggagattctctccgtgganaaggagatacaggtngtgttagaaaagccaaattggattaaatccnagctccacaacccagtatagccatccacctgaggtagatnccttccataagcgaaga

SEQ ID NO: 573 - DNA, 408 bp, Homo sapiens
  SITE (348): n equals a,t,g, or c
  SITE (366): n equals a,t,g, or c
  SITE (383): n equals a,t,g, or c
  SITE (392): n equals a,t,g, or c
gggtcgacccacgcgtccgattacatggagcttctatatttcaaactggaaactgtcttctctgaaggtggtgtatgatgttactttgagctactagagcttgggtcaatatttccttccttatgtgtcacagaggacatcactgagaagtatgtacagaggacctcaaaatagaaaatttggcaggaccccccggtctctttctgctggctacctttgcccccctctaccattagtgtttttgttttgtaaatcctgttttcttccaactgtcccaccccttttcagtgratctgcaaaattgtcctttcttcaagaaaagagtttcttttggcctcgttccttgangccttccccactggtaanggatgggtttggataanaaactgttngaaaaaaaaaaaatgt

SEQ ID NO: 574 - DNA, 381 bp, Homo sapiens
  SITE (61): n equals a,t,g, or c
  SITE (351): n equals a,t,g, or c
gggtcgacccacgcgtccgcttttgaatggaatcgggctgattcatcgccggttcgcggancagagccccgtggagtgtgagccgccgctgccgcctccgctgccttcgcgtcaccgcagkaaggacgatagcccagaccgcggctggccgaccccsccggccttcaggagtgagagaaaaaaaatacttgggaaaagttatacctgccagtataagcaagagcttgaattaagaagaaatttgtcaaactcaacgaattggaagctttaacacctccaagagttgttagttcactggaccagtaaatatggacagacttcttwagacttgggaggaggtatgcctgggantggggccaggggccaccttacagatgcttc

SEQ ID NO: 575 - DNA, 458 bp, Homo sapiens
  SITE (371): n equals a,t,g, or c
  SITE (402): n equals a,t,g, or c
  SITE (442): n equals a,t,g, or c
  SITE (456): n equals a,t,g, or c
gggtcgacccacgcgtccggcagccgtcgtttgagtcgttgctgccgctgccccctcccggatcaggagccagtgtataccgcccgcccaccgccttggtgccgctagaggaaacgagaaggaggccgcctgcggtttgtcgccgcagctcgccccctgyccgggagagccgagccccggcccagtcggtcgcctgccacccctcgtagccgttacccgcgggccgccacagccgccggccgggragaggcgcgcgccatggcctctggagctgattcgaaaggtgatgacttatcaacagccattcttaaacagaagaaccgtcccaatcggttattgttgatgaagccatcaatgaggacaacagtgtngtgtctttgttcccagcccaagatggatganctgcaatgtttccgaagtgaacaaggtggtgctgaaaagnaagaagaggagggnaa

SEQ ID NO: 576 - DNA, 377 bp, Homo sapiens
  SITE (253): n equals a,t,g, or c
  SITE (300): n equals a,t,g, or c
  SITE (377): n equals a,t,g, or c
gggtcgacccacgcgtccgagtttctaggcccgagtccstgggtttattaagctcctgacgctcctccagacgtctcagcggctctggctgagagcctggacagcctgggtggacarggactggctgatctctggtgaggcagtgcggagagcgcggccctctggaattctgctgggccggctggtggtcgcctctgaagtgcctttgggggctgggaccccagcggggtaaacccccctctgtcctgggcantggatggttcagcattttctgaagctgaagaataagtcgcaggccanccgtcccccacatcaacttgctgtgtgaacttgggcaagtggctccctctctctgagcctctgtttttcccctccan

SEQ ID NO: 577 - DNA, 348 bp, Homo sapiens
  SITE (345): n equals a,t,g, or c
  SITE (347): n equals a,t,g, or c
ggggtcgacccacgcgtccggagaaaaagaagaatcctgctgctttcagtatttcctgatttcatatttgtaaatataaagaggaacttcaattatgaaaaatarwasatatatatatatatgtactattttgtttttttgtcttgaagattttgagttatggtattgttttcggattgattaattcgagtatgctgtgttttaaaatgagattccattagctttttttttcttccctcaatataaatggtttttcttagaagtctgatattggttcakggcttagtgcctgggtttacagacttttccttttaaaatgcaagacctttttccaacaaaaaaaanang

SEQ ID NO: 578 - DNA, 371 bp, Homo sapiens
tcgacccacgcgtccgttttttggattccaaaagacttcccaatgccagctggggccccaagtgaagggatggaagctacatggaaggagggacttccagccagcaaatggatgaaggggaatgccaccgagcacacttagggagaactgggtctggggagcagagcaaatgcacagatttccccagtccatggcatctgggccagggcagagatagggatggggctgcagaagattgggggtaggggtcacagggaggcttcgcttggaagggagggggaggtcctgcattccttggggtcatccagagttagcttctggcttctcggagccttcagttttcttcctgtgcgagctctgggctgggttgg

SEQ ID NO: 579 - DNA, 503 bp, Homo sapiens
  SITE (441): n equals a,t,g, or c
  SITE (487): n equals a,t,g, or c
  SITE (492): n equals a,t,g, or c
tcgacccacgcgtccgaccaacccaccgaagttacctccagcctcccccatcttggagaacagactgatcaaggttcagtgcatataccctccaaagatgatagcatttcattgactgccaaaggggataccagtatacccaggtcctcattaggagacttggacacagttgccgggctggaaaaagaattgaataatgccaaagaggaacttgaactcatggctaaaaaagaaagagaaagtcggatggaactttctgcactacagtccatggtggccgtgcaagaggaagagctacaggttcaggctgccgacatggagtccctgaccaggaacatacagattaaagaagacctcataaaggatctgscagatggcaactggttggattcctggaagacwtaccagctgtgggaacgcctggacccaagaagtctttantcttcggggaaaaattcgsttycagtagatycacaggtcaagagantttanggaatccgagg

SEQ ID NO: 580 - DNA, 234 bp, Homo sapiens
  SITE (47): n equals a,t,g, or c
tcgacccacgcgtccggccgccatgccttcctctgggccccgcgcancctccttctcctgttgccaccgctgctgctgctggcactgtcctggccttgcccctggagcgggggacgcccaagcaggagagccctgcrwccgagagcccagacactggcctatactaccaccggtacctccaggaagtcatcaacgtgctggagacggacgggcatttccgtgagaagctgcagg

SEQ ID NO: 581 - DNA, 546 bp, Homo sapiens
  SITE (491): n equals a,t,g, or c
  SITE (493): n equals a,t,g, or c
  SITE (494): n equals a,t,g, or c
  SITE (532): n equals a,t,g, or c
tcgacccacgcgtccgtgacatgttattgaacctgactttttattttctgtctttgctgcttaattctctatagatagttatttcagttcttaatatccttaacccwgccrtccctgaactcttactagcccttttaatttttggcactatgaaccctacgtaagcccctaaacccccaccccaggagaccagagaccttcatctttaatgaattttattcttgggatgtggtggtacagtgggtgccatgaccatcacgtggtaggaggagtcccttttccttggattggtaccttttcagttgcttcatcctgtcttggggggggggggagttttaaaagaccctttaggaattttcaaaggaagggacagcaaattatgtgactttccgtagtttcctttgcgttcaaaaatgctcatttaaaatcatagagacgggctctgttaaacttcaaagagttactaaaagtcatggtaaatggaagaaagntnnatagtagactaaggtcattgaaaaggttcatccatagnacatgaactttagt

SEQ ID NO: 582 - DNA, 420 bp, Homo sapiens
  SITE (379): n equals a,t,g, or c
  SITE (400): n equals a,t,g, or c
  SITE (417): n equals a,t,g, or c
tcgacccacgcgtcgagcttccamgcgwsgaaatagactgcactggggcgtggttgttcgcgatccctgcatctgtcacttggggtcaaggcttggctctgctctacagacccgcggaaagactcggcctcagcgccactatgaacttggagcgggtgtctaacgaggaaaaattgaatctgtgccggaagtactacctgggtgggtttgctttcctgccttttctctggttggtcaacatcttctggttcttccgagaggccttccttgttccagcatacacggrgcagagccaaatcaaaggctatgtctggcgctcagctgtgggcttcctcttctgggtgatgtgctcaccacctggatcaccatcttccagatntaccgggccccgttggggggncccttgggtggactacntct

SEQ ID NO: 583 - DNA, 641 bp, Homo sapiens
  SITE (192): n equals a,t,g, or c
  SITE (194): n equals a,t,g, or c
  SITE (500): n equals a,t,g, or c
  SITE (562): n equals a,t,g, or c
  SITE (604): n equals a,t,g, or c
  SITE (613): n equals a,t,g, or c
tcgacccacgcgtccgaaaagttataatgttgcaattcctttcagacatttgtaaaaaaaaaaaaaaaataccataaaataaaataagggataatttgcctcagatgaggacgttgttgagaaagccgttcagcccctctgaccgggccccgcggggctgtaaggctggctggggaggagtctccgactcgntntcgtttcgtaatcggcctccgggggccaagctccggggaggccgccgaagcgggcttctctgtgacgctccccacggccattttctcatctcagaaattattttcaggagtttgcagcaccctcaagttcagattctgagagcttggctgatttatcttcttcctcaagctgaacaaataccgactgctacatttctgaggaagatctcgggatctggaatacacgagaatcctcagtgaggctcagccacacccgggggagatggggagtgactacaagagaattattctgctgaagggactggnaggtcatcagcgagtaccagttcagcatagtcaagtccctgctgggcccgcgatctggggantcaccgccaacatgccaagaagagtataataaggttcaagantggcggacntgatggaaaagaatttccctgggactgc

SEQ ID NO: 584 - DNA, 360 bp, Homo sapiens
  SITE (344): n equals a,t,g, or c
  SITE (350): n equals a,t,g, or c
tcgacccacgcgtccgatggcgactttggtcgaactgccggactcggtcctgctcgagatcttctcttacctcccgggtctgtcaccgctggaagaggctggtggacgaccggtggctgtggcgacatgtcgacctgacgctctacacgatgcgacctaaagtcatgtggcacctccttcgaagtacatggcatcccggctccattccctgcggatgggtggctractgttctctggctcccaggccccccagttgtcccctgctctgttgagagccctgggccaraatgccccaactgaagcgctctgctgcastgggcgaactgagcatggtggcccatcancaagcnggcccagcaa

SEQ ID NO: 585 - DNA, 402 bp, Homo sapiens
  SITE (315): n equals a,t,g, or c
  SITE (354): n equals a,t,g, or c
  SITE (391): n equals a,t,g, or c
  SITE (398): n equals a,t,g, or c
tcgacccacgcgtccggagctactaaccatcagctcttcttaatcaaagattgccatcagtgtagagtgtatctattggcacaacattctggtgttttgataacagtagaactcaatttcagtaactattaggagcatggtctgtgccctagcattaaaaatgttacttattattatgtgaatatcttgtattattatacaatgcagtattcaaatttgtccttgtagtgcagagatgactgataatttctaaaagattcgatccttaaaacttgttccaagcagacttataaggaagctgattttgagtcagangccttaaacgtggtccatataccaagtgggcaccatttnaagtcccaagtggaaccacctggatttggaataagcnagttatnaacc

SEQ ID NO: 586 - DNA, 839 bp, Homo sapiens
tcgacccacgcgtccgcacagttcttgaaggtgggaacagaagagaaggcccgggggggccggggagggggtacccaggctctgcacagtacccaaggggcttctggcagcaggaaggaagctacacatcagagttggggacttgtgccctggggctgcctggcatctgggggcctcctcagagccagggctctttctggttgaggctgagactcactggtgtcatcaggcccctccatgaatgagacaaacaaaacacttgttgggccttcggagctccccacagcgtctgctgtggcccctggcccaggcactggggctcgggcatggcctgtgctggtaggatttgtgctgggggctgtggtcctctcgctcctcattgcacttgctgccaaatgccacctctgccgccgataccatgccagctaccggcaccgcccactgcctgagacaggaaggggaggccgcccacaggtggctgaagatgaggatgatgatggcttcatcgaggacaattacattcagcctgggactggcgagctggggacagagggtagcagggaccacttctccctctgagctcccatctttagaccctccccactccctccatgcctgacagcttaaggacagtggttatgacatgggggccttgaacctcagggacagaggtggctggggcttaaaggttggccagggatggagtaaaccccacttccctgacactagccagcaaagtgacaatgaccctctcttgctcaataactctcaactgttccctgctgttctcaggataaagccaaacaaaggcttgagtgtggacataaaaaaaaaaaaaa

SEQ ID NO: 587 - DNA, 443 bp, Homo sapiens
tcgacccacgcgtccgaactgcatggtcttagttgttccacaagccattgtcatccaaattcaactcagctccaactcttacaatgtggtttctttggggagtcttggctggacttcacatagctcatgaatacttaaatattccatctggtctgcaaacgtgtcatgggaagattgggtgttcttagtgtgtgaagtaattgtactggttcatctctcctcagggtgaataagtggactttctgtctgccttgtacttctagaaagagacacaaagaaatgtcagctgtgcttgttctctgttttcccaggctgttgcttctgagtctcaaggtcattacttaggagccagggcttttcagatawtgtcagcyttgawtttagctcctcctccaaccttcccaatttgtgtgtcaagaaaatgtaacataagtctacccccc

SEQ ID NO: 588 - DNA, 492 bp, Homo sapiens
  SITE (3): n equals a,t,g, or c
  SITE (24): n equals a,t,g, or c
  SITE (26): n equals a,t,g, or c
  SITE (434): n equals a,t,g, or c
  SITE (485): n equals a,t,g, or c
tanagcgggccgcccttttttatntntattttttttttttttttacttgcatttcctctacatttattgcaacggctaaatgattaacaacattcacaacttcttagatcttaaaaaacagaaacaaaagaaaacttccattttgtaacatcacaaatgtcttctaggctttatcaaggaccaaaaacactacaattctctaagtgatttccagtgatggaaacaagccagagacagtaaagcacccagagtggcgagagagcacttccagatgcctgttgtcctctcgggggtgaccctggaacaaaccgtacttgggcactggctccaggccgatccagggcagggatgatgttttaagggcaattgctgcttcaaggcttatctttcacatcagtggttttgatctaattggttggccccgcttgtgtctngtacatctggcatcatcccctggtcgggaacacatccgaatgtggtcttcnttggggc

SEQ ID NO: 589 - DNA, 209 bp, Homo sapiens
  SITE (209): n equals a,t,g, or c
gggtcgacccacgcgtccgtgctgatcaagatggagagaagttacaagctttgctccgcctcgtaatagagctgttagaaagagtcaaaattgttgaagcgcttcttacaacctcaacaacagctaagcagtacatctgaggaactgtactaagagcttcagatgtactgcttagcgttgttgagtttaagagtaaaaatgttccatan

SEQ ID NO: 590 - DNA, 563 bp, Homo sapiens
tcgacccacgcgtccgcccacgcgtccgcccacgcgtccggaagaattaggagtccaggttcatgtgaataagctagacatgtttaggaacatgcctgagatccttcatcatctcacaacagaccgcaacactcagatccatgcatgccggcatcccaaggcagaggaatattttcagtggagcaaattaccctgtggaattacttccagaaatagaattccactccacataatcagcattaagccatccaccatgtggtttggagaaaggagcagaaaaacaaatgtaattgtgargactggagagagttcatacagagcttgtttttcttttcactcctcctacagtgagataaagatttcttgagctacctctgtcctgtgaaacgcatatccaaatgtcattccagttgggcacactgatggataaagttgtcgaaatatcatcctaaagscttsccggtaatctgccaggagggaggcagttggcagtgaggccttcgaaagggcttaaagcctttatgccggtcttcccaaagttacgggggccaaagtataaacca

SEQ ID NO: 591 - DNA, 781 bp, Homo sapiens
  SITE (24): n equals a,t,g, or c
  SITE (39): n equals a,t,g, or c
  SITE (45): n equals a,t,g, or c
  SITE (52): n equals a,t,g, or c
ccttaaaccttttatcaggttctnatgaccacccaaagnaaaagnctttaanagagcaaagaggttgtctctacacagccggacccattggatcgggaagctcaggccaaaatagaagaggaaatccggcagcaaaacattgaagaaaacatgaatatagcgatagaagaggcccccgagagttttggacaagtgacgatgctctacattaactgcaaagtgaatgggcatcctttgaaggcttttgttgactcgggcgcccagatgaccattatgagccaggcttgtgccgagcgatgtaacatcatgaggctggtggaccgacggtgggctggggttgctaaaggagtgggcacacagagaattattggccgtgttcatctagctcagattcaaattgaaggtgatttcttacagtgctctttctccatacttgaggatcaacccatggatatgcttctaggcctagatatgctccggagacatcaatgttccatcgatttgaagaaaaatgtgctggtcatcggcaccactggcacgcagacttattttcttcctgagggagagttgcccttatgctctaggatggtaagtgggcaagatgagtcttcggacaaggaaattacacattcagtcatggattcaggacgaaaagagcattaaagcacgttataaatatgttaccaccttgagggagcctcaggtccccggcaattataagttaagagcttactggcaatgtaatcattaaaaaacatcagtaacaactaaaaaaaaaaaa

SEQ ID NO: 592 - DNA, 885 bp, Homo sapiens
  SITE (278): n equals a,t,g, or c
  SITE (794): n equals a,t,g, or c
  SITE (881): n equals a,t,g, or c
gtgggacgctgggtgtgcggtgttctgtctccgctcccgtttcgctgtcacagcccgttccttcccggagcccgggacaggctgggcgcgcgcccgtgtgagtgagcgggactcagggcagaagtgtcccctcactgcgtttttttttccttttatccaaagaacggggcagttagtacgcttgccttcctgtcgcccggttgggagcggggttggtgtgcggagtggttcgcctttttttctttagaacttgtgagccttttttttttttttttttnttttctttttttaggctcagtgctgtccgggctggtttgcccggtccctgactaacggctttctgccccttctctcgccacccctgcccaaggtcgcccctctgccttcgcccctgtcccgggagggtgggaagctttgaccccgccctgcccwctskcgtctccgcagccgtagccgcgcctgtcccaatatgaatagggtcaacgacccacttatttttataagagatattaagcccggactgaaaaacttaaatgtcgtctttattgtcctggagataggacgcgtgaccaaaaccaaagacggccatgaagtgagatcgtgcaaagtagcagataaaacgggcagcatcactatttccgtgtgggatgagatcggaggtcttatacagccaggggatattattcggttgaccagagggtatgcatccatgtggaaaggatgtctgacactttatactggaaggggtggtgaacttcaaaaaattggggatcctctatttatccacagtctangtgcggtgcaggcagccgcaatgcgagattccatacactactaccctgggtaatgatctccacccttgacctggaggagccatcctntcta

SEQ ID NO: 593 - DNA, 286 bp, Homo sapiens
  SITE (283): n equals a,t,g, or c
gcccacgcgtccgcccacgcgtccgacgaacttctgagacaggtgtgggtgcgagggtcgggagggtcatgggattgggaccgaggtgtgaggagggaatctgcaattccttgctacacagagcgctggcaacttctgacaggctgtttctggggtatgggctgcctcgggttgttgctgttacaaggaaagaaaagagttcccctgcccaccgcctcccagccactgggctacctcctggcaggaaatttgcaaactgagtttaacaagttaggatcagcanagg

SEQ ID NO: 594 - DNA, 713 bp, Homo sapiens
  SITE (489): n equals a,t,g, or c
  SITE (654): n equals a,t,g, or c
tttttttttttgtataaaacattcaatttattggtctttgtggagaattagatgcatcaccagtatattacaacagagccattaatcttgtagcttcatcaacattaactggtttgctttcatgacgctgctgaggaatctgaaaggagaaagtattatatttaaaaacacagacaacaatagcagacaaatgacttatataagctgttattcaatttaatttttctagtcatatctttggaagtagaacaatctgtatattctgacaatgttttagagtctgaatatgctatttatactatagagcctagtactagagagccaagtactaaaaattacactcaacttacaggctttgaaaacttgggagtttaatttattagccycaatttgttagccataaaaaaaagcaaatgatttctgcttaccagttctttctgcagaggttcaagtgaaatgctttttgcgaaatgtgcaagttccttttgnacatttaccaaaagctttatttactctgttaactttttcctcattcataatgtttatcttttaaaaagaaaaaaagcattaatctatgatctcataaccattaaagataagatatattcaaccttaacctgttaaatctaaaatctaaaaactcttaccaacaanttagggataattcactcaaaaattcttatagtcttattgggaaattacagacaaaaagc

SEQ ID NO: 595 - DNA, 358 bp, Homo sapiens
  SITE (120): n equals a,t,g, or c
  SITE (159): n equals a,t,g, or c
tcgacccacgcgtccgcatgaagtcctaatagtgtgtaaacatgtccatgaaaaagaattgctgagttaaatcaggttgcctgtttcttttcccagtttttccctatgtacttgtttgangtctgctggttgggttggtggtcagtggtgataaccagncagacaggtaggagcagttgctgagggcttaacactttgcgggagggagcactgagaaactccaccctctggcttagtttgttctagggactgggtgacagcggcattcttcaggcttggtccagtgatcagagagacaatcccgtgggwtcttggtgtccctcttgctatgaatgaggagaagggtgggggacacaca

SEQ ID NO: 596 - DNA, 384 bp, Homo sapiens
  SITE (322): n equals a,t,g, or c
  SITE (343): n equals a,t,g, or c
  SITE (348): n equals a,t,g, or c
tcgacccacgcgtccgtctggctgaatgaatgggagcttctagccattgaataagaggcagtagccaatgtttcttattctgaatggtccaggttgacttttataagagaaacactcagccttttaattgctgaaggtctggcccatagactaagattgcacattcttagtctaggttacacttgaactagactgcacccactgacgatatattcagttcaggtgttaactcacttggattagcatctggcctgtcctatctggaatataggttgagacgtgtattggaatctctggactagtcagaatacggtcttagttntattctccaatactggggganttttnacttgtagaaactggaaggcttcggaagggggatgg

SEQ ID NO: 597 - DNA, 493 bp, Homo sapiens
tcaaaattacatgttttattttcatgtttgtaaaacgaagagcttttttctggatggttttcttatcagcttttcacacaacagtcaagtaaacctcgtggcactagccagaaatcgtkgcaactttggaacttccaagacawtctggcctctatcaatgggcagacagcgaccytcattcaaaatgaagctgctagtcagtcacattcgacattcattatcttcactggctactcgtccacactcagaacgctgttcactgttaaaagtgtcaggttttaaccaagcgattttccattaaatattctcccagatgttctggaagttttttcgtgtatctttgcatcttcagagctgctccactgtgccacttaagacagcgccattgttctgcgggaaatcggtatttaagcattctcgcagaaatgtcacactccaaggcgtttttccacacaaaacccttccccttcattaatccgaattgcacacaacg

SEQ ID NO: 598 - DNA, 107 bp, Homo sapiens
taaagagcaatctgacagttcttagttctatatcaktgtgcttcatgaccatcaagatccacttttggatgtgtactggaaaaaaaaaaaaaaaaaaaaaagggggg

SEQ ID NO: 599 - DNA, 364 bp, Homo sapiens
  SITE (331): n equals a,t,g, or c
  SITE (337): n equals a,t,g, or c
atcgacccacgcgtccgggatcagtcatgcttaaaggctgaacgtttagcctgagatcaatagaaagctttcatgaatgtaaagcaggggagagttaatgttcagcagcctagctttttagatcactcctgttccagaggagaagagtctggaggccaacagagaagggtacaggtaaaatgtaaagatggtggctgggtgtggtggctcatgcctgttgtattcctagcactttggggaggctgaagtgggaggattgcttgagcccagggagtttggataccagcctaggcaacataggaagaccccatctctacaaaaaaaaaaattnaaattnagccggcctggtgggcactgcttaagt

SEQ ID NO: 600 - DNA, 874 bp, Homo sapiens
  SITE (152): n equals a,t,g, or c
  SITE (153): n equals a,t,g, or c
  SITE (732): n equals a,t,g, or c
  SITE (806): n equals a,t,g, or c
  SITE (822): n equals a,t,g, or c
tcgacccacgcgtccggtacctaatgttttcattgtgtcattgaaactatagctgactggtatgtatactaagtgttcgttgatctaaaccagatataagtcattgacttttctgaaacttagttgtgtcagagatgaaccacctgctcagnnaaccgtcttagtaaccagtgatgaagcatataattctaatgttggcaataggacattgctaacagtgcgtttaactgcaatattttaactacagtaatttttctgtttatttctctatccactcagtagaatttgtggttgaattccaccttcgctgccatagttttttaccacattcctaatggttttcaacctctatactgtagtagaaaattcatctaactactgaatttaattttagcataatactggatcaaattgtttgaattttcattcctgtcatttttgawttttaaaaaatgaaacaaaactaaacmacaaaaccctrgggaarrgaatggcttctttccaactagtcaattaaaacgtccagtatctccccaaataaagccttakgtttcttttaacctcttaatggktaattgaaaagrgtacagaaactwtcaaaatacttatccawtcaatggggggraaagstatgtcttcaggggacagtagagtgatgagaattttttagaaaacactattatccatcaaacttaaaagcatttgggacctgatatttaaagattatgaaanttttccacattttgaagttttcaagaaatcttccatccacaaaaattttatcttttaaagtttttggttaattntccagtttagtttttnaaataaaattttattttaatattattccccattggaaaaaaaagcccccttt

SEQ ID NO: 601 - DNA, 822 bp, Homo sapiens
aaaagtttgttttctcgaaataattcatctttcagcttctctgcttttggtcaatgwctaggaaatctcttcagaaataagaagctatttcattaagtgtgatataaacctcctcaaacattttacttagaggcaaggattgtctaatttcaattgtggcaagacatgtgccttataattatttttagcttaaaattaaacagattttrwaataatgtaactttgttaataggtgcawaaacactaatgcagtcaatttgaacaaaagaagtgacatacacaatataaatcatatgtcttcacacgttgcctatataatgagaagcagctctctgagggttctgaaatcaatgtggtccctcwcttgcccactaaacaaagatggttgttcggggtttgggattgacactggaggcagatagttgcaaagttagtctaaggtttccctagctgtatttagcctctgactatattagtatacaaagaggtcatgtggttgagaccaggtgaatagtcactatcagtgtggagacaagcacagcacacagacattttaggaaggaaaggaactacgaaatcgtgtgaaaatgggttggaacccatcagtgatcgcatattcattgatgagggtttgcttgagatagaaaatggtggctcctttctgtcttatctcctagtttcttcaatgcktacgccttgttcttctcaagagaaagttgtaactctctggtcttcatatgtccctgtgctccttttaaccaaataaagagttcttgtttctgaagaaaaaaaaaaaaaaaaaaaaaattggcggccgcaagc

SEQ ID NO: 602 - DNA, 418 bp, Homo sapiens
  SITE (367): n equals a,t,g, or c
  SITE (377): n equals a,t,g, or c
  SITE (388): n equals a,t,g, or c
  SITE (415): n equals a,t,g, or c
gggtcgacccacgcgtccgggtgcctgctaccacatccagctaatttttgtatttttagtagagatgggttttcaccatgttggacaggctggtctcgaactcctgacctcaggtgatccacccaccttggcctcccaaagtgctgggattacaggcatgagccactgtgcccagcccaacagagtcatttttataaaggaaaccccccctccctctacccacaaacttctgtgttttacacatscaagtgagttagaggaattaggcatttctttgcttgagttcattcactgttaatcttccaaatgtgtcaccttgaagaagctaaggagaggcggagtctcaggcaccggaaatgcggttgcnggtcagttangccccaacaantcattgacaaccagaggaaaagtgccnggc

SEQ ID NO: 603 - DNA, 217 bp, Homo sapiens
  SITE (217): n equals a,t,g, or c
tcgacccacgcgtccgtgtgagtccactgagctggcgtgtacctaaaatgaacaatccttctgtactctcatatcagtctctccggtcctcagtttcctgcaacatttttggtgaccacaaaaggaccagagacagcaggtttactgtttcctttggctctgggcgctggagccctgggcctcaggagacctgtgaccccaggtaccactggggggn

SEQ ID NO: 604 - DNA, 423 bp, Homo sapiens
  SITE (394): n equals a,t,g, or c
  SITE (414): n equals a,t,g, or c
  SITE (416): n equals a,t,g, or c
  SITE (418): n equals a,t,g, or c
gggtcgacccacgcgtccgcccacgctccgaagccagataattagaaggaaaacaaggagagtagatcattatagaaactaaaggaatgacaggggaaaggcatgtcaaatgatgctaagaattcatgttaaatgagggctcaaaagtgscgggatttggcaatgtatagattatccataacatttcagagagctgtttggagagttaagaagtccaaggcagaagtctgatgtgagtggacttgctgcttaagtgaacatggaaccatcacccaactaactggcattttttccattcccaaaatgaatatttgctttctggttgataaaaatgtacttttaattagagaagaatgaggaaatatgggagacaaaagaagacaaataatggatncccattttcccaaccatgtncncncatat

SEQ ID NO: 605 - DNA, 374 bp, Homo sapiens
  SITE (348): n equals a,t,g, or c
  SITE (369): n equals a,t,g, or c
  SITE (372): n equals a,t,g, or c
gggtcgacccacgcgtccgagtgattctcctgcctcagcctcccaagtagctgggactacggacgcacactaccacgcctggctgacgtttgtgtttatagtagagatgggttttcaccatgttggctaggctggtttcaaactcctgacctcatgatccgcctgtgttggcctcccaaagtaggactctcttaagattggattaattctgctactttgctgccttagggccatttaggtaaaatgggttcttggcaatgaagtttcctttctttagctgagtgctgcaaagatgtctgatccctatcaaacaggtatttttccccccataggcttactgtgttcccnctctgtttacacctctgaatnttnca

SEQ ID NO: 606 - DNA, 360 bp, Homo sapiens
  SITE (312): n equals a,t,g, or c
  SITE (340): n equals a,t,g, or c
gggtcgacccacgcgtccgaaaagaaaactctcctttgaattaaggtaatccttcttgaaaggcttgtttaaaatgtttccttgttacctgggagagagcaggaagcactgggaaatggcacgtcactggtgcctcgtgccatttcgtgcctttccctgtcttgcctcagccttgcactgtgggaatgcaaaagagtagaagaaactccaacgtgaaaattgtcgacaaacaatgcagagaatcttcggtggcattaaacattaaaattaaagacacatggtcttaaattcagctgatatacttgacacctncagatatactcttggtgccaaaagggangttaagcaaaatttgagggg

SEQ ID NO: 607 - DNA, 277 bp, Homo sapiens
  SITE (265): n equals a,t,g, or c
gggtcgacccacgcgtccgtaaatttctctgctcattcatttattctgcaaacatttattgaccagttacaatgatccatgcaccatgctagagactagggctaaccaaaatgaataaattcgtgccctgttttcaaagaactcagaggcaggtaaaaggtccagcttgcagataaaagattacaaattcagtatcgtaagtgccatcctggaaggagtacaggagatgtttttgtccgtgtaatcattcattcaacaatttttntttttttggaaa

SEQ ID NO: 608 - DNA, 319 bp, Homo sapiens
  SITE (287): n equals a,t,g, or c
  SITE (300): n equals a,t,g, or c
  SITE (312): n equals a,t,g, or c
accacgcctggcccagataactcttgcctgcctgatttttttataatgatgcactttgttttgttaaaaatttataaatttaaagacaaaatatgcaaaaatgtgccctggtctcagaaataacacagcacattcgagtgaagttgttggcagttccgtgtgttttggggtgattcatttttttcataggttgttggggccgtgcatccattcgtgttctgagcacactccatggtacctgatgactcgaatggatcctgttcaagcccctgggttacccaaagaantatacttctggcntgctggttggtncagagaa

SEQ ID NO: 609 - DNA, 489 bp, Homo sapiens
  SITE (4): n equals a,t,g, or c
  SITE (13): n equals a,t,g, or c
  SITE (15): n equals a,t,g, or c
cggnacgcgtggnanaaagttcaagaccagctttgggcaacacagtgagacctcatctctaaaaaaaagttcttttgattagctgggcatggtggtgtgctgcgtgcctgtggtcccagctacttggaaggctaaggtaggaggaggattcctttagcctggaggtcaaggctgcaataagccatgttcatgacactgcactccagcctgggtgatagagtgagaacttgtctcaaaggaaagaaaaaaaaaataagaaaatgttgggttctcagcacttccagcccacccccatccatatacattccagcacattgttggggccatttgcaagctctgagatgagattctgcacaagtcagcagtgcagagactcccagggaaggcctgaggccgccaagagcaactctgcaggtctgctccaagagggcagaggtgggccccaacgtccttggcaaaatggagattggtctgagggtccatgaggca

SEQ ID NO: 610 - DNA, 1468 bp, Homo sapiens
  SITE (1388): n equals a,t,g, or c
  SITE (1406): n equals a,t,g, or c
  SITE (1424): n equals a,t,g, or c
  SITE (1453): n equals a,t,g, or c
gggtcgacccacgcgtccgcccacgctccgaaagaaataaccccagcgaggtactcttcagggacacaggtctagtacaagagaactcttgacggctactaagttcagccagtcttaaaaaactgtgctgtttctacaaaactttaactacagtagtttataaggatgccaacgaaagctgagggtgtagagcaaaatagttctaagcttcagttaaacttctttagcattgatatgaaccatggacaagtatattctgctgccacaaagactgtaaagtgcttcatttcaacagctgaggcaagccaagtgatcattaataaagcttttcttggttccttcagtggtgttggtagtaaaatggaaggtgtcttgctgcaggtaactaatgaagaagtggtcaaccacagagtcttcaagaaataagaaattctgtaccatctgaaagtagttcttgttggtgccttcatttaaaaagcactctttaaaataaaagggaaatgttttctgataaaacaaacatttagttgaggttcttgatataaaacaattacaaaatgagtgttgtttgtaaaacagtaacatcaaattggctagagagataaatgtatcatgttttaaattaggttttgtgagtagacagattacaattctattttaaatataaagtttataaaataaatactttttgtatccaaatacttggtgtaatgtttacacataaaatgtgtgaatcttgttctataaatatttggttgtctaaaagatcaccatcccctaaatttttaaaagcagtttcacaaagctatgcatattttaatattaacaggtaaatgagaagagcattgtggacattattggctgtccccaataaaatgctgttcattatgcactgtatattcagcgtttgagtactcctaaagtttctggctttacttttacgtttagcaatactggtggcattttgaaaatcatggattttaaaggttaaccggctggagtggtccagattaagtggctttgcagaagcactgaggtttacaatatgtgctagattgtcaaatgtcaattagttttattgtggtttacactgagtaaatgaatatcagtgttgctttttaaatgtgtttatttggacatttatytgaattaagaaaaccaaaaagaccaggttaatttgtttctatgataatttgttttggttttgataatgtgaggtatctaacaggtaagtcaaatttaacagcaggtaacacatagaaagcagctttctgtttgaaatagctgagttcgtcaattaaagacgtacaaatatcccaactttaagaaaattttgaaggtttaaaaatgtgtggatgtcaaagacgttgaactttgaaatacatcangttgatatgcataacctnaaaataccaactcctatncagccaagggtcaagggaatattacacanatagggggagaatta

SEQ ID NO: 611 - DNA, 422 bp, Homo sapiens
  SITE (332): n equals a,t,g, or c
  SITE (398): n equals a,t,g, or c
  SITE (404): n equals a,t,g, or c
  SITE (406): n equals a,t,g, or c
gggtcgacccacgcgtccgcaaagtgctgggattataggtgtgaacaccgcacctaggcaatatactgcctcttaaggacttttctaactggattgagatgaaggaagtgttgattcaaaaatgaggccagatcgtgtgcctagaccgtgtctgtttgacaacattcaggaggggtaggtcatgattctggatttaccgtgtttgaggtggtagaggcttttcaatgagatgtgtctagtagatgatgagaaacctgagattggagcccaggttaggaatagagatactggtttagagtccaggctgagaatatcagaagagttgttttganaatggcaaaggccggagagtataaaggaaagccgagaagccgaagattacaccccagagaaatccnggggcngntgaaaggccttgatgt

SEQ ID NO: 612 - DNA, 642 bp, Homo sapiens
acccacgcgtccgccagtatctgtgaaatgatgttttatctgtgtgtcaggatgagaaacggcagtcatyccaccaagtgttggaaactggttagcctggagacaagggtttctggggccacagctcagggatgtgtatttaattacaggatccccagaaactcctctctaggctgccacagcaacattttttctgggcttwggagccatacstgaactgtttcctccaaggcgggaactccagagagcctgccaatctggagcaagctggggcttctgctttggccagacckgggccaccatgagacttgaaggcttctagctgtcctacgacacgagccacggtgccctgcctytccccgctcatagaagcctggtccctctgtctagcccagttcccatctagcatccgtcttctgggcctgaagccctaaatggaccacagcctgcacaggaatcaactgtaggctcaaagggaggcggtgagtaaggtcagagcctgctccaagcccaagaacaaaagttgtgttatgggtggaggctagtcccccagatctagccctgccgtctttgccctttaatgaccattgttttctttctctaaaatgtcttgtaataggtgataatgttgttgattcaaat

SEQ ID NO: 613 - DNA, 546 bp, Homo sapiens
ggaaagctggtacgcctgcaggtaccggtccggaattcccgggtcgacccacgcgtccgctaaatgctatttatctctgagccgtccccgtcctccgtgcagagcaagttgaggtcattccttcttttcttctccgatcttttttcttggcttctgaccaaaaaccaagctctaccccatccccatcccagacctgcaggagacgagcgagcgggaaggcgccgggcccgggactgtccgttctcggggccagagctgctgggggaccgagtttgtacattttccattttggaattttgagttccaattgttgtaaaacttaatttctccccagtttttatatatatattttttagagttccgtttttatttattaaaaacaaaagccccagccctgccgaggcctgggcggcgtcctcagtcgggtggtcccggggcctttgcggtcccgcccggctgagacgctcgccccgacgcatggacccgagaggcgacgacacgagtgaataaagtgcacatggaccctgaaaaaaaaaaaaaaaaaaa

SEQ ID NO: 614 - DNA, 265 bp, Homo sapiens
  SITE (37): n equals a,t,g, or c
aaattcatcattacataatggcactgtacttgttcancttcctcaactatttcaaacagcagagaaccaggaggaagttttttctttttttttttttttgtaaaaaagcctttaaacaacaaaaataaatgtcaaaaaggtcacgcaataaaacttacagggaaacttacaggaaagtccctttagtctgcagttagagcctatttactcttggacactgttctaaatattgtggttatctgtttttgataaaacagagatttga

SEQ ID NO: 615 - DNA, 818 bp, Homo sapiens
ctttaccaaatcctacaatttgctcatccatgagaggacccacacggacgagaggcctatcacgtgtgacatctsccacaagccytccsgagcaagatcacctgcgggatcacagatacatccattccaaagaaaaacccttcaaatgtcaggagtgtgggaaaggattttgtcagtctagaactctagcagttcacaaaactttacacatgcaggaatctccacacaaatgtcccacatgtggaagaacctttaatcagagaagtaatctgaaaactcaccttctcacmcatacagacatcaagccctacagctgcgagcagtgcggcaaagtgttcaggcgaaactgtgatctgcggcggcacagcctgactcacaccccgcggcaggacttctagagaagcccaggatctgtcccgtgccgccgctgctcccctccccagacacctctccacgtctcctacccagggggtcgcatccctagcccttcactgaccccagctcttcccttgctgcagccgcacctgcagctccagggagttaactcttcttctgggggactgagaactgtagaaagccacacactactacatcccttcacaaagagtatatgctagtttcttgtagatattcacagctcattttagagctctgtacataatgttgtgggtctttgttttgttgttttgtttgctttgggatcttgttggatgcacttagatatggaaaatggaagccaaattttatctttaaagactgtattttcaaaataaaactttttcttgtttgtttcaaaaaaaaaaaaaaaaaaaaaaaaa

SEQ ID NO: 616 - DNA, 545 bp, Homo sapiens
  SITE (383): n equals a,t,g, or c
  SITE (520): n equals a,t,g, or c
  SITE (522): n equals a,t,g, or c
  SITE (541): n equals a,t,g, or c
gcccactcgtccggggcaactccctaacactgctcacctctgtcttgctttggcttggtggaagctagcttgcacacagaagcttagttgcaaaggcctctgggaaatgtaggttttagcttcctaggctctttwctttaagatgtcaaaagacagggggctggaaggaatgctgagctgccttccgctatctgcccagaaggctcatctattagtagtgtgtcaaatggataggcaggaacagagatggatgcatggcatccagcagataatagtgtgctatacacgagatgccaaccacctyctttagagggattgcaatagcagtcaaaaataagggrtwagtgaagatacctcagagcatggactctcttaagtgttanttggactattaaagaatggaggaggagaagttcaacaatgatttacatgggctctggaaatctatcctggcaaaattactttacttttacttaaaaaaaaaaaaaaaggggcgggccgctcttagagggttcccccnanggggccccagctttacgcntggc

SEQ ID NO: 617 - DNA, 444 bp, Homo sapiens
  SITE (427): n equals a,t,g, or c
gtatggtaccccctttttgtagataaaaaattttgaagtttagagaggctaaagttgtgtgtgcaaatgcactccctgccactcagggtagaactactctgcctttatttagtatttagacagaaatgcacttcgatttgctataatcacaagaggttttttgtttgtttgtttgttttaaaaaagaamaagatctggtccaagatagcagtaactataacgkcatgatgacctctgggtataactcctcaagtgtagaccctgatccacaaggctcccctggggtcaggaagttcaagtgatgcatgcgctggcttgaagggcccaaggagggaaggaggatgaatttgggccatgtaaggcataggatcaaagacttgaggtatgatagataaagcaaggatttgaaggcatcttggcaagctgnttgtgaaattagaaatg

SEQ ID NO: 618 - DNA, 155 bp, Homo sapiens
  SITE (138): n equals a,t,g, or c
ctgctgccatcaaagataagagaattgttttcagcacagttatagaaagttcctaggctccagtccatgccttgagccaagaatgtagggatttaagcttgttattcttttttccttggaatcgcccagtgccacagnaagcagctaccccatct

SEQ ID NO: 619 - DNA, 470 bp, Homo sapiens
  SITE (388): n equals a,t,g, or c
  SITE (414): n equals a,t,g, or c
tgagttgttttccacattctacaactgtaaactgctaattttttgtggcttcttgctctatacaccatgcaagcataatttatcagtttgtttaaaacattagaaagggagaaatactcagccttgtccttgaacctgagttgatactcgatctatctccatctgcattgccccctttttctctactttgtctcttattttgctgtattttttcttcctcagaactctcctgaaaagcctttgatttggtaaatatattttgggattttcagatgttgaggtttattataaatgctttaaattttctggttttatttttttttaattaggttttgttgaggaacagagtgtaaaaaggaaagggatatggttaaaaatatggaaaatnaggtaaaaaatgggtgccatgtacancgttagtataccaaatggttatccaaataggtttaggaaggggtgtccaagggccc

SEQ ID NO: 620 - DNA, 357 bp, Homo sapiens
  SITE (302): n equals a,t,g, or c
  SITE (328): n equals a,t,g, or c
  SITE (356): n equals a,t,g, or c
ggcacgagccaagayctccttccacctcaagcatccccagtttcccgcgggcctggaggtgacagatgaggtactggagaaggcagctgggaccgatgtcaacaacatcttccagctcactgtggagatgtttgattacatggattgtgagctgaagctttctgaatcagttttccgacagctcaacacggccatcgccgtatcccagatgtcctcaggccagtgccgcctggcccccctcatccaggtcatccaggactgcagccacctctaccactacacggtcaagctcctgttcaagntacactcttgtgagtgggcccagggnaacccttggcccggaaggttgtggttana

SEQ ID NO: 621 - DNA, 351 bp, Homo sapiens
  SITE (248): n equals a,t,g, or c
  SITE (294): n equals a,t,g, or c
  SITE (300): n equals a,t,g, or c
tgcacagtatatttattgactgcagatggaagcacattgctaaggaatggaaagctgcaagatagaacatgcccttcacctgcgtggttgcatagaaccagtcgtttgtccaaatcttaaagaactcaagtggaaagcatacttaaaaatgtaaaggttagaatcacaaactacagtttgawttgaaatgactgaargattgtttcaagaatataagattctatctaaaagaagtgaatgaargtatntctggctggagtgcatggcgcgatctcagctcaccgcacctccacntccggntcagcagtgatgtatgaggagtgccacaagatgtgctccgggatgaagcaa

SEQ ID NO: 622 - DNA, 638 bp, Homo sapiens
  SITE (524): n equals a,t,g, or c
  SITE (583): n equals a,t,g, or c
  SITE (589): n equals a,t,g, or c
  SITE (626): n equals a,t,g, or c
ggcacgagtgagctccttggagctatccagatcctgctcacttttccttcctgagatcagaacaaatcacccccttactcccactccaaacaaggccttgatgataaactaatccttcctaaaatgctggtaggtaaacaagcaatgatgaagcattgaacacaggttaactcctgacttttgtaccattgtctattccattacacattaacatgactctgaatgccagatccaaacctttgcccaccatctgcttgtcgtgcaacagttgaggcagtaaccaggggagattcacttcctgtcttgtccttccccagggatcacccccctgctgssctctagcagccaarctcagatgagttccattgttaccctaggtgtgcccatctctttggtagggaaggagaaaggtaagaatagccatcagtgaggaaggattcttggagcgaggagccactgtggtttttcctgctatttaagatgttgagaccggataactttagaaagatacctgcacaaacccntaaatagtgcttttataaagtttagtttcaccgggaacctgagtttcagtattttgacnttaggnttttgttccaaagagtttgaaggcctgttgggaggtnttttggttccaa

SEQ ID NO: 623 - DNA, 307 bp, Homo sapiens
ggcacgagtggaagcagaagtaggctgtaaaacaggtagctcctaatcttttcctaaaggaacaaagtatggagaagctcaggagtgtggagaaagtcaaaaaaactgcggaggttgttgtgcaaagcaatagggaagagactggttagattcactggagatgcaggataaactagtaggccagctagtttgctggagagaaccagkaaaagaagaagctaggaggagccctttggtatccagaacaactctcaaacactgaccttgggaactaactgtccctttagagggacccaaatttgatcta

SEQ ID NO: 624 - DNA, 360 bp, Homo sapiens
  SITE (296): n equals a,t,g, or c
  SITE (343): n equals a,t,g, or c
  SITE (360): n equals a,t,g, or c
ctctgccagttcctggtggatagtcatttaaagtgcaacccacaatcaagagtataaaaaacaaatgaaacccaaacatatttactgaatacatcgttaatggaagattccaggtactgtgaaggatactgtgggagaaagacatggttccctttcttcacaaatttatagcttccttattataaggagttaaacagtagtatcagacaataaaaatgatataaaaatgtaaacaataataaattacatgaatggaattgtctatgctgagcagtgaaagacattagggattttantcaggtgatgcatagatacataagtccattttgtgcctagagttaanccagcaactaagtgaan

SEQ ID NO: 625 - DNA, 636 bp, Homo sapiens
  SITE (145): n equals a,t,g, or c
ggcacgagctttatcagccacatgaaaatggactaatacagttattaatagaattaaatgaaattytttatttaaagtactcaaaaaatattaactattattattaccatcatctagttagttgatttttaaagtaagatgtgtntatgttctcttttcagcaccataaaggtagagcagtctctgactagatctggtaaaraartattttatgcagatgagtaaacttcactattacaatgagctctctaaagaaagagtcccctttcctcaacttactgtatattctaattgttagcaactcattcaattgggatttttcttgcatctttttgtaaattataaagragrtccatgtgttttaaaattgatgtgctttttaaaactccaaggtagtgtgttttcattttmcaatggraagtgtcggtattttttgtaaaaagtrgraaattagtttatgcgkcttcaaatagcaaagcttaattrgacagtcgcatatctatcattaaaattcaaatgttttaattcacttgggaccccaaatgtgaatttctcttgggctagattattcatagattctctgcatgtaatgatgcctatggtttctaaaattctttttggccaaaatcaggagga

SEQ ID NO: 626 - DNA, 421 bp, Homo sapiens
  SITE (340): n equals a,t,g, or c
  SITE (376): n equals a,t,g, or c
  SITE (400): n equals a,t,g, or c
tcagctttattagacccaatgcccatttcaaaacaagtattctgtgaaatatcccttactatattgaaatggaattcataggtattctaacttacctcatgcacatttcagaggaaatcagtataaagtcctaactataacataaattagaaaaagagagtaattgataagatgatgatgtgtattmcatgcgtagtgcctgagtacactggagagcatggatgtttacacctgtatgtggaattatcktgaattcaacagtgacaaaggctgttgtatatagrtgtattatgtcaacaacttcaaataccacaaatttctgttgctgttactaacatgnttttttggaatggtaaacagctgttagggggattgncaaacaaattagtggttggtttantggtttctttcagttataccc

SEQ ID NO: 627 - DNA, 331 bp, Homo sapiens
  SITE (276): n equals a,t,g, or c
  SITE (311): n equals a,t,g, or c
  SITE (331): n equals a,t,g, or c
ggcacagaaaatccattgccattttcaggttaagttttaggctcgcttgattcagtcagcaaaccttatcttgagcactttgtatctgttagatctagtgatgtctgaaggaacccaaaggtcaagtaatccaactccctcatagtgtacaaagaaatcttgcatatcttccacaggtttattgacttttatccaacacttttcatgttttaatttcagcctttgtgaaagttgatattgaaaaatacagaggtgagaacttgttagaataaccanatggaatccacatgaatgttagatcaaaatacaanggacaaagatgaaaatgccn

SEQ ID NO: 628 - DNA, 322 bp, Homo sapiens
ggcacagcggcacgaggtttatttaaagtatataatgagagatcagatatcataaaaaactattttattaaggaaattataggctggagtatatatgcatttaaaaaaatcttaggttaaattatcaacacactgttattaaaattgacagttagaaatactttctacacatattagggaaacagtggagtccattgattcagttattcatattttatattttgtgtagtacactagagtaaaatcagatatgatggagaactttagtacataaaactgattgggagtacctttatgaataagaattgtttttatgtgtctt

SEQ ID NO: 629 - DNA, 429 bp, Homo sapiens
  SITE (3): n equals a,t,g, or c
  SITE (10): n equals a,t,g, or c
  SITE (387): n equals a,t,g, or c
ggncacgagncaatattgtaacacttctcagaatgagtaagtacaagtagttgatttcactgaaatgctatttattttaattatatagtaaaattgtcctttttcatatacaggtctgtaaattttaatacatatacagatttatgtaagcaccattacagtcatgatacagaacaattccatcactcctccagattccctcattatcccttcacggtgatgcctacccgcttctgctagtcctgacagccactgatcttttctccatcattgtagttttgtctttttgagaatgacacataaatggaattacaaagtaggtgaccttttgaggctgtcttcktgtactcmaaataataccttgagatttatycagttttggggggnaccaaaagtttgttacattgtgtttgattgaataccattgtt

SEQ ID NO: 630 - DNA, 296 bp, Homo sapiens
  SITE (265): n equals a,t,g, or c
gagccagggtgctgggattacaggcgtgacaccgcgcccagccacattttcattttctaagttggacttcatagggtcacatagtattgagttaatataagacagacctttttctatcttgttggttgcttactagaagatgrggaagctaacatctctggtttacagttaactaatttgaggaatataggcattggaatagtgttagtgtagcaagtaaatgagtgtaagagaacattttgcaaaactatacacttaaaattcnaaagttcagtaaattaagtaaacttgggacc

SEQ ID NO: 631 - DNA, 330 bp, Homo sapiens
gggcacgagctgccaaatccagggctgtgcatagagtgactgctgacagcgtttgataagctttgctgtgagtccaaaagaatgatcggatagatgcctgtcttgcagcgcatctacattaatctcataacaaattattcgtctcatattagagaaagtttagctttcttagaagcttgatgggaaagagcctcccagctcttagagtttgattttcgcaactcagttcacatcttcttcttactccaggttcccagctccttgagccttgcccgtgaaggggttggagtcaggatgggaagccttgagctgccttgacctgctccattc

SEQ ID NO: 632 - DNA, 539 bp, Homo sapiens
ggtcccagtcccactcgcagaaaaattatattccacaaagaagaggaagaagtgagaagattcgccagattttagccttatatgtaattccttcacatttgggcagcatggacgagaaggaagaatttgcaagtttggcctttatataagcatgtgttgcaggtgctgtttgatttttctaaggtatttttagcccttgatcccctttgcttgcgagaggtggggaactgctcactgacagcttctctgtaacctgcagtaccagtggatcrttcttgattttgttttcattagtgtcatttctttgtcattgaggacttttccccttacaacagtaacaccattttttgaagagcaaaacttataatacctcctgggattgtgagctagtcattcagcctgtgtaaccatgtggaaataaaaattgacgaccaatgtattatatggacaactttgctttgagtaataaacttgattgtaggaaaaaaaaaaaaaaaaaggggsgccsttttaragatccaagtttacgmcccgggcat

SEQ ID NO: 633 - DNA, 303 bp, Homo sapiens
  SITE (297): n equals a,t,g, or c
gcttttgcaccaacctaatacatagtttcaaggtatcttcccacaagtatttattaattataaaggaaaatagagtaactttacatggaagaagtgacagatacagctatttttctgagagatcaaattaaatattaccagtgttcatatacactgaaattctacatcatggttagcatgcaatgagaagaacatagcagcatttttgttatattattgccaaaccattagagtcagagtctaaccattagaaaatctaaaaaaaaaaaaaggaaaaaaaaaaaaaagggggggccnttttaa

SEQ ID NO: 634 - DNA, 371 bp, Homo sapiens
  SITE (368): n equals a,t,g, or c
gcggccgcgacttcggggacctgctcatctactcgggcgcgctgctggtgttcctgagcctgctgggctggatcctctggtacaccggcaacatcgagatctcgcgccaggagctggagcgcgactacggcctgcggccctcggcgctcgcccgcctggcgcgcaagctctcccgccgcgggcgcgggcagcgagtgaggcccagacaaccccttggctccagctgtcagkaccagactgagatgtgcagctgcccctacatccgtggccagacggacgctccctgtaccccctccctcctcacttggataaaaagcagatttgccttaaaaaaaaaaaaaaaaaaaaaaaaaaaaaaaaaaaaaaanctc

SEQ ID NO: 635 - DNA, 384 bp, Homo sapiens
  SITE (363): n equals a,t,g, or c
gtagctgcggtgagtgggcgtgtgcgccgagcggtctggcccaagggctgggssccggccgagggtcttcgggagcaggccgcagggcgcggagagatcctgggatcgccgtccgccgctgctacccggcatgtcggcggaggcctcgggcccggctgccgccgcggccccgtccctggaagcccccaagccctcgggtctcgagcctggccccgccgcctacggtctcaagccgctgaccccgaacagcaaatacgtgaagctgaacgtgggcggctcgttgcactacaccacgctgcgcaccctcacgggacaggacaccatgctcaaagccatgttcagcggccgcgtggaggtgctgancgatgccggaagttgggtgct

SEQ ID NO: 636 - DNA, 257 bp, Homo sapiens
tacagtgtagtgtaagcttaagaaggtgtggagaggatgggagtsactcactgggcaggaatggcccagctccagcaccttgctatgaccagccagctgctgggaacaggccaggaagagtgtggccttagcgcaaacactggggtggatctcgagatgaaggtgtggccgctggaagctgtcacttcaccactcctcttctgaagaaagagctgagccctgcacatgggagcattggtgaaaagggtggtagacgt

SEQ ID NO: 637 - DNA, 606 bp, Homo sapiens
  SITE (9): n equals a,t,g, or c
  SITE (11): n equals a,t,g, or c
  SITE (401): n equals a,t,g, or c
  SITE (411): n equals a,t,g, or c
  SITE (549): n equals a,t,g, or c
  SITE (563): n equals a,t,g, or c
  SITE (573): n equals a,t,g, or c
ggcggtcangncttgaccgttcttgcccagcaagagactctgatgagaaatgctatctatcaaaatagaatagttcttgacaacttggtagcagctgaaggaggtttgtagaaaatttaaccgtactaattattgtctacacatagatgatcaggggcaagtagttgagaatatagttaaagatataacaaaactggcacatgtacctgtgcaagtgtggcatggactcagtccgggagccatgtttgaaaattggttcccagcaataggaaaatttaaaactcttgtaataaaaataataatagtaataggaacctgcttactgctcctttctttacctgtattctccaatgataaaactcttgcacttgtcaaaaatctcgcacagctcattaatccanatttgccaanatatgcaaacaataacccctataaataatccaggggaataggagaaaacccttgttttatttccgtctttaaaaacacaataatcagacgcgccgccagctaacagctgctctgctaaccatattaatcacctataanctattctctaatcncctgttaaanactttgaatcctcctttctttccctacaccgtt

SEQ ID NO: 638 - DNA, 318 bp, Homo sapiens
  SITE (40): n equals a,t,g, or c
  SITE (292): n equals a,t,g, or c
  SITE (294): n equals a,t,g, or c
tgtatccgttttttaaattttttaacaaaagaggcatatngcaaaagcatcactcactactttagtcagattcagagaaccctcttagaccacacttgagttattgtcatggaatagctttttaaaatggctggaaatgaagatagtctcttgaaagaacaccttttcctacctatttcagtattgtagtcaaatcttgaaatacaaattttttttttcaatggcatggtctcggctcactgcaacctccgcctcccggcttcaagtgattctcctgcctcagcctcccagnanctgggatcacgtggcgcccgccag

SEQ ID NO: 639 - DNA, 629 bp, Homo sapiens
ggacaaaatgtctgggactgtacaccaaatcccacagggtgacagacaaatgagaccccccaaacccaagaggaggaagatctcagataacagagactactccactaatgcgcagtgtttattaaaggaacatgcacagatgkatctgkatataggtattgatatagccacagttatatcaatatttagactatggcagatagctaccaccaccacagggtgctaaaagaaacagtgatacaaaatttttttgatcaggaaggataatgaatgctggaaaagccaatcaaagtctctgtgtgatgagagtgatcaatggtcaagagattactgagaaactctttttctataatactaaattgtgattataagaaatagtccaaatgtttctgaagaattttcaatgttgtatatagaaaatacagaatttcatggtgatatcagaaatgtaaatattgtacagtattgtcatgtacaagcgtacctaatgcacactttatcttttattgtacaaagaaatagtgtacaaaattctttggtttctatggagtacacctaccagagactaccagtgtaaagtgataaataaaaatacaacctaaatgcttytctatgawaaaaaaaaaaaa

SEQ ID NO: 640 - DNA, 1118 bp, Homo sapiens
  SITE (23): n equals a,t,g, or c
gcatcttttgggcatatcatagnaacaatcatgatgatgatgataaacacttgtatagtctttaagtgtgccagacacattgtaagtatttcacatatattaactcataactctcattactgcacttgagaaagctagtattattattattatcatctctaagaagtggagtcacagacagcttaggtaacttctccaagatcacacagcaataaggtggaagggcctgttgggcttcggagtctgagtttttgtcactatgcatactgggccccgtgttctcaaactcaacacatctgaaacgaaagtatcccgctgttcctccatgactccctgtctcgcgcaaccaacccacttgcccaagctggaaatctgtgagtcaccctggaattctctccttcccacctccattcaaagtaagttaatcacccaaatcctatyattctacctcctacatatttaaaacatccgtttaatggcctctttatctcctccagtctattctccacattgcaaccagagggttcctctaaaaagaacttaatcttgcctccttttgactgaccaactagccttcaatgggctagcactatctgtcggttaaatccagactccttaacacagcaaacaagggcctccgtaatccggcccattcccacctttgcagcctcatcactcctcactgcctcgtacccgctcccctctatcttggctggctctcagtttttcaaatgcactgggcactttctctctcatgggactttctgctctttcctctgcccagaatcctccctccactccctagatcagagttgggaccttctctgaccaaagactgtgataggaccctctgctgtatgttccttgtctccttttaactttccataataaaaaattcatcacacctcagtgcaattttttatctaaagtctmtgttcccaatagcatgaggatggggacaatgtctatcttcttcaamtmtgtatcccagtgcttagcacagagccacatatatagtggactatcaagaaatatctgtagaatgaatgaatggatgaataaatgaatgaatgtcagagctacttggagggatggcatactggccatcatagcaaagc

SEQ ID NO: 641 - DNA, 554 bp, Homo sapiens
  SITE (549): n equals a,t,g, or c
attaatgaaaacggtatgaaaaagcaaactaaaagaactaatcaaaaataaaaagcttttgcagcttaccgaggaaaaaaacaaaaataaaaagcttgaatttaaaaattcagtccaaaggaggagatttttagaaggttccatactgaaatgaatatgcaagcatagtacatttctatgtttcaaattagcccatggagttggctawccctaatgtaatcactaaaagtatctagaagatctaaataaaggaatgatcatttcagagcgtatgctagaatgctgaagttataatagtccactagttacttaattctgcatttctgaagtgttgcacttgcaaacgattatcagtagtgtwtttaattagargagatgttgatgcaggtttatatgtatcaaaaacacatgactkcttagtcttaaaagtgactaagacttcttatttctgaaaacaaacccaaaaccggaactgagaatgaayattaacaaaataaacccacgaaaagtttttggtgttctctgccaaaaaaaaaaaatcctgccagncagga

SEQ ID NO: 642 - DNA, 512 bp, Homo sapiens
  SITE (489): n equals a,t,g, or c
  SITE (501): n equals a,t,g, or c
  SITE (507): n equals a,t,g, or c
  SITE (509): n equals a,t,g, or c
gctagattcaaagattttctgattggcaattggttgaaaagttactgactaaagacttaggaatgtctttagagaataaaggggttgtggagaccaaggttttagtgagaatgggataattggtgtggaaaacacaatttggtgtcagaagtgttgtgaatacatagttttccaattgagtttctggatgagattaacatttcaattggtagactgagtatagtacattgtcttccccaatgtgggtgggcctcagccaatcgaccgaagacagaatagawcaaaaaggctgacctcccaggagtaagagggagctcctacagccaaacagcttgagctggaacacttttccagccttgggctcagactgggactgcacatcagtttgcttgcatctccagcttgtcaactgcagatcctgagacttctcagccttcataattgtacgggcaaattccttataataaatcttttatacacacaaaaaanaaaaaaaaaaanaggggngnccg

SEQ ID NO: 643 - DNA, 361 bp, Homo sapiens
ttcgtcgaggtgagccagctctatgactgcaactggatcgtggtcaactgctccacaccggccaactacttccacgtgctgcgccggcaratcctgctgcccttccgcaagccgctgattatcttcacacctaaatctctgctgaggcacccagaggccaagtccagctttgaccaaatggtatccgggaccagcttccagcgggtgattcctgaagatggggccgcagcacgggccctgagcaggtgcagcggctcatcttctgcacgggaaaggtgtactatgacctggtgaaggagcggaaggccagggacctgggaggagaaagtggccatcacgcgcctgggagcagatcttttcc

SEQ ID NO: 644 - DNA, 222 bp, Homo sapiens
  SITE (213): n equals a,t,g, or c
gcaattgttgattataagtcaaaaaaacaccatcatgtacaaattcaggggattttgtataccttgtttttttggttacaaatatgcaaaattaaagatgtttgctaatacttgtttccaatttttaaacttttcaagtgttgcactgttaataatgttaaaataaaaggcatttgacttagwaaaaaaaaaaaaaaaaaaaaaaaaaaaaanggggggccc

SEQ ID NO: 645 - DNA, 675 bp, Homo sapiens
  SITE (657): n equals a,t,g, or c
  SITE (665): n equals a,t,g, or c
tccacgcgtccggtcagtctgggtgcaaggcctaagggagcatgttttaccacttctgttctggtcacttagaaacaataaaactgtaatgacctcagcagctggagcctaacaccacttcaaggctgtgccctagtttcataaataggtctttgaagaagatccctgctttattggagtagatcataacagtaacacagaaatcaaagagtggtgatgcgtgtgggtttggggccagaaagtagctctgggagactcttaggttaaaggcaaaattgagatgttaaatgctgagtttgtgtcagatttaagagtttaggaatgagagtgggagaaattaagccgttcttgcaagacagaagcaaggatgctatatttcatttgcattctgccttccatgcggaagtagttacaaaagtgatattagtggtgcctgtgtgtattctaatttcagagatyccagtataaagtgtatgttatacacacatgcacacacactgctctcatcaggactggaatctgctttcagaccaagtaatccaccttttcagttgtaattactgtgagggartttggggcagcacatttctcctgggttttgcctaccttcaactcctcttttggtatttcttgaagatattaaagtagttcaagtanaaagttgncactatttca

SEQ ID NO: 646 - DNA, 842 bp, Homo sapiens
gggaaactgaggcctagagaagctcaacaagttgcctaagttccaagtttcctctcccaactctcctaccctctcctcttccttctcctttctcccattcttccctgcctcttccctaactagacaattttttattgagtgtctcccaggtgcaggcatgagccaggtgctgggaaaatcatgataacccagctccttctggtcattttctcagctggttagaggctgggaggacacgcaagttcagctccagccgactggggcattggtggtagcccctggagacattgtgcaatggggctacgaggctgcatctggctccagggaagcgtgttgcaatccatgagtgatgtctgccatgcgtacaggcatggagagtgaggcgcctgtactgtctttctgtagaccctagactggtggggcctctgaaatgcatccagacactgtgctgggtgtgttgcatggccctcccaaccaattcagtatttttctccccattttccagggagaaatctaaggcgtcagaatgtaaggttcttattggaacccaggctccagggtccctggttttctgtgacatcatgctgcaggaccctgtttctctctttgctttggctgctggggagctcagaagggagctttaggcttgctctcagtcaccacattagctcaggggtttgggcatttttgtcgccgtctcctttgggctctgtctcctccctgctgtgcttcctgaggagcaggccggatgtaagttatcaactataaataaaaccaagacttccgttctggctctcaaaaaaaaaaaaaaaaaaaaaaaaaaaaaaaagtcgtatcgatgt

SEQ ID NO: 647 - DNA, 848 bp, Homo sapiens
  SITE (154): n equals a,t,g, or c
ccacgcgtccgctagggcttgctactctgagatacaatgcctctaatttcatgctatgtggctgctttgtctttgatcagatttagtgtcttaggtaattaaatcagaaagtctatttagctattctagaagtgtatgtgtaggtattgggtgngtggggttctttgagcgaacttgtcagaaactccattcttaacatcagaatcagggcaggattgaaaacattgtggctggatcttgaaattgctataacatctattgcagaaaatgataggtcagatggatagcaataataattatatatcagatcttagtaacaaaattaccaagctttatctagtggatatatgtaaaagaatatttttaaatgtccagcattgatgtattttctttaagaattattacagtatataagcattctttgggaatacagtataaaaacataaattttttcttatttttaattttttttatttttttgttcaaggatgaatcttccctttaaatattaattttctcttaatttcgtgtttccttgcacataatagcmctgcccctaacttcagagatgctgattgcagttaaaaaatcaaaaaraaatgatgtgaatcagaaaataccatgttgtattgaaagcaaatcaaatagtgtaaacaccatcaccagaactctgtgcgaacaagctcccaagaggagggcagcttgtaacttacaaaggctgttagagaactcagagcatcagagcataaagcatgtgggatccaaagagacacatttggaattccagtttggggatggtagttgcaagcacctaaacagtttgccaaggaatgtttctcctgagtttg

SEQ ID NO: 648 - DNA, 574 bp, Homo sapiens
  SITE (42): n equals a,t,g, or c
  SITE (43): n equals a,t,g, or c
  SITE (52): n equals a,t,g, or c
ccaggtaccggtccggaattcccgggtcgacccacgcgtttnngctcatgcnaccatccctgggtcatttttaaattttttgtagagagggtctgactcttgcctatgctggcttcaaactcctgggctcaagcaatcctccttccttggcctctcctgaagtgctgggatacagttatgagccaccacacctgccaagtgctttgtgatactatgcatttgttcaatgcagattgggaaacttaaaatttgaatggagattatgttgatgggctttggcagttcatttggatagactgggatgagaagctcttgggacttgtgactggacaaagcattccagtatattaaaataaaattaagccatattactccactcataaaaagcaatcctatggtaggtacatggaggttgggaatagtgcacggaaaggtggcagctttctttggcttcatgttttaatctggtaaagttcaagattgcactttaagcaggcctcctaaatattttagatttcttggggatatgctaaaataaaacaactaaggcmtcaaaaaaaaaaaaaaaaaaaaa

SEQ ID NO: 649 - DNA, 687 bp, Homo sapiens
  SITE (11): n equals a,t,g, or c
  SITE (16): n equals a,t,g, or c
  SITE (20): n equals a,t,g, or c
  SITE (673): n equals a,t,g, or c
  SITE (685): n equals a,t,g, or c
  SITE (687): n equals a,t,g, or c
ctaccctggancctcnggtnccgcctgcaggtaccggtccggaattcccgggtcgacccacgcgtccgtgaaactcttgytcttctacatatttccaatttttagccacaataaacaaaaatatgttaaaatagaatcaatagaataggattttgtatattattaaatatatgatgaaaatgaatggtggtaatctaggatgaggaccaaatttcaaacttggataagcagagctatgaggataatgaggccagtcttggtcctgctgggtttgagccacctgtggaatacttagttcatatagtatttggaagactaattactgcacttcttgttatagactgatttaccctcctccctgctgcatatgttgaagtccttgaaaatatgactgcatttagagttagggtcgttaaagatataaaatgaagttattgaggtgggtctgaatccaatctgactggtgtccttataagtaaagaagactggacacacacacagagaaaagataatgtgaagacacagggagaagacagttatcgacacaccatggagagagacctcagaagaaatcaaccttgmccacagggttaatcttaagrgtcgtagcctccagaattgtgaaaaaataaatgtttaagccactcaaaaaaaaaaaaaaaaaaaaaggggngcccgtttaggngn

SEQ ID NO: 650 - DNA, 446 bp, Homo sapiens
  SITE (443): n equals a,t,g, or c
  SITE (444): n equals a,t,g, or c
gattcagaagaacttcaggcatgagttagttgcatataaagtacaatgtgaattcatgaaayygaagyygtgccacaagcatggaagaacccacatgcgtatccctggcctcctgtgctgaggaaaatatggctccttaatttttgctacgacgtttatcctgcagagaggatcaagctgattatgttagagcatttctgggcagagaatttagtgaaagtttgacagcagtggttcaggacatacttacaaatattttgggcagatgactatctgttagcttttacatccccagagccttccttaaattatggtttaagtaatagttcatggtttaattgtgatataatcttagtaggagtaataatatatctgttagggtataatgatgttatggtaatattaagaataaatgttcagaaaccaaccaraaaaaagacaannga

SEQ ID NO: 651 - DNA, 305 bp, Homo sapiens
ggcagaggctccaatgccactcctctacaatgatagccagccacactgggaattctgttccacagaatctcatggttatgtcactcaaatgcctcatccaaagtctggcccatagagggtacacaactattttcctttctgccaattgcttactgtcttcttgcggatttgaggactgtggcttgggtaagcacttggatggtacaccagttaagatgaggaactgaacaaccatgaagggaaaagaaggtgggctgcggagagttcagtcacctgagcagttgtctagaaaactagtttctagg

SEQ ID NO: 652 - DNA, 256 bp, Homo sapiens
  SITE (3): n equals a,t,g, or c
  SITE (16): n equals a,t,g, or c
aanttccagcctgggnaacactggaaagggtaggaagagtagtctttgggtccctaaagatcacctgataacaagtttgacttttctgagcactcttgtggagtttgttgtggagggaataccatgggcattggcaatgtaaagttgatctaaaaaatctcgttttccgccgtgcgcggtggctcacgcctctaatcccatcactttgggaggccgagacgggcggatcacggaggtcaggaggtcgagaccatca

SEQ ID NO: 653 - DNA, 437 bp, Homo sapiens
atttttaaaaagtgctcaaagcatctatttttcatagctgtgcaaaagtaaaagaaataatattcatttttcacttcatgcaagaacctcacttgcatgaggttctcggaaatagaaaatcataatcaggacaacttgtcacttcttcagatgttttatatagaatatcatttggcttctaaatctgtgattccttttttgtctgtggctccagattttcataatctrccactattaagcagaagtggtaatttatgaagaaatttgggtttgaaatgcttattattttcatgaagataaaaagtaaaataagaatgttaaccatttgagtcctgttgctgaagggcattgagaggagttgagccccatctctctctcccattgcagtagttcctcttaaagtctcccttaccatcttaaaaaaaaaaaaaaaaacc

SEQ ID NO: 654 - DNA, 552 bp, Homo sapiens
  SITE (26): n equals a,t,g, or c
  SITE (394): n equals a,t,g, or c
  SITE (467): n equals a,t,g, or c
  SITE (507): n equals a,t,g, or c
  SITE (545): n equals a,t,g, or c
ttgctcatcttcgccacacggtgggntcttatcacatgcttagtgcctgctcttttcctgcttgcgctcaaggcggtttcggaggggtagggtatgccgtttgtcccttgcaaatcccaggatgccctacatccagaaatctggccatgcaaggcaaagcccacattttktcaccagccagcctgggttcaaatgccgtttaagagctgtgatcgtctctgggtctcttcagcagtaaaatgggactgcaaacccagatcaccatgcacgtggtaaaatttgtaggagataagttatgtgaagctcggggctgaggccctgtgtagggcccagttcctagttcctaagacggcttcctcgagctgaaaggaaccagcccagtgtagtcttatgnataagagggtggggacccagtcttaagagcagaaccaagaatgagagctgagctacgtgcagagtgcagagtncctgctgtgagctctgccccaacccaggctggaaaagttnctgtctgcccttgggtggaaggttgcattagcagaagnagtatag

SEQ ID NO: 655 - DNA, 470 bp, Homo sapiens
  SITE (12): n equals a,t,g, or c
  SITE (37): n equals a,t,g, or c
  SITE (134): n equals a,t,g, or c
  SITE (440): n equals a,t,g, or c
cactgagagttncccatagaacagcaactcgggaaancccatgttggattgggaatagggtggccccaggcagccagtagttccagatagcctcttggcctacccatggtttttcctacatgtgcccgcttccnggatgtgcattcctaaacatttaaactctcaaagctaagatagtaactaccagagcactgtaataattaaccaactaacctccctgtcttcaaaaagatgctgtgagttagattcagtgattttgctgctgcttgtatttttgttttagcctgttttagtttttgtttcaaatcatgatgcttttattttttcatttttgatgtgtaagtttgcaattacgcctttttgggttgctgctgaaaccaagaattctaaaatgtcatgcacccaataagaaaaagtgaaaagaaatagctcacatgaanggattttctgaaaacagggacttgtattaa

SEQ ID NO: 656 - DNA, 98 bp, Homo sapiens
ggatattcagttttcccagcaccatttgttgaaaagactgtcctttcccctctaaatacttttggcacccttgctgaaaatcaattgaccatatacgg

SEQ ID NO: 657 - DNA, 228 bp, Homo sapiens
  SITE (13): n equals a,t,g, or c
  SITE (222): n equals a,t,g, or c
  SITE (224): n equals a,t,g, or c
gtcaaggtatatnttttttgctacttaaatattttacaaatgtcctatttttatgagtagatgaaatacacatgtgtcttgaacagtgtgattatttgactgctgaacaactcattaagctgccaggacagtgagagtctgctttgttaaaattcatgatagatgctcacaccgctaatcctagcactttgggagggtgaggaagaaggatcccttgagccnanggag

SEQ ID NO: 658 - DNA, 442 bp, Homo sapiens
  SITE (251): n equals a,t,g, or c
  SITE (276): n equals a,t,g, or c
  SITE (352): n equals a,t,g, or c
  SITE (436): n equals a,t,g, or c
gatcaaaggaaagaggcagaaattatagcagtaagtaacagtaattagatgtratcagatgataccaagatgttgtycattcatttacgccacaaacatatcccgagtsccctttttttsctaggcactgggaataaaatagcaaaccacatattcttctttctcttaagacactcataattaagtctagcaagacaggcactatgcagtgaatggtaagacacagtgggaaagcttgtgttctggagttncatcaagaaaataattttaaaaagngtttctatgttgcgttcttactataacacaggatcctgttggtcacattgtaaatgtaatcacaccttcacagcangacatctgcagtttgactttgccctatctttatttttattctcatttgtggaaagatagaggggacaaattccaagacagtcanttttgg

SEQ ID NO: 659 - DNA, 369 bp, Homo sapiens
gggtgataaaagaaaatcctcaaacattacgggagggagtgcggtcgaggctagagtcccgcccccgatcgagtcccgctgccctccgttctcaggcccctgctttagttgtttccgggccaccggggacagccatccttacaaggcgatgtgttcaccggtgtccttccccgccacacccacctctctgcgccgtgaattttgtcacttaagagtatagtttgcactccatccagcctgggcgactgagcgaggccctgtctctaaaagagtagagcttggggaaggttctgtgctggctcaatccatatcagaaagtttacccctcggccaggcacagtggatcacacctgtgaccctagcactgtg

SEQ ID NO: 660 - DNA, 443 bp, Homo sapiens
  SITE (406): n equals a,t,g, or c
attgccaatgataaaatttgaactttcaagcaaaaatgcaaattttggaaaatgtgttatttctgccactgagaacataacagcataccaacacttttagactttttacttttatattgtataatgaatgcatcaacatttggatgatctgtattacaggtgaaccaacattttccagtattagtggtggggaatgaccgtgtcwgaaggcttgaccaggatggggatagctcaaggaggcaggatggctcattgcttatgtcttcttcaggaacacaatgaagtaggttgagtttccaggatttggcccctgcattggggatggttggaggaaaggccaaaaacctaggttcttycagsccatgggctttaaaaaacgtggtactttttaaggaacagggttcanggcaggggtgtttttggggctagggttaaggaaaatg

SEQ ID NO: 661 - DNA, 289 bp, Homo sapiens
  SITE (280): n equals a,t,g, or c
  SITE (281): n equals a,t,g, or c
aattcggcagagatcacagttgtcacatcagcaggctagaaaagccatcccattcctgcggtaggcattctgtcaaagaaaaagaaatctgcaatgaattatcacatgaagtcaaacaaggaaaggaggcaaaaagcaagcagagccctcttcctgttttgtagactctgctggctacaatctaatagaatgcttgaatctggagtatttctggtgggcaaaactatagcaaccwttctgtctattaaaaagtcagtgtggttaaaaaaaaaaaaaaaannaaaggaaa

SEQ ID NO: 662 - DNA, 365 bp, Homo sapiens
  SITE (341): n equals a,t,g, or c
  SITE (348): n equals a,t,g, or c
catccgagcaatgctgccaaggggatgtttggtcttttaaattgtgatgacaaaataaacttttatgaaccctcttgctcaataaacacagcctggcattttaaatgttagcacatctcaattttgtgagagggtctgcctgagaggattgacttgaaactacacagcaaagaggaggtgctagtccacatttgcgtgttccatttgcatgagcaaaatggacctgcaagatggagctgcagcaagaggggaggcacatgtccaatagcaaggaagccatcaggatcctttattcttgaaggggtatgcaacagacttggaaggatctcatttttctttgntttaaangctttgggtaaaagtaa

SEQ ID NO: 663 - DNA, 357 bp, Homo sapiens
  SITE (331): n equals a,t,g, or c
  SITE (334): n equals a,t,g, or c
  SITE (353): n equals a,t,g, or c
aattcggcacgagtggaagaataattcacagtaatattaatcacatcagtaagtattgattaggcactttaacatcagttaatggccgggcgtggtggctcacctctgtaatctgagcactttgggaggccaaggtgggcagatcgcctgagctcaggagttcgagaccagcctgggtgacatggtgaaatcctgtctctacaaaaaaatacaaaaaattagccaggcatggtggcatgcacctgcggccccagcttacttgggaggcttgaggtgggaggatcacttgagcctgggaggtcaaggctgcagtgagctgagatcggaccantgntttccagccttggtgacanaggg

SEQ ID NO: 664 - DNA, 412 bp, Homo sapiens
  SITE (62): n equals a,t,g, or c
  SITE (371): n equals a,t,g, or c
  SITE (410): n equals a,t,g, or c
aattcggcacgagacgcagcaccatgcagctcagtcccaacctgtcgcaggacccggcgcgnctgcctagaggacccgaggcaggagttgggggcggggaggtggagctgcgccatccaggggctgccgagtggagggtcggaagtttccctctagggtctggatcaacaaagcacccgayttaatgcgmtgggrgagtgattcatgaaaagaaatttaaagctagccctgtktgcattatcagcccaaccctgcttttttttagtcctagttctttactaaaatctcctgcaaggctgagatttactataagtccagtgggttcctgtttagtccacagaaaagtggggccgggtggaagaattcaaggnccgcgagcagaagctttttttcccatttaagggtgtttnca

SEQ ID NO: 665 - DNA, 353 bp, Homo sapiens
  SITE (172): n equals a,t,g, or c
  SITE (310): n equals a,t,g, or c
  SITE (342): n equals a,t,g, or c
aattcggcacgagggatatggtatgagatgcacttgatttctggaatgtggctgacactgccacaagaaccttaataaaaccacaaacctaatggccaactaaaacgagaaagaaaaacatagggaggagacctgtgataatttggacatttggctgatttcagtgaaagantaaaatatgacccctaagagtgtccatttctcctaatcagcctgcagagctgctgaatatgtcttaaagaggcccattttggaaacctcttgaggtttccaataatccatggatttatcttcattggtcttgcacttntaaggacttccaaagggttttttttttttttngggggggaaaa

SEQ ID NO: 666 - DNA, 343 bp, Homo sapiens
  SITE (218): n equals a,t,g, or c
  SITE (301): n equals a,t,g, or c
  SITE (337): n equals a,t,g, or c
aattcggcacgagagaataccaagttaaacttcttaattagaatcaggaatcaggactctttggctgctgattgarggaagaactgtccttaaatccagagtgggccgggcatggtggctcatgcctgtaatcctagcactttgggaggccaaggcagatggatcacctgaggtcaggagttcaagagcagcatgaccaacatggtgaaccccatctntactgaaaatacaaaaattagccgggcgtggtggtgtgtgcctatagtcccagatacttcggaggcttgagataggagaattncttgaacctgggaggtggaggttatgtgagccaagnttaagg

SEQ ID NO: 667 - DNA, 358 bp, Homo sapiens
  SITE (54): n equals a,t,g, or c
  SITE (357): n equals a,t,g, or c
aattcggcacgagaaagaatctaagctggtcatcaggtgaccaaggttttggtnaggactcgtctacttgcttggtggttgatttcagggaagtaacctacattatctgttactgtttggtcttctcagtggaaagttctctcatcacattaggctcttaatatgacaaaaagaaacttaggaaagcagtttttaaaaagcaaagtttattcttgttttgtttctgtttggctgcttatcatacagcagaacagactactgaaaactggacattcaaagcctgaatttcaagacctcacacttgacacttccatggaagcaggcaaagrctcaggtgcaggcaagggaagggggttnc

SEQ ID NO: 668 - DNA, 240 bp, Homo sapiens
  SITE (234): n equals a,t,g, or c
aattcggcacgaggagtctctgagcaagttaatctccctatgatgcctcatctaccacatataaagcttggctgaaaatgtaataatctctatggtctttttcagctctaataccacatgtgactctagactgtgccactaagtgaatcttgctgtacctaagtgggtggcttagagctaagaggctcttgactggagagcaggcgtgacctgagccactgatctctgccctcnamatta

SEQ ID NO: 669 - DNA, 370 bp, Homo sapiens
  SITE (204): n equals a,t,g, or c
  SITE (306): n equals a,t,g, or c
  SITE (320): n equals a,t,g, or c
aattcggcagagccactacataatatttcaacaagggctccagcttgagtctgactatttgtaaccttaagacacattggcttggatgggtgcaaaggacacaaggrtttgcaatwggaccaagwaacatctagggtcagactcagtttaaggcagctgctcccaagcctggcagcacgttaacatcactgaggccatctaggncccactccagagcaattaaatcagaatttctggaggtgaagtgcagacaccggtattttcttttaaagtatcctaggggaccttaatgtgccagtggggttnagaaccacttaggntaagggaaacagaacttcaaggtgggacattttgggtcccaagggcagtt

SEQ ID NO: 670 - DNA, 319 bp, Homo sapiens
  SITE (201): n equals a,t,g, or c
tcaggacatccatcgggtggaaactgctgcactcccccacccgttcaggccactggagtgtcaccaaaccaccagggctgcccctgctggagtagctcacctgggtaactctgaggacaagmccccttggagactcttctcaggagggaggtggcattttccaagaaagggttcaacacagacctctgagtcagaggaccngttaaagagaaaattattctgrctttattcaggaatgttgctgtaggggtcgtggttattgccatgcggggggttgcccttgaggcagctgggagtggctcacggctgtaagtcccag

SEQ ID NO: 671 - DNA, 377 bp, Homo sapiens
  SITE (358): n equals a,t,g, or c
aggtcaagtatgctactaatgctttgcacggactttattcctttttttctttaggaaaataagttttgattcaaaatggaaagccaaacatacatttsctccaccaaccttagcaattggaaggggaccatttctcctcccctcttacaatgatagtgtatacgtttaggaggaaaagaccagaaaaagacatttctggtggcagtaggaaggaaatgaragacaaataaacatcttgactaaaaaggtaaaagagtatacccaatggcytaattcagaggacattaaagaggagtggagttatctccagtagcatggaagaggaaggaggaaagcattcttccattgggcagaattnggttggggttttcttttct

SEQ ID NO: 672 - DNA, 277 bp, Homo sapiens
  SITE (152): n equals a,t,g, or c
  SITE (233): n equals a,t,g, or c
aattcggcacgagccctcctcggcctcccagagtgctgggattacaggcgtgacactgtgcccggccccaggtcaattttrattgatttttcccatctctccatatgggtcataatgtcctgcctsttttcatgcctgtttttttgtttttngtttttcccggatattcaatattttgtattctaccttgtttggtgctggatatttttgtaaacctatacatatctttgcanttgtttctcgaatgtgatcaagttacttgggaaaaaaaaaaaaa

SEQ ID NO: 673 - DNA, 307 bp, Homo sapiens
atctttagtatattgagcctttgaatccatgaacatggtggtacatcttttaggtctatgatttctttcatcagcattttatagttttcaccatataaaatctgtgtgtattttgttaagtgtacacttatttaagtatttcactttctttggagtgattgtaaaatatattgtttgtttaatttcagttttcacatatttattgcaactgaccagaaaatgaaaggggattgtctttttgtgtgttggacattatttccccaagaccttgctcaacttatttgggkatttgcttttgagtgtgttg

SEQ ID NO: 674 - DNA, 401 bp, Homo sapiens
  SITE (363): n equals a,t,g, or c
  SITE (381): n equals a,t,g, or c
  SITE (398): n equals a,t,g, or c
aattcggcacaggkagtttgagttttaggcacatcctttatggaatataaacaggaacctaaaagttcattctgaacataggttgtttctttctgccaaaacaagattaatagtcagtaccctaacgacaaggtcctatcactgaagtagattatcggctagtcaaatgggttcctaacagcacctccctcatgggttaaaacaagagggttaatgtgatgtgtatttgcttaatttgggttgttatacagtaaacacacagcaaacgttagctattgttatcttcatttcctttggggaagttatcttatttctcaccykatttaaaaataaaccctaacttcaacaggggccctccttacnttggtccttttcaccctngatacccttataacctntat

SEQ ID NO: 675 - DNA, 466 bp, Homo sapiens
  SITE (463): n equals a,t,g, or c
aattcggcacgagggaaaatcaggttgaccacaacttctgtagttcttgagggaagaagggaagtataatgatgttggaagtcaaaatattgacattaagatagccaagtggagttttattatgtatgtatgcatgtagacatgattgaaatgtatattacaagctcatatgacatacctttataatagagaggtacctgtggattctaccttacttttgttagtgttttcactgtttcatgtgagttttacaatgaacctgtgagatttgcagagttaagagttatatacccgtctatggtagaaaacacaggttcattcagaggagtaaaagtggcttgcttggagatctgtgtccagtgggtagtcttcttgactagtgtttcacagagttgttttgcccwagaaagttagagcctgggccagmcggggttggtcaggctgtaaatccccagcacttttnggg

SEQ ID NO: 676 - DNA, 403 bp, Homo sapiens
  SITE (56): n equals a,t,g, or c
  SITE (244): n equals a,t,g, or c
  SITE (403): n equals a,t,g, or c
aattcggcacgacctgaaaactaaatgggattactaccaaaatagatacacatgtncaacattccaaccattttcctatggaaaaaccagtgttgaaacatacagtgtgttttcagttgactgagataaaatagcctgagggaatgtcatttgtacatggatcaagtttcaaaatactacttgcaactttctctctcttgagaagcagcaccccccacttcactgctgcttaaccatttttttnctaatgcagttttccttaacaacagagggaaggaaaactctgtagccctagggatctgaggaacatcatcaaagtggtctattcttaaagtggaaagtttttatttaatatttgtgtttcatgtatatataattagggacatatttataggattaggtn

SEQ ID NO: 677 - DNA, 325 bp, Homo sapiens
  SITE (125): n equals a,t,g, or c
aggctattttgaatgacagaaaagaatgacacttcttgttgtggagacctcttcacacgaaatggagttatgaaatgcctgggaaagaggttgcagcacagaatatatttgggagtgaactaggnaagaaggcaaattgaggctaggccatgaagaactattaagaaatttagtagttttttcattgtagaatatttacttttaaaaagcaaaaaargaaattaaaatgactcataataccactactcacggataatcactgttaacatgtgcagtgtcatccmtccagttctttatacacactcacacaagcaccaaggaatgg

SEQ ID NO: 678 - DNA, 648 bp, Homo sapiens
  SITE (533): n equals a,t,g, or c
  SITE (568): n equals a,t,g, or c
  SITE (596): n equals a,t,g, or c
  SITE (619): n equals a,t,g, or c
  SITE (642): n equals a,t,g, or c
  SITE (643): n equals a,t,g, or c
taattcggcacaggaaccactgttccttacaggtaagccagcatgatagttagaccaaaccatcccaatagagacttggcatgcattcaacaaacatcccaggtgcctagggtgtgcccagcaccattccaggagctgccagtaaaggaaacaagactgctgtgtggccaggtgcggtggctcacatctgtaatctcagcactttggaatgccgaagtgagtggatcacctgaggtcaggagttcaagaccagcctggccaacatggtgaaaccccatctctactaaaaaaaaaaaaactcgagggggggcccggtacccaattcgccctatagtgagtcgtattacaattcactggccgtcgttttacaacgtcgtgactgggaaaaccctggcgttacccaacttaatcgccttgcagcacatccccctttcgccagctggcgtaatagcgaagaggcccgaccgatcgcccttcccaacagttgcgcaacctgaatggcgaatggcaaattgtaagcgttaatattttgntaaaattcgcgttaaaatttttggtaaatcagctnattttttaaccaataggccgaaatcggnaaaatccctttataaatcaaaangaatagaccgagatagggttgannggttg

SEQ ID NO: 679 - DNA, 324 bp, Homo sapiens
  SITE (2): n equals a,t,g, or c
  SITE (316): n equals a,t,g, or c
tnttttctaaaggcctgacactgattggtacatggagtacagcctgaagggaacaagacttgttagaaaggaagctattgactgggtgtggtggctcgtgcctatgaatcccagcactttgggaggctgaggtgggcagattacttgaggccaggagttcgagatcagcctggccaacacggtgaaccccgtctctactaaaaatacaaaaattagcaggttgtggtggtgagcacctataatcccagctgcttgggaggctgaggcaggacaattgcttgaacctggggaggytgaggttgcagttagcccagantggggcat

SEQ ID NO: 680 - DNA, 316 bp, Homo sapiens
agagaaaaccaagctttaaataaatgacaaagattattttaaaattaatttggaaggaaaaatatgcgagattgctaatctttttttaagttgaatgagaggagactttcttcaccagatattaaaactgaccataaagctataataatcaaaatggcatggcattgccacagagttaaatcagtgaaaaattattgaaaatctaggaaaacattaccagtatatgtgggaaagttagcacttgctaaaaatggcattttaattgagtaaaagaaggctcctaataggcagagttgctatctggttgggaaaaatt

SEQ ID NO: 681 - DNA, 550 bp, Homo sapiens
  SITE (110): n equals a,t,g, or c
  SITE (529): n equals a,t,g, or c
agccccagtgggcctgtttccattccaagcctgccccccactatttcttcttccgaggtaccagggtttgaccaacatagctacccttttagttgccatcatccattgtntcttctctgcctctggaatatgaaatgtagttcagtatctctgcccctacccccatctytgaagcaagcatgtcrctcttttttgagattatctgaaraattttgctgcagtagccagagggaaaccgggtaaaattttccctatagggaacatgggttaaaagtctsacaagcctcatctgctggtgtttcttggaatgcagagtttggcgtggctttctcagcttcctaagtgcatgttcawccttytagaaagctctttctcctcttggttccctgaaatggtgctctagacccactttccctcagggactgagcctctaacttaattttcctcagtccctttccctacagggaggagacacaggtcacattaaggaattcatactggccaggttcggtggcttcacacctgttantcccagcatttggggaggcca

SEQ ID NO: 682 - DNA, 339 bp, Homo sapiens
  SITE (338): n equals a,t,g, or c
aattcggcagaggaagaaaaaaagaatgaatcaactcttaatgactgsctcctactgctgagctctctggactagtcacttcatttatattttctcattttctttattccttactatatttctctkaagtgtcattcccatttcatagttgaggaagctgggactcaggaggattaataacttgtccagcgttacaaagtgagtttaggagccacaattcagattcagatttattgactccaaaatttttgcaggttttaccatagcatgttgcttcagaaattaaacagacctggctgcaaaccccagacccaattactctgtggccttttaaacang

SEQ ID NO: 683 - DNA, 305 bp, Homo sapiens
aggattaaaggctggaaggcactggatgcctgatgatgaagtggactttcaaactggggcactactgaaacgatgggatggccagagacacaggagatcagttggagcaagctcaataacaaagtgrttcaacgaggacttgggaattgcatggagctggagctgaagtttagcccaattgtttactagttgagtgaatgtggatgattggatgatcatttctcatctctgagcctcaggttccccatccatgaaaatggggttacacagtatggatctattaaagtggggattattagttatgg

SEQ ID NO: 684 - DNA, 357 bp, Homo sapiens
  SITE (323): n equals a,t,g, or c
  SITE (335): n equals a,t,g, or c
aattcggcacgagcttatctcaaaatgtctaaagcaaattttccacagttatcaatcctattttaatatgtaaaactttctgaaaataaatttcaaagaggggactgtgggaaaccaaaatatgccatccaaagcgtgcctctttggcatattttgagatggctattcagagggtctgcagacacaaagcatggctctgaaaatttatccttttgtaaaataaatttacatgtatatattaataaagcaaacaagggatgcaggcagacggtttctctgaggtccttttatttgaatctaggaaaggttaactcacaggaaangaagacttaagncaggtttgacacttttaaaggt

SEQ ID NO: 685 - DNA, 695 bp, Homo sapiens
ttcggcacgagagaaaagtaaaaaaaagaaagaaagaaagaaacaaacaaacaaaacaactggcatacatatatctcctaaatacaggaagaagtattcataatctcactctttagcatggtacaaagctaaccacaactaaattattgtatataaagccacgtgaagtggtgtgtgacagccttattttgtgaatagggctgagaaaaccagttcaaattctcctgagactatttcagaggagttaaatttgaactcgtttaaaaatcatgatttatttacttaatattaagtttagattaacggacagaaaaagaggagcctggggcatcaccaaaatatagcaatttttaaaacagtatacaaataaacatgttgtatagtcacttaagatcagagggcccaagagagacccttgatggtgacttctattgggaggactatgaccaaatataacagcttgcttgacacaaaatcacctacagttagaattttgctccattacttgggtgkctctctttacaaatcacttaaaatttaacaaaccaaaggagactgtagaaccatgacataaaggaacataggttcagcagaataaagcaacagccttctcatgcatcccataggtatctttcatcaagactactgaaaaaaggtttcatggggtactctcttttttcaatacgcagactctt

SEQ ID NO: 686 - DNA, 590 bp, Homo sapiens
  SITE (556): n equals a,t,g, or c
  SITE (583): n equals a,t,g, or c
  SITE (584): n equals a,t,g, or c
  SITE (586): n equals a,t,g, or c
aattcggcacgagtttgcatccaaattgtttgacctttgtgcagtggctcccattatcaactggggaaccagtacaatctttacctagttactactgaggttgttctctctccatcacaaaatttcatgctatttatctgtgagaaaatgcctgaggactttcacacagtaattcatcttatctggaacccttaggatcagatgtagaccgagcaaatgtcaagttcacagagaacacctgtgtcttcagaacattaaagggcaccattagagcttgtttcccttcacttwacatgcacatttttggcataagttggggctgaatgatgttgtcatagcaaatactgctagaatgattgctgtactcattacactaccaaaaaaaagagagagatgaatgggtgtggagtgtcactaaccctyctcatgatcagcacatggagaggacaggacagggtgacattctgaggaactggtaacccccagacagctaatatgctttatgacagattgggtgggttggctatctccaaacttctaagacctagaaattcanaatgagggcataggaatcaaataatcnngnacgg

SEQ ID NO: 687 - DNA, 324 bp, Homo sapiens
  SITE (318): n equals a,t,g, or c
aattcggcacgaggaacctcccagggaagatgaggagaggcagagaataacattaattctaaccaaaacccgtatatgttggaggaatgaacagatcccttttatagaacttgaaaatgagcctccaggaggttaaataagctgcttacagtttcacagctagaaacaggagaggcagaattcaaaagcacatctttctcattccaaagctcatgctctctgaggcatactccatggcgggtggtgcactgtgagcaggaagggagtgcccttttccatctatctccctttttcttttatctcttctcaagagggtgntagggg

SEQ ID NO: 688 - DNA, 369 bp, Homo sapiens
  SITE (354): n equals a,t,g, or c
  SITE (355): n equals a,t,g, or c
agggacactaaagtgagctttaatatttaatctaaaaaagataggaatgtgtatttctttatattagatgcaatcaaaagtttaaagaacctgaagcaaatgtgtagtaggcttataactggactacgtaccttaactactacttaggaaaactaaagcctaatttaattaagtaagctactaaggatctgtttaaaaaattcaaaatttaaatccaaacccaggtctgactaatttaaaagtttgcattcttaagcgtgacacactctccttctgtgtgaggagagttgaaagtatagrtatttgtagrtatagggtattttatggacmgggactttgraggggccataattnnggggttaagggaaa

SEQ ID NO: 689 - DNA, 207 bp, Homo sapiens
  SITE (184): n equals a,t,g, or c
agaaaagatctaccctagcctgatgctgctggggctggcaaagttatgtgaagctcagaagttgagaccaagcctccatctcctctactttaagtggaaagttaacacagtctgggaagagtcagccaggagtatcagcccgtttgtkttaattggcttttattttttcttgctgaaaacaggngtgaattacactcttcactgaat

SEQ ID NO: 690 - DNA, 281 bp, Homo sapiens
  SITE (84): n equals a,t,g, or c
  SITE (265): n equals a,t,g, or c
tcaatgattccaaaaaatcgatacagtttcaaattttaatttagatgtaattgtgatcatcactgtatttatatatccaagtgnctacattttaagttgtagacaattgttatttagaggtatgaagaaaaagagggagctggtgggaagtttgctagcataggagaaagtaaaaagaagcttcaattttatgaatgaatgraattaaaagtcttaaaaaatcttagaggttatttagtatagtactttatttttttccttaagnaacaatcaaggcatgt

SEQ ID NO: 691 - DNA, 373 bp, Homo sapiens
  SITE (310): n equals a,t,g, or c
  SITE (314): n equals a,t,g, or c
  SITE (369): n equals a,t,g, or c
aattcggcagaggttggatggtggtgttctgggtctcattcctggaggcccagcttacagcttgctcttgcaaccctttcgataaatttataagcactcagattctctgaataaggtctcttttaaattaaataatgagagtattttatggctcctgtgaactgacccttacctgatacacttccagtcacagtcagaatcaatctaaagtccttaccaagcccttaccagcccgggaaccatccagccttagccactttcttactgtctctttcactgactctgcttaagttacatgtcacttttgcantttngttcttccctgaacacaataagttgccttaacttaggggtctggggaccgctgtnctta

SEQ ID NO: 692 - DNA, 324 bp, Homo sapiens
  SITE (193): n equals a,t,g, or c
  SITE (318): n equals a,t,g, or c
aattcggcagaggcagaaaactaaacatttgataattatggcaggaaatatggaaggawttaaaaagcatgagggagaagaaatggaatgcacattacaaaagaaatagctccctggtgggtggtttatgctccctgtttgmattttttccttcatattacagtttaaccacacccttagcatcgcagcttgnactctgcccaaaaaagtcataaatgcatacaaggtcttcacaatttttaaaaaatacgcattgtactgaattctcatttaattcactactacgttgttgattgaggtggaaactccaatcactgntttttt

SEQ ID NO: 693 - DNA, 359 bp, Homo sapiens
  SITE (342): n equals a,t,g, or c
  SITE (352): n equals a,t,g, or c
  SITE (358): n equals a,t,g, or c
aattcggcagagcagaacattggtatgcggcacatgactgtagatcttctcattaataataggcaacctggtcaggtgcacgaagtctagggttcagaatccaacaggctcaaattcaagtccagctcagccacgtggctgagtgctgtctgaacctcagcgtcctcagctgttaaacagaggtaaccatccccatctcagcagctttgggaggaaattaaatgagatatattgggatccagataaccaataaaatatcaaatcactttaccagttcaagctcttaccactcagtgattgcatggrcttatcactgacgratgaactcaggrrttcagragntygagaccancctggnc

SEQ ID NO: 694 - DNA, 371 bp, Homo sapiens
  SITE (312): n equals a,t,g, or c
gaattcggcacgagtcacagcaggaggtgaggagtgggtgagtgagcaaagcttcatctgtatttacagccgctccccattgctcgcattaccccgagttccgcctcctgtcagattagcagcagcattcgattttcataggaacacgaaccctattgtgaactctgcatgcaagggrtctaggctgtgcactccttatgagaatctaatgcccgatgatctgcggtggagctgaggcggtgatgctggcactggagcacggctgcaaatacagataagcattagcagagaggttttactgcacagagaccntagtaagtcmakttgtttgcagacttcatatcaaaaccatatctgtgagtggcgggttg

SEQ ID NO: 695 - DNA, 379 bp, Homo sapiens
  SITE (155): n equals a,t,g, or c
  SITE (156): n equals a,t,g, or c
  SITE (339): n equals a,t,g, or c
caaattctggtgataaatattataatttagtctgaccttggcctgaggtttataaagaaatactgttaaacattgctttctgttcaggtaaatatatacacagaaatagaatagtatactctcctgcaaaagaatgttatttactttcattttgnnggatgttgtcttaagcctgtttttctgaactccacttaatgacccacactgatgctctggtttgacaaacaaaatcttcagatttgatgattttgttaatttctagagcaggctcaggtgaaaatatcagccagtgattctgaggtgttgcattcctatttttaaagcagtcattaggtaggnctgttgtaggcaatggaaaacacattttttccttattaag

SEQ ID NO: 696 - DNA, 371 bp, Homo sapiens
  SITE (343): n equals a,t,g, or c
  SITE (345): n equals a,t,g, or c
gaattcggcacgagtatatgaacatcacacacataaaccatatatgcagacaggcagaagaagatccmstaattgtaagatttttacttgccaatctcttaattgaattattggcctcatggtgaagcctttcaagaaataggactaggaaaacattcagtttttagggtttaataatcaggtatagctgggargacaaaaacagatttttagagggrtctatccacttttaattcttggggttccatgaggaaaacagatatttttttccmaaattgggkatgtggtgccttctttgtttctcccaaggagtycccargctatcagaagtttaccttagggncntctcgtgtggtgccattaaaagtgga

SEQ ID NO: 697 - DNA, 694 bp, Homo sapiens
ttcggcacgaggcattttgtatttctgctgcacgcccagtaaaggagaataatgtgtgttgcccaaggggagatggccatattgttttctccttgccccatttgtgtatccggtggtacataaaaaaagaaggacccagagattttactgcttcctttggagccaactcctaactcttctttagagaggaacagggggactccactcattcccatcccctctttcacaaaccaacaggaacttcatgcagtaatgactggcaggaaggaactaaaagcctgtccgatgatcctttccctggtgtggttgcttgaatccaactttagtcttggtcctgagagaatgattcatatatgattaatgggccaggcatggtgcctcatgcctgtaatcccagcactttgggaggccaaggcgggcggatcacctgaagtcaggagttcaagaccagcctggtcaacatggcaaaaccccatttctactaaaaaatatgaaaagtagccaggtgtggtggtgcatgcctgtaatcccagctacttgggagactgaggcagaagaatcgcttgtacttgggaggtggaggttccggtgagcggagatcgtgccactgtactccagcctgggtgatagagagagactccgtcttaaaaaaaaaaaaaaaaaaaaaaaaaaaaaaaaaaaaaaaaaactcgag

SEQ ID NO: 698 - DNA, 655 bp, Homo sapiens
gtccagaaaccacagaatccttataagccaaagtgggtgaagatgaggtatggagcatggtatttgaaccccaagttgtggaaaaagcaaagagtagacgagcctctggttgaccctgaggtctcacataaggctcaagaggagaattttaaaaaggagctgcaggaacaggaggagttacttgcagaccttcacggaacagttgcctttaaggatttcattctaagcaggggctacaggatgccacgtttccttgagaatatgtatatcgggaaggaatgtaaaccgtgcatgtaataagactcctataaaacgaactcaagcatagaagaatcgtaggagaatgattaggcagattttattactacgtacttggctatttctctgtctccttttaaagattaaacagagtttatgatgagtgtcccactgtggatgttcaactttgacttggcaacatctgtaaatgtaatacctgatggttataagcatttctcaatggatttctgcttcagttaatcaacattttgtatactttatcacccatgagatcaatattcacatgtaatcttctcatatttttgtggcacgtgaatattatataggtatatcaactattggtaaaaataaataaaggcataawtaaaaacagaaa

SEQ ID NO: 699 - DNA, 342 bp, Homo sapiens
  SITE (67): n equals a,t,g, or c
aattcggcacgagtatgaatgtaaaatgtggaaagctatttatgctttcctttaacccttattttantttttcctgttgtgtttgggttaaatgtaaattgtattcatttgttgattttaatatgtgtgacccacacagaaataattttatttattgaacctcctgtgggaagatgcttaatagtttataaatataaaattgtccccaacacttaacagatgatgctaaaagatttatagtttatccatggatgttcagttttgttttttccattaagttatcatggttcaaattatccattaccaaaaacgtcatgaggaaagatgcatgaggtccaacaa

SEQ ID NO: 700 - DNA, 400 bp, Homo sapiens
  SITE (359): n equals a,t,g, or c
  SITE (366): n equals a,t,g, or c
  SITE (398): n equals a,t,g, or c
aattcggcacgagaagaaagaaagaatgaaagaaagaaaagaaaagaaagaaaggaaagaaaaaggaaagaaagaaaggaaagaaaggaaagaaagaaagagagagaaagaaagaaggaaaaggaggaagggaattccaggtatataccactgcatgagtaaaggcagggttgtggatagacatagttgatttgtagggcccttgtttgccaagaatagtcctgctttacccctgttgtcctgatgtaattattaataatactgcctcattcagtcttaaataagtcttggrtttggactagaaattatatggctaccyctttatgtgggactaaaagtaattccttgrgacmgggacntggagtnaggtgcccaaggaaagctagaaggtagttttntc

SEQ ID NO: 701 - DNA, 309 bp, Homo sapiens
  SITE (165): n equals a,t,g, or c
  SITE (166): n equals a,t,g, or c
aattcggcacgaggaacatatactcagtgaaatcacattatgagacaagagcggaagactttgttcttcatttcacattttctaaatgagctactttgcaaactgatcactagaaccatatacattaacaggatttcttgacaggaatttattcaaattctagtnngaagcaaaagggaggtatcgtgcacatttaactggttgtctactgttgagttcaaacataaccatggtcaaattattcagatgttagaaattcagcaagcttcttggtacctaagrttaaggaatcaagcatcagcagaaatt

SEQ ID NO: 702 - DNA, 227 bp, Homo sapiens
  SITE (226): n equals a,t,g, or c
gctcgtgccgctcgtgccgaattcggcacgagttcctgatagaacagactttacttttctagcccagcattgatctagaagcagaggaatcccagcgccttttaaaagttgttatgtggttttcttttaaaaagctcctgtttttggaaagtagaatttatgggtacaacgtatgttcattatttgtacataaaataaaaccatttaaaaagtaaaaaaaaaaaana

SEQ ID NO: 703 - DNA, 116 bp, Homo sapiens
  SITE (107): n equals a,t,g, or c
gcccacctcacattttattctttggagattttttttgacttggattaaaaaactttatatttaaaaaaaaaaaaaaaaaactcgagggggggcccggtacccaattngccctatag

SEQ ID NO: 704 - DNA, 396 bp, Homo sapiens
  SITE (178): n equals a,t,g, or c
  SITE (345): n equals a,t,g, or c
  SITE (370): n equals a,t,g, or c
ggcacgaggggattagaacccagatccccagcccaagttcaaacttgtcccctctccaggttacaactccaaaaaatggggctgtgacccagaaaactctgtgccagcaatctctgtctgtccccttcttcactctcacctagtttccacggggctcaggtgtctcctgttgggccancaggctggcctggcactcagccacctaggaccccatgtatcctggcattctaggcctggggtgatgcagacagatttcctcagcctccgcttcttctgccttgaaaaaatcagtccttcctgtgatccccggggacctggcttggggctgcgtgtgtgcgtgcctgngtgtgtactcaaaattgggcctggnaaggaagccggaaggttaagaaatgc

SEQ ID NO: 705 - DNA, 427 bp, Homo sapiens
  SITE (298): n equals a,t,g, or c
  SITE (376): n equals a,t,g, or c
  SITE (392): n equals a,t,g, or c
  SITE (394): n equals a,t,g, or c
ctcgtgccgcgaaggccttcgccatagcgtgagtgggccttacccagtcgaaggcctttgccacagcgtgggtgggccttacccaatcagtcgaaagctttttgccacagcgtgggtgggccttacgcaatcagttgaaggctttttgccacagcgtgggtgggccttacccagtcaaaggcctttgccacagcgtgggtgggccttacccaatcagtcaaargcctttgacacagcgtgggtggggccttgcccaatcagtcgaagtccttcgacacagcgtgggttgggccttaanccaatcagtcgaaaggccaccaaagagcagaaaatctaaaaactcttaaaggaagagaaggattttgacccagaatgnagactcaagctgcagnancaagtcctgctggggaatttccagcctgctgga

SEQ ID NO: 706 - DNA, 438 bp, Homo sapiens
  SITE (295): n equals a,t,g, or c
  SITE (435): n equals a,t,g, or c
tttaaaactagtctaggaaacactttaatttctgtgagcaaaactgtatcttatctctgccttagttaaagatacaaattgtactttttaatatttatttgttaaattctctattaccaaggtgtatcggagatctacatgaatctctcaataaataattggtacattttatttatatgcataaaaattaggagtctcctccatccccagcatcatattccatacccacaaaacaatggtgaataagtcataatccccatttaacaattttctctatgtattgattcctgctatntgcatgatactgaggggagcacttcatagaagacaataaggcttttgagcaccttctgtcttctggggccagttgtaattccatttcaccattatcccataataacctggcaagaaggtggtattaattatataaggtgnggt

SEQ ID NO: 707 - DNA, 61 bp, Homo sapiens
ccagtacccacttccccctctttctcccttccccttctccccactctcttttttttttttt

SEQ ID NO: 708 - DNA, 464 bp, Homo sapiens
  SITE (427): n equals a,t,g, or c
  SITE (440): n equals a,t,g, or c
  SITE (453): n equals a,t,g, or c
cgggacccggacggaggtagaggccagggcagcgcgtccgggagcggagtccgcgcccgccgccgccatgccggacagctgggacaaggatgtgtaccctgagcccccgcgccgcacgccggtgcagcccaatcccatcgtctacatgatgaaagcgttcgacctcatcgtggammgacccgtgaccctcgtgagagaatttatagagcggcagcacgcaaagaacaggtttactactaccaccggcagtaccgccgcgtgccagacatcactgagtgcaaggargaggacatcatgtgcatcaaaktcgaccaagaaattatcaacattatgcaggatcggytcaaagcytktcagcagagggaaggacagaactaccagcagactgtatcaaggaaktggagcagttacccaggtggccaaggcntaccagggaccgntatcaggacctgngggcctacatg

SEQ ID NO: 709 - DNA, 225 bp, Homo sapiens
  SITE (187): n equals a,t,g, or c
  SITE (212): n equals a,t,g, or c
tctcagcctatttagaagtatcccatagtttaaaaatccaggaatctctgaattcctggctaactcctgagtaaaatcaacctatctaccaggaaaagcactagaaggcaccgtgccccttcatgggcgartgacttgagggaatacgtgggtaaaagggaaggtgccataagttaacttctttggncagcactccagactgagcatcgagnctccttattccca

SEQ ID NO: 710 - DNA, 610 bp, Homo sapiens
  SITE (391): n equals a,t,g, or c
  SITE (606): n equals a,t,g, or c
ctggaccgaaaccggcgcggagcaactgaggcccgagccttctcgggacccgggggacgcctaaccccgcgagatgaggaaactgaggccgcgagagcgcgcatacagcagagaagcagcagaatcgggaatcaaacccagctctgtctgaccccagagcctgtgcctttaaccactggctaggctgaactgcctttgttcttcactgtccccatcacctctttcaaacctcagcctctccttcctcatcgttacatctctaggctgcacctgctctctaaacattcacacaaaccctgcaaattttcttcctcataattgggagaagactcactggccgaatggcagcagtagatgacttgcaatttgaagaatttggcaatgcagccanttctctgacagcaaacccagatgccaccacagtaaacattgargatcctggtgaaaccccaaaacatcaagccaggatccccaagaggctcaaggaagagaagaagatgatgagttactgggaaatgatgactcttacaaaactgagttacttgctggacagaagaaaagcttccccttctggacatttgaatactaccaaacattctttgatgnggca

SEQ ID NO: 711 - DNA, 314 bp, Homo sapiens
  SITE (294): n equals a,t,g, or c
  SITE (301): n equals a,t,g, or c
  SITE (311): n equals a,t,g, or c
ttttcttcctttcctttttacaaaaatatcctcatttcttctcttgtctttttgtctttttttctccacaattctacaaactttcttcttttccattttcctcttttactgtcttcttatttcttcttcattttttattccttcacttctttgtctgccccttattttcttcttcaatatcataggttttgcacaaattttttcaacatctattcacctattcttttatattgctagtgtaaaatttttaatatgtctgaagcaaatttcactgtgcataattaatcaataatntactcancatttcattnaat

SEQ ID NO: 712 - DNA, 425 bp, Homo sapiens
  SITE (390): n equals a,t,g, or c
  SITE (420): n equals a,t,g, or c
  SITE (424): n equals a,t,g, or c
ggaacgggagatgttgcaggcgccgagagggcgggccagggccgcactccggagactcgcggttgctacgcgcaccatggctggaggctccctggcattgggcagtgttacagtgcactcttctgaacctgaagtcagaattcctgagaataatcctgtgaagttgtcctgtgcctactcgggcttttcttctccccgtgtggagtggaagtttgaccaaggagacaccaccagactcgtttgctataataacaagatcacagcttcctatgaggaccgggtgaccttcttgccaactggtatcaccttcaagtccgtgacacgggaagacactgggacatacacttgtatggtctctgaggaaggcggcaacagctatggggagtccangtcaagctcatcgtgcttgtgcctccatcnaggnt

SEQ ID NO: 713 - DNA, 468 bp, Homo sapiens
  SITE (403): n equals a,t,g, or c
  SITE (430): n equals a,t,g, or c
aagaaggggcacctgctgcggctgcctgcggcattcaggaaagcagcttcccagaactcgagcctgtgggcccagctcagttccacacagaccagtgattccacggatgccgccgytgccaaaacccagttcctccagaacatgcagacagcttcaggcgggccccagcccaggctcagtgctgtggaggtggaggcggaggcggggcgcctgcggaaggcctgctcgctgctgagactgcgcatgagggaggagctctcrgcagcccccatggactggatgcaggagtaccgctgcctgctcacgctggaggggctgcaggccatggtgggccagtgtctgcacaggctgcaggagctgcgtgcacgatggcgggaacagccacaaagaccatgtcctgtgngggaggccccccgggagcctcgccgtnctgttgggggtaaaacggacctggcatgggacccccat

SEQ ID NO: 714 - DNA, 440 bp, Homo sapiens
  SITE (259): n equals a,t,g, or c
gttgaccagcgcaaataacccgatgaaaaatttgaagtaaacgggaaaatcaaaaaaggtctgaatcacggttagctccgaagcaaaagccggataatgttagccataaataaggttgaaaagacgcgctgacaatacgccttttgacagcatttttcacctcctaactacttaaaattgctatcattcgttattgttatctagttgtgcaaaacatgctaatgtagccaccaaatcatactacaatttattaactgtnagctataatggcgaaaagcgatgctgaaaggtgtcagctttgcaaaaatttgatttggatcacgtaatcagtacccagaagtgagtaatcttgcttacgccacctggaagtgacgcattagagataataactctaatgtgtaaaccttttagtaaatcacagtgagtgtgagcgcgagggg

SEQ ID NO: 715 - DNA, 435 bp, Homo sapiens
  SITE (369): n equals a,t,g, or c
  SITE (389): n equals a,t,g, or c
ctgcaatgtccctggaattctgaaggctgggagcagagggagcaaaaagtgatgcctggagagtttagtttgaagaacagagcatcagaktgggggaatgagaactgtctgcaatcacggctgagttgatgacctgggattagaatcctgggatttctcctctctgggctcagtgtccctawtaggttgtgcaaaagtaattgtggttttggcattaaaagcaataacaaaaactgcaattacttctgcaccaacataatagatgaagagcagtgtggatttgatgatctgtcttaaaaggcctacctagcttattccagccaggctgtatagactccagccatcccctatccagacctgctggtggtnggggttggaaggttgggatngggaatcggtcccactgcacctgctaactttatgggcatgttgcat

SEQ ID NO: 716 - DNA, 414 bp, Homo sapiens
  SITE (18): n equals a,t,g, or c
  SITE (45): n equals a,t,g, or c
  SITE (72): n equals a,t,g, or c
atggcagaagctgaaagncacaagaattgccttggaacccccggnggtggaggttgccagtgaagctgagancgtccccactgcactcccagcccgggcaacagagtaagaccctgccctcaagaaaaaaaaaaaaaaaaaaaatcaggattgtgaaaggtcatcatcatttaagatacgtttaattaaattgtgacttcccatacgtagtattttaaaaatgcacacttgaagcaatcactgtccagcatacttaagaagctcccttcttatcgtgtagtaaawtcttcccagtcacctgcgttcataccattatactgtttgtttgttagtcctagatcttttctcctcttcacaatgctttgcttaaatcctgcccttctaaaaagccaaaaaaaaaaaaaaaaaaaaatt

SEQ ID NO: 717 - DNA, 205 bp, Homo sapiens
  SITE (197): n equals a,t,g, or c
ggcacagctgccactcacccactgctgtgcacttggttcctaacaggccatggactggtacaaggaataatgcagggttggggacccacaaggttacatagagtattggttaaaaaaaagtttgccctggccgggcgcggtggctcacgcctgtaatcccagcacttcgggaggccaaggtgggtggatcacctgangtacggga

SEQ ID NO: 718 - DNA, 328 bp, Homo sapiens
  SITE (305): n equals a,t,g, or c
  SITE (308): n equals a,t,g, or c
  SITE (322): n equals a,t,g, or c
ggcacagtcacagtccagaccatgcctgtatatggatggatgagggagcaaaagttcccaggggctcaagagctgccaaggccactctgcctccagctaaaggggctgcaccgcaatgctcatcttccarggaaagggccagatcatggggaagccacctgtgtgtgggagagcagaatccatcccatgcctctggattttgttcatgggacacaaaggtaaagatgggcaggtgggaagaggatgttctcattccaggacatgtgttttgagaccactttctctgctgctgtgccccaggatcnttnctggggccttgggnggttgc

SEQ ID NO: 719 - DNA, 415 bp, Homo sapiens
  SITE (369): n equals a,t,g, or c
  SITE (370): n equals a,t,g, or c
  SITE (383): n equals a,t,g, or c
  SITE (410): n equals a,t,g, or c
ggcacgagtagatgtttcagaatttagaatttttgggactttaaaaaggtaatatgatgcgcatgcctttttatgtaacactcccagaggaatgtggaaacaagtgggataaaaagcctgtctccgtacaggttagaaattcccaccaggtgaatttcagcaccatgcttaagaaaaaatcagtttggatatagttttttggaatccagaattatcgttaaggaattgaggacacttggagtcttgcgggttgttgtgaagatgaactggatgtgtgtatgtacgtgtggatctatgcaatccacaagatgtaaagcttgctatttatgttagctgctgcagctgctgcccttgctgtgatgatcattnngggttatgattgnaattttgccccttctcaaggctcaacncaaac

SEQ ID NO: 720 - DNA, 352 bp, Homo sapiens
  SITE (343): n equals a,t,g, or c
ggcacgaggaaaagcagagaggcagcagcagctctgggagaaagggacagcagacattagaggggcgagtgttctgggagcctcagagcagtgatggattttccatctttccttggaggaggggctgggtcttggaatcccctcccttctctgccccttacacacagtttgtcctgaggagcagacatgaggtctgtgctcacccaagcgctcacagtctccttctctcttcaatacccatctgctgggcctaattcttacctcaaaaaggtaactcttgattattcttaaaagtttaaaaaaaaatagtaactgtgattctggtctaagctaaaattatttntcctcaagg

SEQ ID NO: 721 - DNA, 343 bp, Homo sapiens
  SITE (285): n equals a,t,g, or c
  SITE (296): n equals a,t,g, or c
  SITE (318): n equals a,t,g, or c
ggcacagaaaaaatctaaaaataagacaaacgagaagtagaccctggaattttgttccagtgttcatcaagctcacataactttattttatacaccataaaaacaagaaaggcctagaaagataccccgctgacctccagacacaaggcatttattgcattctcatgactgtcatctaaacattaacaaatcaaaagaagattcttattaaggtatacatttttagtggaaccccagacattgtctatagttcaacaattccatttattaaatgctcacaagctnaacttctaatnaatttttgtactcttgccggcnatcaacagtggagatgaacacccgt

SEQ ID NO: 722 - DNA, 290 bp, Homo sapiens
  SITE (268): n equals a,t,g, or c
ggcacgagctggagtatggtggataggtgtgtgtgtggagggggtttaggggccagactgtgccatgtgggccagtagggcaggagatgcctgggattttattctaaaggtggcgggcaccctttagagggtctcagtagcaggtttggaggcagagacgggtgaaggagggagatggcagtggggctggagctgggagagtccacgtggcatggggaggtgggggagggaagagcccagataaggatgcctggggatgcatgcaggnagaagggatgcctgaaagcagc

SEQ ID NO: 723 - DNA, 251 bp, Homo sapiens
  SITE (184): n equals a,t,g, or c
  SITE (186): n equals a,t,g, or c
ggcacagaaaagtaaatttattttttttcacatcccacattacatttcttgattagcacagtcaagggtgacagagaactactctcttaaggattacctggggtctgagtcatttcagaagattacacagrattttccacagttcctgaaggtgaaagcttttcaaggcaaaataaaatctggncnatagcctttgggatgaagtcaggccgacatatcacagctttgagctaaacagtgtattggagggc

SEQ ID NO: 724 - DNA, 335 bp, Homo sapiens
  SITE (145): n equals a,t,g, or c
tcggcctgtaasactgcctttaaaaaaattaaaaagagaatttataacaaataggtgaaatacgtgatcactgagttactgaggtggatattgtattaaatatggcatggttcctggagatttggggaagttctggaggcttttntttccaatataaataaaactttcaaaaaaactgaaagacaatgttgtttattgtgcaagaacagtcaagactacttaaatgggatattgtgacgaagtgctgccaattaatgctgtatctaatctcaaatacatgcaagacttttatccttcttagtaggctgaccaaaaagactaaaagaagttgtctt

SEQ ID NO: 725 - DNA, 771 bp, Homo sapiens
  SITE (769): n equals a,t,g, or c
gtgctcctagcatttgtaggtgacgtgttgatctaggtctgccttttttgtgttcatgttagtcactaacaaggggggtttctagtgcttatggaccacatggcaattaaatgcccatatattgccctgaaaccatctggtttaacttgtccctcaatcctagaagaaacctgacaatgggattttcacatttctctaaggaatatgttagtaagttattccttaagcacatagattccatccagattattagtgcctttttccccccagctcaattttagagataaaaagagctttagacatggtattgtacactcaccaaacctctgttttatccctaaatagaccaagagagattaccaagtctcccaaggttacatagtaaatgagaaacacctggggcagagctcaggcctgctggtccaagccctgtgttttttctccactgaagcacctcattggagtagctttttcataatcctcatctttcttggaayttctgaaggcaggcaagcctgtatagccgggctaactttcacctcatcctcctgcctcgtctcacctctcccttcccttttccttgcctgtggatgctgacctctgcatgggtgcctgcttctctaaagctacgatgtaatctgtagctgtccttyctcgtttgagacccacatgtgaacaccccatatgtgtgcactttttctgcgaatggtgatcatctgattttcaaggggttctttagcttgktttttaaaaaaaaaaaaaaatcacngg

SEQ ID NO: 726 - DNA, 431 bp, Homo sapiens
  SITE (344): n equals a,t,g, or c
  SITE (412): n equals a,t,g, or c
  SITE (418): n equals a,t,g, or c
  SITE (419): n equals a,t,g, or c
attgaaatttccccaaacctaagaggtttcatctgtacatagaaatattttcaccatggaatgtatagtggttgaacttttgaagaaaagttgacttattgtctaaaagttttccatttgccctcttctaggtttgcactcaagactgacatttaccgtaatggaagctgttcatatgcccccaggaaagaatgaacaatttaatagaaaatgctaaaggagtgatattaggtgagcatctcatgtcatccgaagaaaaacataggcagattttctactctttaccttatttcccactttattttcaggatgtggggataaaaatgtagggtctgatgaatttntcaacagcttataattatcagtgttattgttagaataccagaatataactaataaccaaatgtaaaangttggnnaaggaaattgca

SEQ ID NO: 727 - DNA, 83 bp, Homo sapiens
ctgcccacctccagccagcccatagctctcactcttggcccccttagtatgttctcaaagcaggaaaagcaacaactgatttt

SEQ ID NO: 728 - DNA, 263 bp, Homo sapiens
  SITE (4): n equals a,t,g, or c
  SITE (16): n equals a,t,g, or c
  SITE (254): n equals a,t,g, or c
  SITE (257): n equals a,t,g, or c
agcnaccgtgcctggntgtgcactcatgtttgatttttgcagaaccacccttccctaatggttttctcctagatccaaggtgactttattcattttagaatgaacttatcccattgatactgaaactagagttggcatacatcacgattggcagaacttggtcatgtttagcgagatggaagtgttctgggaaactcctccttcttgtagacgtggaggtgagggtgcgcattcttcagtgcctggtaaaaggnttncgcttg

SEQ ID NO: 729 - DNA, 365 bp, Homo sapiens
cttaactgtcttctacaatgctgcctgaaatattaggtttctcaatccaattgtcacatggcatcaaaattacaccattaccactaggcatttctcagcagagagttttctaggcaacaatgcttcttttcttcctctttctcttcataaacagaaaaacatggaatccatattttcccagaagataaacatgtgattcacttacaacgggactgtctgtaaaataactctggctcagggtgtggacatcatctcacccattgtcatcacaatattctttaagtaaccactttctgggatagaactgccccaacaaggtagcagccaggtcacatggtggttttagtttactctctcmaacatgc

SEQ ID NO: 730 - DNA, 300 bp, Homo sapiens
aattattagatccttgtctcatctttcttaactttaatttgttttttctgcacaaattgtctaatgtcttatttaatttcacatttaggagatataggtaattattatttacatacatgtagataatctgctattgctaggaggaaatctttttttagaaattttacttttaatatataaaaattgaaggttgaaaatgcaaagccaaaaagcacaatacataacaaaaagtaaatcaattgggctttctaaaagttaaaacattttctctgcaaacaacacggttacgagaatgaaaag

SEQ ID NO: 731 - DNA, 371 bp, Homo sapiens
  SITE (252): n equals a,t,g, or c
  SITE (276): n equals a,t,g, or c
  SITE (351): n equals a,t,g, or c
ggtagccagaggcaactccaattcctgctaaacagtaggaagggttcttactagagacggctcttctgcctcctggggtggaggggtgccgtcaggcatggaggaaggactagcctcattgtcagtggtcacgtctccatctgtcagcgcatcaaatgagggcaatccgtcttcatccacagggagactgtctagtgtctctgtgaggactgctagcaagtttgcctcattctcttcatctatcttctgcanaaagagaaaaaaacagaagatgtnagttgaccctgggaggcaggtaacactatgcatcaacatgtttgaccaaatgagtgaaccatacgtgaaatctanaatgcccattccagaacaca

SEQ ID NO: 732 - DNA, 435 bp, Homo sapiens
  SITE (364): n equals a,t,g, or c
  SITE (376): n equals a,t,g, or c
gtttcttcctaaatattttctatctgtaggtggctaaatctgtggctgtggaacccatatatatgaaaggctgactgtatattcttcaattagattactttcaaagtcataggttagtggaaatcctttaggaaaaatattatttttagcacctatagaagatcaggtgttccaagtgatatatatggttttaaaatttttaatacatgaattactaaacatttttaaatttaatactgcattttaaatttatcttgtatggcttataaccaccgcagaagatagaaaatgttattttgattttactgatggggactagaggtacagagacgttaaataacttgctcagttacatacttagtcnataaaaaagtcnaaatttgagcctaggtaatctgaccccaatttacagtccctggagtataaaggaaaaaa

SEQ ID NO: 733 - DNA, 339 bp, Homo sapiens
  SITE (314): n equals a,t,g, or c
ggagattgtaagggctgtatctccgcgattactggtactggtgctccacccataggggccctgttctctctggggtcccacactggggtcatgagagctagttctcatgagagcaggacccctaggtctggtcctgccagcctgggataggggtcaatgtatgctacacatcttgggctcacaagtgaggctgtggaggccaggaggttcaagtatggagggtaggagtgcaacccaggagcaacgctcaaggtggccgagatgcagggaggattgtggcgatccggttgcacactggcctctgtggaagtcanggaggtgggaaggtgggtgggcctt

SEQ ID NO: 734 - DNA, 347 bp, Homo sapiens
  SITE (308): n equals a,t,g, or c
  SITE (310): n equals a,t,g, or c
  SITE (319): n equals a,t,g, or c
tccacgggcatctgtatatgtcaattccccaattcaratgctggtagaaacatcccatgtgcaactgacacagwatatcatacaaacacctcaagagttcaaagacttttgtcaatatgcttgtaatatatccttcagaacaagaaggaaaccagttgaaggtaaaccgactgtagcaaaccaatttcaatgccccacccaatgctccttggactccctttacatgcacactgtggcttcagtcttcgtttggctccaaagccagaacgtgggcttcttctggccctaagtattgaagcccatgttananttccacccngggtggaaatgctaggacaattttacca

SEQ ID NO: 735 - DNA, 549 bp, Homo sapiens
  SITE (76): n equals a,t,g, or c
  SITE (497): n equals a,t,g, or c
  SITE (534): n equals a,t,g, or c
  SITE (537): n equals a,t,g, or c
ttaaccctgacatacacacacacacacacacaccagcattcttgagttacagcctgctcgccactccagacctggntcctgtggtttcacagtgaccaccccagagatgaaggtgagttgcttagctgccttgttcgtcttgtccccacaccctagcacatactgggtggtcaataaggatagactgttgagtgagttgagggataaatgaaggttgtgccttctcaggcagtgccaggagtccctgctccagaactgaggaatgagcaccagtgaagcctatttcccaacctctgcagcctccagtaggcagaacttcaagagcctctcccacctgcactctcctattatggaggggtttctgaaagactggagcagatggggcaggaaagaggcaagtggacctctggacattttcccaaaggtcagggtctcaggccctacgaagccactgtccacctgaagcttccatagtaagctgctgttcctgaccactnaagtattggtcatttcttcacagatagggtaagcgtnagnttggccccaagg

SEQ ID NO: 736 - DNA, 334 bp, Homo sapiens
  SITE (333): n equals a,t,g, or c
  SITE (334): n equals a,t,g, or c
ctttttctaagtgtgccttttccctcatttctctcattggcacatagttggtgttaaatcaatatctgataaataataaattaatgcatacatggtgaaaattttctaaattttaaagttctctgcccatggagtagaagaacatagcatctgacattttggcaatatatggacacataaatgaatcaatcataaagaaataataacttctgaaaatccagcccatataaacagttatttctagatccaccgagcttctgcgtgctgggccaggaagatgcctttgatggctaggggatatgtaggttctgggtatgttccagctgtcactcnn

SEQ ID NO: 737 - DNA, 351 bp, Homo sapiens
tgcagagaatagtggagatgcagaaagacagtctctgtgtggtgagtaaatacaggtttagcatcttagatctgaaaatctgaaatccaaaatgctcccaaatctgaagttttttgagcactgatgtaacacttaaagaatatgctcatacaacctgtaatgcttcaaagaagcatccaggattcatcattctcagtgagaatctaaatcagtggagctagaaagaacaagaatttaaattattactttagagtcatgtaaggagataaatttacaaggagtatttctatgcatgttcttcattttcgtaatttggatcagggtaaaaaaattagagaaagaattgctaaa

SEQ ID NO: 738 - DNA, 232 bp, Homo sapiens
gaccatttcacatgccaacatgataaagctgttcattattcccaggtttggtcatcctggttgcttaatctagcaatgttgacttaaaatgactagacagcccacagtgattgcccccggctcagggtcacactgggccctgtaacttctcattttacatcatccaagggataagactccagtacaactgtagtagatgtttgtaatgaaaatgagccctttgctgagatgt

SEQ ID NO: 739 - DNA, 185 bp, Homo sapiens
  SITE (145): n equals a,t,g, or c
ggtgagacttcacctcaaaaaaaaaaaaaaaaaaaaaaaaagcaggggaaactagacttattttgtggcccaaactgaaaagtctgtaaacataaaaatactcattgtatttgttttcaaatttctgcttctggccaagatgtantagtagagatcttatttacctttcctcctgaaatgacaaa

SEQ ID NO: 740 - DNA, 292 bp, Homo sapiens
  SITE (291): n equals a,t,g, or c
gagtgagccaagatcgcgccactgcactccagcctgggtgacagagcgagactccatctcaaaaaacaaaataaataaaataaaaaataaaacaattttgatcttacagatcccctaaatatcccctggggacccccagagaccctggtctaccctgtccagtagaatcgggttattgctawtcggttaacctgtgtgatcaggaaaatgttacatgggtgacatttgcacaagtwctgtgttgacctttgarctgggtttggaaccagttaatgaagagggatcttggang

SEQ ID NO: 741 - DNA, 1040 bp, Homo sapiens
  SITE (985): n equals a,t,g, or c
  SITE (1039): n equals a,t,g, or c
atcagatcccggcggctgcggcgcgcgcgagccgagtgtgagcggaaaggggcccggcgtctgcctcgagactgaagaccgataaactcaagccatggagggattactgcattacatcaaccctgcacacgccatttctctcctaagtgccctgaatgaggagcgtctcaaaggacagctgtgtgatgtgctgctgattgttggagaccaaaagttccgagctcataaaaacgtcttggctgccagcagcgaatacttccagagtttattcacaaataaggaaaatgagtcacaaactgtatttcagcttgacttctgtgagccagatgcttttgataatgttttaaactacatttattcttcctctctatttgttgagaagagcagccttgctgctgtgcaagaacttggctatagtcttgggatttcctttctgactaacatcgtttctaaaacacctcaagccccctttccaacgttgtcctaatagaaaaaaagtgtttgtagaagatgatgaaaacagttctcaaaagagaagtgtcattgtttgtcaaagtagaaacgaagcacaaggaaaaactgttagtcaaaatcaacccgatgtaagccatacttcccggccctctcctagcattgcagtcaaggccaataccaataagccacatgtcccaaaaccaatagaaccacttcataatttgtcattaactgaaaagagttggccgaaagatagttctgtggtatatgcaaagtctcttgagcattctggatctttggatgatcctaatagaatcagtttggtgaaaagaaatgcagtgttgccttcaaagcctctgcaagacagagaagctatggatgataaaccaggtgtgagtggtcagcttccaaaaggaaaagctctagagctggctttgaagagaccacggycacctgttttgtctgtttgtagctcatcagagactccctatctattaaaagaaactaacanaggaaatggtcaaggtgaakatagaaacttgktgactattcaaagttaggcttna

SEQ ID NO: 742 - DNA, 571 bp, Homo sapiens
  SITE (465): n equals a,t,g, or c
  SITE (493): n equals a,t,g, or c
  SITE (521): n equals a,t,g, or c
  SITE (556): n equals a,t,g, or c
  SITE (571): n equals a,t,g, or c
gggaaaacctttatgtagatcataactatcagaaagtaatgaactaattacttaaatatatagatctgaatacattcattgcacatgttaagattgggaattccatgggatttatgatttgtacatggttcagattcaggacttgttaggatttgctttggaaatctctttatgttgcccaaattgatgctgaaatgctagagaacttctgaggccttgagagtcccccacccagactatcagttcatacattctctttttcagcagtctcaatttacatgcactaattggtagctaatgtgctcccaaaggcaaataaaggtatttgttgctttaaaatcctaagtctttttctttttccaacatgtgcttggaaagagaataaaactttgcatatgtttgtctgggactcctggatctgattaagaccctggtaatattactctgtattcacacagttcttanggtcctcattgcttggctgggtgttgancgcatgactattgcagcatgcacttcanccagtggtgactttctgcttacgcagtcaatctantaaatactaattcan

SEQ ID NO: 743 - DNA, 621 bp, Homo sapiens
  SITE (410): n equals a,t,g, or c
gagcaatgcaaatatagagattaccctcaaatccttacaaacagttttaacatgggaatagcttcagttccctaactggcatgttttatctactagtgccaagratataagaaaagagaamcaaacttaagtttcaaataaataattttctttaggaattaaaaatcacattcatttgacaataattggaatatttacataattttccattgaaamcgccaaacmaaatttatagkttaatcagaraatccccctctaagagaaagattcagcaatcctatcagcttacaaaaattgaaggtctggctttctaaattatagagctttcagagttgatattgtgaacctgactgttagacatttcactgctcgggaggacatccatcacagtgctgacaggggagggaaancaagggcaaacttaaaaaataatttcaccatgtttctcaagctataaaatgtgatttgggaaaaacagtgggaagtaggacttaaaataatttgaggaatcattcctgctccccatttaattaagagttaacaaaaatcccagtttacaacagaatcctattttaagaaatgggttgatatcaagtgtatacacatgtaactgagtcagcc

SEQ ID NO: 744 - DNA, 251 bp, Homo sapiens
ggccaaaggcaaatgaggtaattaaatatggggctcatttattttagcattttatgtattttcttaggttttttttaattaaaaatatttttccagttgcaagatttacatawagggaaacaaaataatttaaatgtgtcaactctaatcacagatcttttcaagttaattaattttatgttataagaagctgttgctatagtttggtgtaagtcatcttacctttgctgtaacatgattgaaaatataat

SEQ ID NO: 745 - DNA, 792 bp, Homo sapiens
gagctaagcttttcttcaaagtgttttcttaatgaagattgtattcactcacaaatagttctccaaaacagagattgataaaaggatggaatgagactcatacactccttttctgattaagataactctgtattttacgccacttatatagactcagtgtgttaagacgtatcttggggaaaatatggctactttctcaaagttgtaagctttatttctatgtataaagtccagctttattagatgtttctgattcccaaaataatagtattaggatattccttattttaggctttaaataatttgtataataaaatagtgtcagtaggtccaaagctgaaatgcaaagttcagatttctaatacaaaggagaggagtattttgtttcttttggtacagccatggttcccaaactgtgtagcagggcaccttagcaaattaacatgggtgccacacaatattttaaaatttttgagaaaaacatagcaacacctgttggacatcacataaactactactttgaggtagtttacattttcaacattaaatagcattatattcctttctataacaacatatctttacaaaactgggttttcagcagtttgataaaaagtactgtgcaagaagcagagaggaaaagaaaatgatactgattccaaggtttgagacatgcagtgtccacagttactagtggtgatgatgtacattcttattaagctgttggatctaactgcttaataaacacaagtattagatatttcttttggaccaggtatgctgtgaaaaaag

SEQ ID NO: 746 - DNA, 232 bp, Homo sapiens
gtgtggactctaggggttcaaggatcccaggcctgctctagaatgtgaagaaatgggctttaagctgttggctgaagttcttcgagatgaattttctgaagcagtgctgtcaaagagaattttcttgaggtgatggaatgttctacatttatgctaatatggtaatcactaataacatgttactaagcataagaaatgtagctggtgtacctaagaaactgaaaatttaatt

SEQ ID NO: 747 - DNA, 548 bp, Homo sapiens
  SITE (368): n equals a,t,g, or c
  SITE (394): n equals a,t,g, or c
  SITE (397): n equals a,t,g, or c
  SITE (514): n equals a,t,g, or c
  SITE (538): n equals a,t,g, or c
gaatactgagttttgagtggatgatgtaagtgtttatagttcaggagatgaattgaattgtgttcccctaaaattcatatgtcgaatctctaatccccagtacttcatatgtgactatatttgagcttaaggccttgaaacagtgattaagttaaaatgaagtctttagggtgggccttaatgtaatctgaatggtgttcttataagaagaagaaatctgggcacacctaaaggcaktggacttaakcatggagaaataagggaccatgtcaggacacaatgaggggacagctatcacaagccaaagagacaggccctgggagagcccaaccctggcaacacgttgattttagacttccagcctccanatctttttgagaaaataaatttctgntgnttaagccactcattatacagtattttgttatggcagcccaagctgactaatttattgatttatttattcaacgaatattcaccacaattcttcactttactccagatacattcctantgccttaacatgcaccggttggantaaagtggaa

SEQ ID NO: 748 - DNA, 367 bp, Homo sapiens
  SITE (355): n equals a,t,g, or c
ggccacatctgccagagcctggagtctgcgaaggccgggacccggttccccggcccacagtgggggtgtgcaaacccgagagaactgggaagtgccgtcagaagcgataactgacgacgtctaatgtctatctgaccgcagtcgctgaaacctctacaacttagttgaccgtaactgccagagccctgccctgaattcctgtccttactccctctttaagattgcgtacccactgcagagtgctgaagacggggtagccackaggttgcaaattcgtgaagaatcaacatcatgtttggcakctgagtattggagccaggagcctgcatgaggttatattcccagaggatgtcantcccaaggacca

SEQ ID NO: 749 - DNA, 643 bp, Homo sapiens
  SITE (583): n equals a,t,g, or c
  SITE (618): n equals a,t,g, or c
  SITE (635): n equals a,t,g, or c
  SITE (638): n equals a,t,g, or c
  SITE (643): n equals a,t,g, or c
ggtgaaactgctaaaaaaagaattcttaaaaaaatttcaaaacttatttacccccaaacatagcaagtaatgacaatatatatttatcactttctaagagttaggaatctgacaatgacttagatgggtgattctggctcaggatcccttatgaggctgcattcaagctgctggctggggctgcagtcttctgagggcttgtctggggtaggaggacccatgtgtaaggtggctgtgaagaagaagccccagttttttgccacatgagcctctcactaggttacttatgacatggcagctagttttccccagaccatgtgctacaagagagaaagagagtaagcaagctggaagctgtcctgtgttttacaatctgattttggaagtggtatttcatcacttctgctgtattctgttggtcagtgtgggaaaggactgtatagaggtatgaataataggaggctatctgtgagccttcctggaaagttggctatcacactttctacaattttaatactttttcttggttgagaattgggaaaaacatcttccatgaattggctttttgggcaccttttgcccncttttttccatgataatatttaaagggtatctaantttgatcattctcttgntancttan

SEQ ID NO: 750 - DNA, 556 bp, Homo sapiens
  SITE (33): n equals a,t,g, or c
  SITE (467): n equals a,t,g, or c
  SITE (488): n equals a,t,g, or c
  SITE (503): n equals a,t,g, or c
  SITE (541): n equals a,t,g, or c
ctgaagaccacgttaagctcgcaattaaccctnactaaagggaacaaaagctggagctccaccgcggtggcggccgctctagaactagtggatcccccgggctggctgccgccatcggcccgaccatctttgtggatgtggacccgaatgcgtccttaagtcgcgaagagattttcggtccggtgctggtggtcacgcgtttcacatcagaagaacaggcgctacagcttgccaacgacagccagtacggccttggcgcggcggtatggacgcgcgacctctcccgcgcgcaccgcatgagccgacgcctgaaagccggttccgtcttcgtcaataactacaacgacggcgatatgaccgtgccgtttgggcggctataagcagagsggsaacggtcgcgacaaatccctgcatgcccttgaaaaattcactgactgaaaaccatctggataagcctggaggcctgnaatgaccgacataccagcagntactacgccggcagngcgaataaatatgcaccattcgacacgctgaatgaagncaatcacctgggacg

SEQ ID NO: 751 - DNA, 518 bp, Homo sapiens
  SITE (414): n equals a,t,g, or c
  SITE (443): n equals a,t,g, or c
  SITE (480): n equals a,t,g, or c
  SITE (487): n equals a,t,g, or c
  SITE (497): n equals a,t,g, or c
gggagaagggacatacatttggtaagtgtaaataagagtctttgctgattaattcagtgtggcccatgagaaagagtggaagtgtccaaggttccctcaggtttacagcttgggcaactgactgagaacagaaaggagctgccattgagaggaagaaaagaaaatgacactgagtccatgttgggacacattgggtttaaagggatatcattatgacctaagctctctgaattccagtgactgggaatatgggaagatacatctttaacagttgaagcaatttatacactttaacaattgaagcaatttatacaccagagcctaaggaatatttatagatgagggctgtgctgcaatgacagatagggtttatgaaacatacactaatctgaccattctatcctycagactcanggaaggaaataataaaagtaagtaccatnaaaaatagacttttatgcataaataaataaaaatcancttgganacagttcatnccttgtataagtaaaacaggc

SEQ ID NO: 752 - DNA, 502 bp, Homo sapiens
  SITE (4): n equals a,t,g, or c
cgtnacatgcagaaagccccgtgcagaacgatggctgtcagtctttgagggacgagagagagacccaaggtcaggagagtaagtttactaacctgccaggctgcttcaccacagtcaaaggaggcagccctgagcttacaaaatgagggttttatatgggggagagagaccctggggttgtttgttggttaaccttaccacatatcatctcgtgaccaggttacaatataggawtttacaagagggtgtaacttaggtttatccacgtttctcgtgacctcccccatgctgcccgtagggttaaagcaagtctggtgaccttgctgtagygcctagataagggtccaggaatgcagctgcagagtattcagggtaagggacagctgcattggggtggggaggggttctggtgcaacttgttcctaacattccagccttttaataggtaatagaagaggggcgccgttgtcctctggctgcttcttgctgaatagggcgatgc

SEQ ID NO: 753 - DNA, 292 bp, Homo sapiens
  SITE (243): n equals a,t,g, or c
  SITE (279): n equals a,t,g, or c
atgaaattggaaatcatcattctcagtaaactatcgcaagaacaaaaaaccaaacaccatatattctcactcataggtgggaattgaacaaggagatacacatgcacagacaaaaactttgcccgagtgttgacagctattccctgagcccaggctgtaccccagttctggctagctctcagacagctccctgtacataattgggtttgaaatctcgaccactctaacaacggatattaattnacccctccctctgaagcagctgcctcgaaggaaganaccagggcagaag

SEQ ID NO: 754 - DNA, 306 bp, Homo sapiens
  SITE (169): n equals a,t,g, or c
  SITE (277): n equals a,t,g, or c
aacaaagatacaaatgagtactttacagaagaagaaacatgattgtctaataaatgtactaaaaatgctcagtaaatatacttaatatgctcattagtaatcaagaaaatgaaaatgagaaccacaatgagacaataccatttcaaactcgatgaaatgaaaaatacanataattctaacaatacccttatcatcctttcatgcaggaatttgggtcttgacataaaataaagcacaaagtccagatttgctgctttatcggcagtgtaatcttcgncaaggtcattttaaactcctagcttccag

SEQ ID NO: 755 - DNA, 363 bp, Homo sapiens
agttccaacccctgaggacaatggggcccacaggctgagcactttactaaaagtgccagagtgaagccagagattgaaagtcaccttcccgctcccagtgtgctgtctgtttcattatacaaactgcctatttgtagtccaggaaagaagacaaacttctccccatttctactgtcagtagactgaggctggaaaccagtatgcggcctcagtgtccttttctagtataccacatacataataaaaacccaggcagataccaggtgcctagccttttcagtcaaacatacacattttagttaaaggatgagaagttgtcagtgagratttgtacagagttcacagtaagaagktgactataca

SEQ ID NO: 756 - DNA, 275 bp, Homo sapiens
cagcatagcctagcccttgatgtctctgagttgggagaacctgttactccagttaggaaatgggataccctattgatgcggctgggaacctctgttgcttattgtacctgagggcagagaccatgtgccaaaggctttattttaggggaagtggtaagaaagttcaggctgtaggtatgttcttagccacttctttcagcttcagcaaggtcttacaagagataaatttaggctacactggattctaaagagcatagaggggaagatccatgcag

SEQ ID NO: 757 - DNA, 243 bp, Homo sapiens
tgaaacttgccagcaaaacagtagaactttaggtgagattcctacattagttttcaaaaaaacatctaaactagaatccgtctgtggtattcagctagaacaaaaawcagaraacaaaaattttsaaactacacaagtatgtaatgaaagtccacatggagatggctacagctcaggggttattaaagacatttggacaaagatggcagacacaaattctgtggctacagtagaaatagaaag

SEQ ID NO: 758 - DNA, 304 bp, Homo sapiens
  SITE (275): n equals a,t,g, or c
ttagtctctaaattccagctttactgtgaagttctatagagtgttaaatacaaattttcctgtcttgcttcacacagttccttaaaatcagttttgaactttggtcatagagtcttcatatttcagtatttggtggtccctatgacttatacataactttgtaaaaaaaaaaaaaaaaaacttgagactagctcgtgccgatatttttagcagttctaatggtgcccatttatcctgacctaaccagttatttaaataattttttaaaccaccanggggttaataaatggcatgtgaactgatc

SEQ ID NO: 759 - DNA, 315 bp, Homo sapiens
  SITE (252): n equals a,t,g, or c
  SITE (277): n equals a,t,g, or c
  SITE (294): n equals a,t,g, or c
ctcagcaaagctggatttctgggagccttcttcagtagggtggggtgggaagaccgaggtgcaggctgctttgggaaaagagtttcccatactcctaacgggagttagggcaggccaggtgcagtgcctcacacctgtaatcccagaactttggcaggccaaggcaggtagatcacttkaggtcaggcgttccagaccagcctggccaacatggtgaaactcgtctctattaaaaatacaaaaattagcttnggcatggtagcgggtgcctgtattnccagcttatttgagatncttgaggcaggagaatcacat

SEQ ID NO: 760 - DNA, 388 bp, Homo sapiens
  SITE (10): n equals a,t,g, or c
  SITE (197): n equals a,t,g, or c
  SITE (305): n equals a,t,g, or c
  SITE (388): n equals a,t,g, or c
ggcacgaggnagaaacacatccagggaccgtttctgcagcatcttctccatgcctggtgctgtgccggggaacagaggtgggacatggaatggagagagggagagggaggaactgagggtgaattagccagactcctttggttcctgtaagaaaagtctaatcaaacagatttaaaaggaagggtgggccgggtgcnttggctcacgcctgtaatcccagcactctgggaggctaaggcgggtggatcacttgaggtcaggagtttgagaccagcctagccaacatggtgaaaacccatctctantaaaattacaaaattagctgggtgtggtggcgcacgctgtaatcccagttattgggaggttgaagcaggagattcgtttgaan

SEQ ID NO: 761 - DNA, 430 bp, Homo sapiens
tagcctagcactaaatttgcttagctttatagtaggatacaggacaggaaattaagcatgcatgatgcttgggtccctcctcacctgcctaaagagcgtgcatgagcttgtggtatttggatgaggttgtggtatgtgggggtttgccttgatgcaaagaagcttctatgtgggtttcccccagtcatataggcctacggttcacaggtctcccagccccatgtactgtcccatagattgtaggtttcacagtgcacaaaatggatgtctgtccctggtacccaatattccaaatttatcttaatttgggtcatttacaagaaactcgtgctgggataagacaaacctaaaatttcccaagcaggcatagttctgggagaaaaatggtacagacctgctattaactctttgctcacacatacataaagaa

SEQ ID NO: 762 - DNA, 503 bp, Homo sapiens
  SITE (435): n equals a,t,g, or c
  SITE (445): n equals a,t,g, or c
  SITE (485): n equals a,t,g, or c
ggcacgaggtaccattggccctggcaagtatggctatggtaaggccccatatatcttaccactgcagacagacactgcacacacgccacagaggctccggagacagaagctctcatcccgcgcattccaggtcccagggagcatcttctgctaggcatggctacagttcaccagcccaccaggtcccccaacatgggcctttgtaccaaagtgacagtggccctcgctctggactgcaggctgcggaggcccccatytaccagctacctttgacccatgatcaaggstaccctgcagyttcaagtctctttcacagcccagaaacaagcaacaaccacggtgtgggggacccatggggcaacttcagaggttcttcttcagcctgcccgatcttacagcaatcttcatgcatcggggcctattggcagtacaagntgtgcaacancaacgtttgtccagaaagcagtaggagtattcgggaggtncagtgtggattctacaac

SEQ ID NO: 763 - DNA, 120 bp, Homo sapiens
  SITE (120): n equals a,t,g, or c
ggcagagctctctctctctctctctctccacaagtcccacatcctgcccaatggccaggtcttgggatgctgttgcaagatggttctgtgactccatgtgactgtctgatgattgccccn

SEQ ID NO: 764 - DNA, 363 bp, Homo sapiens
  SITE (32): n equals a,t,g, or c
  SITE (60): n equals a,t,g, or c
  SITE (349): n equals a,t,g, or c
ccagttagcagctgctgctgtagacagggttnctgtaagccaggaatatctgggcaaatncctccctgacagagtgtgagggacatcagtgtgaggctggtcaaaagggcagagatccatccaggtctacagcagtccctttcaaactgccagcatctgacacggtgagctccattttgttcaggttaaagtcagacctggacagcaaaggtctctttaaacacatggggggaatagcctccatggactcttggagattaacttctgcagttcatttttaatttcactycatggaatgtaatatctagtcacaaaggtgttaaacagraagggttaaargttttttaantggttttagggttg

SEQ ID NO: 765 - DNA, 445 bp, Homo sapiens
  SITE (29): n equals a,t,g, or c
  SITE (415): n equals a,t,g, or c
  SITE (416): n equals a,t,g, or c
ggcacgagcggcagctgccacggaccganatccctgaggactagatggggttcacraggccggtgttgttggcttgagggacttgtsccactttggagtragaaggatgtgtctraagtgcaggaagagcttaaaccagggcctagaaactccagccatgcgtgtgckttgtctgtggggttttcccgctgcagcacagaggcgagtggtttccatggctgcaagcagaaatacttgctgtctggcccttgacagaaaagactgccaggctgaggcctaaccacggagaagcctctcgggaggaggcgacacagccatggggctctgagccccccagggagtgggtggtggttccagcaagttgtttttagggggagcctgtttttgggagcttaacccaggacatcgtgctttnnagagcaggaggggccccttcccaactttt

SEQ ID NO: 766 - DNA, 429 bp, Homo sapiens
  SITE (77): n equals a,t,g, or c
  SITE (339): n equals a,t,g, or c
  SITE (357): n equals a,t,g, or c
  SITE (378): n equals a,t,g, or c
agggaatagttggatgtaaaaagctgagtctacttggttgaaatgagagcaaacagtcagcaaagccttttgcattngagcagggtcgtgcttccgagagagcctgccatttcctctttgccatctgcatgtggccccttctgcctccagacatttgtcccggggtgaatcggagatgtggtgctagctgaaccaacaccaaaccaacgcagtggatgctgccttgcggcggaagttggctcctgaatctgggatgggaacctggctccaagcctgggtcccctgggagggtgggggtacccagaaagcccttggaagttctcgggggaggtgcttggnagattcatttgggtttancttttccacccacatttaatnggaggagagagtatggggttttatgttaagtcattttgacttactttttgt

SEQ ID NO: 767 - DNA, 484 bp, Homo sapiens
  SITE (254): n equals a,t,g, or c
  SITE (443): n equals a,t,g, or c
  SITE (457): n equals a,t,g, or c
tcacataagcttcctaggtggttctaatgtgcatccccaataaaaagcagtgctcttatgtgctgttgccgaactttttcactctgtgtcatgtcaagaatgtttggtattgtgatccagagtaaaagaaaaatttcacaaaacggtacttacccttgtcacaagtaaaacactctggttttattaagttttttaatgctgccacccagggtcttgactgatgatcttgacctgtagtttgaaaaacactgttntgaaacttagtaaccattgctgcccttggggttaatgatattgaaaccgtgtcttctgggtcacttaactataaatgccactgactcaaagttaactatataggccaggcgtggtaactcacacctttattcccagcactttgggggggttgaggcaggcagttcacctgaggttcaggagttccaggnccagttggccaacnggtgaactccgtctctacaaaatattt

SEQ ID NO: 768 - DNA, 209 bp, Homo sapiens
  SITE (198): n equals a,t,g, or c
attcctccctgttaagctccccctgcagattcatttcttcactcattcagcattgctcgagcatctgtgtgccagctgtagttctaggrgatagagacaacaaagctttaggcagctcccatgcttagtgaagcttacactgtaggatgtacggttaggggcagggaaggtaaggctagtatatgaaactgacagggnataaggcgaca

SEQ ID NO: 769 - DNA, 386 bp, Homo sapiens
  SITE (351): n equals a,t,g, or c
ggcacgagctcatacctcattgtagttctcttcattgacacccctgaagtaaggggctcctctctcaggttcttagatcaaggaacagccactggagataggcagggtgtggtttgaagctttgtatgtctttgtttagatagacctctttctatagtgacagagagtctgtatttgaattatcttcagtactgctttgtgtattgtaatttggtccaatctccaaatttttcaagattaagcattcttatttctagctgtctcagtactgtcttctaacctatattcagtttcatagttgtccttacatagatagtaaagtccctagrttaaagaaaaactacatgatcncttttcctatccgtagagaatataattgtccacat

SEQ ID NO: 770 - DNA, 346 bp, Homo sapiens
  SITE (214): n equals a,t,g, or c
  SITE (301): n equals a,t,g, or c
  SITE (345): n equals a,t,g, or c
aactctttcaatagccttgaaagggtggggcctattgctttcccagggtccaataataaccatagtgaatatttacggcaggcatcctgggcagggcttctsctcagtgcgctgtagggagtgtgaagttttgtgtatgggaagcttgaacatgtttactgaatgaatggagtacattgtgcccaaatagtgttagctaggtactttaaattgncacttgcaccttcatccccacttctgtccaccagggtccctggtttagtttctgattaagaaagcggttaaaacaaagactgtcttncttgaatgtccaaattaaaagctattttctagaattcggacaant

SEQ ID NO: 771 - DNA, 442 bp, Homo sapiens
  SITE (385): n equals a,t,g, or c
ggcacgaggtgactcatggtttcacctcctttgtccacttgggttttaaattgtaagtctggaagttactagaacaatcccagaattagctcacacactttcactctgtttttccctttcttcctggggttatattttacccagcattcctaggtgtttgtggtgggagattccgcccctacgttatcttaatttgttgccatatttctgaaccaggaatcccatttaccacattgagttctggacatcaaggttctccgggcatcactttctawgctgtgtcatcagtgaagcccataaacttacccgttatcagaaaagcgargatttcgagatcytgttgagacggtaggtatawagtatgtcctgaggggtttagaaaaantagctaccttatttccaacccatggtaacttcatggtaaatccagacagaccttaag

SEQ ID NO: 772 - DNA, 225 bp, Homo sapiens
  SITE (72): n equals a,t,g, or c
tgccccgagggaatggcagggaatgaaatccaccatgaactcctgccctcagatagcatagcacgtattggnacagacagacagaactttcccaccaccastgragattttagtaatgcccctttgtactcataagaggaccccaaccaagtgtaggggcccaggggcttccatgggggaaggccctgattcagattgaagcatgaattgtatcctgtaatccgg

SEQ ID NO: 773 - DNA, 417 bp, Homo sapiens
  SITE (91): n equals a,t,g, or c
  SITE (407): n equals a,t,g, or c
  SITE (414): n equals a,t,g, or c
ggcacgaggaacaattagccatttgtagccagcaggtgttaattaataaaactgtccagtactgcatttcagggaaggcatgaatgatgtnatgaactctacaaaaataaagtcagctatatgaaaaaaatctctacatctcaggctctagagagaaccaaatcagaatgaggactcgtttccttgtgtgggcacctggaggggatgaggctgtcctgggcccagaagactcatggcaccttccctgtaccattttgataagaaacagtgaactcttcattcatttcatattggaggaactctgagggctgcagcgttgccctggggggacagcacaagcaagaatgcatcagaaggttagtgccgcaggawtgacacattttaggtgtctgctctgcacagtgttntgtttantga

SEQ ID NO: 774 - DNA, 315 bp, Homo sapiens
  SITE (298): n equals a,t,g, or c
caagcacccatacagcaggtggtttcattgccctccatttacagacaagtaaactgagcttcagggtggctaccgcttgtttcccaagccacccagccatttagccacggaagaggtcatgaactttttacaccccagtgaaagctgaagatttttctttccgtttttaaaaatgtttactccccagggcagtgaacacctggtgcctctgtctagcgcaagaggtgaacgtttgccacttccgtttctttcctcctaccagacctgaccctcctttttgtggacgggaacatcctgncaggcagtctgttcctg

SEQ ID NO: 775 - DNA, 280 bp, Homo sapiens
  SITE (53): n equals a,t,g, or c
  SITE (178): n equals a,t,g, or c
  SITE (244): n equals a,t,g, or c
tggataagcaggggaactgtggcatcccatttaaaattgcttctgaaagagancatgaggttacatctgtaatctccctgcagcagagtcaactgcataagaaaccaaaagacacacctgctccatgccagcctaagccaccacataaaaagtcagaccatctgctggaggaaccacntggagaggccctgagtcaacatggagaggaagaaggacttggactgaatccagccttccagctgtnccctaccaaggtgccaggcatgagaatgaaagctgt

SEQ ID NO: 776 - DNA, 430 bp, Homo sapiens
  SITE (371): n equals a,t,g, or c
ttttttttttttttctttaggaattttttttttatgtagaatgaaaacttttttctggaaccctaaaagtgtcgtgggtcctgggggctacgctcctgtgcctcctgggggtcagtctgctcactccaccgtacattcgggattactcgccgcagcacggtttgggagagccagaactgggcaaagcactgtgcagggataatcagggcatctgtgatggagttctttgaggcgttacaaagccaactagctgtgcttgtattagggtggagagatgttgaaagataaatccacaggttaaaataaaccccgaccctgagctcactttatcgttattcgatcctaggggtcgatctgggagcatcaagggnagaagattcctgaaaggtttccacatccgggatctgcttctcctccattgttttcagga

SEQ ID NO: 777 - DNA, 289 bp, Homo sapiens
ggcacgagtttgtatctttcaaataatttgtccattttatgttccttatctctggtaatattatttgctctgaaatctattttgtctgctttcttttgattagtattaggatggtatatttttttcttcccttaatttttaagctgtatgttaagcatggttgaatcttgcatttttatccaatcttaataatctctggtttttaaatgagagagtttagactatttacatctaatttaattattgataattttggttctatttgtattctgtttgttccatcttttct

SEQ ID NO: 778 - DNA, 407 bp, Homo sapiens
  SITE (342): n equals a,t,g, or c
  SITE (347): n equals a,t,g, or c
  SITE (357): n equals a,t,g, or c
ttgaaatccaaggggttgaaactgggttcccgatagcttccagtttgggyctgacaagaccatattggactggcaccctaggtacctcctgagtcaggacttgtctagccacagcatcccaaattgtmattctctctaggctgagaaagctggtgggatttcataatcaccacttccttgagaagccggagcagagagaactttatagtgattgcatgcgtatcttttcacgrtttacgcatcatcgtagggacccaaatgccctttwaaacataaggcaactgaatctagcagtttgggaggtcttagagcatttgtaattaacatgctggctctctgtgnatgtnccccgaaggnaccattttcctggaatggacttgtccaaaaagggggaaaaatttccccat

SEQ ID NO: 779 - DNA, 255 bp, Homo sapiens
  SITE (200): n equals a,t,g, or c
  SITE (206): n equals a,t,g, or c
acattcatccagaggcacggccaggttctcacttcaggacttgctgttctggagcttgtggaagacagaacccaggtgttggagagggaaggagcaggtgtgcttggaaggccccgctgtcgggttccctctgcacccatcttgtgtcccccgctggtgctctgccatgggtttctcacagcctctttgaacgtcgtctncattgncagctgtacagaaaatgcaaaccgtggtattgacgcttaatacttcaat

SEQ ID NO: 780 - DNA, 305 bp, Homo sapiens
  SITE (28): n equals a,t,g, or c
  SITE (65): n equals a,t,g, or c
aagcaagaggagggagagcatgtatggnatttctggaacctagtcccgcttaggctgcatgactnacaggcaagataagacaagtctttcaagttctaaagactacagtgttgctatctgggaagatacaagctcgcctgatgggaaaacattctacctactctgcctcaaatgcctccagaagcacccagaactttctggaaggcaattagcaaactatctccaaagtcttgctagcatgcaggggacggtgtttgtaaaaggagaaattggattcactttaaataccgccaagttaggggatt

SEQ ID NO: 781 - DNA, 333 bp, Homo sapiens
ggcacgaggtttctttattctttataagaagtttgttttagatcaagtcataagcatatgtttccaggctgccgcaatataataagcccaattcttcgttaggtgagaaattagactgggcaactggagagggtagatggtgtccccgtctttcaggaccgttctatcttcatgaagcccttcatgatttcttctgccaggagcaatgtctccaccctccaacctccaggaatgtttcatacctttcttattacattggtcgtgttttgtgtgtgcttgtttcattaccattcttttttccttccttcatttggtaggtctttgttgtctttg

SEQ ID NO: 782 - DNA, 209 bp, Homo sapiens
ggcagagggaagcatcccggctggagcagagccagggtatagagcgagttccaagaaccaggctaggaaatracacgctaagtttcctatttctagcagctgccaaggccaccagcaagcatgggaaacctctgggaagtcacagctcctccgtctccagaggcctggtcagtggccaagtctagaaggacgcgggtgccacctggtac

SEQ ID NO: 783 - DNA, 134 bp, Homo sapiens
tggcacgagtcgtgatatgccacagaatctaggcttagattctmaggcctagatgaagaccttraatttktagatcccacaagacttcccccagagtctgctcatgggtagaggaaagggatggggtatatggg

SEQ ID NO: 784 - DNA, 443 bp, Homo sapiens
  SITE (423): n equals a,t,g, or c
acttgcccacagaaaatgttgacaaaatgaatctgtgggtcaagatgttctcccaccaagtgcagaagaacctggctccgttctttgaggcctgggctggccatccagaaggaagtggctaccagcctggcctatctgcctgaatggaaggaaaatattatgaaattgtacctcctcacacagatgtaaggagtgcccatcgaggtggmaggccccactgaaattgaagtcaagaaatgcaaaaaggaactgacacatctcagcaaagaaaactgaagggatttggttataagtggagaggatctcmagcatattttctgggaagatagaaagtggrtggaagcatgataatggaaagagttgaagaaccytttccagattaaaatgtaagctgatctggaacaacataacccccaaagagantttgcggcacctggaaaagc

SEQ ID NO: 785 - DNA, 644 bp, Homo sapiens
ggcacgagtaacaacccaggatcagattttccccttcctcatgctctgtcagctgcagagaaggatgcacacactgtggcaggagcacttcaaactggtggtcctcttcagccagatgaggctggccaacttccagacagactctcaggagagtattcagaaaatattagctgtgcaggaggaatcttcaaatttaatgcaacacatcttaggtttcttccagactttgacagatggcacatgcgaaaacgatggttaagcaaacaaccaatgtatcttggrtgctgaaataaargacaagaaaagtcacacagtttcagrtaacagtgtaattggacattcacctgtttgccatttcacacttccatgaacgaaaaactcactcacctcccagcatgctttgccactcttttactcacagcaaatccataacaatgaaacaggtgactttcatgctgctgtcaggaacgatctaatttcagctctgggtgactgattgcaattggctttgcctcatctgataattaatctatgtcaccattaattggaagagagaataattactgtcggtgttgacagtgactgttcgcttccccagatttccctatcgtcttggcccaaataaagctttgccattcagtaaa

SEQ ID NO: 786 - DNA, 204 bp, Homo sapiens
  SITE (169): n equals a,t,g, or c
  SITE (203): n equals a,t,g, or c
cctcatgcctggccttctttgtttacttgtgctgatccgccgacagcaccacgttcctcatggcacacctccgggcaagaacctttgtgtgtgtgcatatttgcacccctgccccacctccgcatcttctccctcctcctctaaccacaggacctccagtcagggcagnccctcatctgtgcctcttcacttgctccgactcnc

SEQ ID NO: 787 - DNA, 314 bp, Homo sapiens
  SITE (172): n equals a,t,g, or c
  SITE (188): n equals a,t,g, or c
  SITE (299): n equals a,t,g, or c
ggcasagcttttttctacagttactttttttccacacttacttttttttaatatcagttcttaagggcatttgcataatccccatgttttgtcacagtagtctcagaataataataccaactctttcaccaacaatataattttaccaaaaaagtttcagggccgcacacgnatggctcatgcctgtngtttcagcagtttgggaggctgaggcaggcagatcgcttcagcctaggagttcaaaagcagcctggggaacatggtgaaccccatttctacaaaaaaaaaaaaaaaaactnggggggggccccgtt

SEQ ID NO: 788 - DNA, 358 bp, Homo sapiens
  SITE (50): n equals a,t,g, or c
  SITE (51): n equals a,t,g, or c
  SITE (62): n equals a,t,g, or c
ggcagaggttctcttcatgtgtcattcccccaactagatggcaagtcctnnggaagccaggnccctgtttgtacccctctggtgcccccagcactaacacctaataggaattcaatgaaggtttggttggttggttgaccaggagccaaagctctcaggtcctgcccaggctcctccccacagactcttcctctcctgccccaactcaggaatcctcagaacagggggctatacagcattaggagcagagtctgaaggaggaaacatccagtgattactagggtgaggggstcagtgccacctgacaacaagattccatctttccagttaagttgcagacaacctgttattttccaca

SEQ ID NO: 789 - DNA, 339 bp, Homo sapiens
  SITE (165): n equals a,t,g, or c
  SITE (280): n equals a,t,g, or c
  SITE (307): n equals a,t,g, or c
ggcagaggggactacccctcaaaaatggaatacttttttgatccagatgtgttactggaaggagagctggccccaaatgatagatgttgtcgaatttttggaaaaatcggacattcatgaaggactgtcctatgaggagaaacactagagcaactttgaaaatgnaagaagaaaaactgcacccttaaaccctgagggagcatcttaacagagamgatggattttcatttagagtaagacggcggcgagatcaggaagatgccctgaaccaaagataccntgaggaacaaggaaaaaggaggcaagnggacaaggaatttcacaacagtacacgaaggg

SEQ ID NO: 790 - DNA, 651 bp, Homo sapiens
  SITE (633): n equals a,t,g, or c
ggcacgagctaaaagggtatggaatttatgttctaaggtccatgcatagtctaggaagagggtgaaaagtaccaatattagatgatatgtaaaaatctgttcttgtaatgtctagagtagtcactaaaagaataataagtacatataattaccaaggtgtggagagttgtggggatgtggaatagttaatcagtataaacaaaggccaaaaaaaatgagaaaaagaaataaagarcagatggaatataatgagaccttggtaagttggtagatctacaaatatactataattatactaagtgtgracagacaaaatgttccmaattacmagacaggtttcggrctggwtaagraggraaatagaaaaatgtgctattttctttttatgagaaatatctaaaaactcaatgtataaaatacttaatgggaaaagacacaccatataaatattaaccaaaggcaagatggtatagtagacaaaatccattatttgaggtaaagagggacactttgtaaggatgaaagtctctcttcatctgaaagatatgagttgtaaatttatacaggttataaacttacaaaaaattgacagaatttcaaactaatagaaaactccatagtcacagtgggaanatcttaccactttacggc

SEQ ID NO: 791 - DNA, 304 bp, Homo sapiens
  SITE (2): n equals a,t,g, or c
  SITE (6): n equals a,t,g, or c
  SITE (260): n equals a,t,g, or c
tntttnttatttccctctgtaaaatgggaataacaatagtatccatttcttttgggtggttataaggaatacttaagttaactcattcatgtaaagcacttgaatagtggcttgtatacagtaagcacacagtaratgtacattgtcattgtatctttgtacctcaacatctgaaactatggtttatacatagcacatactcattcatgctttgttgagtaaatgtaatattcagaargtgggaaagtgatttccttctntcttatcataaattagggttatatttggttggaaataaggcttc

SEQ ID NO: 792 - DNA, 354 bp, Homo sapiens
  SITE (305): n equals a,t,g, or c
  SITE (328): n equals a,t,g, or c
  SITE (348): n equals a,t,g, or c
agaccccacccaccaccaaaccaggagaaaccagggggatgtccgtgagagaatcaggagcaaccctcactgctgggctccaccacagttgctggggcttcatggggcataggmacaagcgagtgtgacatatacacacgtgttcatatattttgtggggtttttgttgttgtttttgagacagagcctcgctctgtcacccaggctgcactgcaatggcccaacctctgcctcccaggttcaagtgattctcctgccttcagcctcccaagtggctggggatttacaggcacacgccaacaaanccatataatttttggaatttttnaatagaaatgggggtttcancaagtt

SEQ ID NO: 793 - DNA, 206 bp, Homo sapiens
  SITE (3): n equals a,t,g, or c
gcngatggagtgtcagtggtggcagaagaggggagtcactgttttcttcattagttaatgcctctcccctggtgggagggcaagasctatggtctacacagccaaagtgagagggtggttgwgcaattctccagcaaactcaggcaaaatcaggcaagcatatttaggcctaggagtcctggttaccacagccttaaattgttagg

SEQ ID NO: 794 - DNA, 299 bp, Homo sapiens
  SITE (41): n equals a,t,g, or c
ggcacgagcagaggtgtaagtttcctatctagaagactttnattttaatcaacccacctttaggacatggctggtttttttgtttgtttgttttgtttgttttgtttgttttgttttgtttttgggaacggatcttgctcttgttgcccaggctagagtgtgaatctcgggctcactgcagcctctgcctcgcttggaacttcaggaggcggaggttgcagcgaagctgagttcatgccactgcacttccagcctgggacggacagagtcaggactctgtcttcccaaaaaaaaaaaaa

SEQ ID NO: 795 - DNA, 348 bp, Homo sapiens
ggcacgaggttgaggtcattttggggagatctggttggagagtgtggctgcctgggaatgaggcccaattgccaaaggaccccactatccacctcacaccaggtctgtctgatgggttgcccaggaaaggcccctcctcctttccagccgtagttcagaatttggaggctctaggatctatactgtggttcagaatcacaccaaggggagtggaggggacaggccagacaccgggcacggccccttgtgttcatcttcaaacctggttgggcaatctactccccaaattcttaattttttgattagggcagttttycagagaatagaagtaaaaaaccagaaaaaggg

SEQ ID NO: 796 - DNA, 327 bp, Homo sapiens
aaagaggatgggtaggataagttcaaactgctttaatggctaacaaaattcaccttkattcctttttatttttagttgacatgtaaaaattgtacatatttattggctacagagtgatattttgatacaagtataaagtgtgtaatgatcaaatcagagtaattagcacatcaatcacctcaaatagttatcacttatttgtactgggracactcgaaatccttttctagctttgaaaaaatatacaataaattattgttaactgtattcaccacatagcactatagrrcagtwgracagratttattcctcctatattgctgtaat

SEQ ID NO: 797 - DNA, 53 bp, Homo sapiens
tgttagatcttggtttgtataaaatataaagcagagcatgaggaaacaaaagt

SEQ ID NO: 798 - DNA, 374 bp, Homo sapiens
  SITE (45): n equals a,t,g, or c
  SITE (46): n equals a,t,g, or c
  SITE (366): n equals a,t,g, or c
agcaggtgtccgtttctcccaatcactttcttaaaatactaaaanngtacagcattcctttttcccctggctctaagtcctgaccttttaaggcctctgttcaagagcatgttaattagtaacttccttcagaagaaatctgggaaagcatttcctgggcaggagcctgggcctgagggtatacctggcctttactttctcttggcctgaggctggattctcattaaccagccagagagtcaagtcttggttttgtttgtttgtttgtttgttttctccccaaatctgaagtctccagccccatcttcaaccgtgttcagtccaaaggatgggacgtggctttttccaaacacagacaaacaaggnccagggcg

SEQ ID NO: 799 - DNA, 411 bp, Homo sapiens
  SITE (369): n equals a,t,g, or c
  SITE (387): n equals a,t,g, or c
  SITE (394): n equals a,t,g, or c
  SITE (410): n equals a,t,g, or c
ggcagagtctgggtccttatccctttcctacaattatgcagcttctttcaattgcagagaagggtcagcctgcaaaaacaacaggtccacaaactaaaacgttgcttgctaataattttatgaatcaatccacaagaagtgggctcctataattccctattatttaaaagcatttattatgcttttaaatcacttctgaatttttttatttttcttgattccagttagtagatggaaaaaaatatataagctctaaggtggtaaatgattagagttttttcacactgctgagtgaagggtgtcacatttwatgcagcttctgcwtaaaaccmggcttcmaaggtgggttatycatctagttgtccattnctccattaggtagccagnggaaatnaggttcacattaatgng

SEQ ID NO: 800 - DNA, 313 bp, Homo sapiens
ggcasagcacacacacaaaaatcccattcccagagcatctttctgtgcattaaaaatgtttgtagagtgtcgttctgtagtcaacttttggctataatataaatctctgcacatcactaaatattagctttttaatggctacatgttaatctcttgcttgaaagtactgtgcattattcttattttgggacatttggtttgcttcctgtttttcaaactgctccaatgaacattgttgtgcctatcatttgatgcagttttaatatttaargaagkttacttaatgaactatttacacatttttwaagccttt

SEQ ID NO: 801 - DNA, 347 bp, Homo sapiens
  SITE (185): n equals a,t,g, or c
ggcagaggttctcaaaacgtggtccccaggccagcttggcatcatgagggaacttgttagaaatacacatttttggtcttgcccagactagaatcagaaactctggagtaagggctcagcggtccatgttttaacaagcccgcctgctgcttcagatgcatgctcaaagttgagaactactgtangagagacagctgtttgtggtgtgtttttataagggaacactttgagtaactttcttagttgtaatatctcctgcttttccaccagaatgcagttttcattgcccattttggagatctkcacagtgatttaagagttattatcctgcgtgttaatgacccagg

SEQ ID NO: 802 - DNA, 284 bp, Homo sapiens
  SITE (266): n equals a,t,g, or c
ggcagagaaaaaacgcttgctctaatggcctcccattatccccagcataaggtcaaactcttttacacagataagagaatccagataagcagaaagaaaagaggcatctattcataatccaactatctagagaaaaccattttctttttttaaagtaaataaaaatgaacttattaaaaaaaaccatttatcatttcacaacacatcaataaccaagtagaaaataaaaaaatatataaaagcctgggcaacatagtgaggacctncatctctacaaaaaatgt

SEQ ID NO: 803 - DNA, 452 bp, Homo sapiens
  SITE (442): n equals a,t,g, or c
  SITE (447): n equals a,t,g, or c
ggcagagaaagaatcagccttactaaacaagctgtccatccttgcctccaaactggccccagccatgaagactcagaagctaagataccgacggtgttcctctgaacttcttccaatggctaaaagctacaagcgcctcaratataaaagactcctggacggattttcatccagcacagagcagctgaatccatatttggcagctagtggatgggataagaggcctaacagtaagcccatggcactttattctctcgaatccatcaagatgaccttcatagatttgagcaacaagatgccgtccctgctgtttggttctgaaatcttcccagtaatcctttcatgtgaaatcatccagctcagattgcacgatgagtcctcaaggacttttccggagcactgtgctcccggcaaggcttgccttaggagaggcctccagtgnccgtntaaac

SEQ ID NO: 804 - DNA, 442 bp, Homo sapiens
  SITE (288): n equals a,t,g, or c
  SITE (319): n equals a,t,g, or c
  SITE (386): n equals a,t,g, or c
  SITE (398): n equals a,t,g, or c
ggcasagcaaacacaattagatgtggcagctatatctgtagcaagtaacaggaaatgcgctttacaaaatgaattatagatatatttcttctcttactaacaacaatcaaacactgcacttcaagcgcattttagacttcttttcatcatctcctgtaattggaggataaggtaatataaagtaaatgtttttaagacaatgaatttagttgttttccccattctattttctcttatgaatagttgatttcatgaagtcttgggggagtagtactttcgagcatttcngctggaatccaaggktgtactcacctagaancctacaactcccaccaagccacagcccagtaagcacaactggtatgggttcccactggcccacaggntttaggctttanggccctgggcaacaaagttggggcccctttaaaccaaattaaac

SEQ ID NO: 805 - DNA, 337 bp, Homo sapiens
  SITE (266): n equals a,t,g, or c
  SITE (305): n equals a,t,g, or c
  SITE (329): n equals a,t,g, or c
taagttaaagtagaaagaaatcattaaagtgtatgtktgtgtatgtggagaagggggttaaaagttagataatttggtatcaaatggcctcagcaagtgtttcttaagatcacttggggatattaaaaaaaatacagctatatagattccgggtcaagccaaattaaaccagagtctctaggagtgtagcccacatcctagtatttttaaatgctcccaaggtgggtctactgtgctgccacagttgaaagtgactgggcccctancctccttagtaaccaagggcagccaatgttcctgccttngagccaaagggaagtagcctgagnattaaacc

SEQ ID NO: 806 - DNA, 154 bp, Homo sapiens
gcctcctgttgtccaccatgcccaggctgttcatacagaggggcacctgcaggcctgtgccaagctgccctcagcccccagyttggcctycctcccatgctaggttagtgcccaaagtttggtagggggccaaggcagcaggaggctggtgtgt

SEQ ID NO: 807 - DNA, 718 bp, Homo sapiens
  SITE (712): n equals a,t,g, or c
  SITE (715): n equals a,t,g, or c
ggcagaggggcttcggcgggcattagcagcagctgagaggcctgtgagaggttctggggcgccaccgcagtcattctgttcagcgggtatagggttcttggataaacaagctctgacgatcattcccaaacaagagttcaaaaatgttttccgcaatagcaatgatatggacggaaaggatgccctcctgcactgatgcctctggaggaccacaytttccattcagagacacgctcagcactcaactcatgctgcacacccggccgaccccagtaccgacactcacagaatgcaggttggagagagatgccgacttccgaggaggtgtcttcttcggactgaacgtatycccaaagaaaggcatctttggcctgatgaaagcaaagccagtgctcccttctcctagggtcagaaaaagtcaggggtacaagcagctggatcactgaccttatgccattgtcttcaaatcttgaagacatacattttatcatgtggctactaacggatcctggtgctatggtttgaatgtccccaccaaaactcatgttgaaattgaattgccattgtttaacagtataaggggtgactgggccatgtgastctgctctcatgaatggattaatgccattgtcatggagtaggttagttttctctggcgtgggctcctggcaaaaggatgagttctgctgccatgctgtctgtctcatgcacnttntca

SEQ ID NO: 808 - DNA, 405 bp, Homo sapiens
  SITE (301): n equals a,t,g, or c
  SITE (375): n equals a,t,g, or c
  SITE (377): n equals a,t,g, or c
  SITE (380): n equals a,t,g, or c
ggcacagtctgggagtgcgccctggccttgccttagggtttcagcctcggaggaccggttctgggcagtggagaagggacctgagttctgcctttctttatcctcatctctactcaagagcatacattaattttaggaatcctgatgacatccttctttttagagatcgttttgatggatatatcttccttgacagcaaaggcctagaatatcctgcagtggtagagtttgctccattccagaagatagccaaaaagaagctgagaaaaaaagatgccaagactgggaagccatcgaaganatcccagaatataagaagttttttagaaacctactgtgtggraggaagagaagaccatggccaacccggagaantnggnggggggagatggaagcgaagacaag

SEQ ID NO: 809 - DNA, 341 bp, Homo sapiens
ggcacgaggggaccctgttatcacaagtcagcactgtgtcggggaccctgttatcacaagtcagcaccgcacctgcccggcgcacagtcgcagaggcctccgtgcagacagacctcaacccggagacaactttacgagcggggagcaagaacaccagggccttaggaccccttttatgccaatcagtgccacacagaacagagcacaagggcgcgcatgagcctccctggcgactgcatgagtcacgaagctgcacgcttcttagagaaatgtccatgctttaacagccttgcccagaccggctgccgtggcttcacacctgttaattcccagcaatttgg

SEQ ID NO: 810 - DNA, 662 bp, Homo sapiens
  SITE (321): n equals a,t,g, or c
ggcacaggtttcatctgcagccttccctctccagacagagcagctacaccagtaatggcactcttcctaggacgggactaaagaggacgccgtcttaaaaacctgacgtgccaccaaagccttcctttgttcctcaaaccccatctgtcagaccactgaacaaatacacatactaggcctcaagtgtgctattcccatgtggctttatcctgtccgtgttgttgagaggatgatgttgtaagggtacttaaaacaagagactcgcttgtattttaagagaaccaagtggccaaagaaactctttctaactttggcaacatncagaacttggccacatgtagctactgcagcaaggcttctgtgtacttgcctgaaaacaaaggaaggtgctggtcattccatttcttttgtttgaagctaaagagatgtgtagctcacaggggctaccttaccagtataaagrgctgataacagtactcagaagaatctgtgaacaaatacttgaaaatgggttcaatgtagactgccattatgtgtggtcttcccattaaatgtgaacattttaatatgtatgcattcaccttgcctcttgcacaaatgtcaaaaaaaagatggtaatatctcaaagaaatgaacttgtagattaccaagcagtttgctaa

SEQ ID NO: 811 - DNA, 234 bp, Homo sapiens
ggcacagaaaaaacgctatgccactgtaataaaaggttgaggtagctatgtatatataattscctgtttatgcagaaaatgtctggaaggatatacaagcaactgaaatcttggctgggtgtggtggctcacgcctgtaatcccagcactttgggaggccgaggtaggtggatcaaaggtcaggagatcgagaccgtcctgtctggcatggtgaaccccgtctctactaaaaaa

SEQ ID NO: 812 - DNA, 361 bp, Homo sapiens
  SITE (314): n equals a,t,g, or c
  SITE (319): n equals a,t,g, or c
  SITE (349): n equals a,t,g, or c
cggttcgttgaacgcgagagaacgctgagccgtctgcactgagcccgggagcatcttcagggcagcgcgcccacgcgcgaggtgaatgaaggacacggcctcttgacactcccaggcagcacagatagacggatccraagagtttraagtttgaaatcccagaatgaggaaattcatccagcttggagacttccaatcccttcattgtgcagaaggttgctaatgctctcaggagaagccctttcaccaagagaatactttccacataagagttcctctcccattggagactaaagggaaaacatggccatgtncatgntaagcccaacagccagccttttggccagcntgttttgaaagg

SEQ ID NO: 813 - DNA, 429 bp, Homo sapiens
  SITE (376): n equals a,t,g, or c
ggcacgaggtttattgcgaaaatctggtggagtacctaaggcaaatcccacaaaagtatgggagtacagctaagactgtggcctctaaaggctctsttgtaatctggcaccctactcagctcccagaaattcatcaaaattaccacaagtgtccctactagtttacagtgccagctgcttcactctaagtaagcagttttcagctaaggctctgtgaatgtgcctgtttcccagaatttatgtggttgtttgccccamaacctcatttctctgrtggatacaagaaaagtcaatgattttcagtttgtgaggctttacttawttcaaggrtgagaaggatgctagaactaaaattgggatccattaaccataatcncctagtcacaataaatgggtttccattctcctgggtcagagccttttcccagc

SEQ ID NO: 814 - DNA, 323 bp, Homo sapiens
ggcacgagggacattccacccttccccactccccccacccagctcttctgtaacagctcactcttcctcacttttcaggtctcaagttaaatatcccccctctgggaagcaccctaggcacccccaaactcgggatggtgctcctactgacctttcacacaggactcacctctcacaagctctacggacaggactgagttcgtcctgcttaccatgatagccccaggacccagcacagggtatagtacacagaaggtgctcagtaaatctttgttaaatgaaagaaacatgggrtttttaagtatatkagtcttacctgactt

SEQ ID NO: 815 - DNA, 430 bp, Homo sapiens
  SITE (277): n equals a,t,g, or c
  SITE (404): n equals a,t,g, or c
  SITE (423): n equals a,t,g, or c
ggcacgagcttttccattctctccttcctcttgtttctgtccatatctctggcttcttttaatttcccttttcccttctttcttattggtctggccctgggtctggtgagaccaagggcacagaaggatactggctccatgccaacctttcctccaaggcacaatctccttcttggcatttactgagatgttcaacttcctgtgtttctaatattccttcctgttttataaaagaaaaatagattggattgcaaagtgccttaatttgttgatttcnaaaaaagcaatttaaaaaatgtgtaaccaccaataatcacataccaggtaacggattaattgactcctgggcttgcccggggtttaaccacacataaagaaatttacataacacatgatccagtagngaaagagcaaagaatatgnaagcctg

SEQ ID NO: 816 - DNA, 461 bp, Homo sapiens
  SITE (400): n equals a,t,g, or c
  SITE (427): n equals a,t,g, or c
ggcacagatgacacccaccatttagtgcctcagccattattcaagtgtgctgtgcctttcctactggccacgttaatgagagggtggagatagcaagttcctgctgaaattttcacaggaaagctaagcccttaaatgatgttttgaaggaatggtttctctaccatctgtaaaaaaggcttgattaattattttggtggcagaaactatatgctgtgcttcaggttaaacagcaggaacatattgaggttcttggggaagakttttcctacagccatcaaataggtgtccacacaggkttaaccsggackgtggcmataagaatgtggggaccattgggcakgcccattgtggaattccgggaaaaagtccggawggtggattaaaatgccaagtgggnaagagaaccggaaacctatggaagagntccatttgggaaagcccccaattggttgaatttg

SEQ ID NO: 817 - DNA, 489 bp, Homo sapiens
  SITE (471): n equals a,t,g, or c
ggcacgaggttaggcttgatactgttaatggaagaaattcatcaacttcttgaacctgcctctaaaaccccacaaagtagaggtataaaggggttttgactaagcaagtgtcgtttgctccctggaggatgtgtcagctcttgcttcttttcaattgcttaagagttaaaaacgattactgtggtctcagaggacagacaccagcactgtgagctggatctcacccacagatgtgttcggcttgacccacatagttgtatacgcatatgtcagtttgttgcaacatacaaaaactggggggtttcacatraaaatctgcattttcaatttcttttttttaactgccaaatctgacaacactgtgtcttccctgcttcccctgtgggaaacagtctgcctgactggggtaacagtgggctcccgggtacccacagtttaccagggccccacctgggcccactttccttccantcctgttttgttttccta

SEQ ID NO: 818 - DNA, 383 bp, Homo sapiens
  SITE (334): n equals a,t,g, or c
  SITE (340): n equals a,t,g, or c
ggcacaggtctttatctggctaattcctgttccctacctcttcttctaataagccatccttggtgctgtgtgctcctgtagctcctacccatacctctgccagtgcgtaattgtaattgtctcttgtctgtcatttccatcagtccctgagctctctatgggcagaggctgtgttttactgtctttgtattcccacatcaccagggtagaacatagtgccagctcattgcaggccctgattagatatttattgaataaatgacatattttctctccttctgatctgtawattckgaatcatttctttrwgtatagaatgcagagagckggaatncctgtnccaacagttgtactatggaagaaacacatttagttatgtcttt

SEQ ID NO: 819 - DNA, 466 bp, Homo sapiens
  SITE (450): n equals a,t,g, or c
gcacgagaaaaattgtgtctgtctttcttccttaaacaatacagtataacagtaatttgcatagcatttacattaggcattttgtgtagcattgtattaggtataagtaatctagaaatgatttaaattatacaggaggatgtgcataggttatatgcaaatactaggacatttcatatcaaggacttgagcatctgcatgcagattttggtatccatcagagttcctggaaccaattcaccacagataccaagggacaactgcacagattaaaaccttaatgcattactaccgtgtacccaccataataactaaaatgggaagaaatagaaatgctaggtattggtgacgatatggggccactgggaactcgagtactggtgaatataccccakgaccyagcattccttcccymagtattttccccamcagaagtgtgtagcctttttnaccacaagacctatac

SEQ ID NO: 820 - DNA, 454 bp, Homo sapiens
ggcacgagagcagagcaaggcggtcaccacaggacctgcgcctcccagtcggggatggcgagtccaggacccaggacgccctgctgcggctttactcacaggagccgcggtctcgggcttggacgctggggccttaaaggtggatgtcgtcctggccgaatctgctctcctgtcggcagctgcccccatggataagcattccaagtagtcgggtggggggatgacaacactgctattctcagacaagttcacggtgctgatgcttctcactggtgtggggctcaaacccaaaaaggacacagcacgtgttagataatgtctcaccamcaaaccccaaacatcctctgtgtccctgaccaaggacaacagtaatagtacatcaccaatcaaaactgatcttgatctcacacacacagacacacacagtacatatatcaatacaaaaactgtattt

SEQ ID NO: 821 - DNA, 874 bp, Homo sapiens
agctgaagcctggataaactgctgagccagattattcctgtgattggagtttaattgctgtagaacacttgttgagaacacattttttactttttttctttcagaattattcctcaatcattgttctctaatgaaaacaccgagaagtaaatctggtgcttcttagtgtaaatatgtttttctttttaaaaagtcattttaaaacaaagatgagagaactataaagtaaggggaaatatcattttatttaaaaataattattcaatgatagataatggagatacagaatgaatcattgggttcataggtatgatttgtgcagccagtcttagaggaaatacatcattttaacattattcccacaaaatgttaaagctcaatggtttgactatgagagtcaaacaattactatttgaaaatctcttatgacatttttataatctactctgtttttatttgcatgattatgcttatgtgatgaaccatccatgattctgatattgtatttctttccagtattaacatgtgtattgtgtggccaactctgatttgtacaccgtattattgttgtaatgattcaactgttcctacatttaattgcagtttaattattatgccttttggggttaaatgatgtgaagtgtttccacctactgataaataccatatgaaaacacgactaaaagactggatttaagaaacttgttatttttaaaaatatgaatttcaaaagaaatgttctcaaagacacatgcatttattttaaattcaaaaaattcttatgaatttattattgcttgtactttaactttttttattgtagacaatcctaagtgaataatgtctcatgggagaacaaaaaaaaaaaaaaaaa

SEQ ID NO: 822 - DNA, 513 bp, Homo sapiens
  SITE (55): n equals a,t,g, or c
  SITE (337): n equals a,t,g, or c
  SITE (388): n equals a,t,g, or c
  SITE (419): n equals a,t,g, or c
  SITE (510): n equals a,t,g, or c
ggcacgaggggaagtgaaaggaatgggtcccttcccactcagagggcggagcccnacttctggtgagagaaagctgagcagaatggatctaatctgattcctccacccagaagcccttaaaatgcagctttkttttaagccttcttgaagatttgggctagatctagaaaagaacctcaccacggaggatgtgcaaagtacaacacgtgaccccggagacggaagctcttctctacctccgtaaagatgatctctggatgaacagacatgatcatgcctgggagaacagggatgggacagtcccgcttctggaaagaccctgtctgggctgatgganttcatggtgcgccgggcagaccccaggccaagagaccccacccacagtacntgagtggttcagtggggaaccagaccagacntcaaaacaggtttgcagaattaagatgaaggagttgagctcaacacagcttcggcagttcccagggggggcttgagccgagggagagcccntgg

SEQ ID NO: 823 - DNA, 427 bp, Homo sapiens
  SITE (343): n equals a,t,g, or c
  SITE (366): n equals a,t,g, or c
  SITE (412): n equals a,t,g, or c
ggcacagctccgaccgcaaaagagtcttctaaagaccactctcagccctcaagggtccttgcaagtcagtgacaccacaggaaatgggaaccttgccaagaattagggaaattcaggtgtctgcaattccctaaaccctagggccaaaaaaaggatttggcagatgtttgtgtgtcctggaggcagatggatgaaagtatcagtaggctccgtggcttwaagtgctagtycagtgctcgccattggtcttttgcatcttgtcacttctgtctgggaggcattcagagagctggaaaggttacacatggcatggttaacatctggattggaccctgggttccancatcttccaggattagtaaagtncactaagcccctttggagagccagttccagggcattcaaattcacnggggctttaggggtt

SEQ ID NO: 824 - DNA, 349 bp, Homo sapiens
  SITE (337): n equals a,t,g, or c
agcaaagggaaatgtagagagagatagcaaaatgaaattaggcaaagaatttttcagaaatatggaggaggaggtcgggtgtatgtrataagaaacagactcacaacgaccgcaagttaactgactactcgaagcctagcttttctgggtccatgggcagtagttccgaaacttcgctgcacattagaattactgggggagattatcagctctgacagccaggtgtactctgacctgatggaaatcgaragggtccatggggctgggagcaggcatcattgttttttraatgatcccaggatgttccccttgtggcagcaaatttttggggaacagnaatttcccccca

SEQ ID NO: 825 - DNA, 356 bp, Homo sapiens
  SITE (331): n equals a,t,g, or c
  SITE (345): n equals a,t,g, or c
  SITE (347): n equals a,t,g, or c
ggcacgagaaaagtcataacgtgatagcacattctcttatataagttacacagacactttccatctctaccgagaaacaaattgccattgarcccctcaragatacagagctgatagaggaaaacatttctcctgtcatgtccaggattacttgtcaagaccaaaacatttgctgaaaccattaattactttattgaaccacataagatttcttttagactagtcaagtggcccataagatttcttttatcacctatgttataaaaccattattttgggaaacttattagcagttctttggagagagaggatccacacgccattatagtanggaataaggtgtancnttggggagc

SEQ ID NO: 826 - DNA, 692 bp, Homo sapiens
  SITE (24): n equals a,t,g, or c
  SITE (48): n equals a,t,g, or c
  SITE (218): n equals a,t,g, or c
  SITE (227): n equals a,t,g, or c
  SITE (685): n equals a,t,g, or c
ttgccctcgggtgatggaaacagncccacggaaggattggatattagnaaaagaacagaatgagagaaatgtttaataaatgttaggcacccccagattaaacaggtccaaaatccatgaagcctcagagcaataatgaaaaggatcctcctgtttcctggcataaaaactgccttcctctgcctacacaggggcccaggaagagctgaacgaactgnctaaaatgncttccccatagtgtctgggattataggcatgagccacgggcctggccctgaaaatcttaaagtttagctttgggacctctcccattttctcagaaatctcatttggatccaactgtgttttataaacctgtgagtccacattacagttttgctgtctcatgactacaattctaaaatgaaagctataaggtcttatttgtgtttctgtctatgtatgtatgtttttscatgtcgtatgtcgtgtctccaagttgaaatctggcatggtcarcyagacatcccttaagaaattctatttggggtggctggacatggtggctcatgcctgtaattccagcactttgggaggctgaggcaggtggatcagctgaggtgaggagttcgagacaagcctgggccacatggcgaacccatttttwactaaaaaaaaaaaaaaaaaaccccggggggggcccggnacccatt

SEQ ID NO: 827 - DNA, 436 bp, Homo sapiens
  SITE (387): n equals a,t,g, or c
  SITE (413): n equals a,t,g, or c
ggcacgagggagcttttggctccacccccaccctccaggaaagggagakgggctggagattgagctaataatccatcacgcgtaagtaatgaagcctccgtaaaaatccctgaactacaggatccagagagcttytgggctggtggacacatccgcatgctgggagggtggcgccccccaactccacggggacagaagctcctgtgcccgggccccaccagagctcgccctgtgtgcctcttcgtcttcctgttcatctgtatcatcaataatgtcctttacaaggacattgttgtccttgtgataatgaatgaggaaggaattattccattcaggaaggagtgagaccagatggtgtcagatggtgtcaagggagcaagactaatngggccagtttgtaataaaggcttagnaacctatacatgtaaccaagtgt

SEQ ID NO: 828 - DNA, 330 bp, Homo sapiens
ggcacgagggggactgcacgttcctgaggccacttcacacttattgagcaaaacgaggtgctgtcctttaagcctggggctgaggtgtttccctcgcttgggtatgcgccgggtggtgggtggactggcctcgaatctggaataagttcaggcattccttttccctctctctttccaagttgaactttaattcttgggtctctggaaccacgtattttgtttggtgtgggaggtattaaatggcagaattctaggaagtaaatattgtgaatccctgattttgctctttkcttattttcttttctctttcctttcttttcttttcccttg

SEQ ID NO: 829 - DNA, 340 bp, Homo sapiens
  SITE (285): n equals a,t,g, or c
  SITE (300): n equals a,t,g, or c
  SITE (327): n equals a,t,g, or c
ttttgacaaaaagaattgtgtgtaatacagagattatgtaaagcctatttatgaaagaaggtaaaaagaaactagtaaataggtgaaagagatgtaaagagagtcacagatgtaaagatgtatttttggtaacaaagattaagaagaaaagagaataattttgtatgagaaataatcttatgtggtaaatttttgtcctacagtaaaatgactgtttatttaagaaagagggaaatttatgacaaaacaaaaagttccaagcatgttgtaaattgtctgtgtaancatgataaggttccntaaaaagaaagctataaaaaattttgntgtatgattacct

SEQ ID NO: 830 - DNA, 344 bp, Homo sapiens
  SITE (167): n equals a,t,g, or c
  SITE (336): n equals a,t,g, or c
ggcacagcagcctgggtgctgtgttagccttagtggccattttcataatgtctctaaacaagcgacactctagtggtgatgggaatagtaaattaaaaagtgagtagatggatttggacaacataaagcaacaaaatttgagatggttgaatgagggccggacatgnatgaaaagggcactttggaaagggttggggtggaagggaaatatttccgggtgggtgtgagctgttgggcttccaggtcagctcttggccatgcagccatgcctgcaggatgatccagaattcacggcacctccatggggaaggttaaagactgggagcaaagcttttnccaaggtg

SEQ ID NO: 831 - DNA, 377 bp, Homo sapiens
  SITE (363): n equals a,t,g, or c
  SITE (365): n equals a,t,g, or c
  SITE (376): n equals a,t,g, or c
ggcacaggcagtgaggaagacatggaagaattgtttttgaggaaaatattatttgagtttgccataatgtagagcaatgctctctgataaagccctccttctatggtgatggaaatgttctatatctgcactgtctaatgtggaagccgctaactacatgtggctgttgaacaattgaaatgtggctagtgtactgaggaactgaatttttatttaattcattttaattcaataaatttaaacttaatgtggcygtggctaccacattggacaatgcagctctagagattttatgtctgagtgattaggataacatgccaacagtacagtgaacactttaaaaggtagatatttacagaatcncncatagaccttnt

SEQ ID NO: 832 - DNA, 367 bp, Homo sapiens
  SITE (318): n equals a,t,g, or c
  SITE (341): n equals a,t,g, or c
  SITE (364): n equals a,t,g, or c
ggcacagataagttgatatgaatatracttgagctttgggacttacctcaagatattaatttgtttaggcagtttattttgtgatttataaataaaattttwatttcctatgtaacttaaaaaaaattatttccccatagccgtgctggtatagaggactctaagaagtggggcatgctgtttctggtgaaccagctgtttaaaatctacttcaagagcaattgacagctcaaacctggaaagacgattacagcactgcacagagagttaacatacaaatactacgttgggacgccaaggctatgtttggacagcggnttttaagccaagccggaggagtnaccggtccattggcccttggagncat

SEQ ID NO: 833 - DNA, 280 bp, Homo sapiens
  SITE (194): n equals a,t,g, or c
gccacccaggtgtgactcactcaggccctgcagacagagccgctgcctgtgagttacttgcagtggagacctgagtcaagaggtgtccagccctgcttggggtcctgggagaccatgggtccaggcagtccagcccagcatgagactgtaactccccatcccagagtgaggagggggctgccaggctggctgtnctggctggggggctgtctgcagtgtgagttggggcaggatgcagggccgagttagaaacccgtggggtgggtaaccagctcctggg

SEQ ID NO: 834 - DNA, 480 bp, Homo sapiens
  SITE (451): n equals a,t,g, or c
  SITE (469): n equals a,t,g, or c
cctccataaaatggtgccataatgtcacaatgcctaaagtatggggatttgcctcagattcttctcctacttggtggaacaggtgcaggagctttgtaaaggtgttatgttttaggatgtgcttgcataataatacaaatagttacgtggtgtaaatttgaatcattgtaaaagacgtcttggtaagagaaactgccatttctcatatattgctggtaggaaaattagagttttagtattttaaagaagtagactggaaaatgtagtaacagtaataattttcataaactttggctgagcattcttactcctatgagtctacctcccataaatagaagcagcagcatatgatatgtgtacaaaaatgtttattgtgacaatgtttgcagtaacaaaaaaaaaatggawttgagcgattaccatcaagaggtgggatctatgagtgaattgnggtccaaatggtattgcngactggaaaag

SEQ ID NO: 835 - DNA, 450 bp, Homo sapiens
  SITE (444): n equals a,t,g, or c
ggcacagcagagatgaagttgcctatgtatgtcatatcaattcaatagctgcctggggtcaaacacctaggggttgtacattccattactgtaaatgattgagagctggtttgtggtatggttggctttgctaagcatttttgaagatgaacagcatgtgcagccaaagaactaatttgctaattaaggtggaacaatcattctgaatgaaatataatcagagtactccgcagtttgttaagaagtactggggaggaggggaatgtgtctcacaataaaatgagttggaattgttgagctaaatgaatttaacctgttttttgactcaggcctactcagagcctctaatgtgtgcacgtgtattgtgaatcctctagagagcttgggtggacggaaaatgaagtgctggtattgaagtaaagaagcttgaagaagctgggcacngtggct

SEQ ID NO: 836 - DNA, 355 bp, Homo sapiens
  SITE (195): n equals a,t,g, or c
  SITE (342): n equals a,t,g, or c
ggcacgagtggagttgaaggttgcagtgaggcgagatagcgcgcttgctctccgacctgggcgacagtgggagacttcatctcataaataaataaataaataaatattacttttacgttttgttaaacttccacttgtttttgtttccgttgcatgaaccttcgtaaagcttcaggaggctgatggcagctcttnccccaggcttccccgtggcgcccgcagccgggttgggccagaagctgggactgtttcctcccgtggggtctttggtggggatgtccccagaggagtggggcaggaggaagggcacggagcgcccccgggagccggttcagagcgcanttgggttgtctgt

SEQ ID NO: 837 - DNA, 360 bp, Homo sapiens
ggcactcaccaaggagtggccatggctttgcatgcttcagctcagtctctggcactgaccaaccagaaaggtgtctgcacttggttcgagcatccttccctgtragcttggggatgcttcagttcttgccctccacacagctatgggtagattccaggaggccagctgcagctcagggacagattatgactgagttttcaaaccaaaaagtcagtcagtgactccacaggacttctaccattaaaactaaagaaacagactcacataggtggttttgaattgcccaaagttgcccacccaactamtggcaaaattcttcagcaagttgtggatgagggattccatggttatggatgcggg

SEQ ID NO: 838 - DNA, 362 bp, Homo sapiens
  SITE (117): n equals a,t,g, or c
  SITE (349): n equals a,t,g, or c
  SITE (356): n equals a,t,g, or c
ggcacaggttgtggtgggtgcttctagctgcacagtacttgggtcattttaaaatatgttcttggtgttatcttatggtttttagagagaggtggttccgaaaaaacaccttgtggnaggatttgtgtgtgttgtgtgatcgtgtgtgtgtgtktgtgtgcgtatgcaactatgtgagagtgtgtgtttatgaggggtttctatggtgatttcaataaccagctatcaccactgtcactttcttctctgttctgttatttccatgcacaatggaaaacttccgcagttataaaaatgaatgggaagaggaaaggttgggaaacacataatgcctcgtgctcctgctcanccagagnacggaa

SEQ ID NO: 839 - DNA, 526 bp, Homo sapiens
  SITE (379): n equals a,t,g, or c
  SITE (391): n equals a,t,g, or c
  SITE (500): n equals a,t,g, or c
ggcacagtccaacagtatgaggcttactctgcctgcatggactttaagggagtgctaataagttgtgtacatgcatctcatccctaggctcttgttcaggccacgaatgctatcttgcagcccaaccaggaggccctgctccaagccctgcagcgactgagactgtctattcaggacatcaccaaaaccttaggacagatgcatgatggaaagacaacccagcaatgcctgcaggctgatgtatgaaggagtttcccaagagcccctgaaatactccggcgggagtgcagctcagagcacagtgcttcatgcctttgatggagttcttaggcattcgtcatagcaaggaaagtggtgacttctgtacagattgaggggnttacatgcttcnttcccataaggccttcatagaagacatccactcagcaccttccctgagggactacatcctgtcctctggacaggaccactgctgacagctttaaccatgtgtgcaggcngggcaagtgcggagtatcacatcacc

SEQ ID NO: 840 - DNA, 322 bp, Homo sapiens
  SITE (63): n equals a,t,g, or c
  SITE (72): n equals a,t,g, or c
  SITE (75): n equals a,t,g, or c
ggcacaggggacgaagaggtgtcacttataaaggatgtgacttggaggtctattaaaaagaanagcaataangantttcaaggcatggtagtacaaatgagtgaaatgcaagtctggaccgtttaaaagctggtaattaaacactttattccatatcagaataaaagtcaactagttgaatatttctaggtgagatgtggtactacttttttttttgctgttattttatgtctgtatctaaaatatcttactgcactcttttttcaggttgccagcagatcccttggagttttgaaacctggacgggccaaatccagagctt

SEQ ID NO: 841 - DNA, 381 bp, Homo sapiens
  SITE (274): n equals a,t,g, or c
  SITE (281): n equals a,t,g, or c
  SITE (359): n equals a,t,g, or c
ggcacagcacagatcctcccaggctgccagccacaggcattccatggaaattagtgctccagtgttgatcagctccagcgatccccgagccgcggccaggattggagaccttgctcatctgtcgtgcgctgctcccacccaggatgtctcctcctcggcgggatctacccccacggctgtcccacgggctgcctcggtgtctggagagcagggcacgcctcccaaggtccagctgcccctcaacgtgtgagctgccctttgtgtctgtcggggntcctgtngcctgcagcccttcccttcctggcctgggctgacctgtccacgtgtggttttccgcagggttttttcccatgtggttnaataatttgggccattataatt

SEQ ID NO: 842 - DNA, 435 bp, Homo sapiens
  SITE (9): n equals a,t,g, or c
  SITE (248): n equals a,t,g, or c
  SITE (386): n equals a,t,g, or c
  SITE (402): n equals a,t,g, or c
ggcacagcncgccatgcacactacaaggcctgggagtggggaggcgtggcccgcagagggagggaggagtggaggcagtcatcatcctcggctctcctctgtctccagcggacttggctgccctgcttcccgacctctccggccgcctcctcatcaactctgtcttccatgtgggcgctgagcggctccagcagatgctcttctcggactcgcccttcctccagggcttcctacagcagtgcaagttncacaggtcagcgggcgcatgaaggagaggctgaggttacccaggttgcaggggaggggtgaggaagggtagcccaggacaggggaaggcattcttagccatggggcaaggcgaggtggtgaaaagcattttttttcanacccgaagcagtttgncatttattagttgggtaagtttgggcaaatttt

SEQ ID NO: 843 - DNA, 436 bp, Homo sapiens
  SITE (339): n equals a,t,g, or c
  SITE (398): n equals a,t,g, or c
  SITE (411): n equals a,t,g, or c
ggcacgaggtttttcaatatcttctatgaattgatccaatactacctatcarattttattgcctagagaacctactttcagctggccacatccactgtcttctgctcccaccttgttctttcctaccccttgtacttttgagcgttgttttccatgagccaatatccaatatccactcccacccatttctgttggcaaatgaattttgtcatgagttctggctccagtggatgggcttgggttgcctggagcactgtgttgggtctgagctcagtaggaagtggaaccacactggcatgaagagagtggcagtacacaggcagcataattgccacatcnggctagctaagtcataatccagccttcaaagaccagcctaagtctcactttctccatgnaacctccaatcantccttggccaatccaactggaatct

SEQ ID NO: 844 - DNA, 810 bp, Homo sapiens
taatttgtggttctcaatatgagtgaatatgcaaatcatgttagaggctctttcaaacaaacagataaacaaatatttggaacatgagttaggcatggatttttttgttaactcctaagtgggataataacttttccctcaactccaggcttatcatccttaacacaatagttaaggatgtgaacactggarcctgactgtctgggttcaaattctggcttkgccacccataagctgtgtggccttgarcatgtcacctaacctcctttgcctcaatttcctcatctgtaaaacagttgtaataatacctacatttgccagggaaattgtgaggaataaataagttaacttgtgaagagcacttaggctatataaatgctattattactwttamtttkatygttgtkttmtaacttctctggagagacaggaagttggtcagagggtgagatgcctgaattagtgatttcaagatgaggcaggttgaggtgatgtgagggttcacagtatgacagtggaagtggatagcagaggtagaatggaggaaagatcatcattggaaggagaaaattagtagtagtattaaagcatgttctttatgagactggagtacctgagttcagatcctgccttcactacttaatggcagcgcaaccatgagcagattacttaattgttttctcatctgtaccactacagaaccatgagcagatttctcctctgtaaaatgaagataataatagtgacctatcttatagggctttcatggaatcaaataagttagtaaataacatactgatttcttagaac

SEQ ID NO: 845 - DNA, 565 bp, Homo sapiens
ggacgaggagagagagagagagagagagagagagacaacagcccatccttcttcaaccctgaagaggctgccacagtgacttcctacctgaagctgctcctggccccctcctccaagaagggcaaagctcgcctgagccctcgaagtgtgggcktcatctccccgtaccggaaacaggtggagaaaatccgttactgcatcaccaaacttgacagggagcttcgaggactggatgacatcaaggacttgaaggtgggttcagtagaagaattccaaggccaagaacgargcgtcatcctcatctccaccgtgcgaagagcccagagctttgtgcagctggatctggactttaatctgggtttccttaagaaccccaagaggttcaatgtagctgtgacccgggccaaggccytgctcatcatcgtggggaacccccttctcctgggccatgaycctgactggaaagtattcctggagttctgtaaagaaaccggaggtattaccgggtgtcctttcctgcccaaactggacttccaacagggacagaatttactgcaaggtctag

SEQ ID NO: 846 - DNA, 369 bp, Homo sapiens
  SITE (310): n equals a,t,g, or c
  SITE (333): n equals a,t,g, or c
catcctgggtgacagagtgaggccctatctcaaaaaaagaaaaaaagagacataaaagtggagtggggaaaaaatagattagaaagtttcatgatgtatatttacttaggttgatgtcaacgaggcaatcatgattatccctgatactactttggtcactgccagaacatttgtttaggcaattgatgaaactgacctcatatgaaatgtaccttctttgaaaatattaattttccaggagatatattgaaactcatagttagaaataatatgccttatggttctgatagattttttttttttaatttanggcttttcagttaatttataggngtccatagaagctgaatagaaatgtaaatatttgac

SEQ ID NO: 847 - DNA, 416 bp, Homo sapiens
  SITE (312): n equals a,t,g, or c
  SITE (392): n equals a,t,g, or c
  SITE (410): n equals a,t,g, or c
ggcacgaggctcagcttttctccacactgttcatacacaaccttactatctttagctctgattcttatcacgtacagtgattccaaactacacatactcacaagatctattgagttgtctttttccatttaaaatgaatttatacttattgttgaaatattgaaaataagacggggaaacatcccttgagagtctcaccaatgaatgagaacaaacaactgcatttttcctttctcttttaagcacaggtttttctcttagaatgaatatctgtgagagattactttgattcatttttgatcatgattcctnaacaagagaagctgcaggatagtaaagctgatttacagcaacacagtaggattatcagtgttttagtcgctaaaatatcnagaatatgattttggaancccaaa

SEQ ID NO: 848 - DNA, 401 bp, Homo sapiens
  SITE (342): n equals a,t,g, or c
  SITE (354): n equals a,t,g, or c
  SITE (388): n equals a,t,g, or c
  SITE (389): n equals a,t,g, or c
ggcacgagggattatgtcttattattttgtgtgtttctcagcacctagcaacaggtagtaagctccttgggtgccgaatcagtattttctgccttggaatcaaatgtcagaagtcaacactcaaacttcttttsaccaaaaagattctacgacaattatccagaagttacaatgcaaggaagaagaattggatgttaagtcttgcgtaagggkgttatggggagtggatcaagacaaagtagaggtatctgctcccctcatccttgtaagckccatggccatttaatccatgctccacattggatcatctccatacgagctttcacattttcccccacaagnaatgggagcgtnaaccccattaacctaacccatagagggagggaanngggaagcccaga

SEQ ID NO: 849 - DNA, 283 bp, Homo sapiens
  SITE (275): n equals a,t,g, or c
ttgattggaatctcattgaattgtagatcaatataggaaaattgacatcctaacaagactgagtcttctaatcactgaacatactatactcctcatttatttaggtctttaattctcagaagtgttttgcagttttcagagttaaggtcatatacatcttttgtcatatttatctgtaattatttcatatttcattttgatgctattataaatgagttttaatgttttaatttatgttgttcatgtgagatatagaaatacaatgrgttttgtangttggatc

SEQ ID NO: 850 - DNA, 361 bp, Homo sapiens
  SITE (349): n equals a,t,g, or c
  SITE (357): n equals a,t,g, or c
  SITE (361): n equals a,t,g, or c
ggtgaaactgcatgttttcctgttccaagaagtgcttgtgatcactcgagccgtcacccacaatgagcagctttgctaccagctgtaccgtcagccaatccccgtgaaagacctcctgctggaagacctccaggatggagaagtgaggctgggtggctccctgcgaggggcattcagcaacaatgagagaagtatggatagcagtcggggttgacctgttgaatgtttttggccgtggtagtttggagggagtgggcagctggtggaaagagaaaagccacggtcttgaaagtcaaactggcatttgtatgctatttcatcacttccctgattatgtaactttggtttnagtccccngtgn

SEQ ID NO: 851 - DNA, 428 bp, Homo sapiens
tcgaagaaaatgacctgatcatttgaaaagcttaacgcctgcttaataaggcaccaaaaaggaacaagagccagttgccattgttagaaaacctatctggaccaccctaaactgattttggggggtaaatactgacattttaaaataaaactttaacccttttaaatatatccattgaaatctgtaaaccatcataatttgttacccaccatcatctattaaagaatatattccaatttatttattgggaattttagattgtctctttttctgcttgaattagtatttacatttcttcctccccacagaattttataccgatttaatatatttcaattctataaaatccttaacaattttctgtgtccataagttctaagtattaaaaaagcttggaattgagctgacattacaattagtgtataaac

SEQ ID NO: 852 - DNA, 506 bp, Homo sapiens
ggcacaggcggaagtcacctcgtggcgtaggggagaggtaacaccgagaagaggcagcggcggtggcgccaagacgattggtgccaaacagggcagaacgcaactcagctctgggtttgtgaatagcacaatggaagaagctggactttgtgggttaagagagaaagcagatatgttgtgtaactgctgaatcacatgatattcttcaacatcaagactcaaattgcagtgccacaagtaataaacatttattggaagatgaagaaggccgtgactttataacaaagaacaggagttgggtgagcccagtgcactgcacacaagagtcaagaagggagcttcctgagcaagaagtagcccctccgtctggtcagcaagctttacaattscamcaggracaaagaaaaagtcttaggarasaagttttattattgatgcaagccctaaacactctttccgactccagaggagaagctggcagctctctgtaagaaatatgctgatct

SEQ ID NO: 853 - DNA, 531 bp, Homo sapiens
  SITE (15): n equals a,t,g, or c
  SITE (454): n equals a,t,g, or c
  SITE (458): n equals a,t,g, or c
  SITE (510): n equals a,t,g, or c
acaactttgccgganccccatttttaaggatggattaagcctagattttgaggccccagaagtaatacagccttgtcccacattttcaccttgatggagcccaaagactgtgtagtatgagcctcatgtatgcacacagcctactgttaggcagaagccctgtgcatgaaattccagaaaaatcttcattatcatagtaactgccaaaaatctgtaacaactatatgattctgctttagcaatatccaaaatctaggtgttaacatggaaaatgtccagaggaaccatgggagaacatgtttgtgctaaaaatgaaaggaggaacacacagataacttctaattagcatgcagtgggtcttcgtggccacgtttatttattttgttttattttatttcatttaaaaaaattttttgagatggagtctcgctctgttgcccaggccggaatgcanggtnacaatcctgggctcactggcaacctccatctcccgggttccaagcagttctncctggccttagcctccccaat

SEQ ID NO: 854 - DNA, 662 bp, Homo sapiens
ggcacgaggaagagacgattcacagaggagctaccagatgaacgggaatctggactgcttggataccaggttaaataaaataccctgttttcctatcttcaccttattcttctactatattctccctttaaaaaagataaattcacatcattctcccagtactaggatttctgctttctggaattcattttggttaggttttttatcctattcaacagactcttgaaagcctctgagagttcttactttcttatacatctcactcaaagctcttgatctaccagtatgtggtttgtatttaaaaccttggctttcagtggtgctctctcttttaccctccacctaaaaaagagagtgatatctccctccagtctccccwcccctcaagactgctagaaaaggagtgattctgtacatgtaattgtaaagttagccactaaagttaaaaagattcttaatttgtagttttggtgcaattttatcagaagtacctttccattttgccagaatccttgaatcattctttaaaccaaagcatttttttatagtttctagctaggtttatagaaactagtggagctatgggcagtcagttaaaaacaggccatagatagcataatgaattataacacccctgtccaagtcctataragaaaaaaaaa

SEQ ID NO: 855 - DNA, 356 bp, Homo sapiens
  SITE (121): n equals a,t,g, or c
  SITE (266): n equals a,t,g, or c
  SITE (343): n equals a,t,g, or c
ggcacgaggtgacctgcccagcatttgcagactcgctggttcctgaatatgagtaagcacagagtttacctagagagtttacctaaaattaacctttagatctactatttatttttgtctnaataaaatgaacaataaatatagtttagctgcatggcattaaggattctgtatgaatagatgtatagttgctgccatctccccatataaaaactctctttacatcgtttctggagccactttctttggctgtctggcagcatttnaaaatatattatttttccctaattagaaaagtcacaggttttagaaaatgggggaaaacaaaaagagccataaagantcatccaataccc

SEQ ID NO: 856 - DNA, 394 bp, Homo sapiens
  SITE (315): n equals a,t,g, or c
  SITE (369): n equals a,t,g, or c
  SITE (383): n equals a,t,g, or c
ggcacagggggggctggaaataaagctctataaaaactcatgaacagtgggtcttgatgagcttccgggtttatggattcgtgggctgcttccacctgctaggagrgtggtgtactctaactcagggacagaagcccctgtctgtgctcaggactcttgcagacctctttacctggctgttcatcttccataatcaactggtagacgttacatccaagaggaaataatccaggcaaggaagcacaagctgatccaagatgtgtagttctgtggctgccaattgtggtttttgacagatctcgcatcagggaagantatcctcaaaagagatttttacgagcatggaaggccaatgttgtgaagaggaangggattttagggcngtggtgaaggg

SEQ ID NO: 857 - DNA, 113 bp, Homo sapiens
  SITE (81): n equals a,t,g, or c
ggcacgagaaaaaaaaaaaaaaactaggtttttgaacttgcttaatcaaagaatttgtttaaacttttaagatgcgttgtnagattatctttccctaaaggaataatttctat

SEQ ID NO: 858 - DNA, 368 bp, Homo sapiens
  SITE (336): n equals a,t,g, or c
  SITE (363): n equals a,t,g, or c
ggcacaggaagcctgacagataccatcctaaccatttaattaaaggtagtagcactgataatgggatgaaaggacattgggtgtttcctgatatgatgcactgagaatatagaatcacttctgggacaatctgctaaaaatgcattgcttgaatctaatcaagaggaagcatcacacaaatccaagctgargggacattctgscaaaataattggcatgtaactcttgaaaaatgtycaaggtccaagaaaagaaagactkgaaggarggagttttcctgaataaarggarggctaatkgaaatgtkgacaacagraatgscaatgccattgccancctttgggtttgggattccggatccanggggg

SEQ ID NO: 859 - DNA, 125 bp, Homo sapiens
  SITE (120): n equals a,t,g, or c
ggcacagcatccacctaccctgtccttgaggcccctgcccgtgggctcccctcatgcctcctgctctgggacctctctccacagtggaggacctggagaggaatgacggctcggcgcagnaggct

SEQ ID NO: 860 - DNA, 302 bp, Homo sapiens
  SITE (247): n equals a,t,g, or c
  SITE (253): n equals a,t,g, or c
  SITE (284): n equals a,t,g, or c
ggcacagcagactttcacccctttgtgttcctgacattcaagagcccctgaggtscaacccctcctccatggagcctgggtcctcagctggcggatccgtgaamtcatctctggggagcattggcttctgtggtcctgcacctgctccttgcagccagttagggctcagagaggacacagagagcacacaaggtcccaggctgcacagagagcacataaggtcctggttatttctgtattgggggancacttnaccatatccatgctgagctcccgggatgcangaaaactctcccaaatga

SEQ ID NO: 861 - DNA, 275 bp, Homo sapiens
ggcacgaggatattagtgatttttttcagtggagccatatttatttttgctggcaacagggagaaattttcccctaattataattgattttctatagtgtacttgtttgtttgctctgtcttgagggaagggaggggaaacattgttattactctcccgaataatttagaagctgaagactccacctatggaatggaacttttcctgttctgaacaggaccaaacttgatgggatatggataagcatgtatttttcaaatggatgtcatcttcca

SEQ ID NO: 862 - DNA, 278 bp, Homo sapiens
  SITE (133): n equals a,t,g, or c
  SITE (273): n equals a,t,g, or c
ggcacgagcggggactctggagcattgggatttgtagcgcgccctctgggtaggcggctgtagcggagaggcgtgcgggatcgggatgtcggggctgctcacggacccggagcagagagcgcaggagccgcgntaccccggcttcgtgctggggctggatgtgggcagttctgtgatccgctgccacgtctatgaccggggcggcgcgggtctgcggctgccagcgtggcagaaggtgagaaaatctttatccttcaaattgggctgggtganaaatt

SEQ ID NO: 863 - DNA, 442 bp, Homo sapiens
  SITE (326): n equals a,t,g, or c
  SITE (362): n equals a,t,g, or c
  SITE (388): n equals a,t,g, or c
ggcattccacccagtcctctccagaatgctgccagccagggactcagcacacagcattgcacccagtcctctccagaacactgtcgggtggtgttactgccctgccattcagaggagggaagtggggcacagacaggtcaagtgacttggccagtgtcagaattgctagtgtacagagctgggaggcgagcccaggcccatgggaccacaaatccaacacaaaaatccatcctcctggcaccctracggagcaaaagtaggttccagttgttttcctgggttttcctgggacacacggattcttaaattccacagcagcccttggngggcccatctttaaaaacagcaattttgctttcctnaatgattctgggaggggcagatgttnaaatccatcgtgtgaagcaggttgtttccttccggagggttccagggggaaaat

SEQ ID NO: 864 - DNA, 315 bp, Homo sapiens
ggcacagcgcgggcccgtcatggaggcgcccaccgtggagacgccccccgacccctcgcccccttcggccccggcccctgccccggttccgttgcgcgccccggatgtggcggctgcgaaggagcaggaaaaggaagaaggtagataatgactataatgcccttcgagaaagactcagcaccttgcctgrtaaattgtcttataatataatggtaccatttggcccttttgccttcatgccaggaaaayttgtccatactaatgaatcactgttttactgggggacaatggtttgcaaattgcttcagcaaagca

SEQ ID NO: 865 - DNA, 296 bp, Homo sapiens
  SITE (274): n equals a,t,g, or c
  SITE (289): n equals a,t,g, or c
ctgttactttcatttcattttgattaataattcttggatgcttggcatcgatcgtatcactgctcctagaaggtaaagatcctttaggacatgagactggtagaagctggctgagataaaataagtatttatttaaactaatgttctcttaatttgaccattgcagatttgggtgacttttttttaacctttgtacatatacgtaatttatatgattctaatgtactatrtscatacttgaattggttttttcgtattttgcctactggcaaantattttgcctatttncagtcgt

SEQ ID NO: 866 - DNA, 553 bp, Homo sapiens
  SITE (536): n equals a,t,g, or c
  SITE (549): n equals a,t,g, or c
ggcacgagaaagcccagctgagatcatcagatggccatcccaggacaagcaagcagaactcctcggcctggggtcctgtttgccaaaaggwatctggatgttgtgagtgcctcaagtcactgactccccctcctcatgaccaggggatgatgagcagctgtttaataagccaccggtgtcaaacccrgtgccgggggcccagggaagaaccccgacttgggagtgcagccccttaggcatctcagagccagggacaggaaagaaagacaggttgtgttgccagtgtgactgaagcaaattaccttccctgggctggtttcctttatctatcttgtctatcttttcttacctccctcccgggaccttgagatgccttggaaatcagatgggaaaagcactgtcactcactgcaggggttgtggtaatgctggttacttgatgccactggggaacaccaaggttacagggagttcagttcatttggggacagttgccagcagttcaggaggcacaggttcacatttgtttccaaaccngggcagtcggtgntttg

SEQ ID NO: 867 - DNA, 378 bp, Homo sapiens
  SITE (374): n equals a,t,g, or c
ggcacgaggtgggatgaattttctaaagaacatgttgaaatattggaggttagggttattttaaaacatgagtttcttctctcacaaattaaagtgtttgatccctataattgccagactataagctctaatagggatagtaagatctaagtgttggtttagcaacgacattaagaaaattttaagtatagctctgaatttaaaaggtattaatattatttttcatttaaattgatagtaatttcatggaaaaacaaatggcttaaacccagggaagcaagggttataattgrtttttttgaggcatgttctcttttggttacaagtaaaaggtaaattaaaaggttttaaaagcctttggaaaggaatgttcnttgg

SEQ ID NO: 868 - DNA, 371 bp, Homo sapiens
  SITE (348): n equals a,t,g, or c
  SITE (360): n equals a,t,g, or c
ggcacaggctttgtgaagttacattctgaggcactcccaggctaaagcagtttgttaattgaagttcctgcaacaactcgtgagatggttgtttggggaacttcagttgaaggggaaagcatttktcctcatattttgaaaaaggctgatcatttttmatttgagaaagtctcttttcctaagaagggtgtgcatgattaattcctgatgataaaaataagttggtcctgtccttgtttgctcttggcatagagaaggccacttgttttctttttgctttggtgtctatttgtgggaaggaagaaatcccggggacaagatacatggaaagataaagtccaactttcntccggatgggcnggagacaccag

SEQ ID NO: 869 - DNA, 443 bp, Homo sapiens
  SITE (400): n equals a,t,g, or c
  SITE (413): n equals a,t,g, or c
  SITE (419): n equals a,t,g, or c
ggcacgagtggaccaggtgttcacgctggcggtgcgcgagacggaggccctgatcccgcccgaggtgcctccccgccaatgcccagcacacgaggctgtcggaaaggttcattggctaatttgccacagttggttttcaatatgtccatcccttttcctgatttccagagctcagtatttctacccagtgcctatttatttatttatttatttattgagacagagtctcactctgtcgcccaggctggagtgcagtggcgcagtgtcggctcactgcaacctctgcctcccgggttcaagcgattctcctgcctcagcctcccgagtagctgggattacaagcgcctgctaccagacgcagctgatttttgtattttaagtacagctggggtttcaacangtttggcaaggtngtctcnaaatccgaacctcggatccgcccg

SEQ ID NO: 870 - DNA, 161 bp, Homo sapiens
ggcagaggtctgaaggggagcccaggaatcagtatttttwaaaaacgtatagataacctctggtgtgaaacttttgcttattggcctgatgaatgtctttgtattgctctttcctacctgagagcttttttttcccttcttcttttttttttttttccttt

SEQ ID NO: 871 - DNA, 268 bp, Homo sapiens
  SITE (191): n equals a,t,g, or c
  SITE (268): n equals a,t,g, or c
ccacagacggtaagagccggcttagagatctttgcctgcagcctccttctttgctctactgggaacatccactctrtctctgcccctcgaacatacatttctttcttgggctcttctcctttcccttttattttttttcttgagatccatcgccgtcttcagctcaccggttcttcacagcagctccggangtgcccagattccccgctctgtaccaagcgtgtggaggagggcactagggagggactcattttgggtaaaaggacan

SEQ ID NO: 872 - DNA, 370 bp, Homo sapiens
  SITE (335): n equals a,t,g, or c
gtttcctttcttccattctgatataattcagggtataaacacacacacacacacacacacattctcacttctttggcatctaccacacctgccccagtgcccatttctctcccacctgaataaaaagcccccacaaagcctgaggtacatggaaaggagcagtggtctggctcccaggagtgtgagaagcagccatgttttcagaggctgtattccacttggacttggccctacgctgaaggtaggagcggatgggggaggcccccttcgcacaaagagccccatgaaagagtgcacagtccagtctataaaacagacgcagaaaatgtgtgtangacttcttyctgaaaaagagcgtggtgcgtccaga

SEQ ID NO: 873 - DNA, 651 bp, Homo sapiens
  SITE (484): n equals a,t,g, or c
  SITE (578): n equals a,t,g, or c
  SITE (599): n equals a,t,g, or c
  SITE (614): n equals a,t,g, or c
  SITE (632): n equals a,t,g, or c
  SITE (636): n equals a,t,g, or c
gcctaagggcatacagcaaatggagaaacattctatgaatggaatcaaaaataactactaaatctaagtgagaacggcaagtgtgtggcctgtgagccacgacccactcctccaccatccaaactcactttctagagactaacctggggctctactccagggggtccagtcaagaagatggtcccctcttcccccagcccccagtgtagggtacatttcacccttcatggccagcctccagcatctctcatcacccagcaaatgagtcaggccaagaatacggacctgactgtcccactccagctcacccataggttggaggcttcatgctagagaggcaagcccggaagactagtgggggtaggtgggaagcaggcaatagaaactgcatttggagaggtccagatgtttgatttagccgacaaaagatttcaaaccagccattataactatattcaaagaactaaaggaaaccatgtctaangaattaaaggaacatatgttaacaatgtctaaccaaacagagtgtcaataaaaagatcaaactatgaaaagaaccaaatagaaaattctggtgntgaaaagaacaaccaccaaantgaaaaattcaccanaaagggctcaataagtanggtntgagacagccaacca

SEQ ID NO: 874 - DNA, 425 bp, Homo sapiens
  SITE (407): n equals a,t,g, or c
  SITE (410): n equals a,t,g, or c
  SITE (411): n equals a,t,g, or c
  SITE (417): n equals a,t,g, or c
gccaaaaggcatctcaaagccagccgctgctactgacttattgatggctatcacccagtggccttggggaggcggtgggaagcccaaccactgcctgtaataaggagagacaactcagcatccaccctgcagtgaataatagaacaaaaagctgccggcgcctgcaggatcaaagcacatgagcgatcacagtgtctctgggttaaatagatccgcgaaggccaggcagccagcagatgtcatggaactttttgggggagaagtctgggttatggaggaagcctcagctggatttcagtaccttacaagatgctcttctgtggctctctcctgctaaccttccttggacatggaataatcttcctttatcctccctcttcaccactgctgtccaagctaaaaatggngcnngaagtnatacagga

SEQ ID NO: 875 - DNA, 360 bp, Homo sapiens
  SITE (203): n equals a,t,g, or c
gaggttttacagcttacagcttcagatcctgtcaacattgtctgtgattcagcttatgttgtaaatgtagcccattgcataaaagcttctacagttaaaagtacactagacccagaacttcttaatttgtttcacttattctcatatgctgcatgctacatgccaaacaggtgagacagctgttcatgtacagctacactgtnatcatttgctcatatggggctacctaaacaaaaactgacaagggacccacttaatctagtcatgcttttcaaaatttcttacagctttgggctataacccaaaaaacaggaattycttataatcctagaaggacaaggcattatataacaggcacat

SEQ ID NO: 876 - DNA, 324 bp, Homo sapiens
  SITE (226): n equals a,t,g, or c
  SITE (304): n equals a,t,g, or c
gcaagaactcagtaatcctcttgagaaacagaagctgaacggaaaagccaccttattttatatattaaatttatagaaagcattttcaaataagggataagtgatgctaaaccttctctaaataatatttatgggaatgttaataatatgagtattctaggctgagcgcgatggctcacgcctgcaatcccaggagtttgggaggccgaggtgggtagatcacgangtcaggagatcgagaccatcctggttaacacggtgaaaccccatctctactaaaaatgcataaacaaaattagccggntgtggtggcaggcacctgta

SEQ ID NO: 877 - DNA, 561 bp, Homo sapiens
  SITE (450): n equals a,t,g, or c
  SITE (461): n equals a,t,g, or c
  SITE (488): n equals a,t,g, or c
  SITE (510): n equals a,t,g, or c
  SITE (531): n equals a,t,g, or c
ggggaaatgatgagaatccgatgttccttttgcacagtaaggcagttactgtgtttgccagtgttattggacatgctgagtaagacatggggattttctcccacagccagttctttgaccttatgttgtattctcatggtcaaatagaaattgacgatcaggtggaaggactccaatatctagcttctcgatatgatttcattgacttaratcgtgtgggcatccacggctggtcctatggaggatacctctccctgatggcattaatgcagaggtcagatatcttcagggttgctattgctggggccccagtcactctgtggatcttctatgatacaggatacacggaacgttatatgggtcaccctgaccagaatgaacagggctattacttaggatctgtggccatgcaagcagaaaagttcccctctgaaccaaatcggttactgntcttacatggnttcctggattgagaatgtccattttgnacataccagtatattactgagnttttagtgaggctggaaggcntatgaattacagatctatcctcaggagagc

SEQ ID NO: 878 - DNA, 307 bp, Homo sapiens
  SITE (231): n equals a,t,g, or c
  SITE (255): n equals a,t,g, or c
  SITE (300): n equals a,t,g, or c
gcctacaccaagcaattctccagttttgtaaggacaccagctgagtgtcctacaattgaattcaattctgccactgtgtacctggagacagcaacaggtcccacagatgaagggctacatcccacaagattgcccccacttcaaacaacaattacagatccaggctctcacccatccaactggagggtaaatcagaggtccccacaaccccctcctcaagtttgatcattngctagtatggtttataggactcangaaaacaatttacttacaggtaatcaatttattataaaaggaccnaacttca

SEQ ID NO: 879 - DNA, 519 bp, Homo sapiens
  SITE (433): n equals a,t,g, or c
  SITE (453): n equals a,t,g, or c
  SITE (497): n equals a,t,g, or c
  SITE (505): n equals a,t,g, or c
  SITE (511): n equals a,t,g, or c
ggagcaaagggcagataggtttactactcactataaaaaaattggggctccgtaagctcagggtttctctcctgagatgaagcccactgtgtgtgcaagtatccatctgggcctacctacattattccgaggggaaggggagctgaccaaatatactgatgcttgtgtcacttgctgtgcggtataggactttcactaaccttggaccatatatttgccaggaagaatgtaagttctccaacatcttcaaataaagaagtggttatgaggaatgatcagaataatggagatatgaaaccattccagaatttcacaacaataccaatcacacagagggtccatgtgcagatttgttacgtgagaatagtgcataatgctggaagtttgcggtatgaatcccatcaccctgatagctctcaactacaatcttgancaaagaagggcatttagaanaagaaccttggaatgcattcagccatcatggccccagttaatgnctccatcnaatggnattccttg

SEQ ID NO: 880 - DNA, 444 bp, Homo sapiens
  SITE (387): n equals a,t,g, or c
  SITE (400): n equals a,t,g, or c
  SITE (428): n equals a,t,g, or c
ggttagttttagcatttgcttcactataatatgaatatcacgtctacatcaaattattttgatagtgaaataggtaaaatatataatatttagcataattgctaggacattatattaactgaaaacactttcctttgccattggttattttgaggacaaaaactgcttttatatctcagtcaagagctggtaaaaatatttgattgttttatgtggttacgacgactaatgttcttaaaggtttttactttaaaactaggccatataaatgtattttaaagtatccatggtctcttattgaatttaattccatatttataaaacagtatttctattttaaaatcaactacctatgactatttagccaaaccattgaatcatttgtgntaatctatttttnaattctacagatggaagaattcatatanagagatacataaaata

SEQ ID NO: 881 - DNA, 437 bp, Homo sapiens
  SITE (354): n equals a,t,g, or c
  SITE (383): n equals a,t,g, or c
  SITE (432): n equals a,t,g, or c
ggttcctgatttgrgaagccaaagtgtcttttgatgaattagggatgaagcagcaagtcatgaatcaaggcagggactgggagttcccgctgtgggagaggacgggctcaggggtcgctctcctaggagggctctcagggagcttgagcccaaggcaggggtctccccatcttcccatgccctcttttgttgatctgtatctttarcattccgtttgtacctttagggtcatcctgcttgcctgggtagtgggtggcagatggccttttgataagtttgggttttctggaagtcttggtaagtctgacaggagcagaatctatccctatcattttctcctaacatctagctcanggcagaagagcgcagtgtcaaaatgagtnaaattaataaagcacatttcatgattgtgctgtgccattgcattttaantggga

SEQ ID NO: 882 - DNA, 851 bp, Homo sapiens
  SITE (770): n equals a,t,g, or c
  SITE (782): n equals a,t,g, or c
  SITE (797): n equals a,t,g, or c
  SITE (814): n equals a,t,g, or c
caaggtgatagttttaagaggtggtgcctttaggagctgattaaggcatttgggcagagccattctgaatgggattaatgaccttataaaagagatgaagatgaacttttgaccccttccaccacatgaggacatagcaagaaggcatcatcttaaagcagagagcaagccctcaccaagacactgaatctgcagatgccttgatcttagacttcccagcctcagaaactgcaaaaataaataaataaataaataaataaatgtctgttgtttataaattacctaatctaaggtattttgttttagcagctcaaaggaactaagacaaagatcatggagaccatcgggtgagtctcaagacttcccccagctctgcttggctggtctcctgctggtattttctgtctgtagagaggaacaagaacttccattttatcttgcttacctgcacttatgaaaagtcaaactgagtcatgctgagagccagggaacataggagtcagttcttctgcagcagcactcarccagttgaaggcaatgtggagtgatggaaggagagcagtgatgcagtgatgctggcaccaactcctttactatggcatccattgtaccarctgccatacaccaggcaacttctacactttatctctaatcatcctagaataagtattagtttccccatcttctagaaaggaaaactcagacccagagacactaagcaagtagctcaacatcacacacgttatctgtgattaagcctgagttagganatgggagccttnggatttccacatttntgctctttttcatggangctacctggactttggtactcaagtttgtcctctaca

SEQ ID NO: 883 - DNA, 214 bp, Homo sapiens
gaatacttattaagtacctagtacgtgatggtatttgtggaagctgcacaatgactggccagtggtggaggctcagtaagttggagtcacttaaagctctgccttccaggtgtgcacaactaarttgatgctccacacargtgcttctgctcttgtggtctgtgtgcattctgaaatatctakgaatgcaaacaaggtgccacagctatctatt

SEQ ID NO: 884 - DNA, 894 bp, Homo sapiens
tgagaaagaagtgaccgagcccgaggtgagaatggtgaatggcaaaccaaagaaagttcgtaaacccaggactatttattccagctttcagctgccgcattacagagaaggtttcagaagactcagtacctcgccttgccggaacgcgccgagctggccgcctcgctgggattgacacaaacacaggtgaaaatctggtttcagaacaaaagatccaagatcaagaagatcatgaaaaacggggagatgcccccggagcacagtcccagctccagcgacccaatggcgtgtaactcgccgcagtctccagcggtgtgggagccccaggstcgtcccgctcgctcagccaccaccctcatgcccaccctccgacctccaaccagtccccagcgtccagytacctggagaactctgcatcctggtacacaagtgcagccagctcaatcaattcccacctgccgccgccgggctccttacagcaaccsctggcgctggcctccgggacactctattagatgggctgctctctcttactctcttttttgggactactgtgttttgctgttctagaaaatcataaagaaaggaattcatatggggaagttcggaaaactgaaaaagattcatgtgtaaagcttttttttgcatgtaagttattgcatttcaaaagaccccccctttttttacagaggactttttttgcgcaactgtggacactttcaatggtgccttgaaatctatgacctcaacttttcaaaagacttttttcaatgttattttagccatgtaaataagtgtagatagaggaattaaactgtatattctggataaataaaattatttcgaccatgaaaagcggaatgtttctgaaaaatacttcattctgcccctctg

SEQ ID NO: 885 - DNA, 640 bp, Homo sapiens
  SITE (26): n equals a,t,g, or c
  SITE (586): n equals a,t,g, or c
  SITE (588): n equals a,t,g, or c
  SITE (590): n equals a,t,g, or c
  SITE (621): n equals a,t,g, or c
gctgaggatcatgccactgcactccngccaagatgacagagcgagactccgtctaaaaaaaaaaaaaaaaaaaaaaaggccttttatatgcaaaccagccaattccgagcccatatcctcagccacctcctttgtctaatccttacacaataagccgatagttcctctgccctaaatcagctcagagccaggcatcagtcaaccagaggccaccgctatagcccagagccagccaaaattattyaaactgkgcaatcctaaacttgctkgaacttgccaacctagctcgccacccttccttgtggaaaccacaagaagagctctgggccatgctcttccctggctcctcctgcctcttcactaatgtagtgtttccctctctggccctgcatggcatccagtgcctactccctcttggaactgtggctagtaaacttctttcaatgacagtgactctctgtatcatcagtcacacctatatattaaatcccaggcacattttaaaacaacctgccttattagtaagaggactggccactcctttttaaggggttcctcctcttgaattggccaagacacctggagncnanaagttcaaaaaccagcctggccaacattggnggaaaccccggcttttact

SEQ ID NO: 886 - DNA, 576 bp, Homo sapiens
  SITE (574): n equals a,t,g, or c
gctacatcgggccttgcaaatgtgagtgtccttgggcccttccagactcctgtcttggggagagagctctgagctggcactgatgctgtctctgccacccccatgctgggtgatcttgggcaaatctctctccctttctgagtctcggcatccccatttataaaatgaggtaattgtctatgagttggctcctctcaactctgagttcagggcactttctggggaaggactgagcgattatggarggtcaacatcagggaagatttctggagtctctcactagcatctgagacaactgcatttcatttctctaatgaggaagaatttcttctctcaggctaagttgaatctttcttgcttcaacactgtaaagcaaaaatgatgtttgacctgggcctacaaaatattttgaaaatatctgaatttgaatgctttaaaataagggcatgcctgtcgggtttgctttgggccctgttacttggtactgkcatatcttcacccttttactcattacattcctatctgscctycgaagagagaggataagcaccctyttccgaaacctkggaatcantt

SEQ ID NO: 887 - DNA, 511 bp, Homo sapiens
  SITE (439): n equals a,t,g, or c
  SITE (483): n equals a,t,g, or c
  SITE (488): n equals a,t,g, or c
  SITE (495): n equals a,t,g, or c
gagccaccgcacctggcccataactctttaagggaaatttttagtacctgaattctattttttagcacaaatcgtatctcatttttaatcagtttatctatattatgtagctacttagcattctggaaaaattagcttccctggtaatagaaggactccttcagtcacctagattggcccacatttccaaatttgcttgatgtttcaactcgagctttgcctcattcagaaaccagtagccttcctgattctggtcactcatggagtgagtcctcctctcccaggtaagtcagaagcgagtgagtcacctccagatttcaggtcccagctgccaagctgtagtctaawacttcacggcacttcccatcccctgaagatgtcacaagtacaagctgcttccagaggcttctgtaaccctcattaatatgtaggcatccanccggggcgcggtggctcacgcctgtaatctcagcacttttggangcttnaggcggntggatcacctgattca

SEQ ID NO: 888 - DNA, 491 bp, Homo sapiens
  SITE (420): n equals a,t,g, or c
  SITE (436): n equals a,t,g, or c
  SITE (453): n equals a,t,g, or c
  SITE (464): n equals a,t,g, or c
gatgtccccctcttctctgttcactcggcatccactggggctggaggccttcttgtctcacttgttggtctagggtctattcttgctgggatttatgttgatcttcacgttgtcccagacctcaggcttggcaagcagcagcctcgttagctgacttctgtcccctggcgcatccccagcccattactttctggacctacagcgtgtccaggcccacctcctgcttttcctgaccttgtgcggggtcagctgctcttcctggcacttagccctggcacttagaaactcggatgggagtgccctgcagagtcgctgtgctcaggtgctttctgtggacgggatgagtactgtgcgagtgaatgcacgcgtgtgagtgtgtgtacgtgtgtatgtgtgcatgtgagtgtgtgaatgtacgcntgtatgtgtgcgtgtnaattgtgaatgcacacntgtgagtgtcntctgtatgtgtgcatgtgtgtgaatgc

SEQ ID NO: 889 - DNA, 507 bp, Homo sapiens
  SITE (398): n equals a,t,g, or c
  SITE (420): n equals a,t,g, or c
gcaacctctggctccccacgaggtagccactctarcgccctggagaggctagaaaccaagcttcacctcctcaggcaagagatggttaacctcagagccacagacgtcaggctcatgcgccagttgcttgtaatcaatgagagcatcgagtccatcaagtggatgatcgaagaaaaagccaccattaccagcagaggcagcagcctcagtggcagcctgtgcagtttgttggagagtcagagcacctccttacgtgggcagctacaacagcctacacgatggcagtgatgggctggatgggcattttccgtggggaagttatctgggacacgttgggcggatggatgtcccaggccatcagaccccttcagayttgggaccaattcagtggacagytnccttcatagagggacttcacanggcaytacacaagsktcctaaattgggtttytgaatacttactgttttgggttagtggacagttttttggcatgggggactggtgtt

SEQ ID NO: 890 - DNA, 344 bp, Homo sapiens
  SITE (269): n equals a,t,g, or c
  SITE (286): n equals a,t,g, or c
gcttgaaggtagggaatatatcttacttttgtattcttgtggtctagcatgaggtcaggtacataacagatgctctttctctctgtgtagatacatatatataaataatacatggtctgtaattggatctaagtttttttttttaaaccgtttattggaggctctttgcaggcacttagttggatatttcacatgcattcttatttactgctaatgactttgaagtaaattatgtggtacttattttatagatgatgaaatcataattnagtaaggtttataattnactcgagatccttatattagcttctcttatttttttgcagttaaaaaaattaaaatct

SEQ ID NO: 891 - DNA, 337 bp, Homo sapiens
  SITE (120): n equals a,t,g, or c
  SITE (134): n equals a,t,g, or c
  SITE (328): n equals a,t,g, or c
tcctcccctccagcttacctggccaccttctacccatacgtaaggctacagcttaaacaccctatcccccagcaggccctccatgcattgccatcgtccacacagcaccatctgcttgcnttttggtgaccctnatcactgctgtgctgagacacctcatttcctgccttccatggacagcaaaccccagcttgtgcctgtaaaatctcggcacgtgtacggtgcctgatgtacccctgactattgactgactgactttatttctctgaagtctttttttcccatctgtcaagtggagagagtaatagtcacccgtccggcttttagnactgtttgt

SEQ ID NO: 892 - DNA, 475 bp, Homo sapiens
cggcgggccgtggcgcgtggaacgggtgttggagctcagagaagttatggcccaagatggaagagcaagtctgtggcagacgaggtccaagaactcgctctcctgatgcctcakttragaacacgttctacttcactacctggtctcccagctacccaagggcatatgaacaaccagggaattactttgggggataccagcaaggagatttggagatcctggaaattggaaaaaacaaaacaatctgtctaggacggcagagagagctggtctcatccaggacactaattcctgcccttggacactggtactcctggttctcaggcctttgaacttggacccggacttacaccatcagctcccctggttatataccaccagcctttttggtttttcaccttcagacaacagacagtgggacttcttgacctccatttccaattcccaaaataaatctttttatatctatgaaaaa

SEQ ID NO: 893 - DNA, 329 bp, Homo sapiens
  SITE (247): n equals a,t,g, or c
caacattggttgtttcttggcagctgcagatttcacaagaatgagattaaatggctttttacatcctgtatttggaaagagaataggaggatttacaggaagttatgctcagttccaatccagttaaacagtacttaaattgtagcaggacaagccgcagacaaaacccctcagccagcgagtttaagaaagaagggctttattcggccgggatcttcggcaagactcacgtctccaacaaccaagntccccaaagacggggtttcaccatgtttggccagggatggtctcgatctctttgatctcgtcaaaagtgctttggcttacaa

SEQ ID NO: 894 - DNA, 228 bp, Homo sapiens
ctctcagcaaggcaatttttactttatgcagaaagggtgctcaattgcagatggaacgatggtgagagcactcctgaacaaaggaaaagcagacatatttgtcccttacgcctttgggttgtccttactgctgtgtcctgcatccgttggctggggctggacctcataatcttaaactgatacccgatttgctaaacaggctgtgagctggaacgtgcctgggcctgt

SEQ ID NO: 895 - DNA, 466 bp, Homo sapiens
caaaagactacatataataccatttatatgacataccagaaaaactatagggacagaaagcagatcagtgatttccagggaatggtggtggcmgaaggagttgactaccaagggtcacatggaattctcagggtaatagaacagttatttaatttttatggcagttacacaactctgcttttgtgaaaatgcataaaattgtatatgtggggaattttactatgtaaattatatatcaataaacgtgactcgtctaaataaaaaatttgtaccaacaaaataaaggagaaaacaatcatctcaatagattcagaaaaatgcatttgaaaaacttgttaaaaatcataacaaraataaataaaamtaaaaataatatcaacacccattcgtgataagggctcttgacaaactaggratggragagattttcctcaacttgataaagcataactatgaaaaattaaaa

SEQ ID NO: 896 - DNA, 242 bp, Homo sapiens
  SITE (204): n equals a,t,g, or c
  SITE (231): n equals a,t,g, or c
aaacctcattgagatataacaggagttattttaaatgtcctgtgattgtcaaaatgttttttacatttaaattttgaagatgcaagatagagaatgaaagaaaaatgccttgagtacaaattacatgtttgtyttctgttctccacaaaaatttaaactttctaggtgcgagcaaaaaagaagaaaagcagtgaagaacgaganaaagcaacagcaagtatctcttaacgnttttacagaca

SEQ ID NO: 897 - DNA, 332 bp, Homo sapiens
  SITE (274): n equals a,t,g, or c
  SITE (296): n equals a,t,g, or c
  SITE (324): n equals a,t,g, or c
aaaaacaccaagactagaggactctgggttccttttatgcaaagtcaactcttctgggtcacagttacccagcaacaaaaataaaggtagttatttataaatggtattaaagatagaaagcacaatgtatattttttaagagttttggttcttttcccaggagaagaaaacactgtgggttggtattttcaagcacattcaagggttttacaaatcagccccagttccagtgcacacacaatcttaagaccacccaagktaacattttcaagangaggttttttcacaagactatnaaatttccagtggctgggatggaatgtncaaggggc

SEQ ID NO: 898 - DNA, 300 bp, Homo sapiens
aattcggcacgagagcagtgtccctggtcgatccccggtagattccaataacaagctgccaatcatgacaataaaaaatgtctgaaatattgccaaatgtcccctaagggtgcaaaactgcccccagttgagaatcactgatcagtagagatgaaaacagaaaaagaatctgtaggcattttgtgacctaaataagacattcttatctccgtgttgctagcttttattttgtggctgagtkaattgttttcagtgtgaagaccmatggtacactggatttctatttaaagatggtttcaa

SEQ ID NO: 899 - DNA, 352 bp, Homo sapiens
  SITE (302): n equals a,t,g, or c
  SITE (315): n equals a,t,g, or c
  SITE (326): n equals a,t,g, or c
agccaaataatagatgtctccgggaaagtatcatatatgtttgaatataatgtgtgtgacacctaaaattatttctactgtatgaagaaaatcagtactttgggagaaacaggtaaaaatgaaaatgtaattcagcatcagtttgagtttcactgtgagcctcagtccaggttttagaaagaaaggtacgtagacacaattctggctttaaatagttcacaatgtggcaaaagaaacttcattaatttcttaagattaatgataaatacagtttctttgggcagattgactctaaatattgngttcaggggggtnattacagtttnaaagggtttctagctgttgaaaggtt

SEQ ID NO: 900 - DNA, 320 bp, Homo sapiens
  SITE (94): n equals a,t,g, or c
  SITE (297): n equals a,t,g, or c
  SITE (312): n equals a,t,g, or c
agcagcctctaacagcatttatcacaccctcttatggctgctggttacttggccatctccctgctgggatggctccctgaaggcagtgattganttaatccttgatgtatcccccatcagctaacattgttcctaggagatggtgtccaataagcattggatggtaggctgaaccagagtgataaaaatatcaaacgagggacaaatctagagacatctggaaggggaaaactaggaatttggtgatgagttatataaagagagtgtattagtctgttatcacactgctaataaagntatacctgggtctgngtaatttt

SEQ ID NO: 901 - DNA, 298 bp, Homo sapiens
  SITE (163): n equals a,t,g, or c
agggattcttgctccaccctgtgtacctgctccgagtgtctttccccctccccaccccagcaggccagtcctgggccccagctccagagcactcacgggctgccagggtgagcaggctagaaactcacgacaccaaggagatccaggttaaaaagtacaagtntggcctcatcaagccctgcccagccaactactttgcgtttaaaatctgcagtggggccgccaacgtcgtgggccctactatgtgctttgaagaccgcatgatcatgagtcctgtgaaaaacaatgtgggcagagg

SEQ ID NO: 902 - DNA, 335 bp, Homo sapiens
  SITE (331): n equals a,t,g, or c
aattcggcacgagcttttccctcactgatgcccatggtgctagaccccatatgaacattcagtttcttgaacacattattttattttatgactttgtttcttgcttatgtattcccctttctggcattttaaaaacagatgtgccctcttgtactaattattatttcatttctgtttaatatactcatcaaactatcacccttctgctaatttagagccactgctagactatgagctctttcatgggaggaactagatatggtagatatggtagtcagctactatataaggaaattgggaaactcatatgcatactaatattttattgggnttca

SEQ ID NO: 903 - DNA, 357 bp, Homo sapiens
  SITE (51): n equals a,t,g, or c
  SITE (224): n equals a,t,g, or c
aattcggcacagggaataatgactgaatcctccctatctggattgctgcangagtaaatacttcaatatatgcttagaactatgcctggcacatgacaacaggttcgtgttattattactgaacatttcccctggatgcctcatagatctttactatccagcaggcaattagatacgtgattctggggctcatcagaaggccttggctggagatacttcaactnaagcatcctcagcacagagatggaggaggamgcattaggctttaggggaaggggatggtgctggagtagtgscatagggtgacaaatgacctgcaagacagttataagtgggaaatagggcaaggacattaag

SEQ ID NO: 904 - DNA, 279 bp, Homo sapiens
ctgtcagctattccggtttcatgggtaatttagtagttgaataaatttttaaaaaaattcattcgttaccatgcgctgttatgaatcagtagatggtttaccattgggcagcagtaactgtaggaagatttaaattgctactgaaaaggatttgagtgaaggtaatgttttataatgttctaagccatatgcacttactttcaggcctccatccagttttacattggttcctagtggaagtgtttaaattggcatccatgggtgcaatataattccagt

SEQ ID NO: 905 - DNA, 272 bp, Homo sapiens
  SITE (27): n equals a,t,g, or c
aattcggcacgagggatgatgaaagtnttctggaactagataagggtggtaggtgcacaacattgcgaatgtacctaatgccactgaatcgtatgcttttaaaaagctctatgcttctgatggatagagaatgttgttattgttatcattgcctgttttgcttatttctacagtctcctggtctcatgtagaactaggacactaagattggaagcttccaaggagcagtatagacwcaacttcaccatgtcaggctgaakggcattgtgcct

SEQ ID NO: 906 - DNA, 419 bp, Homo sapiens
  SITE (221): n equals a,t,g, or c
  SITE (411): n equals a,t,g, or c
aattcggcagagctgcattgtcttttagggccaatggacttggaggcatagagattttataactactgccagaacccaaatattgccagtsggcctcttctgctgctgttgctagctgtcttcttctgggggaaatgggttgggttctaaatatgaattaacacagggctgtcttcgatgaattcagcacaaaatgttctcagcaattgaacactcggagngaagtgttaggcatttagtgcagactcatagaatagcaggacagggagggatttggatctgggcaagcaggagatggrtatgaacatctgtcttttgagacctgccgaggtggcaatgaaggtagaggcccctgtgttgaggtctttattcaagaggctgtggtccctttgggacttaacatagcatccnttagacag

SEQ ID NO: 907 - DNA, 306 bp, Homo sapiens
  SITE (147): n equals a,t,g, or c
acaaaaggccaaggtcatccagccactgactctggttagctgaatacccgatgttgacagtttctccctccctctctctctctgctgtttcctctatagagctaagtctggtttgcattgaaataagcatgcagtaatatgcctttngccttaccaacttgtatttgcacacaggcagcacagattcaccatttcacttcctaccatgaactaaaagaattgtatctcttcaacaaacaccactttatttttaaccttttttttttattgtggtaaaatgtatactacataaaatgtgccagtgta

SEQ ID NO: 908 - DNA, 581 bp, Homo sapiens
  SITE (21): n equals a,t,g, or c
agccactgtgtcctgctagtnattgtaattaacaggcctccagggaagtgccataagcccaagactgccgtactcaaaagtcagccatgtaggtaaagcaagatatttggtcaaggagttttagaaggagatttttcctgtggtgttggcttaagtgtggcactgttgtgcgtgtgtgaggtgtcttctgtgggaaggatttcaaacagtacaaagggatgtgatgtaagcatccagaactcactccagaaattgaataaaatgctagtagttagtctctaggggaacttttgagaaagtctcagtggattcctgaggcccaagaattgtgctaacaagcactcaaggcgattctggtacataattagggttcagacctcagctgattggtctactgttggtcaggaacaaaactgcaagtatactctgtttccagaaaatacgtttacctcttcacaaatgctaacacactgcaaaaatatgtttgtggaaagctgacagtctcatctagcggttactctcttgccctgacaaagcagcaaataaagccattgctaacaattcaaaaaaaaaaaaaaaaa

SEQ ID NO: 909 - DNA, 426 bp, Homo sapiens
  SITE (426): n equals a,t,g, or c
aattcggcacgagacaacctactccatcatgaccttggaaaagctacgtttattttatatgggtgttagttggttgataacacctatacccttccaaaagaacttgaggtattttaagacaagaacaagaacatatacaacaaaatataaatggaaatagaggatcagaggcaggggaaaacacaaacatagcaggacacaggcatgcaaagcattactcagctttaagtttggatctgagcttcttggaagccaaagcaaaaagggagacaagatcagctaaggagtgagaactcttaggtgctcctgaacttcaaggcccaccacattttyttccctytgcagaytttcagaccgtgaggccagtattggctgtgttttgggaggggtgctttccagttcttaagtgcctttccctaaaaagtn

SEQ ID NO: 910 - DNA, 429 bp, Homo sapiens
aattcggcacgagccagacatagctagaagtcatacagctcttgtttccctattttacaaatgcatcaaaaaaaatcaacagaatatgaatatcagtttattgacagaaatcaagaatttggtggcttctgactcttcacgattctgaaataatatctgtgataactctcattgggcatctgctgtcaccaagtattcggtgctaagcacattatgtataagtatacaaaatttcatgtaatgcttacgtcagcctcataaagtagagtctatgattcccatacaggtgagaaaattaaggttcagagcagtcaagtagactaaagctacttkggcaggtcattgcagamccagggctcagagtcgctgaagttctkgagcattgtgctgctytgcccgattcaagttcaattccagctaaaaagcccc

SEQ ID NO: 911 - DNA, 493 bp, Homo sapiens
aattcggcacgagcaaatctgacccttgtctgtatacttacatgtacccagtagtgatgaaaagagatgaagataatgttagtggctaaatgataattgttgagaaggcatattcaattgaagagaaatagattttttaactctgtgtgcataaatatactctataaacattttgtatttgcacatggtttaaactcatctaactgaattctgacttaaggaatagaaagcatggtctcttccaggtcaagccacactgtagttatttgggggataaatgcttggctaatttatattcctttataactgtctttattaaagtgaagacccttgaccctgagtcagatcacctggatggttcctagactccaytcctacaaactgaatcagaatctctgggrttggagcccagaaatttgcatttttaatgkcatttccaggtgatcattaaaataaaattgtattttataaaattttatttaataaaatgtat

SEQ ID NO: 912 - DNA, 620 bp, Homo sapiens
  SITE (592): n equals a,t,g, or c
  SITE (620): n equals a,t,g, or c
agactctaagcactcaaacgctgaagtttcctgtacagacaatggcacattcaatctttcaaggggccaaacacctcttaacggaaggctctgaagacctagatggtcacagtgatccaaaggaatcctttgccagagaaccttccagacttcccttccattaatatggatcctgctggcctggtatgatgaggacgacactagcattggcatgcccagcttgatgtaccgttctccgccaggggctgaggagccccaggccccacctgccagccgggacgaggctgcgctgccggagctcctgcttggtgctcttcctgtaggatccaacctcaccagcaaccttgccagcctggtctcccagggtatgattcagctggccttgtcaggggcctcccaaccaggcccttctggagcacctgcccagagagcaacgagagcttcctccggtcccccagttcagacctggacactgatgctgagggggatgaytttgaattctggaccagtcggagctgagtcagctkggaccctgccagttctaggrgcatgaggcaagatccttttgggatcatgtggttaagtttttttncccatccattaagtgatggggggggggn

SEQ ID NO: 913 - DNA, 157 bp, Homo sapiens
aagaagggtagtaattgacctctttgggattggaactgctcacagtcccaaaagataaagcacaagtggcatggtctttcctatctagggcttaagctacaattactttgcctttcctttagagcaaggtttagtgttttgttatgtatctttttgg

SEQ ID NO: 914 - DNA, 739 bp, Homo sapiens
  SITE (690): n equals a,t,g, or c
tacattttggacatatttcaggctcagcagttttcttttttcccctatctggtggcccgacttgctgatttttttctacttttttttttttcagtatgaccatgcttcccacagttaaaacaagctccaggaaatggagtactttctgtatccactctcagtcctgccattgcccgtgctagcaggtggcctgatgcagattacctctgataccaccacaggccttgatataatcaactaaatgtgctttccctctgataggtcacagagcagcctggcaatcaggattagcattgttgaaagctaataattgcaacactatatcctgagcagccaaatctgcagtcatctttttaagagactcctgtaactgagctataaaatccacatatgattcttctggtccctgttttatagcactaaagaaagggtattgttctccacttgaagtgattttttttccccaagctctaatgcacgctcctctaagctgttctatggcatcatcctgcatgaccatttgtgcatctaaaccagcccaactgccaacccccaaaagttggtctgsagttatattaatttgaggttggtcctgcgtgttgtgagaagcctgaatggaagcttcatctgcccaccaagttttaaattgtaagaactaagcaggagttagacaagcttgagtaagagcgncccagtcagtaggaatcatctgactggaaacagcaatgttcctcgtgcc

SEQ ID NO: 915 - DNA, 227 bp, Homo sapiens
  SITE (33): n equals a,t,g, or c
  SITE (214): n equals a,t,g, or c
tttatgtaccaccggacgttcgatcactttttnacgccacgactcaccgtgcaggcgataggtgagcaactgtttttccaccagccgacggtaaaactcatactccagttccgttatccctagtgtcgccagttctgggtcaggcagaacgtaaaatatgcatcgctttgttgcagaccatcaacctgctcaggaaaccgtcgccggttcgcgncaccatgggggca

SEQ ID NO: 916 - DNA, 344 bp, Homo sapiens
  SITE (256): n equals a,t,g, or c
  SITE (304): n equals a,t,g, or c
  SITE (334): n equals a,t,g, or c
actactctattagctgtgtggctttgatcttgaccttcctgagcctcactttcctctctgtgaaatgggaattgcacctgctctcagaggtgccctgagactgtggattctgtgcgccatggccctggcagagtgctgctgtcgtcaacaccagggacagcattccccagccattggagttgtatgctttaaccttcaaagaaagaaatgggaaagaaggcttggcatggtgtcaggcacctgtgaaccccagctnagctactctggaggctggggcaggagaatcgcttgaatccaggaggtngaggttgcaatgagccgagatttcgccacngcactccagc

SEQ ID NO: 917 - DNA, 368 bp, Homo sapiens
  SITE (277): n equals a,t,g, or c
  SITE (289): n equals a,t,g, or c
  SITE (332): n equals a,t,g, or c
ctggccggtcttgaactcctgagcccaatctcctcacctcagcctcccaaagtcctgggattaaaggcgtgacactgcgcctggccgtgcatataaaagttttgttggctggacatgttggctaaaaaacttttgtttacactatagtgtagtttattaagtttgcaatagcattatatttaaaaatgcaatgtgacataccttaattataaaatattttattgctgctgggtgtggtggggcatgcctaaaagtcccggcttacttcaggaggctnaagacaggaggntcacttgagccccagggatttgagtcccagcttggggcaaccntttcaggaaggttgagaagagggagagagacagggg

SEQ ID NO: 918 - DNA, 358 bp, Homo sapiens
  SITE (285): n equals a,t,g, or c
  SITE (329): n equals a,t,g, or c
  SITE (354): n equals a,t,g, or c
atctgctgatagattccatgtcaggtgtgagagggaggagagtcaagctcatccacagctctggcagcggaagacggccaaagtgaagaaggtggcctcaagtttacctccaccttccaaacctcaactggtaaaacctcatgcatgcccagaatgctagcacaagagatttagggaaatgtgggtattttgctttctggccctgcagttcaggttccaccttataaaatgggagtggcgtgggtggtgggcgccaccagccatattccacgggagttaagcatnaagggttcacagtttgagtgaagcttcctgagactgtgccgtgnttgccaacacagttctgtccgattncatt

SEQ ID NO: 919 - DNA, 381 bp, Homo sapiens
  SITE (302): n equals a,t,g, or c
  SITE (353): n equals a,t,g, or c
ggcacgagaaaaattttattcaagtaatatgattatggtaatttaagttccaggttattttaccttaaaaaaagttttaaatcatcctaggttgtcatgactgcaaaaaaattatattgtcacacttatttgtagattataaaatttactgagaagacttttaagatagtggcagtaacctttgtatcactctgagacaacttaggaaatgttaaagatatactgcaaactctagggtaaccacttaaagttggaaaaaaaaatgttaaggccttgtaaggaggtgtccagtggggggctcnttaaaaggcaggcagccaagggattcagggtgggtaattgtttatggggcntcctgtgggtctggggttattaaacccg

SEQ ID NO: 920 - DNA, 486 bp, Homo sapiens
  SITE (394): n equals a,t,g, or c
  SITE (442): n equals a,t,g, or c
  SITE (458): n equals a,t,g, or c
ttcccctccaaagtcagaggttaaggacaaaaaaattgagtgctcacaggtaagctgacggagatctcctagatagaacagatgttgaaagacatgagatttggtgacttaaggagaatgggagagaacagcagcatttattacagtgaatcttccaaggaatcaactttgcacccaaaaaactrataagattgtggacaaccaaaagagttaggaattgcctggattcgtggttcagccaacatgtaaagtgacatcccaaacatattcttcaggatccacttttcagagcgtcttggtgtttttccagtactgccgtcatacctgtgtttccctttccttttgttctctactagcacctgggtgttttagggtggattgtgtgtgtgtctgnttggaaggaaagttaaaatcttgattctcttttggtcaggggtaggtnaggaggtgtatttttnaatcagtaggttttcaaaaaaatgttta

SEQ ID NO: 921 - DNA, 657 bp, Homo sapiens
gaattcggcacgagtggtggctggtgggttaattgaaaaagccaattaaagagacccaaagcaaatcagattcctatcttacacattttatttgaatgtaaagtatgtaaatacatgtccatttgccagtctttttgagttgagtgtctgctgaagtagagttctgcctcatctttctcatataaaccacacccaaagtgtgctggctacaatgcccagtgtcagtttctttaaaatatcaatggatctgactgcagaatccatgttttcatgattttwttttctagtctttctagtcccctcacccaacacacccctaaytcakccagttgttactttttagtgattgttctttgctgagtctattcaaggaattcaacttagttttttgagaaacaacttgtttttgcacttatagtttatatgcttttaaatcatttaaattaagacatgtaattaggataatgggtctaacttatatacagcttacccctgaagtgctcagttggtgaggtcagaagggcatgagcatcctagaaagcagctgctacctgcgaggacttgacttctgtcagggtggacttgtatttctgcaagtacagcctcaggtagaatggcttagggtatcattacagcctctgcaaccccgcagacttt

SEQ ID NO: 922 - DNA, 254 bp, Homo sapiens
  SITE (205): n equals a,t,g, or c
  SITE (223): n equals a,t,g, or c
aacagctgacttaacagaaacaatggaaggcaagaggcagtagaataatatattcaaaagatgcaaaggaaaaaaaactgtcagccaccaattccttatccagcaattatttttcaaaaatgaagataacacaaagactttgccagataaacagaaatattaattgaagttgttgctggcagacctaccatacaaaaaaaaaaanccaaaaccaaaacccccnaattaatttcctagggttaaaggcaggttcc

SEQ ID NO: 923 - DNA, 542 bp, Homo sapiens
  SITE (2): n equals a,t,g, or c
  SITE (5): n equals a,t,g, or c
  SITE (525): n equals a,t,g, or c
  SITE (527): n equals a,t,g, or c
tntanctttatttctgaggtggctcacgtttggatagaagtagcaactctccgcttacacctgcacgtttaaaacgcatatcagattgtgttatttctgtcctcagaatcttcctggccttcccgttgctttcaggataatacacatttcttagcctaacttcaagggcctacagggtcttgattctgctgaatttttcagtctttgctactttcatggaaaacacacctgcaggtacactcatattatgctcccaccatgccagtctacggtaatttaataactttagatatggcaaagttttatatggtttactcaagttttaatttttgttctagcatttagccaaaatcgattgawttcataatattgctaggcactgttttaaaaacgggataaaatgaaaacaaaacaaaacacaaaacaaaagtcttcagtcctttaaaaaaataaaacagcttcctgacacatagttcacctaccgtggagttcaccatttaaaacgtggcggtgcctcaggctgtnantcccggcactttggg

SEQ ID NO: 924 - DNA, 343 bp, Homo sapiens
  SITE (319): n equals a,t,g, or c
  SITE (323): n equals a,t,g, or c
  SITE (342): n equals a,t,g, or c
ggcacgagggatttgcacatgcattactgtggcacctgtattcccattgtaaggcccatccctgaatacatgacattttctttcagagaatttccttccttgtttttcacttatcaacataatggtaatcactgtgaacaaaggtgattctgagatccctgattttgtttttatacttttccacagatcgggatgcttacccttaagtagctgtgtcaaactaggcaaatgggcatatgtccaggtaactgtggtacctgaaggcaaatgacacagtaaatatgagcaaagaatatggacaggagagcaaccatataanggangaagtattgctaggatccng

SEQ ID NO: 925 - DNA, 255 bp, Homo sapiens
  SITE (13): n equals a,t,g, or c
aatgctcagttgnaacaaaaatttgaaagatagcaggccataagtgataagaaattgaatggcaatgtgaaaacccttgatctgtttacaaatgatagtttcgaaaaaggaatgtgtctgtcatagggttgacttaggtcaggggttctaaactaggggccacttttcaacctccttccctcagagatatttggcaatatctagagacatttttggttgtcgtaatgggttggggagcagacttaatacattctt

SEQ ID NO: 926 - DNA, 410 bp, Homo sapiens
  SITE (256): n equals a,t,g, or c
  SITE (304): n equals a,t,g, or c
  SITE (352): n equals a,t,g, or c
  SITE (354): n equals a,t,g, or c
ccagaaggccaggggcatctcaggctccgcggggaaggcgctggctgtctggagcctggactggcagcaggccctgcaggtgcgtgggactcatgaactcaccaatcccgggatcgccgaggtcacgatccggccagatcgcaagatcctggccaccgcaagctgggaccaccgcatccgcgtgttccactggcggacgatgcaaccaatggccgtgctggcctttccaaaagcgccgctgttccaagtgcgtggncttcaacggccgatgggctttgcttggccgcggggcttccaaaggatnaagcgggattcaagccttctggttcaatttaacccaaggcgcattgantncaacccaattcctttccggggaagaagaaggaagggcgggcaagggaagttgggat

SEQ ID NO: 927 - DNA, 799 bp, Homo sapiens
  SITE (39): n equals a,t,g, or c
gtttttttttgagatgaagtttcattctatcgggcaggntggagtgcagtgagccaagatctcgccactgcactccagcttgggcaatagcaagactccatctcaaaataaaataaaataaaacttagagcaaagtttaaaactgagtattcatattaagtgttttattttccatattagagatgggaagggaaccttatgtgtattttattttgttttcaaccatcaataaagttttctctagaatattgttttgaacatccttgtaaaagatttgcgagttaaactattttatttactgtctgtgagagcattgggagtaggaaacgatggactccaaagtacaagggagaatacccattttcattcagctatctggagtaaaatatcaagtacttccttcaactaatcttgtctcattcactcaccttttgatatcgaaggcagaaattgcgtttacaacactgaagaccaaagctttttaattagtaaacaagcggaacatagataatggacaatgctggccactgccattctgtgttcagaaagactatgagacctgaacatatggccaagaggaaagaagagtgacgttgtctaagatgtaatgagtgctctctgagagaatcactcaattcctattggagtgcaatccttacttgagaactttattactcttgttctgtgtagttttttttttttgtcacttccccatcagaaaagcatattctttttgatagagggtcagtgttataaataattgtcttttgaaataaaatcaaatattcatgcattgaaa

SEQ ID NO: 928 - DNA, 152 bp, Homo sapiens
  SITE (45): n equals a,t,g, or c
caaaggggaggggctcgggcagagggaactgtgcagtccccaggncgccccggctccgggctagaggcaataaataaacccgatcctgcgggcacagccggcgccctccggcgccgtccccgggctgacgggggagggagcggagaagcgag

SEQ ID NO: 929 - DNA, 627 bp, Homo sapiens
  SITE (70): n equals a,t,g, or c
  SITE (71): n equals a,t,g, or c
  SITE (93): n equals a,t,g, or c
  SITE (578): n equals a,t,g, or c
  SITE (627): n equals a,t,g, or c
ttttctgttccaggtttcttccacccacgagcactttattctcctccgagacccccttttcttccccttnntctctcccccaccagggcagcngcttaaatttccagacagagaccagaaggaaggtttagaaagaaaagaacacttgcccagggcagctttgcctccaagaggctccctcctgtctctaagtcaattccacccctcctcgaagtcccggcttccacccctctcctcagagtcccggcgtttacctcgtggtgtgtttgccttgggcctttcatgccccggctgcacacatcgtctgtgaattgtggctgttcactcccgaggatgtgtcctagactccgggtcgcgtggatctaccctctagtttacttgctcgggagaagaaactgactcgttttatttagtgcctatttagcgagcccagagtaacgtacatttgtgctgttttcaattttgtstatcgcaaatcacaaaaaaactgttatcaattcacattcatcatcagcacgagacccatttccttgtgctcctgccagctcaggatattatgtttcttttttcatttttgnccagtctgttaagtaaaatgtcatatgcgtttgttttaaaaaaaaaaan

SEQ ID NO: 930 - DNA, 853 bp, Homo sapiens
  SITE (103): n equals a,t,g, or c
  SITE (748): n equals a,t,g, or c
  SITE (749): n equals a,t,g, or c
acttgcattttctatgggtagctatcaaagggtgtaacaaattattccagcttttcccaatactaattatattggttttaaaaagtctgcataatcactaggnggcattttcccttcatttgtgaaccaagaggggtaaatgatgctacccatacagtgacttctgagttcttttaactaactttgacagaatctccattgtttcattgaatttctcattgtattatatgtctttccaagtgtgcaaactataatatgtagttaatgaaaaatggaaggctgcagattattttgcatgaataattaattgcccattagggctaaggagactgacatgatttttatcggttctgggtaaatgaaaattttaatggaaaactcattcaccatttactagctttgtgcaatattataaaaggtagaagcaaaacactagcacattgtgctttgcttggcttgtaaggatggctttagtaccattacattaaatggacagtgtgcacagtgtattgtaaatgccaactcttgcaaatttacaatacttaaatatgttcaattaacatcctaaagtattaaaagtacagaggaaaaactaagcaagcatttatagcaataccatgaaatctccagtaatcgttttgactgttgccttttgctctttagtgcagcttttctgcattgtaattgtattgctttgtatttcatgttttttacactcatgacttcagagttaagtactgtacaccannattgcaatcaccttctcttgttgtacatgcatgtaacaactacagtttgggtggttttaacatattccccttttctttaataagggtatttatttggaaaaaaa

SEQ ID NO: 931 - DNA, 708 bp, Homo sapiens
  SITE (511): n equals a,t,g, or c
  SITE (617): n equals a,t,g, or c
  SITE (651): n equals a,t,g, or c
  SITE (653): n equals a,t,g, or c
  SITE (693): n equals a,t,g, or c
  SITE (701): n equals a,t,g, or c
acagtgccagccacctcccacccaagccactagcaagactccacaatgtcagagcaacaaatggacctgaaggatttaatgcccacaaagaggaaatacatgtggaagactgctgaagataggcgcatgtytgacctcacctgtgtgctggagtggctggagcggaggcaggggaagaagaaacaagctcccgagaagcaaaagcccaaagtggtgacagtccttaaacgaaataagaagaaggaagagaagaaaggcawaggcctcatgacagcacggggagggaaccgcagggacacggagacttcccagcaggccttaggaaagagattcaggaaggacgccgctcctaccgaagcctctatggagtggagcaaaaggggaaacacctcaacatggtccctggcagctacatcaaggatggccccaagaaatctgatacagacatcaaggatgcagtcgacccagagtccactcagcggccaaacccattccgtcgacaaagcattgncttagatcccatgttacaggagggtacctttaacagccagagggcaaccttcataagaaactggtccaacaagatcctgcatggcttacgaacgcagctaaagaanctcatggagaaaagcaccgaactaagatggaaancnctgaggttgttgaaacccgaagaagtgctgacttccgtanctgaggtnttcaagg

SEQ ID NO: 932 - DNA, 596 bp, Homo sapiens
  SITE (322): n equals a,t,g, or c
  SITE (521): n equals a,t,g, or c
  SITE (586): n equals a,t,g, or c
atttatgccaccaactctgccgaggtttgtcaatatgtcatcactcatgccaaagtgaacatcttgctggttgagaatgatcaacagttacagaaaatcctttcgattccacagagcagcctagagcccctaaaagcgatcatccagtacagactgccaatgaagaagaacaacaacttgtactcttgggatgatttcatggaacttggcagaagtatccctgacacccaactggagcaggtcatcgagagccagaaggcgratcaatgcgcatgctcatctacacttcagggaccacaggcatacccaagggagtgaatgntcagtcatgacaacatcacgtgggattgcaggagcagtgacaaaggactttaaactgacagacaagcatgagaacggtggttagctacctcccactcagccatattgcagcacagatggtggacatctgggtacccataaaagattggggcgcttcacatactttgcttcaagcagatgctcttcaagggcacttggtnaagtactctaaagggggttaaaacctactgttttcattggggtgcctccaattttggggggaagntaccatgggg

SEQ ID NO: 933 - DNA, 376 bp, Homo sapiens
  SITE (333): n equals a,t,g, or c
aaagaatatccttgctgtgccaagaaagaaaagaccatggatctactagttgcagatttcagcagtaatgccaagggggcaagaagtgaccagcagaacaattaggccatggcaacagaagccaactacaacccatgttccaatctatgacctccctctcctgctggtacaaggatatggactagcctagatgatgatggctcaccaatttccttgcaagggcaagagctgataatcaactgactaatgaggattgacttctacaattgatgagcatggaattggatgtgcctaaatcaacagaagagggttttgatgtcatcacactgtagncccagaagacagaacgctcaaaggtgtcaatggggcagaattt

SEQ ID NO: 934 - DNA, 465 bp, Homo sapiens
  SITE (428): n equals a,t,g, or c
  SITE (453): n equals a,t,g, or c
  SITE (465): n equals a,t,g, or c
gcagcttctagttgcagctcaagacccgcgagttcaccctccgcgccaagcacccaactcccggctctgcctacagtcacccacagacctaatgatcgactaagcgccgtaatggcmcgagatgacaccaggagactcccttgctgtgcgcctccggaagacgcggaacgtagcccctttctcacactcctgggacacaaaaatacccgacaactcaaagtcgccaaaccacatcttttcatgctttgaagacttctgcccaaggctgtggcaggagtatgtccaactgtgatttgggattctttttaaacatcgaatcaaagggaagaggggagggattcgcaactaaatggtagttgttttcaagcaagtctttacgtagccccaaacctactytagtattcggtgattcagccccaaaacatytntgcctgcctttattgttcgggtctnattccattattn

SEQ ID NO: 935 - DNA, 326 bp, Homo sapiens
  SITE (246): n equals a,t,g, or c
  SITE (315): n equals a,t,g, or c
tctcacctgggcccagggtaacactgaagacatgggcaagagcatcccccaatacctggggcaactggacatccgcaaaagcgtagtcagcctggccacagckcggggcgatctacctgctctacaaggccatcaaggctggcataaaatgcaaaccacccctctgtagcaactcacccatctgcatcgcccgcctggcagtcgagcgagaggggcacgggcgggactcaggtgagctccggaggntcctcaactctttggagtgcaaacaggatgagtacgccaagagcattgatcctgcacagtatcactcgntgtgtgtactt

SEQ ID NO: 936 - DNA, 315 bp, Homo sapiens
  SITE (37): n equals a,t,g, or c
atttatttaattttgtattttcaacaatgcctggcanaggagtttaataaacaaattgaatggaaaagaaatgttctttaacacaattatggaaaagacaccactctatttattattgaaatacatccaatactaggtgattctgtttctttattatggctagagatggtggcatcacttcttcaaagccatttgacaggtgcttttcaaggtttcttgtccatgtttctgataggtttcatagcagagtaataagaatgttgtccagcttgcttcacatgtatttctctatgtgaactgccaccactacctata

SEQ ID NO: 937 - DNA, 311 bp, Homo sapiens
gttgacacctaccttactctctccctccactcacactctgagaactgtgctcaggggcagcgctacaacttccacattggtctttacagggcttgagtgattatttcaagaacagacgctgtgtggaaaccttaccatatttcgktgtatctaagacacattttttttttttttgaaatttaacatctctaaggttgggttatgtttcttcatcattgtcaggttggagcttaatcagcagcacttttttttaatgtcacacacagtaatggtgatgcatctcacaattgagatcatcttagacatgatgg

SEQ ID NO: 938 - DNA, 425 bp, Homo sapiens
  SITE (382): n equals a,t,g, or c
  SITE (396): n equals a,t,g, or c
  SITE (406): n equals a,t,g, or c
ttttttttttgtttttatttaaaattttattgaaaccctctttcacccgtttaccacttccyaagtaaaaatgcatgtaaactctgagcctgatggtattagcttcaaactattccttaaatacctgaaaatgtgacttttgaaacttgggaaagtgacgttaggacaaggatccattttacatgcctgcttctttgttcattcatgagcagagtagactaagaaacctttcaatgagagggagagcatgtatgcaggagtataactctctattctgaattctaccctcggctgggcccatggaaaggtaaggaacactttaggatagggtggggaagggaggtttgggaaaacttgtgataaaggggggtaaatttttccnaaatttcttaggtnaaacctaacnggtttacccacagggtccg

SEQ ID NO: 939 - DNA, 680 bp, Homo sapiens
  SITE (601): n equals a,t,g, or c
ataaggcccagccccgccttctgctgttgccgcagcaacccagaaagcgtcatggctgccgccggccaggaaaaagggtatttgacacagactgcggcagcctagacaagtcaccgtcactttcgccacagctagcagctcccatccgagggaggcctaagaagtgtctggtctatccgcatgcgccgaagagctcccgcttgtctcgttccgttctgcgttggcttcagggtctggatctcagcttcttccccaggaacatcaacagagatttttcaaatggcttcctaattgcagaaatattctgtatatattacccctgggaacttgaattatcatcctttgaaaacgggacctctttaaaagtcaagttggataactgggcacagttggagaagttcctggcaagaaaaaaatttaaattacctaaagaactaatccatggaacaattcattgtaaagctggagtgcctgaaatattgatagaagaggtttacactttattaacacatcgagraattwaaagtatccrggatgactttgtgawtttcacggaytayagctaccaagatgcgtttaccctggtttccaggtctacagnttcgaagtctattaaagataaccattagggtatcagaattactaagcaatcccaacatgctgacccaatgaacttaaaa

SEQ ID NO: 940 - DNA, 760 bp, Homo sapiens
  SITE (598): n equals a,t,g, or c
  SITE (674): n equals a,t,g, or c
  SITE (695): n equals a,t,g, or c
  SITE (707): n equals a,t,g, or c
  SITE (729): n equals a,t,g, or c
  SITE (751): n equals a,t,g, or c
gagggctgagggtccacatctcctgcaggacaggccctagctaccgagtcacagaaacccagggccgaagcaaagtcccaatcccagagaggctggggcacacctacaactgaaaggaggcttagaaatccttcagagaccaccctatcggttctcctccacctggacaggatgagccagcaacacagaaggaagaggccttcctccgaaagacaggtttctaagacagccaccgatgggtcctacctcctcgtattcacatcctatgtaatctcctccccagtgtgggctggacctggtgacttgcttccagtgaatagaatatagcaaaagtgattgatgtcacctccaagattcagctatagaagactatgactatgactttcctcttggctagcattctcgctaacccttcctgcttgcttgtactgagctgccctatgaagaggcccatgtagggtggcctgggtgggggtgatctgtggccawcagccagcaaggaactaaatcctgkttacarccacatgagcttggaaggagatccttycccagtaaagccaggagatgaatacaggcccagccttcaacttcattgcancatcgtgagacacccacaagcaggactcacttaaccacagccagaaatctgtcccacagaactttaagacactaangcttgtgcttttcaacttcanagttttgacctnaaattggtggataacaattagncccacttgggttttcaattaanccccttatt

SEQ ID NO: 941 - DNA, 251 bp, Homo sapiens
  SITE (26): n equals a,t,g, or c
ggggaggggacggtcggccgaagtcncccggggcgggccggcgggagtcgtagtcagtggtgatttcttctggagtcgtttcctcagctccttccagccccttgggcggcaccttctatctttgaggcgttaaaggagcagcaaatggatttytcatggaagtttgtgttgattcagtggaatcagctgtgaatgcagaaagaggaggtgctgatcggattgaattatgttctggtttatcagagggggga

SEQ ID NO: 942 - DNA, 597 bp, Homo sapiens
  SITE (492): n equals a,t,g, or c
catctttacccactttaactcatcaagcaaagaacttgtaatacgctgaatgctgcatagaaggttttgaaactacttacctgctgtggaacacctgtataactttaaaatgcatcaatcaatctcgagagtatgatcatgcttcctgcttttaaggatctgaagttaactgcaactccaagtatacaagacttctttgggacccatggaagcatctctacatgctcatgtttgccagattcagtggcctcctgaaacctggccctagctaataagttaaaaagctctaagtaatcccgagctgcatttgaatctccaagatcacttgttcatgggttggtaatactttaaagagccatttgtttaactgctaatctggatcttatattctgagccccagcttttttctaaagcaaagaaaatacaaaataaaagtaagaccaaatgcctttktaccatggagagagaaatgactcattggaatgcttctgnttttcatcacatcaaagatgcatcaacataaatcaaccattatatcatgcaccatgataaaaaagggggataaaagtccccaaaccactggcaattaaaccaaca

SEQ ID NO: 943 - DNA, 447 bp, Homo sapiens
  SITE (381): n equals a,t,g, or c
  SITE (388): n equals a,t,g, or c
  SITE (394): n equals a,t,g, or c
agttggaacactcactttattgttgactgattgaaatttatcagtgcttaaggtgctgaaatactgaggtactagtcaggaaccttgttagttgactagttgtgtcagaccctactggctaattcacaggaagactttattatacctcttgccattttgcccaagtcattaatgacagctttagttgatagatacaaggcgtgtaaggatagcaggagatccagctccttggtctgctgtattcatatataaaaatgtttggaaagctgattaaggcatttcattaattaagccttaaaacaactgaaaccaaatctatgccaaggttcctgcttgacatgtgttcctcaaaagatattatctcaacatctataaagctangaagccntatttngggggaaatctacacagtatattggctcttcaccatggcagggaaagcaaagt

SEQ ID NO: 944 - DNA, 513 bp, Homo sapiens
  SITE (58): n equals a,t,g, or c
  SITE (507): n equals a,t,g, or c
  SITE (508): n equals a,t,g, or c
  SITE (509): n equals a,t,g, or c
aaaagttgcctccttctgtattttctgagagtttgtgtggcactggtaaaatattttntgtatatgtttgacataattcaccaggaaaattatttgtacctacaagttccctcctggaaagatgttgataatcacttattatcctttcattgtctgccagatctgtggcattgcttttttctctggtattagtaatttaaattttcccttatttcttgatcaattttggcagagatttatcaattttattaatctcttttaaaaatctgtattgagctttgttaattttctctattacatactttttatttctactcttacgattgctatttctktatttctcctttggatttagcccatttttctatttgtctaattttaggatttaaaattcaatcattatttttagatatttttatttttaaatataaacatgaaagttgcaatattaccttgggcactgttttgactgcattccacaagtttttatttgtcatgttttaatcnnnattc

SEQ ID NO: 945 - DNA, 322 bp, Homo sapiens
ctttgtctagcaaacatgtctgcagagtacaccagtaaagtgcaaatatttgaacatgggggattagagccactcatcagactactgagtagccctgacccggatgtaaagaagaactctatggaatgcatttacaacttggtgcaggattttcagtgtcgagctaaacttcaagaactaaatgcaatacctcctatcttagatctcttgaagtcagaatatccagtgattcakttgttggctctcaaaaccttaggtgttattgcaaatgataaggagtctcgaacaatgctaaagagacaatcaaggattgggccatctt

SEQ ID NO: 946 - DNA, 317 bp, Homo sapiens
  SITE (259): n equals a,t,g, or c
  SITE (283): n equals a,t,g, or c
gaatattgttaatcaatatccacaccttcaaaatgctcatacttagctgagaggcacaaacttcagccagctgcaactccagcctctgcagctaataatgccaggccaggatgtagctcctcattattgagtaaattaggattaaatgataaattactgactccaacgttattgctcaggattctcaattacaaacaatggaatctactggactatattaaacaaaaaatgaatttagtaaatgrcatcagatagcaancagcatctcaaaggggaccaaagngccacattctaaagctacagatttagggacaatg

SEQ ID NO: 947 - DNA, 471 bp, Homo sapiens
  SITE (377): n equals a,t,g, or c
  SITE (390): n equals a,t,g, or c
cagattcacatggagaagaattaagggttcctgccaatcaccagcaccactttgccagccttgtaagtgggccaccttggaattggagcctccagttcctactgacatctgactgcaacatcatgagagaccctgagtttgaaccacccagctgagctgcttctgagctaacccactgaaaccacagttggcatctgtgtgaagatgtgaatggaggaggcagagtaggcagtgagtgccgcagccacagcttgtgttctctgcagccctggcacagaagataggaacamtcatggggttccttagatcctgggrtgaggaggtggaccagcagaaggtgggyttgtgaaggcagcccggggtccaaatcctcctgnctcttcagcttancgggttagttaacattcagaagccttcatctcccatctgcaaaatgggcatgtccaactcagaagctgcttgaagaaaggg

SEQ ID NO: 948 - DNA, 1017 bp, Homo sapiens
  SITE (953): n equals a,t,g, or c
  SITE (1011): n equals a,t,g, or c
tctcaccagagtttgcctacgtcccagctgacccagctcagcttgctgctcagatgttaggtaaagtttcatctattcattctgatcaatctgatgtgttaatggtggatgtggcaaccagtatgcctgttgttatcaaggaggtgccaagctcagaggctgctgaagatgtcatggtggctgctcctcttgtgtgttctggaaaggtgctagaagtgcaggttgtgaaccaaacatctgtccatgtagatttgggttctcaacctaaagaaaatgaggctgaaccatcaacggcttcctcagtccccttgcaggatgaacaagaacctcctgcttatgatcaagctcctgaggtcactttgcaggctgatattgaggttatgtcaactgttcatatatcatctgtctataacgatgtgcctgtgactgarggagttgtttatatcgagcaactgccagaacaaatagttatcccttttactgatcaagttgcttgtcttaaagaaaatgagcagtcaaaagaaaatgagcagtcaccacgagttagtcccaaatctgtagtagaaaagaccacctctggcatgtctaaaaaatctgtagagtctgtaaaacttgcacagttggaggagaatgcaaaatattcctcagtatatatggaggcagaagcaacagctctgctctctgacacatctttgaaaggtcagcctgaggtacctgcacaactcctggatgcagaaggtgctatsaaaataggctctgaaaaatctctgcaccttgaagtggagatcacttcaatagtctctgacmataytgggcaggaggrgtttggggaaaactttgtaccccrggagatggaaggcaaacctgtgctctctggggaagctgcagaagcagtgcacttgggtacatctgtaaagtcatctagtggccccttccctcctgctccagaaggnctttactgcaccagaaattgaaccagaagggggaagcaaacagttgaattaaggtttnatgaag

SEQ ID NO: 949 - DNA, 591 bp, Homo sapiens
  SITE (15): n equals a,t,g, or c
  SITE (42): n equals a,t,g, or c
  SITE (589): n equals a,t,g, or c
aagctcttccaagantattcttctgaatcccctcctgctccntaggagtcaatactgatgaataaaaaggcagcactttttcttcttcggtttcaaatttcctacatatttcagcaagtttaaggatcttttcacccttatcaacaatctttctcagggccttgagggtggcattactttccagggtgagtctgactaagttcttctgggatgctgcccgggcctgagtyctttgggccttaagttttcgcagttgtacaaggaccaattccttgtcattacggatataccggttctcatcttcactctcacggctgtgtatcatgatcttgccttttgaaatagttatggcatcctagaggaacagagtagattaggggaaatctacttaaccaactgagggtcttcagtgagacaggtaaaagggctgcctggggactgaaatcagagcatatcatcttttcccaaccaatgatcagtgatgaggcccaggggaaacaaggggaagcaaaagaggggataatagagcagttaaagcagtgagtatttccaggtggctacactaacctgtagtttctgtatttttttntg

SEQ ID NO: 950 - DNA, 340 bp, Homo sapiens
aattcggcacgaggctcagtgttgtgtgaactaaggtaataggcttctcgtggcctatttcttcatttgtaaaatgagcaagttagacagtaagataatccactgcattgcaagaaaatcttgttcaaacagtttatatgtatttttacttgaaaatatgatgaaaaaaataaggttttactaatctgaattgacactgggctctggcctggggctgcgtcaggggtctgtggtcacacagagtccctggtttctagtacggtgcctgacagtagatgacttcttatatgtgctgagcagcagagaggagaaggagagaggtaaggaggtaacttgatat

SEQ ID NO: 951 - DNA, 606 bp, Homo sapiens
aattcggcacgagtcaaagtaccgaaaaccttctcccgggatcaggcgcggcggcacccccaggccaggggcacctctggtggggcagaagaggatacaaaataaaaatacaaactggaaaataaagattacagagaaaaaaccaacaccttcctgtgcagtcctgttggaatttggacttgccatgaggtgttgaagccttgtttcactgagttggagagactggacctaaatggcgcagatgactttgctccagcctggcttaatttccctactycaccatcatcaacaaaggtcctgaccagcagtttgaaatcgtcattgaattttgagaagcattctgaaaactttgcatggacagagaatcgttatgatgtgaaccgtcgacgacacaactcttcagatggctttgattctgctattggacgtcctaatggaggtaactttggaaggaaagaaaaaaatggatggcgtacacatggaagaaatgggtacagaaaacataaatcatcgaggtggataccatggtggaagttcccgttcttcgtacaataattttccatgcaggaaaaaagccaaggactacatgaaaacacatactgacat

SEQ ID NO: 952 - DNA, 395 bp, Homo sapiens
gcacatacacaacttttaacaacatgattttttttgacaataataaagtaggtgcattaaaggagaggacacactagtggctcagaagagcaaatgcaagaaatagctaaaaaatgatccaggaattaatctagcaaaaatatgtaagatctttatgaaaaaattaatctttattaaaggacataaaagaagaactataagagattgatatactcatggttgggaggactttattatcaactattctcaacctcatcaaattaatttggaaaaacaatacaagttcaaatgaagtcacttcatgrtttttttcacacagctcccctcccctcttcccgaataacaccatttatttgtgttgatcaatgatggaataataaaagatttggtaaacc

SEQ ID NO: 953 - DNA, 418 bp, Homo sapiens
  SITE (367): n equals a,t,g, or c
  SITE (378): n equals a,t,g, or c
  SITE (398): n equals a,t,g, or c
  SITE (410): n equals a,t,g, or c
aattcggcacgagattggctcctctcttgccctttttatttatttattttttatatggggtaaagaaatcaagctagggaaaagaagcatgttttataggctccaaaataatgtttagaaactgaactggtggtgttcattgtaaagagtggatttgcacaaccctaggtcctggtgcctcgagctcctcctagttctcaagagaaaattccgtccacaggrccacatgaagcaaaatctctaagctaagaactcgtgagarcctgccatgcccatttcatggccttgcacacacacccacccacacaccattcagaacatgtacttttgccaaccttttgtaatggttttttgattctatgcactnaatttctttgnccaaaacatttactctaccnatgtctggggantgtttatc

SEQ ID NO: 954 - DNA, 358 bp, Homo sapiens
  SITE (199): n equals a,t,g, or c
  SITE (209): n equals a,t,g, or c
  SITE (327): n equals a,t,g, or c
  SITE (332): n equals a,t,g, or c
aattcggcagagttttctccaaacacttgcccatccaggaaggccagccctgggcattgaagactccagctgacatcatctctaccgttgagttcaaccacacgggagagctgctggccacaggtgacaagggcggccgggtcgtcatcttccagcgggaaccagagagtaaaaatgcgccccacagccagggcgaatnacgacgtgtnacagcactttccagagccacggagccggagtttgactatcttcaagagcctggagatagaggaggaagatcaacaagatcaagtggsttcccacagcagaacggcggcccaytyaytnctgtnccaccaasgttaaaamttttcaattt

SEQ ID NO: 955 - DNA, 266 bp, Homo sapiens
ttgtaccactgccctgcccaggggtctcccatctttgacccactgcactgccagactaccagcagacataccttgcaagctcctctgagctgggaatcaatcctactggaaactattcaaaaaattgaggaggaagtgttcctgtttaactcattctacaaagccaccatcaccctggataccaaaatctgggcaaagacacaagaaaagaaaactgcagttcagtattcctgagggacatcaacatgaaaaatccttcaaggaaa

SEQ ID NO: 956 - DNA, 623 bp, Homo sapiens
  SITE (605): n equals a,t,g, or c
aggatcgagtcctcatctgagcctgccagcactttcagctccgacgtgccccacgtggtcccctgcaaattcaccatctcactggccttccctgtgaatatgggtcagaagggaaaatatgcaagtttgattgaaaaatataagaaacaccctaaaacagacagttctgttacaaagatgcgtcgtttttaccacattgagtatttccttctgccggacgatgaagaacctaaaaaagttgacatattgctatttccaatggtggccaaagtattcctggagtcaggagtaaagactgtgaagccgtggcacgaaggtgacaaagcctgggtgtcgtgggagcagacttttaatatcactgtgacaaaggaattattaaagaaaataaatttccacaaaatcaccttgaggctctggaacactaaagacaagatgtcaagaaaagtcagatattaccgattaaagactgccggcttcacagacgacgtgggagcttttcataagtcagaagtgagacatttgggtttaaatcaagagaaaattatctgaacagggcattgagaataccaacattgtcagagaagagtcgaaccaggaacattcgncaggaaaacaagaaaaaa

SEQ ID NO: 957 - DNA, 244 bp, Homo sapiens
agcggcacgagcacattggtaaatwatataagctttaaaatttwatgtagacaaaagtggtttctctttccaccataatatcttratggttaaatatgtcggtgaagtaattgttttataaactattgtttaaaccttgraaacttcatagcaagcgtttttctagggcagaaaacattgtgcttggaaaactttggagatttaaaaacaagcaggccaatttcactgcgrttctataatttcc

SEQ ID NO: 958 - DNA, 435 bp, Homo sapiens
cccagatccaaaatgcccctcgtggagcctccggaggaccaccagtgctctcgctccagcaacttgaagcgtgggatttggatgacatccttcagagtctggcgggacaagaagacaaccagggaaatcgtgcacctgggaactgtgtggtgggcagctgaccacgccawgttcaagaccgcatggtgccgagcgcccacaacaggctcatggaacagctggccctcctgtgcaccacgcatccaaggcctctgyttgtgcccggaaggtgcctgccgacaytccscaggacaccaaagaggcagwttcaggaagcaggtgggactcgtagccaggccgggctcctgtggtcctttagaatggccccatggttttgtagcactgactgggcctaccaagggcggggcactccatgtgcattctgtcagtcactct

SEQ ID NO: 959 - DNA, 354 bp, Homo sapiens
  SITE (294): n equals a,t,g, or c
  SITE (326): n equals a,t,g, or c
aattcggcacgaggtttttacccttgtgaagggcgagttagtatctatcaaaattttcaatgcaaagacagtcatgtgttgcttaacgaagggggtatgttctgagaaatgtgtccttacatgacttttgtcatcgtgcaaacatcacagaatattacttaacaaccttagatggtactgccaactacacacctaggctgtagggtgtggcctatagctcctggccagtgaatctktacagcaggcactktaccaaatactgtaggcaaccagagcaggatggtaagtatttgngcatataaactttcctaaacataggaaaggtnttggtaaaattccagtatttgcaatctt

SEQ ID NO: 960 - DNA, 407 bp, Homo sapiens
aattcggcagagttttggccttttctttatatatgtggcctagcaatatcctgtgtttggaaaagtataaacctaaggcatcacctttacagaaaatatcttccacggaaacatctaaaggcaaaaatccttcaaattcaaatttatccaatcatttcttctgcttactaccatcctaaatcatttttctttagtaagatctattagtgtgaagctattaagctattaatgtatgtatcatattaatgtattaagacattaagtgaggaagtaaagttgcattcacaggccttgaacttttccacatctcgatttttacccatcatctctgcatagttccctaaggcagccttcaaatggtgatgttcttataatccagagttcagaagtggttctcttcaatcttc

SEQ ID NO: 961 - DNA, 496 bp, Homo sapiens
  SITE (238): n equals a,t,g, or c
  SITE (495): n equals a,t,g, or c
aattcggcacgagcccctgcgggccccggacgtggagacgctcgagtcaggctgacgcgcgcgccgggaacgaactcttgcgtgtgacttgggatgaccggatgggatgagtgatgccagtggcagtgggagagaggatgaggagaaacggaatgaggaagtgcgctcctgtgttcgcgcccgtgcctsctctcacacaggctccacagtgcttcacccagccctgcgcacgcatctnttttctacctcttaggactcacttctgcaataggtgtcttggggacacaaaggaattcccaaacccaggtgcctccacgtgtaaactccaaataaagctgctgaaacatcaacaytccatacgggraacaagggaaggccgcccccaaatttaattgttacagaatttttaaaatgtcgrttacaaacacaccatcattctgaaaaaaagagaaagaagaaaggggaagaaagaaaaaaaaaaaaaaaaaaactcgng

SEQ ID NO: 962 - DNA, 702 bp, Homo sapiens
  SITE (379): n equals a,t,g, or c
  SITE (473): n equals a,t,g, or c
  SITE (689): n equals a,t,g, or c
aattcggcacgaggacatcagctttcctttctgccgttaaagggtgctggttcttcttgtcctccatcacctccagaaatcagtgctggtgaaatctactttgtggaactggttaaagaagatgggacacttggattcagtgtaactggtggcattaacaccagtgtgccatatggtggtatctatgtgaaatccattgttcctggaggaccagctgccaaggaagggcagatcctacagggtgaccgactcctgcaggtggatggagtgattctgtgcggcctcacccacaagcaggctgtgcagtgcctgaagggtcctgggcaggttgcaagactggtcttagagagaagagtccccaggagtacacagcagtgtnccttctgctaatgacagcatgggagatgaacgcacggctgtttccttggtaacagccttgcctggcaggccttcgagctgtgtctcrgtgacanatggtcctaagtttgaagtcaaactaaaaaagaatgccaatggtttgggattcagtttcgtgcagatggagaaagagagctgcagccatctcaaaagtgatcttgtgaggattaagaggctctttccggggcagccagctgaggagaatggggccattgcagctggtgacattatcctgggccgtgaatgggaaggtccacgggaaggccttcatntttccagggaggt

SEQ ID NO: 963 - DNA, 793 bp, Homo sapiens
  SITE (1): n equals a,t,g, or c
  SITE (6): n equals a,t,g, or c
  SITE (331): n equals a,t,g, or c
  SITE (788): n equals a,t,g, or c
ntattngggtatttgggtacgggccccccctcgtgccgaggaactagtctcgagttttttttttttttttttgcagaaagaataccattggatgtttatttaacatcactctccatccccccaaaaagaccttcaaaatgctctcacatctggctgcttttcttctctcacttttttgtgcagagccagggcagggaggaaacttcatcagtctgaaaacatccagcagcaaagtgtaaattaaatgtgtagagaggccaggggaaggggagtcttacattctgggggtggagtaagactgtgtcctcacccccacyccatacgggcaranctggttttttaccctgtgtcycccattaggarctgtktgaccttgggccagacacttaacccttctgagcctcagttyccttctggtaaaatagggaaataagcacatacagggctgttggagggcaaaagggaataatgtatgtagactgtatggcacgtagacacttgattgatggtagctactattgtggttgctgggatcaaaaccagaagagaatcccaactcttcccatgcctcagagactcaccattgctggccccattcagggagacagatgggcaaaagtaagtcctgccttttgtcctctttcttgcaggttccacctgaattccttccatgcttttcagcgactgaaccatttgggtggcctggaagagcctgtgagctccctggagaaaggagacagtgtggatggagaagaatctggagtagagctcgtgccaattcctgcagnccggg

SEQ ID NO: 964 - DNA, 428 bp, Homo sapiens
  SITE (358): n equals a,t,g, or c
aattcggcacgagcttggtgtacgaattgaggatgatgtagtggtgactcaggactcacctctcatcctttctgcagactgtcccaaagagatgaatgacattgaacagatatgcagccaggcttcttgaccttcactgcggcccacatgcacctcaggttcaaaatgggtgtcttctggcagccctgcacgtgtgctttctgagtgtctctgtgtgtgcattaatatatgcattccatttgggagcatagcagctgtgtgaatgtatgtaattgtgtgtggggggttttttgttttaagtagttagaagtctgggaaaatgaatttttgaatagtatgttactgcagctttggtaanattaattctatagaattaatgatcagagcaagtttaatttttaaacataaaggtcttggttacacatgtc

SEQ ID NO: 965 - DNA, 460 bp, Homo sapiens
  SITE (411): n equals a,t,g, or c
  SITE (441): n equals a,t,g, or c
aattcggcagaggtcccttcacctccgctgcacatcacctaaggagatgctgtctccactggctcagatatagagacctctcttaccacatgtgggcctgcttcactgatggctcctcccaggtaacctttgctgggctggaacaggtgtgcctgtcatctggcctaaaagaagcctgtctcttacagagcatggtaagggatattcagctccatggcagagctttgtggggttctgatggctatacaggccacccacaaaggagccctgttgtggtttcgtggactcatgggctgtggctcagcccagactgacgtcaaacaagccaccctgtgggatgagacattkatataaaaattagstccattctaataaacgttttgttggcatgtaaatagtctctaaaaggtnctgagccacaagggaacttagcatgagcgntgttgcaggaatagggggt

SEQ ID NO: 966 - DNA, 373 bp, Homo sapiens
  SITE (211): n equals a,t,g, or c
  SITE (326): n equals a,t,g, or c
  SITE (344): n equals a,t,g, or c
  SITE (347): n equals a,t,g, or c
agttgaagctcagaagagtcattgtgaataatatggacagagtaaaagagttatgacattagctgttagtgacattagctcgaagcccacaatagtcatagaaagggggagacttcacaacaccatctccctggtatccactgggactttgaatgggtggcatccacttagcggaattcagaaaaatgaaggtgtgaaatcggtttttatnaaagargagaaccatgctatggaggaaggattactgtatcgcctcttcagaagccttgtatgatgccatcctgggrtacagctgagtaagcctgcattcttaacatcgtataggncattctagcatagaagcnttnggatgaggccacccgttttcaattcc

SEQ ID NO: 967 - DNA, 315 bp, Homo sapiens
  SITE (94): n equals a,t,g, or c
aattcggcagagtggagccccagaaatgttcccaagcccattcttaccaagaaccaatgagtaaaatsaggggcctcccacctgaggtcagggnaaccaggccctggagtggaacttggggtggaaaatggccttctttgtcaactgattcattctccagaattcaatttgttctccaactcggtggtgtttgaaagcaactttatccagacccatgtacctgaggctgatttccaggtcactaaagcccggggactggagagatgtctgtgaagggtctgccaccgggatcctcgggggtgacctcctcggtgg

SEQ ID NO: 968 - DNA, 1007 bp, Homo sapiens
aattcggcacgagatttgtaaaggcaagtttattagcctctgccatcgggggcaaagaataatagctaaggcaaacaatagacacaccaaaaagcctgggaggaaaagctggaaagtaagatattttggagaataaaggcttttaaaacttccacatattcttgggaatccaaaaggccacatgtacatgcagggtgagcaaatagagaagacttgagaaagccttaaactctcacctctggctaaccatgaggcttgctcaaataggaagtgaaaactaaggtgaatttgttgcttagctgaatgttgaaggtgtgccccaacacttacacagagcctactggtaaagacagagtgttttctttttgtcttggtttcaggcatttaaggaaatctgtttctcttttggatcactagctgcaaattaagctaacagaacaggagctcagctggtcacacacagcaacgaatacagactttataaagttcagaaaagttaccaaacagtggtaaccataacaagtaccaacaatgaactatggggagggaggagaatctgatttccagagttaccacattataatactattcaaaatgtcacatttttagcaaagattacatgacaaggaaaaaccagaaaagtatggcccatacacaggtaaaaaaagaaattaatagaaactacccctgaagaagcacagacttcggatgtacaaaacaaagacttttcatcaactcttttagatatgctagaagagctaaaggaaaccatggacagagaacaaaaaaattaggaaagcaatgtctcatccaatacagaatatcaataaagagattgaaattgtagaaaagaaccaaatagaaattctggagttgaaaagtattataactaaaactgaaaattcactagaggtattcagcagcagactggagaagtcagaagaaagaatcaacaggcttcaagataggtcaattaagattatacagtctgaggagcagaaaggaaa

SEQ ID NO: 969 - DNA, 331 bp, Homo sapiens
  SITE (208): n equals a,t,g, or c
  SITE (309): n equals a,t,g, or c
  SITE (319): n equals a,t,g, or c
aaattcggcagaggtcacaatcactgggacttggggatacaaggatggaaggggaaargagaacattctttcttctgtcaacatacctgggtatttgctaggatgaaaaaggaaccagggacacctgctcctctctttctagatgagtaaccattcattcatcttcagtctatatccttttcgaatgcatcctgaacccttgggactnctttgaaaacatgcttttttccttttatcccctctgtcttctctttacagataggtaatcatgtcttcatactatgggacggtcccctcagatgcatcctncaagtttggnagaattaatttt

SEQ ID NO: 970 - DNA, 567 bp, Homo sapiens
  SITE (520): n equals a,t,g, or c
aattcggcacgagggcacgatgtcctccctgacgccgccagacagcgcctggcccaggcctgggcctggtgaacgygggtttcttcctctgaggttcaacactccgcacttgggttggctcctttcatcctgattggtttattcgccacgtgccaagcactgaagagggcgtgcaggatggatacttttggagcaaaaatagccctgcttctttcctggggagggatcgcactttctagaggggcggttctcaaagtatggtctcaggactagcagcgtcgaaaatgctgggaactcgttagaaaagcaagttttcaatcctcgccccagawtcagaaactcggggtggagcccagcaatgtgtgtcctgacaagtccacgcgcgaccccatgctggytagggttgcaaagccactgytctacggagcgagcgagatccatcatagtgggacaagcgagaggatgaggccatacagaccagggttttagcaaaccacaagagcatttcataaattgtgantcaatagaaagtattttccaggattgacaacattcacctttcaaccg

SEQ ID NO: 971 - DNA, 423 bp, Homo sapiens
  SITE (392): n equals a,t,g, or c
aattcggcacgagcttccctcttgttttgcctctcgttgccctgcaagcgtgaccctgatggacatccagtctctccaattaactaacaaagcggttgccgacgaccaatagcattaaagactattccaactggcccaccatcccgcaagtgtacctcaatggcgagtttgtagggggctgtgacattcttctgcagatgcaccagaatggggacttggtggaagaactgaaaaagctggggatccactccgcccttttagatgaaaagaaagaccaagaytccaagtgagggcggccaagtcctcgytgagcagagagggagccsttcatgtcagagaytcaytgccagaaaggcttacccattttgggttttcactattgagaccgcaantgtttgcactgatcaatttgggtcatgagca

SEQ ID NO: 972 - DNA, 460 bp, Homo sapiens
aattcggcacgagtactctggtcactactctgttaaacagtcaaggaggctgagtgccacgtgctgacgtcactaagatcaatacagcaaactctgaaagatggacagagagacaggagatggtcctttataatgcagtgtgatctgtgctgcaatagagttttggaagctagaagttcaaaacgaggtgttggcagcaccatgctctctccgaagatgctaggaagaatctgctccatgcctttccattcgtttctggggtttcctgcaagccctgacattccttggcttgtagatgcatcaccccagtttccgccccatcatcacatggcctyctctctgtgtgtgcctctgcgktccctctattcttcttctaaggrcaccgacaccagtcatagkggrttaagtgtccattctaaccaattacatttgaamaaccytattccaataaagcacattt

SEQ ID NO: 973 - DNA, 351 bp, Homo sapiens
  SITE (308): n equals a,t,g, or c
  SITE (325): n equals a,t,g, or c
  SITE (328): n equals a,t,g, or c
attcggcagaggttggtccagctcccagccaagcagcctccgccgggcacattagaacagggcagaagcatccagcaaggggagaagcctgtagttagcttggagaccacacccagccagaaagcagactggagttcaattccaaagcctgagaatgaaggcaagttaataaagcaagcagctgagggaaaaccaagacccagacctggagacctgattgaaatttttcgaattggctatgagcactgggccatctatgtagaagatgattgcgtggttccatctggcttccccaagtgaggagtttnaggtggggcagcattanttncatcttttagcaatcggggccgt

SEQ ID NO: 974 - DNA, 561 bp, Homo sapiens
  SITE (444): n equals a,t,g, or c
  SITE (516): n equals a,t,g, or c
  SITE (529): n equals a,t,g, or c
agacgggaatcacaccccaaactgccaactgggtgaatgaaccattctaagccttagtttgctcttctataaaccggggagagcaatggtccctacctcatgggtttttaattgggattgcataaaataggccctgaaaagtgctggacgtgcccggcaaacatgagtgctgtgcatgcggtctgggctggctgcccacctgcccaaagctcattcctctcactgaccaggtcatgactgcaacgtttgctccaggaatccatctgagaactctgtccatgttctcaaatgcctggatggcgaggtggctgagggcagtatcgtgcggtccccagcagccaggactcagcccagctgacctgtccccagccagcagaagaggatccgcagatgcccgcaggaaggggacgcattgccaggtccaccagctctcccacagacagntccaggcctcactgttgagtctgtgtcctattattacaatgtcatcttgaggggtggcaccgaacaactggntggttttgttggncacccaccaccctttcagccaccctggttgcc

SEQ ID NO: 975 - DNA, 411 bp, Homo sapiens
  SITE (364): n equals a,t,g, or c
  SITE (371): n equals a,t,g, or c
  SITE (393): n equals a,t,g, or c
  SITE (401): n equals a,t,g, or c
aattcggcacgagcttactttctccatagtgattttcgagtgttcagtctctcacatccttgccaacatttgtwatctttttgatatagcgatcctagtgggtgtgagcacaaaggaactttaaattttatcaaatgcttaaatatctattgacatgtaattcaccacattaacaaaatagctttaattataaaccaaccttgcattcctgcggtaaacctaaattggtcattttatgttgttagattatatcatcctgatgttttgtataggaattttgtactatatctttgttcttgggtgagattgacctgtagttttacttacccagactgtctttgttggattttggtgatggggttangctaccntaaaaaagggtttgtgaatgtntccggtcntttctttttc

SEQ ID NO: 976 - DNA, 628 bp, Homo sapiens
  SITE (593): n equals a,t,g, or c
gagggacaccaggcactctagtaggcctggcctacccagaaacagcaggagagagaagaaacaggccagctgtgagaagccaaggacaccgagtcagtcatgggcacctaaggcggcaaagggggccaagccagagccagcaccagctccacctccacccggggccaaacccgaggaagacaagarggacggtaaggagccatcggacaaacctcaaaaggcggtgcaggaccataaggagccatcggacaaacctcaaaaggcggtgcagcccaagcacgagtggccacgaggagggggtgtcgccgytaccggtkgggawttaaaagrcagcawtaaagakttytggytyttggggcacgytgagwtcaagattcggagtttgggctgcctaatagctgcaatgatactgttgtcctcactcaccgtgcaccccatcttgaggcttatcatcaccatggagatatccttcttcagcttcttcatttactgtacagtttgccattcatagttacataccttcatcctgtggccctttctgaccttttcaacgacctgattgttgtgcgttcctgtgggagcctggtttttgntgttagaagtcggggttcctggatttccattattt

SEQ ID NO: 977 - DNA, 435 bp, Homo sapiens
  SITE (426): n equals a,t,g, or c
  SITE (430): n equals a,t,g, or c
  SITE (433): n equals a,t,g, or c
  SITE (435): n equals a,t,g, or c
aattcggcagagctcttgctcaaagtagagaacagacagaagagtagccagagtagatgcgggaaagccaggcagaaggccactccaaatactcccaacacctaccactgggatccaagagcatatgaaatcaggagaacatgagtcatagtcaactatcttcctgggagaaggaaagaagcacaacaccaaaggcaaaggttactgcttaactagagagtcttaaaagcagttcctaccttaatagggaagaggatgggaaaccatgagamcatcccaggagagtgagtctctggacggatacctgtgtggacaaawtatgaaaamcagaggtctycatggctgtgacttttgcctatgctgaagagggcttctctatcacacaamcaaggtctccttcattggcattggcccccyatttaatgncacngtncn

SEQ ID NO: 978 - DNA, 256 bp, Homo sapiens
  SITE (235): n equals a,t,g, or c
  SITE (247): n equals a,t,g, or c
aattcggcacgagaaaatacatacactgggagggaaagaggcatcgaagaattgtgaaagaaaggaagaaaggggggaaggaaagaagtaagaaaggagaaaaagagaagatgctatatccaccagctacatttactctaatacttgatgaacatattacataactatcagtataagtgtgttttacctcgtaaatacaaatctcacaccttgtaaaaamaaaaaaaaaaaaaanctcggggggggncccggtacc

SEQ ID NO: 979 - DNA, 424 bp, Homo sapiens
  SITE (203): n equals a,t,g, or c
  SITE (301): n equals a,t,g, or c
  SITE (424): n equals a,t,g, or c
aattcggcacgagcaaaaacactgctactcccagtatgcctggtgaggagcgcaccgcactgcccctccctgaaggtaccaactccatccgcaatccccaatcccaatgcatgcttgggattgtagtccggcaacctgtgaccaacggccggaagtggctaggagactacttctcccagcatgcctggcgaggcgcgcaccgntgggccctctctcctgggacamgcaccgyctccaatcctggtttatgctkggattgtagtcaggcagccctgtgagcaatttttcagattaactcttnaagtactycacggctacatgctyctgaagstgtcataggccagctcagatyttgcaggcggatgacaggcagaatctccgtggacatctttctgggggcatcaattttactgcaagattttgn

SEQ ID NO: 980 - DNA, 377 bp, Homo sapiens
  SITE (41): n equals a,t,g, or c
  SITE (298): n equals a,t,g, or c
aattcggcagagccacagcccacagggagccaccgcgtgtntggtacaccctcccgtcagccgtgcaagccccaacatacctccttcccttcgggccagatgccatggattgctaactgaggtgataatacagaagcagaaaagcgagacccccaggaactcgtggcctccttttctgaaagagttcggaacatgtcgcctgatgaaatcaagatcccgccagaaccccctggcagatgttcaaatcacttgcaagacaagatccagaagctttatgaacgaaagataaaggagggantggatatgaactacattatccaaaggragaaagawtttsggaaccytagcatttmggggaagytgwttccatttttgtg

SEQ ID NO: 981 - DNA, 363 bp, Homo sapiens
  SITE (361): n equals a,t,g, or c
aattcggcagaggtttttagcccttgcttgcagcgctctgggagttactattaccaaaactctcaagatagtgtgtgaggtcttatcatgtgaccacaatggtgggttgccccgaatcccattcagcaccttccagtttctctacacgtatattgccgaagtggatggggagatctgtgcatcacatgtcagcaggatgctaaactacattgaacaggaagtaattggtcctgatggtttaatcacggtgaatgactttacccaaaaccccagggtttggctggagtaacagcacaattttggcaattttaaaggaagatacagaggtgattgtacttcagatgttaaaccctttaccacnta

SEQ ID NO: 982 - DNA, 363 bp, Homo sapiens
aattcggcacgagctcgtgcygtttttactactgaaaaatattgcattggtagcaatacagagatatttcctaatcagtaatgaagtgctaatgattgcacctctgcctccacctcccctactaccacctttggctactaactatcgaactccttatgatgatgcatactatttttatgggtccaggaatactttcgatcccagtcttgcttattatggttcaggaatgatgggcgtacagcctgcagcttatgttagtgctcctgtcacccaccaactagcacaacctgttgtgaatacggttggacagaatgaactgaagrttacaagtgatcaagtgataattcaggattgatttttgag

SEQ ID NO: 983 - DNA, 354 bp, Homo sapiens
aattcggcagaggcggccccagcactcccagctgcgcagggcctgccaggtggcgctcgatgaaattaaagcagaaatagaaaagcagaggcttggcactgctgcaccaccaaaggcaaacttcattgaagctgacaagtattttcttccattcgagctagcttgccagtccaagtccccaagggtagtcagcacatcccttgactgcttgcagaaactcatcgcatacgggcacatcactgggcaacgcccctgacagtggagcccctggggaagcggctgatcgacagaattgttggaaaccatttgcaktkgtttttcaggggcctcagactgatgaaggggttcagttac

SEQ ID NO: 984 - DNA, 297 bp, Homo sapiens
  SITE (67): n equals a,t,g, or c
  SITE (183): n equals a,t,g, or c
  SITE (202): n equals a,t,g, or c
aattcggcagaggcttggttatggcacctgtggctcccaaagagccttctactcaagtagcaaccantctgaggataccagtctctcctcctctgccagaccctgaagacctcaaaaatctccccagttcagtattggttaaatttccaacacaaaaagacctccaaactgtacctgcctctnttgaaggagcccctttctntccagcccaagcaggactcaccaccaagaaagaccctactgtattaccgttagtccaggcagcccctaaaaattccccttctttccaaagtacat

SEQ ID NO: 985 - DNA, 384 bp, Homo sapiens
  SITE (358): n equals a,t,g, or c
  SITE (361): n equals a,t,g, or c
  SITE (381): n equals a,t,g, or c
aattcgacacgagaaagaaatgggaagaaaaaggaagagaaccatagctacgttgtgagggcattgcttcaactctggtaacttcatgtgaaatgactacaaaatgaattaatatgcagtaagagagccagtgccccaccagggcacctttccacttgctggcacacagatttaccacaattaggatactgcttgtcctgtcatgccgggagagtctaaattactctgactttcaagaaaccaaaaatatgcatttttgatgttaggaagatttactgtgcattgggctgtgtcatttgatgggggaaaaaaccaaatgatctctttatggaaatgaaggtaaattatatgtaaatgnccntttaatctaactttttatangga

SEQ ID NO: 986 - DNA, 333 bp, Homo sapiens
  SITE (155): n equals a,t,g, or c
  SITE (277): n equals a,t,g, or c
  SITE (286): n equals a,t,g, or c
aattcggcacgagagagagagagagagagagagagagagctctccgccccggccgccgtcacccggcagcgcgacgcccagctcagggcaatggcctggtattaaagagtgaccttggcttagatataaaaatagatgcggttaagccgcggggnctgcaacgctgattttgcgtattcctttaatgccgaccttcgcaggattctgttcgcatagcccggtggagttctmsagccccgygtaggccctcctgaaatttacccagagtgggcgcggncatcccggncttgggacaggggtgcagagggcacgggcgaggaccgccggtcttcg

SEQ ID NO: 987 - DNA, 481 bp, Homo sapiens
  SITE (457): n equals a,t,g, or c
aattcggcagagctcttttccagtcctccactgccggggctgggccgccgcgggaaggaccgaagggatacagcgtgtccctgcggcggctgcaagaggactwagcatgaatggcagccggagagtcagagcaacctctgtccttcccagatatggtccaccgtgcctatttaaaggacacttgagcaccaaaagtaatgctgcagtagactgctcggttccagtaagcgtgagtaccagcataaagtatgcagaccaacaacgaagagagaaactcaaaaaggaattagcacaatgtgaaaaagagttcaaattaactaaaactgcaatgcgagccaattataaaaataattccaagtcactttttaataccttacaaaaagccctyaaggcgaaccgcaaattgaggatgacatgttaaaagaagaaatgaatggattttcatyctttgcaaggncactaagaccccctttttaaaaag

SEQ ID NO: 988 - DNA, 385 bp, Homo sapiens
  SITE (97): n equals a,t,g, or c
  SITE (128): n equals a,t,g, or c
aattcggcagaggaaagaacactttttcaaaggatgtgacatttcaaatgagaccaaaggatgacagattgggtcctgtgtgctacttaagtatttnctgttttatcctaagagtacttgagaaaccntggagggtttaaaaaagaatggcacgattagatttgcatattgaaaagtcctctggctgcagtgtagagaatcgtagtgttactgaaagtgctggtcaagcatcatcgggaatgaacttgatgagaaggaacttattacagaatattaatttacctatttttttccttcacagggaaatcttgctacaatgtcaactaaactaaccctttactcagtgctggcacaatcagcattgaattagggaatgtgtgagctg

SEQ ID NO: 989 - DNA, 1260 bp, Homo sapiens
  SITE (520): n equals a,t,g, or c
  SITE (768): n equals a,t,g, or c
  SITE (974): n equals a,t,g, or c
  SITE (1213): n equals a,t,g, or c
aattcggcacgagctctaggaaaacttagctgtaagaaggtcagaaagggttctttgtttgaaatcatctcctttccagcaaagactgctttaactagcataatatatgcttcatatgcagcactaatttatttggcagtctgtgttaatgctgtgctgaagaaggtaaagaacatcttccaggaagaagaatccataaggcaaaacagagaggagagtgaaaattgtagaaaagccttttctgagcctgtgctttcggagcctatgtttgctgaaggtgaaatcaaagcaaaaccttataggtcattgccggagaagccagacatttcagattaccccaagcttcttgctaataagcagagtaataacatccaagttttacattctgtgtttgaccaatcagctgaaatgaaygagcaaatctgaatacaggtatcactgaacagaacttaagagttatctatttaatggcacatttcatctgacaaaactcagagtctagtttacatattctgaattnctctgctttcttaaaaaaaagagaagggggctactattaaaatgtcattttctagtatttacatgatagagtaaataaaatgaatattgatgtggaatatatgtactgaytacatacttttaatgaacaagaaaatccatcctytggtaggttagmctttacmctgtggtttataatataagcatatttataatccattaatgkttttattaaagacttgttttgagtgtcttaattctttacttggnaggaaaaaaagccccatcaagatggtgcatatccaaataaaagaatatttattttttatatgcagactgaagagtttgagtctgcctattattattttgtaaatcaccttgcaaagttatgaaggatttgcaattcacagatgtcataaatttataaaacaaaatattacttaccaatgtgatgagaagatttctgtatatgaagncagtacatgatatgatttttatttctagatttagagatacaaatttagaatgaaaaatcaagtgcacactactcattattgccagtggctcctatgagaaaatatttctgtaattattcctgcaaaccagggctagtttttgcctgaagaaagtactttgatttcttctgtacactttatattctggacatgtgttaagacctgactgggcattgaaggattatcacatgatagaatanactgggaagtaccttcctgagagatagcccgggaattccggaccggg

SEQ ID NO: 990 - DNA, 615 bp, Homo sapiens
  SITE (589): n equals a,t,g, or c
  SITE (595): n equals a,t,g, or c
  SITE (615): n equals a,t,g, or c
aattcggcacgaggcaatgctcaattcctatagggactgaagagattagtgccaccataagtacttgaaggaaggcggggtggtgattcctaccatatgtccattcaactcgcctatttagcctgggcagaagacagatggattatcacaaacttaactaggtggtgactccaattgcagctacagtaccagatgtattgcttgagcaaattaacacaactcctggttcctggtatgcagctacctggaatcttgattgccttttctttccacatcacattggtccattacattgacgacattatgctcactggacctaatgagtgagacatagcaactactccagacctattgcttttctgcatggaagaattaaattgagaaaaacatagttatttaaaaaatcacatcgtaactgagttaacaaggcactgaggtctaatcatagattaccttccttcttcatcttycagctggtttctaaagcttyctctgtgcttgagtggtctgcaatcagtatttttgaaaaagaactgggatcttaattctggtcttatgstactggctgaaactaaacatcttggttganaaaaangcctaacattatagcccttn

SEQ ID NO: 991 - DNA, 321 bp, Homo sapiens
  SITE (280): n equals a,t,g, or c
cacggggaaaacttaccaggtacaatgagccagtgactgttactgaatttcttaagattacacttttcccaactactgcagactgcttcagaatagaagaagacaactctcatgccatcaagccgacggactttcaaaaaaataaaagatgcatttctttacttggcccatgagaagtaaaagcaggcactggcattctgcacagatggaaatacttcctacgacaggaatacatgctcacttgtggacttctctgtaatctgtaggsaacatcagytcntgatttctaggtctggatctgggtttctgtagcacaggagc

SEQ ID NO: 992 - DNA, 426 bp, Homo sapiens
  SITE (252): n equals a,t,g, or c
  SITE (409): n equals a,t,g, or c
  SITE (415): n equals a,t,g, or c
aattcggcacgagcggccttctcaacagatgacttcaagttgatttcgtgctttatttcttaagaatagtgactaacctaagggatctgattcaatttattaggaacacagtgccaccttccaaaattacttacctaagaggactgagcctgctgtccctggagcagttagctaaaacagtgcctcagtacggagcgtacctgtgttaacttctagagtgctgtttccgggagctgctgaaatccacgctgnggttatcaagctcatcctacaaaataaagcaagttcttcgcaatttaaagcaaaaatctgggcttattttttagggttttgggggatgtgaaagttgtcttagataagkttccagggaagtaagacttacgtgcattacagtcactttcacaatttngggttnggttaggaggt

SEQ ID NO: 993 - DNA, 412 bp, Homo sapiens
  SITE (380): n equals a,t,g, or c
  SITE (399): n equals a,t,g, or c
aattcggcacgaggagagagagagagagagagagacttttctaaaaccttgtttaactgccttgtttatggcccagaaaatacccagccaattttagatgatgtttcagactttgatgtggcacagattataatcaggataaatactgcaacaactgtagctgacttaaagtcaataataaatgaatgctataactaccttgagttaattggatgtctcagacttataacgacattaagtgataaatatatgttagtaaaagacatacttggctaccatgtaattcagagagtccacacaccctttgaaagttttaagcagggtctgaaaaccctggtgttttggagaaattcaggcttatccagaggcatttgtagcancctgtgtcataacccgggngttttttgcaaaa

SEQ ID NO: 994 - DNA, 707 bp, Homo sapiens
  SITE (574): n equals a,t,g, or c
  SITE (699): n equals a,t,g, or c
  SITE (705): n equals a,t,g, or c
taattcggcagagggaaccttatttccctgtggtcagttcctccaaaagtttttcatgattttycctcacactgatcactatccaatcagaacaataaacttctaacactcccttactaaaagaacatggttaagggtgagaaagtccccaagggcaagaagatcaccctcaaggtggccaggaattgcatcaaaatcacttttgatgggaaaaagcgccttgacttgagcaagatgggaattaccaccttccccaagtgtattctgcgccttagtgacatggacgagctggaccttagccggaatcttatcaggaagatccctgactccatctccaagttccagaacctccggtggctggacctgcacagcaactacatagacaagctgcctgagtccattggccagatgaccagcctgctctacctcaacgtcagcaacaaccggctgaccagcaacgggctgcccgtggagctgaagcaactcaagaacatccgcgctgtgaacctaggcttgaaccacctggacagcgtgcccaccacgctgggggccctgaaggagctccacgaggtanggctccatgacaacctactgaacaacatccccgtgagcatctycaagctycccaagctgaaaaagctcaacataaagcggaaccccttttcaaagccaggtgaagtcgggaaatattctagactncatcanga

SEQ ID NO: 995 - DNA, 844 bp, Homo sapiens
aattcggcacgagctcccttggaggtacaaatggcacagcctaattatggtttagaactagtaaccggcagtgcgaaaaatgggacttacttccgaattcatattaacaagtataaaatggtggaaaccatcacgtgcctttctagggagcccttccccgcctccaactacatccgcttgtttggccagcacgagcaactcctcaacaacctgtgtgctcggtacgatggaaaacctgatcacagatctctatagctacttcaccgagccgtggtgcctggccctgttccacgatcgttttattgatctcaggaaagagttacgscaaatyttagsctccaaggaggaggaagatcttccttccatagagcagttagcccatcaaatagaagatgaggaaatcaacccgactgagaagcccaggcaatacctcaaaagagtttttgaggaatccatctacaaaaccctggtggagagaagcactcttgactacctgcactataaccgctaccacctgcccatgtacgcgtggccaggcatcgtttagttgtaggcagggtctcccctttatggttttcatttatttagttcctggaaacgcgctctgtagaaatagaaaagttctctgcagcctggtttgacagcgaagccagcccctggtggttttgttcactcctttcctttcctgacttatgcctgtagttttctatcatcccagtaggtggyacacggccgtgtgcctctcttctrgggcaggctcgctttacaaatcccaggcatgttcctgtgcagaataatccatttcagcaataaaatgagatcatactgtgtaaaaaaaaaaaaa

SEQ ID NO: 996 - DNA, 550 bp, Homo sapiens
  SITE (516): n equals a,t,g, or c
  SITE (526): n equals a,t,g, or c
aaattcggcagagctttaggacccgaggcaggctctgggcccgccgggtccgttaatctcaccgcgccgcaaggggccacgttttaccacttgatttagcaaccctaagcggtttggaatctgctttgctctcacaggacctcagcccgtcgtgatcagattctcccactttcttttttctttcctggaatggagtgggcagtctttttccatctctaccgaagttgatgttcatttttaatcttttcgcccctcacgcttttgtaataatgagcactagaatgctgcagggttggcctttggctaaaaccatttctagctatggacttgccagatgagagccagtgggacgaaaccacctgtggcttggctgtttgtcagcamccacaatgstgggcaattatccgccgcattgagaggggccatcctcgaatcctcggstcatcctgcaaaactcccctggatgctgaagataaactcccagtgctcaccgtggtagacatcttagattccggntttgcagctncatcatttaccagaatgtaccttt

SEQ ID NO: 997 - DNA, 165 bp, Homo sapiens
  SITE (16): n equals a,t,g, or c
atgccaaatagtgggncataaactttaaacagttagctttgaccagmggtaggcaaatatcctccatgggctaaatccagatgtccacctgttttcatmaataacggtttattggaggatagctgtacccatttgtttacatattggctatggctgctgtctagt

SEQ ID NO: 998 - DNA, 590 bp, Homo sapiens
  SITE (475): n equals a,t,g, or c
  SITE (508): n equals a,t,g, or c
  SITE (522): n equals a,t,g, or c
  SITE (566): n equals a,t,g, or c
cccgggacgcgcattttccttctctcgccacgagttcacctgggactttgcaaataactstgcggtgggagctgcgctcagccttgtcatttgctgagggtgggtggcggtgccaaggaagtgaacttattttgttccttcacaaagactggaccaggcggtgcctttcacgcgaagaggttacgaccacggacacaacctcctttgatgcattgtgcgaggcagcacctcgggccccggacagtagtcatttcacagaaaatgcaccgccccgagtgtcttattgctgtgatgaaatggaaatttaaataaaaggtcgaacacgtgcgttcactgggaagtattgacatgggtgttacatcaccagcagccaatcagataactccagtcgtgtttatacttctacaaccaccttgtgagtattacagtatgtcataacgttataaatattaggcagggttttcccaggagcggngaggagtctgcttctacggacgttgtgagcggntcccaagattgtgnggttaaagtcaacaattcatttttaagacttttttcgaactggntacattacatggactttagattga

SEQ ID NO: 999 - DNA, 257 bp, Homo sapiens
  SITE (132): n equals a,t,g, or c
  SITE (244): n equals a,t,g, or c
  SITE (255): n equals a,t,g, or c
agcttagctccccctcaataacgacacggccgtcagtatttaccacgttattgaccctctccagccggcccgcggcaagaagagttccacttccttcccggaaaacgcggccggaaggggcgggctttccgnctgcaccaggsgcttccgccaccatggcttcacgtggggaatgttgcatagaacgaccgcctcttcggctgcgtggcttcggagcagctttgactacaactcccagacttgnatcgcccctgncc

SEQ ID NO: 1000 - DNA, 293 bp, Homo sapiens
  SITE (254): n equals a,t,g, or c
  SITE (261): n equals a,t,g, or c
aattcggcacagggaactcactgccctaaagcaaagaacacaagcctggctggcattgccacttgctgattatagagctttgagcaaacataagtggtaaccacatagtcattacagtgggccttggatgaaactcagtgctgtgctggcttcagggctcacccagtgcagtcccagtggtggtggccataagggtgcttatgtcactcsctsccccagctccaggcagcacagcatagagatagtgactccanttgtttngggggaaagttaaaagggaggagaacaagatt

SEQ ID NO: 1001 - DNA, 350 bp, Homo sapiens
  SITE (306): n equals a,t,g, or c
  SITE (314): n equals a,t,g, or c
  SITE (326): n equals a,t,g, or c
aattcggcacagcttttaatagccggggatttgaagattcctatgccactgacagctcctccatgtggwgtccagaggaacaggacaggrccaatttgcaggtgccatscggggtctcagagcccatctcaaagtgtggtgacctagatgtcatctttgraatatagagccgccagccagaagctcasagtgaccattgtgagggcacagggcctcccagataaaggaccgaagtggtgtcaattcctggcaagttcatgtagtgctgctgcctggtaagaaacacaggggcaggacgaacttacngagagggncccaaccccgtnttcagggagaaggttcaccttttg

SEQ ID NO: 1002 - DNA, 291 bp, Homo sapiens
  SITE (107): n equals a,t,g, or c
cccaattgctgaatgcaatagatatactcagacagtagccttgtttaaccagtgcctgtagaaggcatagaataaatagcatgtccaagagtataacaacttttttngtaaatttagttactagcctaatcaaactgtaaatataactcactaattggtaccatattttcatttttcttattgttcatctttaaggtttcattttattgcttttttgtagctctaagtaactaatcaatttatttcaaaggaaagttaaagaaagtttaagcttttactgcatggattctg

SEQ ID NO: 1003 - DNA, 323 bp, Homo sapiens
  SITE (219): n equals a,t,g, or c
  SITE (316): n equals a,t,g, or c
  SITE (321): n equals a,t,g, or c
aattcggcacaggtgagtttcttggggtttggtaaagagtttccttatttggtaaatacattttggcaatctawgcctttgagtctttggagctatgagtgtgtscgtsctgggaggattttyctgagtatgggaagagtttgtcatggctgttgtgtttgttccctagacacgggcatgtgttgtacatactcagaacctctgggcaactttactggnagcccacatgttatttctcttcatggtttattggatttaacaagttrtraagtagtcgctwatcaaatggttgggatccatscrgaaacacttgggncttgncc

SEQ ID NO: 1004 - DNA, 540 bp, Homo sapiens
  SITE (357): n equals a,t,g, or c
  SITE (486): n equals a,t,g, or c
  SITE (497): n equals a,t,g, or c
  SITE (527): n equals a,t,g, or c
  SITE (538): n equals a,t,g, or c
agtggggtttctcagtaggcaattatatcatctctaataatactttttgttttctcatttccaatagcaacgtccctatatctgttttagaattatattaactaatacaatggcagtaaggatctttgttttctttctgatgttatgggatcctgtttctattttggttctttgtccygtagtgtgggtgctcattaaaggacttcctttgtgttttgtctggattattctccaggcagctggtaagctccttgtgaagacagcccatcctgttctaacatgtctgatactctgtgtctggtctctgcagctcctggcacacagcagggaacttgattagggcctgaaagaatgtgncttatgctggattcttgggaggcctaaaagatctgcactgcttctttctggatgtggccatgtgtttagaaacatctgctcttctagaaatctggggttcctggttcagcttcgagcagacacttgggnttcccttacangctactggctggtggtgaccacatactcangaataaatggnaa

SEQ ID NO: 1005 - DNA, 426 bp, Homo sapiens
gggacctcagtttggcagaagtccaggtctgttcctccagcaaaggggagtaagacagccacactcaacgctatagggacarttccaggmgagctgacatggcccaggatgtrsgctaaatgattacacaggtccccagcagactccttaagagggaaaatactccctcttaaggagtcctagccaaaggacagcarttgggakaggacagaaaagagtccttccttgtaaaatgtggctcaaactaacaaagagctccaaggtgtctctcagtgaggctatgggtttcctatggaaaagaraagatgttgctaattctttgtagatgtgtgattctcgactctgtcagagtcaatgccaggcttttaacacaaatactttatcactttccctttactcaactgaaatgaaattcatagaaaatat

SEQ ID NO: 1006 - DNA, 405 bp, Homo sapiens
  SITE (17): n equals a,t,g, or c
  SITE (331): n equals a,t,g, or c
  SITE (389): n equals a,t,g, or c
aggcagaaatcggcgtnggggtcagccgcagatctgctttccgcggccgaggtccggtcacagccggtgttgttcagcttaatgaattccagtgaagcagcgatgaaaaaaactttacccaagagccatttatctcgggtgattattcatgataaccgcatcgcacaacgaatctatgagatggaggtgagcgctttagagaagaccaagaaaaagrtcagccactactatgaacacctgaaaaaaaagttcatgacagagcagcttcagaaagcttgggcgatggagagaggaatccgtggaacagcaaccggtactttaaccttcgggntaccaccaccattttaaattccattttcccaagaaaggccaaccacctagtttttggnaaaggggtttttcccc

SEQ ID NO: 1007 - DNA, 206 bp, Homo sapiens
agacgaactccgaggctgccatcaaccgccagatcaacctcgagctctatgcgtcctacgtgtacttktccatggcctattacttctcccgggatgacgtggccttgaacaacttctccaggtatttccttcaccagtcccgggaggagaccgagcacgcggagkaagctgatgaggctgcagaaccagcgaggaggccggatccg

SEQ ID NO: 1008 - DNA, 477 bp, Homo sapiens
gggcgaccgacgagcaaccgtctgaggccaggagcgctgcacggagccttgaccgccgttgcccggccctctcccgcgcagccccgggcttccgcaggaatattgggaaaccaaaatgaggcacaatcagatgtgttgtgagacaccacctactgtcactgtttatgtaaaatcagggtcaaatagatcacatcagcctaaaaagcccattactctgaagcgtcctatttgtaaagataattggcaagcatttgaaaaaaatacacataataacaacaaatctwaacgccccaaaggaccttgtctggttatacagcgtcmggatatgactgctttctttaaattatttgatgacratttaattcaagatttcttgtggatggactgctgctgtaaaattgcagacaagtatcttttggctatgacctttgtttatttcaagagggctaaatttactataagtgagcataccaggat

SEQ ID NO: 1009 - DNA, 507 bp, Homo sapiens
  SITE (114): n equals a,t,g, or c
  SITE (323): n equals a,t,g, or c
  SITE (440): n equals a,t,g, or c
  SITE (450): n equals a,t,g, or c
  SITE (480): n equals a,t,g, or c
aattcggcacgagctcatctggtaaagacagacagaactctgaagtggaaagagcacttgtcaagatatcaggagatgacggctttgtgagttctgtcactaaccagtgtatgntcttgaccaaataattttacctctctcaaccttggttgctccatccaccaaacgatagcgatctgaattcgtcagcttcttttctattatgacacttgattacttcatcaccagaagctgagctcccagcttgagtatgcaacatgtctggacatgtttggctaattactgtggcagccagcctgctggccattgcagaatgacccagntgcttcctgagagaactcaggtttaaggaagagaaaaccaaactccaggagtctgacagcaacaaagccttagttkgacagaaaggtwgttattttgggtggcttaagtgttttatnattcttaatntgcctcctaactccatgtctaggttcaggnaaaggcaatttaattaattaaaaacca

SEQ ID NO: 1010 - DNA, 317 bp, Homo sapiens
  SITE (170): n equals a,t,g, or c
  SITE (289): n equals a,t,g, or c
  SITE (295): n equals a,t,g, or c
ccatgctgtcctgaggtggatgaacacctagtccatgccatcctgagatgaatgaacacatcagccatgccgtcccgagatgaatgaacacatcggccatgctgtcctgagatgaacgaacacctgggccttgccgtcctgagatggatggacacctggaccatgccgtnatgagatgaataaacacatcagccaagctatcctgagatgaatgaacacatcagccatgctgtcctgagatgagtgaacacctggtccatgccatcctgagatgaatgaacacatcggncatgcngtcctgagatgaatgaacacat

SEQ ID NO: 1011 - DNA, 377 bp, Homo sapiens
  SITE (289): n equals a,t,g, or c
  SITE (341): n equals a,t,g, or c
aatttaagttttggatcattcttttgagaaagaaagaaaagtacccttttaaaagaggtggctcttgaacaacacaggtttgaactgcatcattccacttatacacagactttcttctgccactgccactcctgagaacaacatgaccaatctctccccttcctcctcctcagcgtactttcaacataaagacgacgaggataaaggcatttatgatgaactacttccacataatgrataattgaacaaaggagagaattgtgagagtgagaaaaagtgagacaaagangaaaaactattaaatcagcaaattacagtgccaggagctctgggaccacaantcagaggacctgaggcctaatttccttttccagtcc

SEQ ID NO: 1012 - DNA, 1182 bp, Homo sapiens
  SITE (546): n equals a,t,g, or c
  SITE (967): n equals a,t,g, or c
agaacaggggctgccgatgctctgtctcccagtctacctggagtgattcaacatagaaatcaataaaacaaatgccaccatggctgagtgagacctttcatttttcttcccaggtgttggagaaggcttctggtgaaggatttggcaaaaccgccgagggtccttcctggtgctgctcctgagggaatgcttccgagacctgagctggctggcactcatccatagcgtccgtggggaggcggggctgctggtgacgagtatcgtcccgaagaccccgtttttytgggccatgcacrtcactgaggctctgcaccaraacatgcaggctctgtttagcaccctggctcaggcggaggagcagcagccctacctggagggctccaccgttatgcgcgggamtcgctgtctggcagagtaccacctgggggattatggacacgcctggaacaggtgttgggtgctggacagggtggacacctgggctgtggtcatgttcattgattttggacagttggccaccatccctgtgcagtctctgcgcagctnagacagcgacgacttctggaccatcccacccctgactcagccattcatgctggagaaagacattttgagttcgtatgaggttgtccatcgaatcctcaaagggaaaatcactggtgcwttgaactcggcgttgcacatcctaaagtttgaagagtctaaataacggggcttccctcagcatgttccctctcctgtttgccacggatccagaggccacctgccctgtcttctcgtacccctttcactcttgaggcctgggaggtgaaaaaggccagactgtgcccaggattgattcaattttgcttttactcccagcttccctctcaaaagagagtgaagtctcatttgtcatgtgtcttcagttccccaacttggcatgaacatttgaaccaaacataggaaactaccattaggttgaaancctgaggcagctgggatggtctttcttgtgtctcttctttgcaccccagagcatgatataagtggtcctaacagattctggataatggagaagccctctgctggttttcctggcattccatgtagaataggtagagaatatttaaccaatgagcaaataaatgttggcatgtttcatgagaaaaaaaaaaaaaaaaaaaaaaaaaaaaaaaaaaa

SEQ ID NO: 1013 - DNA, 732 bp, Homo sapiens
  SITE (28): n equals a,t,g, or c
  SITE (517): n equals a,t,g, or c
  SITE (661): n equals a,t,g, or c
  SITE (712): n equals a,t,g, or c
aggccagatggaccaactagtgctggtnttcatgggttgccttctcaaagaccatgacacactgagccagaggggcatcatggatggccacaccatctacttggtcatcaagtccaagcagggctccaratctctagcccattccttccgggacctgccaacgaatgatccctgccaccgggacagaaacaccaaaggaaacagcagcagagtgcaccaaccaactggtatgaatcaagctccagtggaactggcccactttgtggggtctgatgcacccaaagtgcatacccaaaacttggaagtgagccacccagagtgcaaagcacagatgctggagaatcctagcatccagcggcttctgtccaacatggagttcatgtggcagttcatttcagaacatctagacacgcaacaattgatgcagcagaacccagaagtttcccgccttcttcttgataattctgagatcctattgcagactctggagctggccaggaaccttgctatgatccangagataatgcagatccaacaaccttcacaaaaccttgagtatccactgaacccacagccatatctgggcttagagacaatgccaggtgggaataatgccctgggtcagaactatgttgatatcaatgatcaaatgctgaacagnatgcaagatccttttggaggaaaccctttacagttttctggaaggacaagngctaaacaaggcagtctttc

SEQ ID NO: 1014 - DNA, 166 bp, Homo sapiens
  SITE (155): n equals a,t,g, or c
acttaatttctggaacacggtgtggcactccttgggggaacggcgtctscaccascccatggtcgggaaggcaggggaggcctcatggctgggccatgggtggggccctccgggtggcctcccataggtcaactgcaagaggctggcggccaccntggccagtggc

SEQ ID NO: 1015 - DNA, 566 bp, Homo sapiens
  SITE (539): n equals a,t,g, or c
cagaggcaggatctgagggcaagacaaactgggggctcctgcttgattgtytcacctgcccctctttggcagcgggttgtgtccctggccttttagacctaagcagagagggaatttcaagtcaggtggcgcctgtacagtctatggaataggtagttaatgaggtctggagttgatgttgccttcctctccttctctgatcactttcatgtcactcacccatcccagatgccatgrtgttctcaatgccccagttctggggtttcctgccccactccacctttcctttcctgatcctcaagaaaactgacttcttttcctaagccccccgtctccactttgtgaggggcattctgagcatggaggctaatcaatatgttctcagtatccaatggaagcctaacgtgccacctcttccaagggcagtgcattttaactcagacccaacgccccaaccaaatgaaagatctcttaatctgggatttttcaacaatggggctggtggggtcagggtgcaccagattttcaggaggtttatnccagaagacttttcaagtgccccaaga

SEQ ID NO: 1016 - DNA, 359 bp, Homo sapiens
  SITE (347): n equals a,t,g, or c
aattcggcagaggttacgtggccagtcaatggcaggttcaccgcacctcaggcagaactctatgaagccgttctagagatccaaagagattgtttggccctctgcttccctgggacaagcttggagaacatctacagcatgatgctgaaccctgataggacagaagcttaaagacttggggatcatggaagaacattgaaggaaaataatgccttcaaggctgcttcgaaaatactgtcctccatcatgttggccactacctcggggatgggatgttccatggacactccagacatgccccgtttccctccctctggcagcctggggatggttaattcacaattggngcccggcattgt

SEQ ID NO: 1017 - DNA, 142 bp, Homo sapiens
  SITE (127): n equals a,t,g, or c
gaattcggcacgagcttctctcagcatcccatggattcatgagcttgaccagtctgtatttgaccttccatcaccaattaattaaaaaacaaaagcagagaggacaaaaaaaaaaaaaaaaaaaacntgggggggggccccg

SEQ ID NO: 1018 - DNA, 859 bp, Homo sapiens
  SITE (683): n equals a,t,g, or c
aattcggcacgagttttttttttgcaggtcaaaattcttcctttaatgtgattcatgttattttaatgacttttaggtcaaactcagattcccagttacaggtgcccttggctagttttatctgtgtaacatttgaggctgcatatgtgatcatggtcttgggtttcatctgagatgttagaagccatgtctcttgaggtacttggctcgtgcaaggacatcattgcagaagtcacagctcaggtcctggctgcttcggacatagccagcacccccactgtaggcacagagtccacctctcaggtactggtcaggggtccaggttggaaacctcctctggatttctttgattctagtagtcagaacttcagttgtctgggaaacctgagactcactaatccaggatgtgggagcttgagagccagggtcctgcaccatgctagtcctatcgcccatgttgaccagaattttgtcaccgggagacttcctggacaagacaccagcgatcacggcaggatccatgcagtacttttggccaatggtttgcatcatgggttgatatttcaggaggtatggcatgtctatttcagccagcctttcaraagcacgaactycacagtagttcargccgkgacgtcttccaatcccacaagatgctccargggtgtccaggctttggatgnttccatagcatccccagtwcgctgctttcaracaagtccatcagggcaaggaggcccagcagcagccacaatgcagacatgatgacgatctggctctacggctcctgaaacacctctctccactgagtactttggaattcccaaagcactgtgtaagtttgtaaggcataatggac

SEQ ID NO: 1019 - DNA, 328 bp, Homo sapiens
  SITE (51): n equals a,t,g, or c
  SITE (300): n equals a,t,g, or c
aattcggcagagcttttaatgctggagcaccastkatttragcagtagcgnaggtgattgtaaatgaaaggactatacaagaaagccaatcaacacatccctttcttaaaacacagcagttaattatcaaccgtaaaccattctaatggtgatttagtgttgaaggggctagaaaacacaaattttgatctcttgagtccagttttataatgccatatgaaaaactggacaggaagttacaaaacttcttcctacaatactgcctatatagrggaaaagtattcacgtggaaatttttgnggttargggccttaattttgaaaccatt

SEQ ID NO: 1020 - DNA, 241 bp, Homo sapiens
  SITE (123): n equals a,t,g, or c
aacagagcaagactctgcctcacaaaaaaattaataataataatgataataggccgggtgtggtggctcacactgtgaatcctagcattctgggaggacaaggcaagaggatcacttgagctncaggggcatgagctgtcacacccaggtcaacatttttatcagtaattacaggtatggacttacagctccaaaaaattaaaaagaatgcagagaacagaaawtawtagagctaaatttt

SEQ ID NO: 1021 - DNA, 551 bp, Homo sapiens
  SITE (125): n equals a,t,g, or c
  SITE (141): n equals a,t,g, or c
  SITE (524): n equals a,t,g, or c
agggacaatgcaggtttccccgctcgcctgttgggtttttgaaacgccctcagcggggttttcctcctaattctggtttggaggagccatctctctccatcccgtctgccagcggggtttgcttnacacacagacgtgggncagatggcatcggggacacagggaaacctgwaccttagaggaaatggaaaagttggagagacactgagcactgatacgaaataattctcttgctgaaatacacgaaaggagtcccagcagccatattagtatttccacgtcctgtgtcagccccaagtagagagaacttggaatgggaggggaaatggcagccatcaggaaatgaatgytggcccwgagayttytaagcaagtcaatcaccagtccaactcttccgaaaacttccttgttttgccttttcaaacatcaggggcgtggattattaacagccaattttgccagcatgctgtgttcatgggtttccatcctggagctcctcatatctgttgggcatccgtgtctantccctctttaggtccatttctacatac

SEQ ID NO: 1022 - DNA, 615 bp, Homo sapiens
  SITE (501): n equals a,t,g, or c
  SITE (589): n equals a,t,g, or c
  SITE (599): n equals a,t,g, or c
  SITE (607): n equals a,t,g, or c
acccttcggaacaaaacgtgacttcagccttaaggatctaaaaccggccgcggtcaggtcaggtggccctcaacgctcaggcgtcagtccaggccctgaatggctggtctccagcggttggcgtcacatctgcctgtgggcgttatgctcccacataatacaacggaagctccagggccccactcagccaagcaagactcttatgaacaaggtgactcttcccagcagtccttgaaggggcacctgaggaacaatttccagaagcagcttttgagcaacaaagagttgattctggataaagtctatactcaccccaaatggaacacccaaacaaaagcccggagctactcctatccccactgtactggaatcagccagcaagatccagaaagtgattcccagggccaaggaaatggtttgttttactcgtcaggccctcaatcctggtatcccaaagccaataaccaggactttatcccctttacaaagaaacgagttggnagtggaccggggcgttcccattgraaacccatggtccacaggaargtcgtgcagttacaggtgaggctggcactgatggggggccctnaatgttttancccaaggncccctggg

SEQ ID NO: 1023 - DNA, 367 bp, Homo sapiens
agcaggtggcagggccaggcaggtcatggcacctgctatggtcgtgctgaagtcctggaggcaacaaccattgttacttctaaacgataccaagagggaaagaacacatcccttcaacttttcctyamggagatctgtraggcaggttggaagaatttgaagtccttctgccttcgcatgaacaaaaatgtgaagggggtttttaaaactcagatttgatctttacagtaaccagatggattttatttcaacatgccagagtttccacatcacgtcaccactgcacttcaacgtgctgktcttgaggctgyttaaagttcarcttggcacctgacatggcgcatctgttttaactccaggcgtgggg

SEQ ID NO: 1024 - DNA, 386 bp, Homo sapiens
  SITE (334): n equals a,t,g, or c
  SITE (357): n equals a,t,g, or c
  SITE (378): n equals a,t,g, or c
acctgaccctgtatttcctaggagcaaaggttcagtacttgacaattcagcacccacagtgmctttatagagcagaactaccagaaataaccagcatcaactgtataaccacagtccctaccgtggtgactgcctttctgcttccaaagggatgcaggaaagagagaactttctgctagctctctaaaggaatgaaaataaccttgggttctcactwagcatcaattctgtgactggctctgtggggtagagatgaaaaggctcactcagttccagcccctgcagatcccccaggaccctggcagcagcagatctatgagcccacatttccccnggtttgtgagggtcacaccaagngagacattcacatcctgggcntcacaaag

SEQ ID NO: 1025 - DNA, 347 bp, Homo sapiens
  SITE (332): n equals a,t,g, or c
agtgcaatatccagtagtatttaggccatcttgggaggtgacccactttgtgcccagctgccaccagctgagacatttttggaatgaagaatgacctgcccaaggactagggaccaggtgggccagttaaacccactgtgcctgtggagtcttggattatcctgtgatgttggccaagacagcttcttgtctttatgccatgtgacgaatgggcctggtagacaatcactggggacaaccacgtggcaacaaggacagccatttcagtggcagcaagggaagttgcatgcttattatkaawttaaaaagggggtacaatggttaggactgtnattcctgttccttgt

SEQ ID NO: 1026 - DNA, 293 bp, Homo sapiens
  SITE (199): n equals a,t,g, or c
  SITE (227): n equals a,t,g, or c
atcacactctgttggcccacgcagatagattccattcatcctttctaatgtctacaccatattttggataacatgccatcatctcacattgtgttgaaagaagaaaccagaatgttggggttgatgtatgccatatggatgaatttaaacagtttcggccttggcaaataattgggtataattctaaattgcaatgtgnaaattatactcctttttaaacggaaggntgaaactatttcagtgggcccacatgttaccccgttaacagaggggagccaaagcaaaatctttat

SEQ ID NO: 1027 - DNA, 328 bp, Homo sapiens
gatgatctacccactggcagtccccaaggggcgcagactctgctgtgaggtgtgcgaagcccagccgagcgggtgtgcgcggcctgcacagtcacttattactgtggggtggtacatcaraaggctgactgggaacascatccatgagaaaatatgtsagctcttgattccactgggcacttccatgcccttctacaattcaraggaagaacggcagcatggcctgcagcagctgcagcagcggcagaagtatttgattgaattctgctacaccatagcccagaaatacctctttgaargggaaacacgaggatgctgttaccagcag

SEQ ID NO: 1028 - DNA, 345 bp, Homo sapiens
aattcggcacgagctcgcccggagcctcacccagagccttctggggtggtggataggtgaggacctcatcgaggtttgagacttaaatacctctctactaaaagggaaatggataaaaagatgctgactgccaggctggtttcggatcctttgtattctgtcagatgagaacacttgtttaccttccaggactgacctgagcatgagattctacatcccaccagagacgtactcaactgctgaccacgargaggttcacatgtgtaggctctgtggtacagcttcagccttttggaagaggggagaagaaaagcaccagggaggattaggaattaaggtacttgg

SEQ ID NO: 1029 - DNA, 369 bp, Homo sapiens
aattcggcacgagccagatcctggcaggggtctcaactccactgatagctaaagcatgttggggtttgaatgctggatactttgaagttgccatatcctgactgaagtccttcccagaacggcagtagttggtcgagtatgccacagtatgaaaacccatggacaatcccgaatatgttgtcaatgacgagaattggcttggccccagttctgggctatttgattattgaagaaggattttaaatattgcactagggagtttttgctttagctgggactaacagatttgttgggatgggattttattgctcgaaactggggccaatcaaagrtycagytttkgggragtggctcttggatcccactggc

SEQ ID NO: 1030 - DNA, 485 bp, Homo sapiens
agggaaacagggagacaatttcagcaaccatttcagtgccctaagaaggagatggcgaggagtgaatgatcttcgtggcctggcaggaggagctcamattgttgacaattaacccaatccaagagacctgcataaatcaatcactacaggaaaaaaaaattgttcttgatctacagtgacaaatgtgtagacaaggatgctgactgctatgctgtgaggaacccaagcagcccagtggggagatccaagtgttgtaaagaaccgaggcacctcaccaatagccagcatgggcttgctggtcacaagagtgtgccatcttggaagcagatcctccagccccagtccagtcttcagatgactgcagtcccaactgtcattcgagttcatgggagataataagccagaactacccagccacaagccactcttgcgttcctgacccacagaaactgtgtgagataataaatattagttgttgttttaaa

SEQ ID NO: 1031 - DNA, 312 bp, Homo sapiens
  SITE (309): n equals a,t,g, or c
  SITE (310): n equals a,t,g, or c
cgatcttacggatggcccagggctccaaaggctcgtttcctaagtgagagagagcctggctgaagctgtattaccattcattctccagcctccgaagtctcaaagcatcacttccaccatactctaactgtcaggacaaacacaaaggcccagaaactgccagactgtcttctgaagtggctatraatatttacactcccatcagcagtgtagaaggggtctcactatgttgtctggagtgctgtggtggagtggagtggctattcacagagcctgttyctgctggggacacagaatcacttgctcccnnct

SEQ ID NO: 1032 - DNA, 876 bp, Homo sapiens
  SITE (91): n equals a,t,g, or c
tctgcattattgcattaattatttggcaagtgaaaaagagctgccaaaaattaagcttggtacctaacaggagctgttgccggtgtcaccnaaggagtccaacaaaagtctggagatagaacatcaagagctaggagaacttcacaggaagaagccgagaagttgtggaagctgctgtttctcatgaaaagccagggctggcttcctcaggaaggaagtgtgcggcgaatcctgtgtgcagacccctgctgccaaatctgcaatgttatggctctggagattaagcaattgctggcagaagctccagaagttggcttggataacaagatgaagctgtttctgcactggattaaccctgaaatgaaagatcgaaggcatgaggaatccattctcctttctaaggctgagacagtgacccaagacaggacaaaaaacattgagaagagtccaactgttcaccaaagatcatgtgtggggagctacaacacagaagacaacagaggaccctgaggytcagcctccttctwmtgaggaggaaggcctgatcttctgtgatgcccccagtgcctaaataatctgctctagcaacactcccttcagtccagccaatcctgggtcctgtgccactcctacaaatgctccaaactctgtcctcaaatgacttgtgccactcaaccaggaaatctatcccaggtctaactcacctcagcagaaggcactgttttatgcaagaatacccatcacaagaaaaaggagttcataggttcctgaacctctgcaatcccctgaaaaaggctttcattgccatttccattaacatgcaggtgaagcagggcattctccaaatatactttgtacctttaagcaaaaaaaaaa

SEQ ID NO: 1033 - DNA, 148 bp, Homo sapiens
  SITE (2): n equals a,t,g, or c
ancttaaagaagacattctatcctatatggaaaaattatggcttaaaaaacacaggwgaactccacaagagcaactttttaaaatgctaccagatacgttcccacatccacatgaaaccactggtgatgcacagtgttctcaaaatga

SEQ ID NO: 1034 - DNA, 224 bp, Homo sapiens
  SITE (221): n equals a,t,g, or c
aggaaaaaaagccatcttcaacatgtaatttttggatattcctaaaatgatacaaatatggggatgctaaaaatgttaactgccgtaaaatggaggttttaaacatttaggaatttactttttactctttatatacatacttctggattgtactttcagatagttatatcccctaggcaaacctgtttcttacttttatggacttacattctttactgctnagg

SEQ ID NO: 1035 - DNA, 463 bp, Homo sapiens
  SITE (400): n equals a,t,g, or c
  SITE (411): n equals a,t,g, or c
  SITE (439): n equals a,t,g, or c
  SITE (450): n equals a,t,g, or c
gagcaaggcatccggacttggaccatctatcacacttaacagcccctgattcttttatattaatggaagcattcttctattttcatatctttctttaattttaatgatacattatcataaatggtaaaaagattttattaatatatcacttatttaaatgtctttaaagaaagtatttaacttgtttaatataattgtatttataaatgctgatagatttaaaggttttaaagttttatatttttattattgcaggatagaaggataaaggatgcatgtgtagtatttttattttgaaaggaaaatgtacaatgtgtgaacaaaaacattaagagatttaatatactattttcttattttagatttttacattcaataagtataaattctcatctatatnaggtattgtgngcaaatttgggaaaaaactgattagcanccatttagtanaagctatgcctct

SEQ ID NO: 1036 - DNA, 494 bp, Homo sapiens
  SITE (409): n equals a,t,g, or c
ggcagagggaaatattcattacctattttraattggtcttaaaaatttaaagaaatataaagctggataattaaagataaataataaaggaagaatacaaggtttctatgctgtgaagaactgagattattatgattttggggcagtgaatttgtttctagaagttttgttggaactaaggcagaaaggaagaagaacaaatgaccttggaatgaaaaactttaaggacttggagctcacactttaaaaaagaagatcattctaactgcccctcatgactactgaagaggctatgccygaaaaagcaaaatgtcctacattagagatcaccargcaagacttttttcargargcaaaaactctcattgcccaacattatgagaaaataaatgagaataaagttcaaggnacttctataaatggttttagaaagaaacaccaaaaaccgaaatctggcaaatccaacctttggagattgacaaaaggtaccccgt

SEQ ID NO: 1037 - DNA, 151 bp, Homo sapiens
  SITE (139): n equals a,t,g, or c
ggcacgagtaagaattaggtactacagccatggagctggctgggtaaaatctaattggatatttcagtttcattcacctaccctgttttggtgtttggttttggttttggttttggtgagttttttttttttttttttnggaaagaaaggt

SEQ ID NO: 1038 - DNA, 418 bp, Homo sapiens
  SITE (326): n equals a,t,g, or c
  SITE (410): n equals a,t,g, or c
  SITE (418): n equals a,t,g, or c
ggcacgagctgggtttagactgtcctttaaaataagagccgctagaagtgaacttctcattctgtccgtccctaattctgtccttctctaaaaggaaccttaatctcatctttaaaataaggagaattactgagtgacctgaaggacccttttcagctggaaagtctgaactgaccaacactggatgaatttraccatttcttaggagactggaatgttaagtttctataaatgaatgaaccagttctctcttgtttggagcaatgctgaaattccaagargcagctaagtgtgtgagtggatcaacagccatttccacttatccnaagaacttgattgcaagaagatacgtgcttccacaaaaacttggcaatggaaatttttggactgtctatcttgtttcagacaanaaagcccn

SEQ ID NO: 1039 - DNA, 303 bp, Homo sapiens
  SITE (256): n equals a,t,g, or c
ggcasaggtctacaggagcctactatagacattctacaaccaaccagaatcatggaacagccaacttccagcaccaatggggagaagacgagagcccctgtgaatccaataacaaaaaaaatgatgagatgcaagaggtaccaaacagagtcttagcccccgaacagagtttgaagaacacaaaaacatcagaatatccaataatatttgtgtattacctcaggaagggtaagaaaataaattcaawtcaactggnggattgaacagtcccaggggactccatcatccatccaaaaggaggcg

SEQ ID NO: 1040 - DNA, 412 bp, Homo sapiens
  SITE (213): n equals a,t,g, or c
  SITE (335): n equals a,t,g, or c
  SITE (392): n equals a,t,g, or c
  SITE (410): n equals a,t,g, or c
ggcacgagaagctttcccacacacatcacactcatagggcttctctctaccgtggattcgctggtgtccaacaagagctgaactgtatctgaaggcctttccacgcttgtcacattcatatagtttctttccactgtggattttctggtgacagaagaggcccaagcactagctaaagcttttccctcactcactacactgctatggcttctnttcagtatgaactctgatgttgtctcagatatgaactcagagaggatttcccacaatcattacactggtatggtttcttttccgtgtggagtttctctggtgtccaaataacatctgaggtngtggatggaaaggactttcccacactcacttacattgggaaagggtttcttcctgtngtggggtccttcaaatgntg

SEQ ID NO: 1041 - DNA, 353 bp, Homo sapiens
  SITE (85): n equals a,t,g, or c
ggcacgagcttgcatctgctatagttctgtctcgggtgccatttgctaactctgttctctgtgtagctgcttttggcagctcctnatctctcttctaatccaccactcacagtcctagagaacagaccacaagttaagaccgtcacctacagaatcccaagggccaaaactgggcagaggacaactccatccttcttacawaagggcttctccacaagaagcatttccgttagactctagcagtgagataccctgcttcaagaatttctcatggagccagaagcctttgaaatttgcccttatggatccttcaccaccggaattcccacttcagcagattccagttaccacct

SEQ ID NO: 1042 - DNA, 322 bp, Homo sapiens
  SITE (298): n equals a,t,g, or c
ggcacgagcatatatatacactcatgctcttatctgaagagatctttattagttataagaatattagtaaaatatacttctttgactttgaaaaataagagcatcaatctctacttaactaatatagaagttgttaatcaggtcaggcctctttggttatatgtgccatagtcaaggtgggggttaaggatgtattgtaaggacatatgtgaaatcccaatggaacttgtcgtaggcagaataattccccccgaaaacgtccatgtgcaaatctctgaaacttgtgaccatggtaggntatttggtcaaaggagaatttaag

SEQ ID NO: 1043 - DNA, 196 bp, Homo sapiens
cccctccggtcacaacatcaagagctgaactgggactagaagtcatcgccccagagctttttgctaccagaactgccgggtgaaaatctttggaagagaagtttgagaacctgttaaacaagctctctaggtaattctgtgcacgttcagtctgagaactgctgcatcttgaagagatttgaacatggattcaatc

SEQ ID NO: 1044 - DNA, 734 bp, Homo sapiens
  SITE (692): n equals a,t,g, or c
  SITE (727): n equals a,t,g, or c
aagaggagctatacagatggtacttagaggatgtagggccctacgtattagggcttcttagttgtagcgaagagcaattggtctggtacgtttagctttttcacatttagttttgaattctgactctagaaatgtacaaccccatcttttgaattacaggttttaagatgttatttgctcttaatacgtcttaaggtaacagccttgatcactgcttttactttcgatgaaataacttaatgagctgtgaagaaaaaattatcagattttaagggagagaattttatgaaaatgtctttgaggttcctgtcacctttatgagaatgtcttcaaagtttccatcaccacctctaccaatttttcttccaccggagccagtggacttaggttccataacaagctcctcttgktcactgaatgagctagacaatatttcccaccttttaaggaaaatatcagctgatatcaatgaaattaaaggaatgaaagcagctattttgacagtggaagcaaatctttttgatctaaatggtagagtgtccaagaatgaagcaaaaatttcatctttggagggtaaaatgaatgaatattcaacaacatatgaatgcaacagacagtttgaagatcaagaagaagatactggattacaagtcaagaactactgatggaaaaaataatcgggtttccttaanaaccgttgagaaagggacttaaccagaggcaattnttattcc

SEQ ID NO: 1045 - DNA, 358 bp, Homo sapiens
ggcagagccactttcagcgtttctgcaaagctagagaagggttcccagtgccgattccgacactgtgcaagaggcccttggcagtgacactgtgtgctcattatggagagagaggaaatgtttagatccactttgcagatttagacacatggaaatgcagcaaaactgcagcatttcatgcttctgggaaactcagcctcttggttgtgtgaagatcagctgtatcttttatcacagcaaacctcgaaatatcaatggattatttttgccaycaagtagcaatatcacaytacagaaagaattcaggaaggaattccactccagtcccaggagtcaaggaacctctggaaacctcagg

SEQ ID NO: 1046 - DNA, 341 bp, Homo sapiens
ggcacgagaacagttaaagatgaaaaactcaaccttgaaacaacattacaagaatctactgctgccagacaaattatggaaagagaaattgagaatattcaaacctaccaatctactgccgaagagaattttctgcaagaaataaaaaatgcaaaatcagaagcaagtatttataagawtagcttgtcagaaattggcaaggaatgtgaaatgttatcaaaaatggtaatggaaaccaaaacagataatcagattctaaaagaagaacttaaagaaacmtagtcaagaaaatataaaatttgaaaacagcatcagtagacttactgaagacaaaatacttt

SEQ ID NO: 1047 - DNA, 315 bp, Homo sapiens
  SITE (304): n equals a,t,g, or c
agtttttttttcacatgttttatcattccatttataaaaaatgtccagaataaacaggcaaatccaaacagacagaaagtagattagtggttgccagagstggtggaaggggagtggaaagtgaccacttacttaatgggtacaggtttccttttggggtgatgaaaatgttttgggaaatatatgaggttatggttgtacaacactgtgaatgtactaaaatgtggactacgctgtacatcttgaaattggttaattttttttttttttaaagrgacagggtctcactctgtccacctggggntctggggttcc

SEQ ID NO: 1048 - DNA, 274 bp, Homo sapiens
taggagccsscgctatcctcagatgggtgctgctgagacattgggtgtttatggaggacttgagagttggcagagcaagccttgtgtgctttctttccctggctcactagcacaggctaatcatgttgtcatcatgttctaagaacatgagctgcctgtggacatggaaaccatcaacctgggacagagatgcagaggatgttgatttgaatcactatcgcataggggaagattgaaggatttraggtactgaagaaagtgaaagactctcttg

SEQ ID NO: 1049 - DNA, 1732 bp, Homo sapiens
catcagcaaaatgccagacgtcaaggagagtgtgcccccgaaatatcctggcgactcaragggcaggtcctgtaagcccgaaacctcaggacccccccaggaagacaagagcggctccgaggmcccccctccctttctttctgtcacaggtctgacagaaaccgttaatgaagtttccaagctgagcaacaagattgggatgaattgtgattactacatggaagagaaggttttacctccaagcagtctggaaggcaaggtcaaggagacagtgcacaatgccttttgggaccatcttaaagagcaactatcagcaactccccctgacttcagctgtgctcttgaacttctgaaagaaattaaagagatcttgctatcactgctattaccacgccagaaccgcctgagaattgagattgaagaagctctggacatggacttgctcaagcaggaggcagaacatggggccctgaaagtcctctatctctctaagtacgttctcaacatgatggctttgctgtgtgcaccagttcgagatgaagcagtgcagaaactagaaaacattacggatcctgtttggctactgagagggatcttccaggttctgggccggatgaaaatggacatggtgaactacactatccagagccttcaaccccacctgcaggaacattccattcagtatgaacgggctaaattccaggaactcctcaataagcagcctagtctccttaatcacaccaccaaatggctgacccaagcagcaggagacctcaccatgtcacctccgacttgcccagacacttctgactcctccagtgtggctggcccctctcccaatgaggcagccaacaacccagagcccctcagccccacaatggtgctgtgtcagggcttcttgaacctccttctctgggaccttgaaaatgaagagttccctgagaccctgctgatggacagaacccggctgcaggagctgaagtcccagttgcaccagttaaccgtcatggsctcagtcttgctggtggccagtagtttctccggcagtgttttgtttggctcaccccaatttgtagataaactgaaacgcataaccaaatccttgttggaagactttcactccaggcctgaggaagctatactgactgtgagtgaacaggtatctcaggaaatccatcaaagcctcaagaatatgggccttgttgctctaagcagtgataatacagcatctctaatgggacagctccagaacattgccaagaaggagaactgtgtctgcagtgttattgatcagcggatccatttgtttctcaaatgctgtttggttcttggtgtgcagcggtctctattagaccttcctggaggccttactctcattgaagcagaactggcagaactgggccaaaagtttgtcaacttgacacatcacaatcagcaggtgtttggtccctactacactgagatcctaaaaaccctcatttccccagcccaggcactggaaacaaaagtggagtctgtttgatagcgtcggctcagagccctggtaccttggacccaagaggaggcccatcatcttcctggagtaacatcaccagtgaccagcagacagtgagcttctatcccaggccctgcagccagtacaccaaggctgtagggatcaagcatgtaaacaccaactggtccatacccattcattaataaacttcttaagtgcaaaaaaaaaaaaaaacaa

SEQ ID NO: 1050 - DNA, 307 bp, Homo sapiens
  SITE (166): n equals a,t,g, or c
  SITE (287): n equals a,t,g, or c
  SITE (293): n equals a,t,g, or c
agctccttgctgggasctcactgacaaacccgctggccccagaactacttrtgacatcaggatgacgcttggtacagcaagggcactgagctgggcattgaggatgaagagatgaaacacaattctagcatctgaaatagaccttggttggtgagtggccttgggnaaagtcatttggcatctctctgagtccctgtggaaatcatgaaggaaaaaagtgctaacaatgtgagaactgatgattattgtccatatgggactgttgcattttacactaaaggaagttnagtttnccagagttggggtt

SEQ ID NO: 1051 - DNA, 319 bp, Homo sapiens
  SITE (296): n equals a,t,g, or c
  SITE (303): n equals a,t,g, or c
  SITE (313): n equals a,t,g, or c
atttcaaatgccttggaaagaggaatcagaatttacaaagcaggataaggctgccagagtcattcagcaggcctggaaaagtttccttaatgtcgctatatttcaacactttaaaagtctgattgatttaagaagacaaggagaaccacgtcagatagtgaaatatattaatcccaaagaggttaaatttccacctgatatatactataagatttttactcacagacctattgaagatctctgtgctaacagccctaggaaattatggcaaaacttccagcaaagcattacatctncataatnaaaaatggtncatctt

SEQ ID NO: 1052 - DNA, 468 bp, Homo sapiens
ggcacgaggtttcacccaccccatccatctccctgggcacacctgctcctgccatcggcactcctactatcatggctgcatctggggtttggagttcacagaaacctcttaaaaaggcacccaattgctcaactttgctaagcagatgaagagtgaaataaatgttgcttcaccagctggttgttataaaggccagcatcacatcagtggagacagtccagcctcccagccagccctaaagacacaggcaccaggaaaggaccaggctctccaagccccggccaggcaactttggccccagtgggctggatggtgggatgcaatgaaccatccaacttggtgactaaggctctttctaaccatggagtgtggacaaagggaaagtctgtcatcagcagacaaaggactgtgcgttgtcggaacagacaaagaattaataaaagggtcactgaacctgcaaaaaaaaaa

SEQ ID NO: 1053 - DNA, 474 bp, Homo sapiens
  SITE (174): n equals a,t,g, or c
  SITE (210): n equals a,t,g, or c
  SITE (450): n equals a,t,g, or c
gaatacctcacaaggaaacgtcgacccccggtgcgccgtcagactagtggatcccgggtgcagattcgsaggctcactcaagagatcagccagcaggcacagagcatgccgttataagacagtcgacctgaagagggtagtttctgctctggaaggactccaaggagtctcagngccgtctccagcctgcctcgagcgtagtcagccganagattgcagcctccaccgtgtcaagtcaggagccgcccaaccgtccaagtgtccatgtggcggcaggtgcctcttgtccggttcaggttctattccaggcccgctggacggcatgcctgtggggtgatcgacaaggtgagaccgtcagggtcattacatcgcacatggaggcatcctgtagaaatggattcagcattcaagtcctgtgagaaatcgtgacactcttatgtgggtcgatgntttgagatgtgtcttggttatgtc

SEQ ID NO: 1054 - DNA, 408 bp, Homo sapiens
  SITE (386): n equals a,t,g, or c
ggcagagctgatgactacctttggcccctgattcaagagaagattaaagttctggcagaagccgggctttctgagaccaatttttcagaaatgacagaatccactgattacctctacaagcttggattgttggccagaaggtgaaaaccaggagtatgccctcctcgagcacagctcatggttgaattgtttctgccaggagagtttgaaccaggtctgagcctcatgcagaaaggggccttacggtagcttatyaggaaagtggaagcacctcctccttcctgtggaaatcaccatcagratattggagtttaggccacacatggtggtkgcacactgttagttcccagttattccagaggaaaagggccccaagcagcagaagntttasggcctttttccagaagt

SEQ ID NO: 1055 - DNA, 278 bp, Homo sapiens
  SITE (8): n equals a,t,g, or c
ggcacganaatggcatcatcccagacaggcagagcccagccaggcacgggggccaggaaaggagggtcgcagtgaataggatggactcctacgtgcccaccactcactgtctactgcctggtcctttgggagctcacagctgagtgggaaaggaggggccagacgtgggcagatgctggatgtggtgctggaaatgtttttgaaatgaaccatggagtcaaatatacaggaaggagctkgggcagagcaccctttctcttgaaaagctaaaaaaaaaa

SEQ ID NO: 1056 - DNA, 464 bp, Homo sapiens
  SITE (422): n equals a,t,g, or c
  SITE (461): n equals a,t,g, or c
ggcacgagctccaccttgtcccacgagtaggagatcccagtaccctggggaaggcgacgtggggtccctaaagacttcctggagccagcggtgcatatctgcagactctctcaggagagagaaaacactctcttaagatgtaagctttaattctaactggaacarcttcccattcttttccaacaccagaaattgccagcagcagctgctcagcggaactaatactacatggcctcatcactccagcccctgcttgccctgagggaggcgggtttttcagcagtgccagcctttcagggcggccagaagcagagcatcccaataaaccagaaagctaagtggctgaagcaataaaagtcactcaaacataacccaaatctgatggtaaaacaaaggaaatcctaagtattggaaggatggtncctcctgtcttcactggggaaacccattgggtccttgtnggg

SEQ ID NO: 1057 - DNA, 217 bp, Homo sapiens
  SITE (134): n equals a,t,g, or c
  SITE (217): n equals a,t,g, or c
agggtcccaccccctggtttctaggacagtacctagcaccactacctccagtaactatttagccaaggctatggtgtcacagatctccacgcagggtttcaaatctcccttctcgatggctgcctccccaaaanttgccgcatctcccaagcctgccacatctcctaaacccctgccctcgcctgaagccttctgcctcacccaagccctctctgtn

SEQ ID NO: 1058 - DNA, 151 bp, Homo sapiens
  SITE (141): n equals a,t,g, or c
tgctattaaaacataaacatttaagatatttatatcttcccaagagagatgctaaagaaaagtgtaaaaaaccaaagccattcttatgtacatcagaatatatggacaaaaactttcacagcaacatcattatcgcaagtncctgaaagca

SEQ ID NO: 1059 - DNA, 364 bp, Homo sapiens
  SITE (306): n equals a,t,g, or c
  SITE (339): n equals a,t,g, or c
  SITE (348): n equals a,t,g, or c
ggcagagcgggccktcaccctgcctcccctgcktcccgccaccggccgcttctktcctcggacccattccaacaatctcgtaaaacatggtggattactatgaagttctaggcgtgcagagacatgcctcacccgaggatattaaaaaggcatatcggaaactggcactgaagtggcatccagataaaaatcctgaggatkaaagaagaagcagagagaaaattcaagcaagtagcggaggcatgatgraagtgcctgtcggatgaagacccttttgaaggacttctttggggawtcgaaggggtnccccgagggaagcagaagccgagggacggggtncgttttttntctgcgtttcaatggg

SEQ ID NO: 1060 - DNA, 210 bp, Homo sapiens
  SITE (170): n equals a,t,g, or c
gggtatctggaacggctgacaactgaagtaatgcaaatacgggacttcttacccagaatactaaatggggaggtgctggagagcttccagaaattaaagattgtagaaaaaaacctggaaaggaaagagcaagatttagagcagctgaaaatggattgtgaagcactttnaaagcccgcctggtaaaccgtgcaggccgacaacataaga

SEQ ID NO: 1061 - DNA, 1100 bp, Homo sapiens
  SITE (1058): n equals a,t,g, or c
  SITE (1092): n equals a,t,g, or c
atgaaatctttaaaatttgccaagttttagggactcccaaaaaaagtgactggccagaaggataccagctggcatcctctatgaacttccgttttccccagtgtgttcctataaacttaaaaactcttattcccaatgccagtaatgargctattcagctcatgaccgaaatgttgaattgggrtccaaagaaacgaccgacagcaagccaggcattgaaacacccatattttcaagttggtcaggtattaggcccttcgtcaaatcatctggaatcaaaacagtctttaaataagcagctgcaaccattagaatcaaagccatctttagttgaggtagagcctaagcctctgccggatataatcgatcaggttgttggacaaccccagccaaaaactagccagcagccactgcagcccattcagccgccacagaacctgagcgtccagcaacctccaaagcaacaragtcaggagaaaccgccacaaacgstattcccgagcatcgtcaaaaacatgccaactaagccaaatggcacactgwgtcataaaagtggtaggaggcgttggggtcagactatcttcaagtctggagatagctgggaagagttggaggactatgatttcggagcctcccattccaagaagccaagcatgggtgtttttaaagaaaaaaggaaaaaagattctccatttcggcttccagagccagtaccctcaggctccaaccactcgacaggggaaaacaagagcttacctgctgttacttccctaaaatctgattccgaattgtcaactgctccaacctctaaacagtactacttgaaacaatcaagatatcttccagggcagcatgacattatactacaaggactggcggatctgtgacactggccttcagggaaagagacgcaagagtcatagttactgacctgctactactaaccggctgtgtacttggagcaagattctggtttctgtaacttacgatgggactgcaccatctgtcaagctcactcttgtgtgaatccaagaaggtgtcctttgatagccagtggnaaaggaaataaacccccacacttggagcaccagntattccca

SEQ ID NO: 1062 - DNA, 433 bp, Homo sapiens
  SITE (390): n equals a,t,g, or c
  SITE (396): n equals a,t,g, or c
  SITE (408): n equals a,t,g, or c
  SITE (417): n equals a,t,g, or c
ggcacgaggtcaactctagggttgggtgctggggttgcggctttcggttaacaccgcagattggaacaggctgagatctgctggagacaacttaggaaattatcatagtgaaaatactaacatggattgttgatcatctgatgctatgattctttcccaggcaccacacctgttggtgttcagatggagcggcacactagtcatcctaacagaaaagttccagccaaagaggaagctaatgctgtgcctctctgtagagcaaaacccttcccccagctatattaatctttcaaagcaaggttcccccacccagcccaattttytkgaaccatccagacaacaaaaggtttgcccttcgggtttgattcacaaggccccaagggattggcntagggncttccccgggantgtattgtnttgcaaaactttccag

SEQ ID NO: 1063 - DNA, 372 bp, Homo sapiens
  SITE (298): n equals a,t,g, or c
  SITE (368): n equals a,t,g, or c
  SITE (372): n equals a,t,g, or c
ggcagaggttcatccccaaacttctctgaagtgcttatgtgctggtatctcccaagagtctgcatgtcagtgtgtctgtgctagtgtaatttatttagaaaagtgcaaaggcaaagggcaggatcaacaggcaaagggcaggatcctggaggctggatctagggtcctcttacctgatttatgtcactgattttcccaaatattgatgaaaaatggaattgatctctaggtggcagaggaaacaggagggaaccctaggacttacatagtgaagtaggaaaatgaatgctggcatgtncatttaggatttgagcttcagccctgagttcatggaagtctttcagaacaaaggattagttctcccctanctgn

SEQ ID NO: 1064 - DNA, 200 bp, Homo sapiens
  SITE (137): n equals a,t,g, or c
  SITE (169): n equals a,t,g, or c
agccagcatctcacttacttgacacaaaacatctatagactgggagacaagacttgaaaccaaagagccaactccgaagccgggtattactgaagatttatgccatggggtaacaatggaaagggaaggtatctggncattctactctaggggaaacctggggaacctnaatgaattggttagagggacaacaggatagt

SEQ ID NO: 1065 - DNA, 419 bp, Homo sapiens
  SITE (350): n equals a,t,g, or c
  SITE (398): n equals a,t,g, or c
  SITE (415): n equals a,t,g, or c
ggcagagggcacgagtactggagggagctagaaggratcagccagccatgcctccagttcaggtacttggcattgctaagctcagaacaggacttgccagtgtctagatgaaaaagaggagagatctcaagagggataaccaattggctggcaaagtaacaaatgaaaagtaacctgactctattgacctgcttaaccctgcatgggggggaaggatggaaaggagcagctgtttgctttgaaacagtggaacagttttgcagccttagaaaatggcatgtaacatacctaaccaaagacagcggactctgtcaacaacaggagaagctctwtacggaattcttggtctncataagggagcatcaaatgaaggaaattaggaaaccttcaggaaattngccctgaacaccatccnggca

SEQ ID NO: 1066 - DNA, 354 bp, Homo sapiens
  SITE (141): n equals a,t,g, or c
  SITE (291): n equals a,t,g, or c
  SITE (306): n equals a,t,g, or c
gtgtggaagagcatagagaaggcttcccagagtgaggggtgaccaggaggagcccgggaggaagagcatggagggcagagggagcagcatttgcaaggcccagaggcattccaagtggaggtgcccatgagatggcttttncgcatgggaggtgccctggagaaggtggagagagaggaagccggcacagcctgcaaagaggccagagawtgagttagccagagcccctgaagccttcacaggaggaggtcttagacaaggcacagccaacagtgccaatggcaagagatnaagcagagatttcanccagcggtttccagaagtttgggcaaagaggagcacaaaagaccactg

SEQ ID NO: 1067 - DNA, 405 bp, Homo sapiens
  SITE (392): n equals a,t,g, or c
agggacaaaagctggagctccaccgcggtgcggccgctctagaactagtggatcccccgggctgcaggaattcggcasagcttaagcccactgcagagtagaaaaaaattgtaaccaccttggcagattgtggtgtaagcacaaaaagagttatcatttgcaaagaacgctgagctgccaacaccatgctgagggcagtgggacttcccagagtagtagaatacatgcagcctggtgtatattgagtttttgagcctatcactcagattgtattctggaaatttcctctccttgttgaccctgcccccatttggtcaccctccctgccctaggactgagtacgaggaaaggttattctactattctgtgctgggaggcagacatcgtcatanttaccaaggttgg

SEQ ID NO: 1068 - DNA, 409 bp, Homo sapiens
  SITE (328): n equals a,t,g, or c
  SITE (381): n equals a,t,g, or c
  SITE (397): n equals a,t,g, or c
  SITE (403): n equals a,t,g, or c
ggcagagctcctaacaagtggctagatgtaggaccagttgggatcaagtttctgatgccttccctgagggtgcaggcagcaggccttcctagatttctctaacctatttatctgccttaacttcctaattggaatggagctgactatgccctgattgtgttcttggcaagaggtgctgcccttggagtcagagcttctaccaaatagcacaaactcaatatcttctgtctatgctgaactttgtgaagcttctctgaaactttcctggragatccggcaacaccaggccttctttcttgcatggtcacaggagatgagagcagagttntctaaacaaggtttaaggggggttgattgagtaaggtgacggatgtgaccctngtgggttccccatttngaaaanttggga

SEQ ID NO: 1069 - DNA, 477 bp, Homo sapiens
ggcagaggcagtactaaggtagcgtttattgacaggagaagacatgtacaactgtgattgcattttgagagtactggatcaaagtgatggaatgtaagatcagaaaaacaagaattcattgacatggggttcactctccgactttggtcttaacatcttggcaaagaaccatatggttatgctccacaggaagaactagagatcaaggccatcaggatgtgccaataagacggrgacaggatcactaataagcttgggggtgcctctcctctgtaggtcagggttgatggtagacamsgttttctcagatttgagctttgtaatacctctaagtaacagagaatggaactcatctttcacttctgaatgagctcctcactgtaattgatggcatttcctgaaatggctgcgatcattagggctccagtgacatgaaataggatgtttctcttctttcagctagttgtacgaaagttt

SEQ ID NO: 1070 - DNA, 519 bp, Homo sapiens
cccccacctaagagaattgtggtggggaatctcagacactctaaccctctgggcccaagtcacctttctatcaggggagggaggctgtgtctcactggcttcttgttagaagttctgcctgccctacagcctgcactgagggctctcatcactgcttctgagatcttaatgggggtcaacgaagatgtgggcttmtctgagtttagaccatccatctgccaaggaaaaccaagccctgagactgatagagatgagagaagagaatggtaatgtccccaagacagagcaggcaggaagtttgaagcctctgagggatacaggaaaatctaacctcaaagagaagaagatgaatatcaacaagttgtgtccgggcttgggtggtgagtgtatgactccagatgttatgctgctccagcagaaccagtcactcttgtggaagccaaggaatgggaacagaagaatatgaaatctgtggtactgatcatcagtcttaatatccaaatgaatatcatggtacat

SEQ ID NO: 1071 - DNA, 394 bp, Homo sapiens
ggcagagccaaacggcccctccaggagggagccgggagattacgcagctccatgtaggtccacgtttaggttgggaggatctaccatgaagaaggtcaagaagaaaaggtcagaggccagacgccaccgagactccacctcccagcatgctagctccaattccacctctcagcagcctagccctggaatccacaccacagcagcctagtcctgaatccacaccacagcagccttagccctgaatccacaccacagcattccagccttgaaaccacctcccggcagccagcattccaagcccttccagcacccgaaatccgccgttcctgttggtkgccttttgatsttccagatgtttaacgtgaaggcagcccttcaatccaggaaagcaggg

SEQ ID NO: 1072 - DNA, 506 bp, Homo sapiens
  SITE (3): n equals a,t,g, or c
  SITE (398): n equals a,t,g, or c
  SITE (425): n equals a,t,g, or c
  SITE (433): n equals a,t,g, or c
  SITE (496): n equals a,t,g, or c
  SITE (500): n equals a,t,g, or c
ggncgcttcctggggcattgcacccaacagcctgctgatggccaatgtcatccttccaggcccaaatgaggaatttgggattttatttgccaatcgcttccttccttgtattgcgaggtcgttatggctatgtgggctcctcatcgggccatgacctcatacagtgcaaccaggatcagcccgaccgcattcatctactaccctgccgaccgggtatctaccacttccagggggggatccttctggtcaataacatcctttggcacctttcgcccttggggcaagtttgccctcaacttctgtatcgagcttcaggggagcaacttactcactgtactggcccccaatggcttctacatgcgagccgaccaaagtggcaccctgttggcagacagtgnaagacattaccagagagtgtatctggngaattttnaggtcaatggggatgttcamctaccaaawtccaaatcytccagggaaaaattattacattaangggnccagga

SEQ ID NO: 1073 - DNA, 321 bp, Homo sapiens
  SITE (244): n equals a,t,g, or c
  SITE (318): n equals a,t,g, or c
aaaacccccccaaaattccatttaatttaatgccatcatttatgcattcagcaatatttttgagggcctactatgtgccaggcactagttggagttgctgagggtataagatgaggttccaattctkatggagcttatcgtttagagggaaaacaatacaaaagtaaacaagtaggtgaggatttctgagtgtgctaagaacaaataggagccagggtactgaggtgtgagcacatcagtaggnttccgtagggaaaggcctttctttagggagttatatttgagctgagaactgatggtaaagggaagccagcttanttg

SEQ ID NO: 1074 - DNA, 735 bp, Homo sapiens
  SITE (259): n equals a,t,g, or c
  SITE (724): n equals a,t,g, or c
ccgctgctgtcacccccggccgctgctgccctccccgccgaggttctactgctctccttcttaagaagggtgggaggcactcggtctctccccacacctctcgcctgaggccaggcsccaggtgtcgcctgaagccagacagccggtttgggagcgagcctgaggycaaccaatcaatggctcagacagataagccaacatgcatcccgccggagctgccgaaratgctgaaggagtttgccaaagccgccattmgggngcagcgcaggacctcatccagtggggggccgattattttgaggccctgtcccgtggagagacgcctycggtgagagagcggtctgagcgagtcgctttgtgtaactgggcagagctaacacctgagctgttaaagatcctgcattctcaggttgctggcagactgatcatccgtgcagaggagctggcccagatgtggaaagtggtgaatctcccaacagatctgtttaatagtgtgatgaatgtgggtcgcttcacggwggagatcgagtggctgaagtttttagcccttgcttgcagcgcttctgggagttactattaccaaaactcttcaagatagtgtgtgaggtcttattcatgtgaccacaatggtgggttgccccgaatcccattcagcaccttccatttctytacacgkatattkccsagtggatkgggagatktgcawcacartcagcaggtgttnaattcatttac

SEQ ID NO: 1075 - DNA, 439 bp, Homo sapiens
  SITE (363): n equals a,t,g, or c
  SITE (435): n equals a,t,g, or c
ggcagacctcagtcactcaggctggagtgcagtggcatgatctcagctcactgaagcttcaacttgatgagctcaagcgattcctcctgtctcgacctcccaaatagctgggactacagtagggacccaactgattagaaaggaaattacatagtcagtgaccagctgagactgagtacggacagaggaagaagctaacttacatctaaagagacctgaagtcaggagacatttctagataaacccctcagccagataacatcaacccatgacttccaataccattgcttgaagaggtcacagaggagagagatcctgagraggttttttaaaatcttgaaagttcttgtatttaaagaagtngggagtttcttggtcttaactctcagttgtgagtactaatttttggcgtgatggttaggtgaatggcagagnccct

SEQ ID NO: 1076 - DNA, 498 bp, Homo sapiens
  SITE (487): n equals a,t,g, or c
  SITE (494): n equals a,t,g, or c
ggcagaggttccgtggcctggctgttggggacccctgatgttaaacatccctctcttccttatccctgggaggtgatgactgactgcaagagccttcgccgtgacttccttctatcctaacccctctttctgttggaacagcgtcctgggagatgaagtcattggaatctggccacgaaatgcagacaaggctgatgtcaactgcgcatgtgtgacccacgctggcctgaacattgtcacaggagatgactttgggctggtgaagctctttgattttccatgcacagaaaaatttgccaaacataagcgatamttcggtcactcggytcamgtgacgaacatcctttctcttatgatgacaagtatgtggtcaagcactggaggagacgactgcagtgtatttgtgtggcgatgtctktaaaatgccagargcccttatgktattgctgctgytgytaccascagcaactgcagaggccatgctgangtgcctncttg

SEQ ID NO: 1077 - DNA, 773 bp, Homo sapiens
ggcagagcgggaaagttgtatctgtttaccacatgttctcccacatctactcggttttacctctgtraggcctgaactcaaaagccaagaaaaaacctctttctccagaactttaccttttctggcaaaaggaagcagggagacctactaggraaatgccaagamcaaaatgattaatcatgtgaagacggcatctaccacctcaaatcgcccagctcattgaacctgcgtgaggatccagcactgtccctggtgtgtacagctcartgcaccgagatgaccaaccgcctgggtttgctttactgtcactgctaaaggcaggaaggcagctgcaaaccaggacaaggtggtcaccccacggtgaacatcagtcaccctccctagcccacacaggcaaacaaccgggggagactatggctcagggcttagaacccaaaggcctgaacaaatgaggaagtttctacaacaaagactttctttgacagagtaaccagtcataatttctgagcattccaggagcgctgtgcagaatcacaggtatttggcaactagtgggataaaacaaaggtgccattgaggatgtttacaaccaacccctctccggagataacctcaaggtctttcccttgcacatggcctttccatgactcatccacagcagctgcctccctccaccacacaaaggaccctgcaagttctgtttggtattcttgagaataaaaactccgtgggtcgttccctggaaaaaaaaaaaaaaaaaaaaaaaaaaaaaa

SEQ ID NO: 1078 - DNA, 420 bp, Homo sapiens
  SITE (362): n equals a,t,g, or c
  SITE (375): n equals a,t,g, or c
  SITE (397): n equals a,t,g, or c
ggcacgagggcaccagctcctgtacctggaggccaggcggcttcccccagttgggggctccctgccacctctcctcagggcagccagcagggactccctgtgtcggtccaaaacgtcgaagaacgaggcctcgggccccataggtgcaaaggccatgagggcagacggctgccagaagctccagaagcccctgtcctaggctgcgcccttggggcgtgggctgcgtgcctttcccgcgctttctgagcggccggcgtgcccacggcacacacccagaggcggggctggacaggcgtatgcgtagagcacggcgtggagtgcgcaacscagggcttttcaggcgcggtcccactgtgaggccntgaggcgggcgcntccctgagtgtgggtcgcgcangcatcggcctgcgtggttgagtt

SEQ ID NO: 1079 - DNA, 540 bp, Homo sapiens
  SITE (204): n equals a,t,g, or c
  SITE (500): n equals a,t,g, or c
  SITE (503): n equals a,t,g, or c
  SITE (539): n equals a,t,g, or c
ggcacgagaagagactctattaccgaacatttcatgccagtgaaaattgggaatatttcatcaccagttactactgtttctttaatagatttttccactgacatagcaaaagaagatatcctcttagctaccattgacacaggagatgcagagatctcaataacctctgaagtctctggcacactaaaggacagcagtgctgtngttgctgacgctcctgcctttccacgtaaaaaggatgaagctgatatgagcaattataattcctccatcaaatccaatgtccctgctgatgaggctgtccaggtcactgattccattattcctgaggctggaaatccctcctgctcctgaagaaagcttcactactattccagacataactgcccttgaagargagaaaataaccgaaattgacctaagtgttttagaagatgacaccatgctgtggctacattaactgactctgatgrgragtttatcactgtgtttgaactcantancyctgytggaaaagmcaargttaacgggagktattng

SEQ ID NO: 1080 - DNA, 558 bp, Homo sapiens
  SITE (271): n equals a,t,g, or c
  SITE (359): n equals a,t,g, or c
agaaatcagggctaatgaaccatctaaggacaggccatgagggttcgattttgtgtaagagacatggccagatctattaggtggaccaggaatggaccaaaggcaatttaattttggttataattgaggatgttgaagaaagcattgaatggaagacattgcagaagaagaaacagcagaaaatcaaggaaaaacttagaataagaacaaaagcagctgtaaagatccaggcctggtggcggggcaccctggtgcgcagggacactgctgncatgcasccctcagggcctggataattcagtgctggtggcggatgacgctgtcgagggtgctggagaaggaaacggcaggcagctctnatcgcctacgcaaccagagagagggcagtgatcaagctccagtctttggtccgtatgtggcgtgtccgctggcgatactgccaggtgctcaatgccatctacatcatccagggccactggcaatgccacaactgccagacctgcgctctcctccaggccactgtgtggtcacagccactcacctgcagttccacattga

SEQ ID NO: 1081 - DNA, 452 bp, Homo sapiens
  SITE (372): n equals a,t,g, or c
  SITE (434): n equals a,t,g, or c
  SITE (446): n equals a,t,g, or c
  SITE (450): n equals a,t,g, or c
agtggtggagtctctttcattgcagggatcttatgctggcaaaatccattccattggtgatgccttcagaaattttaaaaatctccgatccttagatttatcaaggaatttgatcactagccttaagggaatccagtatttatgttcactccaagacctgaatttatattataacaacattccttcattagtggaagtgtcccgtctacaaccgttacccttcctcaaagaactggatttgagacttaatccygttgtaaggaaagatacagattataggctctttgcygtatatacamtacaaactctggrgaaattagatgaccgaactgtacgtgaaggtgagagaaaagctgccaagctgcattttangtcagttgggcaacagtgaaaattttcttttaaaggtggaaaaaagctctagggagaagacnatgaaaaactgngtanca

SEQ ID NO: 1082 - DNA, 314 bp, Homo sapiens
  SITE (260): n equals a,t,g, or c
  SITE (275): n equals a,t,g, or c
tgtcatgttcgtttatttttcaaagaagacagcaggtccctgacctcatagaccagctagtttgggaggtggcggcagaataagggctgaggacccagatctgcctggggtcaggctgcttctaaaagtgcagggccaccctcagtagtgtggctgctagggcacacagttacaatttcgctgaaggctgaggcaggagtggaggaggcatgggaggaggccccatgggggaatatactggacctgtttgttattcaaantccccactgttgggntgggcccagggggggaaggacggcaaccccgtttatgga

SEQ ID NO: 1083 - DNA, 350 bp, Homo sapiens
agctgtgactgtgcaggtcccaaacagtatggacatgaatgtctcaagctgcatgttagcagggcttctaattccatctgcagtgatagtgtgtggagcttagttgcacagagcgcatgttactggaggagatatgggtctgtgtcatcctgcatgggaatgatcctaaaaacaaagtgatcagtgactgctcaggactgtggaaaggtcacttggagcagtgggaaaaggtctggcagaggaataagragatacaggtcttagaacaagccctgggacttcaaccaagtcatttaacatytggggcttcgtttattatcctcccagcagwtaaagcatacctgccctgt

SEQ ID NO: 1084 - DNA, 327 bp, Homo sapiens
  SITE (122): n equals a,t,g, or c
  SITE (131): n equals a,t,g, or c
  SITE (169): n equals a,t,g, or c
ggcagagcggaaaagggtgcgcaggtttagtgttgagaatgataaaccgtataattctgttttattaactccgcatctttgcttgccatggtactaggcttgagcgccggcgagcatggcgnggagttagnaacttgaatagattctacaaaaatgtggaaaactatgnaactgtattagggagtctaacgacttargctggtcaaaaaggcgcccctgttgagcagagtttgargagagagtggtattcattaaggcaaaggctgggggaaggggcgttcccggcagaaagaactggtttgtggcaaaaagcacccacccattaca

SEQ ID NO: 1085 - DNA, 737 bp, Homo sapiens
ttggggtaccgggccccccctcgagttttttttttttttttttttacataatattttaacacatctttattctcacagtgctagtcaacaacattgttcacaatcacaatcctctgagtggcaccccaaattgagaaaggcagagaaatgaataattcaataatgctgaaagtcatcaatgtaatcaaaattcccaagaacaggacagtaacagccttacactgactattttggtgagaataaccacaaatgtagttttgatctaggatgaaaccaaatgtgaggagaatgattccagctattgctcccagggcactaagaaaattcattattcggctcaatattatcagagtttctgtggtttttcttttcactgcaattaggaaggctccagaattaatgaacaaaacagagccccagaatggatatcctgaaagaaatataaagggaaaccttggatatggttttaacaaggtgaaaaggaagataactccaaaagaaaaggtcataattccaaacaggatctggatagtccctaagattttcatttttctagcaaataatttttgcaaggggctttgagttgaaaaggtcgtggctgaaagttctgtggactcatattctgaagcagtgatttctggaggaaataccagaaacaccggactgtgtgcggtgcttgaatccatgatggtgtcggtgataatttgaaaggagatgacttagttggtacttcagtc

SEQ ID NO: 1086 - DNA, 624 bp, Homo sapiens
  SITE (401): n equals a,t,g, or c
  SITE (475): n equals a,t,g, or c
  SITE (491): n equals a,t,g, or c
  SITE (593): n equals a,t,g, or c
  SITE (612): n equals a,t,g, or c
  SITE (617): n equals a,t,g, or c
ggcagaggaaacttggaaaccctctctttcggtgactttttttctaatgattgtctctgccatgaaattctaacttcaaatgaaatctttggcaggaacccagggctgttctgtcaaggttcagctgcaggaccagagccccttccacctaacccccactcctatcctgatgcttcctgaggcacatctgctgtggtttctcaccagagaacagtctgcaaaatcactgcaccttgtccaactccattttccaactgagaagacttggcccagagaagtgcacagacttgagggaagtaacacagcaatcggacagacagacatccccagatatacctgctacggtcctgggagaaaatagagacccatccccaaataccatcatcctcatcattctctgnagcccaatcaaatgatgctccaggcctgagattttatccaatgaacactctgtacatctttaaaagagatatgnacttggcttattcctnctttcctttctttaaaaaaaaacacagggcccagatccagtcattctaaataggaaggaaaaacatacccactgaggcaatggatgctggttctcttcctgntctgggactttaagtttgnctttnaaggcca

SEQ ID NO: 1087 - DNA, 346 bp, Homo sapiens
  SITE (312): n equals a,t,g, or c
  SITE (317): n equals a,t,g, or c
  SITE (322): n equals a,t,g, or c
ggcagaggaacagactgaacgaggattacctacccaggctgagagaagaacttctgggcagattgatggtagactggctatgcatctgaccagagaggttccagacagaccgaccacagaatgggcaggccagtctgagagaagagcttccgagcagatggaccgcagaatgtctggcgaggctgagcgargaacttctgagcagattacacacagattatccaaactatctgagagaagaccttctgtggcagattgacagtgggtcatccgttcccatctgaccaaagtccttctgttacagattgacantgggntcgtncgtgaccatctgaccaaagacctt

SEQ ID NO: 1088 - DNA, 565 bp, Homo sapiens
  SITE (476): n equals a,t,g, or c
  SITE (483): n equals a,t,g, or c
  SITE (514): n equals a,t,g, or c
  SITE (553): n equals a,t,g, or c
  SITE (559): n equals a,t,g, or c
ggcacgagctggacatggcctcaaagtaagagctccgccagcccaactaaaagttaaaccaactcctgctctggaaaacttagtacccgaggttgaactgcccagtctctttcctgctctgctggccaaatccatggcaggtccaagtcacatgcctcttttcgtgaaggaaaaatcatcagcacctcctacaaaggtcttcctaatcacttcattttgggggtaggggtgtggattytaaaactttgaagactatgtcacamtcaccttgcccctcacctctggccttgacaaccatsttgctttacaagtgaattccgcagktttctaaagrtggtcacaacacaggtgccaggaatgscttcctgggtacatggagttccgccacgaccacagaagacattacacaaaactgccaaaaggtatgaaatggcaatctgacaacaacctgacttaaaagccagtaaagacatcanaaaagangttggtgtgcaacaagaaaccccttcgcagnaccttaaatgggcaaaacccaaagagggaagaacctganctttcnaatggg

SEQ ID NO: 1089 - DNA, 691 bp, Homo sapiens
  SITE (533): n equals a,t,g, or c
  SITE (678): n equals a,t,g, or c
  SITE (683): n equals a,t,g, or c
  SITE (690): n equals a,t,g, or c
gtgaactcttggggccgttttattctctgaggttagcaaggagtcatctactagccattcaggaggccagctgggaagacaaaataggcaccccaaactcagcaacttcataacaccttcctctccccgcctgaagccttaaactgcatcaagtcaaagaaacctggggcaaatccttaacatgtttttgactgcagtaaatccacagccactctctactccgagctggcagattgagaccaagtattcaacgaaagtgctcactggaaattggatggaagagaggagaaagttcaccagagacactgacaagacaccccaatccatttacagaaaagaatacatccccttcccagaccacagaccagaccagatctccaggtggtatgggaagaggaaagttgaggggctaccttacaaacacctgatcacccaccaccaggagcccccacatsgctacctgatcagcacctatgacgaccattacaaccggcatggttacaacccggggctgcctccactccgcacttggnatggacagaagttgctgtggctgccagagaagtctgactttcccttcttgctccccctacaaactatggactctaataagcagctcaagcagagacagctcaaaacccaagggctggcctgaagcaagggcacttataccttcancctancccaagna

SEQ ID NO: 1090 - DNA, 371 bp, Homo sapiens
  SITE (339): n equals a,t,g, or c
  SITE (359): n equals a,t,g, or c
  SITE (362): n equals a,t,g, or c
ggcagagtttggggatgtcaagatcattgacagacttgtgaggtgaaagaaagttttagtgaaactgaaaggacgggacgcagattggattgggtgcaaaatacagtaatgagataaagtggaaacaatgggtttgactggctttttagagaagtattgtaaaaagagggtaaatgaatctatgtacttgtaatcccagcactttgagaggctaaggtgggtggtttgcttgagcccaggagttcaagaccagcctgggcaacatggcgaaaccccatctctaccaaaaatagatgaaaattagccaggcgtggtggtgcacacctgtagttccagctncttgggaagctggggtaggnttncttacctct

SEQ ID NO: 1091 - DNA, 534 bp, Homo sapiens
  SITE (320): n equals a,t,g, or c
  SITE (329): n equals a,t,g, or c
  SITE (390): n equals a,t,g, or c
  SITE (457): n equals a,t,g, or c
  SITE (494): n equals a,t,g, or c
ggcagagctggcccagggggaaggacgcaccctgttatgaatctgatactgatatttatgagactgtggctgctgcaacatcagaatccactactgtagagcctggcaagctggatgtgggagccacggagggccaagacctgcagcacatcagcaaccaaaagatgcccacaggtccccctgaggaccgcctgagtttaaaatttctgccatcaagtgaggaagacaatgatgatgccaagattttaccatcacctgtccagggttcttctgaggacaacctgagtttagtatgcctaccacgaaggaaggatgatgantgtgatggntgatgatgatgatgatgcccagattttaccgtcacgtgtccagggtggtgttaccgtttgntagcattcttgttcttctgaggacaacctgagttttagtatgcctaccaggaggaaaggttgatganttgatgatgatgatgatgatgcccagttttacctcancgtccaggttgttctgaagtagccctttttaaggtgtcat

SEQ ID NO: 1092 - DNA, 333 bp, Homo sapiens
  SITE (292): n equals a,t,g, or c
tgtgccctgtgagacagcttagatggtgacaagctacagatattgaagccagtgggacctgggtttgaagtctgactctgccatttagtgaaagaccttgagcaaaactcactggccctggagccaatcttgagcagagcctataaggcagaaggatccagactctgaataaccagacatgcctgcaggagaccatgtgagtgatggaaataaaacttctgsttgggggcatttcaaatattggaaagaatgaatggaatggaattaagtgtttggcacccagtggaggatnacttgaggcgggacctattttggaaaagaggaggagttggg

SEQ ID NO: 1093 - DNA, 438 bp, Homo sapiens
  SITE (339): n equals a,t,g, or c
  SITE (430): n equals a,t,g, or c
  SITE (436): n equals a,t,g, or c
ggcagagcaggattactacaaagcattacactacttcttaaaggcagcaaaggccgggagtgcaaatgccatggcatttataggaaagatgtatttagaggggaatgctgccgtgccgcaaaataacgctactgccttcaagtacttttccatggcagccagtaagggcaatgcaatcggccttcatgggcttggtcttctttactttcatggaaaaggagttcccctgaattatgccgaagcacttaaatactttcagaaagctgcggaaaaagggtggcccgacgsacagttccagttaggcttcatgtactactctggctctggaatatggaaggnttwtaaacttgccttcaaatatttttacctggcatctaagagttggcagccccttgccatttattatcttgccaaggtgttttcaacaggnccaggngt

SEQ ID NO: 1094 - DNA, 696 bp, Homo sapiens
ggcagagcaccatcactactcaagttggagaaatagaggccaggggaaggggataaagggagggcaaagaaaagtwattccaaaggaacatgagcaccaataatgctttaagagtgttttggaaatcaagagaatggaatatgaaaacatcaacatttgattcagatgaggatattctacttttacccaaaagaaaacgttttagaaagaaaaagtcaagaccagtgagacacaccaaacgccatgaagaggagcaggtctatgagcaagggaccacattaccctgttccatatgcaagcacgaaattgacctaactggtatttttctccataagaagcaacatgtagctctggccacgctgggtttccaatggatgggtagaaagaaaccacagccctcagtgattgctgttcagagacagttcatgatttctaaactattgtcatcttttatgttcactgaaaaaaccctacagagcattaataatgcttttgagctgctttggaaaaaacaaataccagcatactataagatttttgataacattgacaggagtgtcatatattctcaaaaaatatgtcatctgttaattaaaggagtgggcatttgtgaagacaggaattctacatggaaagctgacatgaatgataaattcactgtagtgagtaattttggtaacaaacctaatgtgtgtt

SEQ ID NO: 1095 - DNA, 831 bp, Homo sapiens
  SITE (649): n equals a,t,g, or c
aacaacttgactgaaatgtgattctaccatttttccagtcaactcctaagttttaaataccatacatctgccaccttaccaggcagtttcaaccataacaacagaagaatactcttgggcaaatagatcccactctctgagggttgtgttggggctcagaaaatactaccccgagtatgacactttggcatgctgaatactttgaactaaaagagattggaaggcctcagaagcagcctcggaagcagtctctccctctgatctctgcccttctgtctctgcccatctttcgtcccagaagtgagtcacagaaaccagaattcttccccaagcgcacttaacttggactcaccacctatcaagtgctcgacagccacgtgtgcagtggttcctacgtggagcagcatacatccagagatgcaaatattaatgaggacagtgctagtaacagagttgctgagcaatctatgtccccttgtaagaaccagtgccccaggggaagaaacagaactccacaaggtagcagtgtgggtgtagtacccgcatgtgcccatgttatgggaatgtagatggggagtgaccaccgccaacagaagtgtggccatcttgcccgagatgcctgaggacctcctatttttagatgctgctnccaaggcctgtatttcatgctatggcttttgtcatttgaattatcagtagctgtctcggagctattacgcttcactgggccctggaggatattgtcttatacagtccactgggttttggatatgcagtctgtgcctttcattgccttcctggaaaataataactaaactcttcctcacctaa

SEQ ID NO: 1096 - DNA, 458 bp, Homo sapiens
  SITE (7): n equals a,t,g, or c
  SITE (18): n equals a,t,g, or c
  SITE (458): n equals a,t,g, or c
gggcagnagctcgtgccncagctgcagtaagggggcgacccggcgtctgttagtcggcggttcatctccttcgtgcctcgatgagctttaacgccattttcctccattctctttcttcamctcttgagtttccaagatggcaactatcaagagtgaacttattaagaatttcgcggaagaggaggccattcatcacaataagatctccattgtaggaactgggatcggttggtgtggcttgtgctatcagcatcttattaaaaggtttgagtgatgaacttgtccttgtggatgttgatgraggcaaactgaagggtgagacaatggatcttcaacatggcagcccttttatgaaaatgccaaatattgtcttccagcaaagrtttacctggtcactkcaaactccaactwgkggttwtcacagcagtcacgccagaaaaaaggggaaccacgccttn

SEQ ID NO: 1097 - DNA, 352 bp, Homo sapiens
agaggcgagcaccggaaggggagcgtggggccgctggaatccgctgtgtggcttacaataaccagtcaaacagattgctgtttcaggaacagatggcactgtggaaaatttataacttgtcagcaaactactttcaggagaaatttttcccaggtcatgagtctcgggctacagaagctttgtgctgggcagaaggmcagcgactctttagtgctgggctcaatggcgagattatggagtatgatttacaggcgttaaacatcaagtatgctatggatgcctttggaggacctatttggagcatggctgccagcccagtggctctcaacttttggttggttgtgaagatgga

SEQ ID NO: 1098 - DNA, 404 bp, Homo sapiens
  SITE (369): n equals a,t,g, or c
  SITE (378): n equals a,t,g, or c
  SITE (380): n equals a,t,g, or c
cagtggccaaagtcctgtcccgttggctgccttcatccactctctcacttctctgccttcagagtaaaattgcaagatctgtggtgcttactgggatctgatagagtctctcggcatccactgtctatgcagcgggtgtccacctgcagcgggggccatgtgcagcggggggccacgtgcagtgtgwgcctmttcttagccatgctggacagmgccgcccctgaaaagcagctccccggtttcacccagaaagccatycagaacctmctggaaaaggtggcctgatggccaagtggcctcggatgccaggctcaatcctttgaacttttcctgtgggctkcargacccatagaaggttttgagcaagtnataggtctntngaatcaagagaagccacaatttgg

SEQ ID NO: 1099 - DNA, 331 bp, Homo sapiens
  SITE (44): n equals a,t,g, or c
  SITE (89): n equals a,t,g, or c
gttcctctctggctggtgggctgcaagcggcagagcccgcccgnacagcccagcttttttctttctacccagactctcaacttgaccgngcgttggtctgtgcgcccggtaacgtgccaggcacgcgccggggagctccgggatatgctccgmggtgctaccggtgacaagtgtggtatctggaatttgtgtagttctttgccccctgtctcaaccacaaaccttgracgacacagtatggccaggggcgaggctcctcccttggcccactttgttctccagactgctagggagtcaagagtcagcttgtcttccccagactcttcctggg

SEQ ID NO: 1100 - DNA, 249 bp, Homo sapiens
gcaacgaaccttctggtattatgmggacattattctacatgcatattttctcattgtttttcgtgataacccaatgaggtagatagtgtcattatactcattccatagatgaggaattagacacaaaaagattaagtaatttscctgtggtcacaaacgagtagataccagaaccaggattcaaatttaggcatttggcttcasgttcatacttttaatcagttaattcacaatgtgaaatacaactgt

SEQ ID NO: 1101 - DNA, 331 bp, Homo sapiens
  SITE (88): n equals a,t,g, or c
  SITE (291): n equals a,t,g, or c
  SITE (306): n equals a,t,g, or c
  SITE (314): n equals a,t,g, or c
ggcacgagctcgtgccgatggactgaggggactcgggggaggatggactcaggatactcagagaggatggactgaggggactcagggnaggatggactcaggatactcagagaggatggmmtkaggggactcgggggaggatggactcaggatactgrgagaggatggactgaggggactcagggcaggatggactgaggatactagcggaagatggactgagaagactcggggaagagtggacttaggatactcgcggagaccggacttagaagacttcgggggacggtncaacttaggataatngtggaggntggtccttagaaggcct

SEQ ID NO: 1102 - DNA, 444 bp, Homo sapiens
  SITE (39): n equals a,t,g, or c
  SITE (325): n equals a,t,g, or c
  SITE (409): n equals a,t,g, or c
  SITE (415): n equals a,t,g, or c
cccatgtggtcacaaaggagtccttcagtatttccaggnaatagttggaaccagcactccatcccctacctggacctggcaccctctctactcttgtcagttctacactaatcacaggaagaaggtggaattagtccaagctgggttttcagaaataacttgtagacatgcaacagatgtttataaccctcagaagcggaaggaaacttggaaaccctctctttcggtgactttttttctaatgattgtctctgccatgaaatttaacttcaaatgaaatctttggcaggaacccagggctgttctgtcaaggtcagctgcaggnccagagcccttcacctaacccccactctatcctgatgttcctgaggacatctctgtggttttaccagagacagttcaaatactnacttgncactcattccactagagcttgccaggagt

SEQ ID NO: 1103 - DNA, 428 bp, Homo sapiens
  SITE (339): n equals a,t,g, or c
  SITE (365): n equals a,t,g, or c
  SITE (378): n equals a,t,g, or c
  SITE (380): n equals a,t,g, or c
gggcagaggaaaatgacattcatagaatcagatatgatcagacagttttaaggaactatgctgactttatgaggtcaaggcttacaaaatcctcttgaaaaaattagcctggtacctggttatagcatgcttagccttacagtgagtatagaaggtcactttccggtactctcaggaaccataggatattttggagacctcaagaagagaggcagtcattcaattctgttttaagccctggagacccagctcttcactctcacctcagatctgagacgtgatgccacaccttttcctccagtgagtcagaaaaggagatctttctgggtctcatgagantaaacctttatttattgcatccatantatgtgactaatngntctagacaatcatttgcatgtgacaacttaaattttggtgtgtgacat

SEQ ID NO: 1104 - DNA, 404 bp, Homo sapiens
  SITE (378): n equals a,t,g, or c
  SITE (384): n equals a,t,g, or c
  SITE (397): n equals a,t,g, or c
  SITE (398): n equals a,t,g, or c
gggcagagctttcattcatgataatgtcgaacacgcacaaagctcggctggaacgccgggtcactggctcaaccaaccggtggcgtttgcccaaacagcctttctctggggacctgctctcactttcccagatgtgcaaggctctgagcatagactttgaggaagctttgaggaacccagacaggttatgcatttcacaaatccagaagtttttctttgagaatttcaagaacaaggacatccaaagtggggaagcagatgtgattctcgagtgcctgggcttcaaatgggagctccatcagccccagttttttcagtctgagaccttggccaagttctacctgaaagccctggcgcagggcaaccacacacccctgngggagntggaggagttttnnggagtt

SEQ ID NO: 1105 - DNA, 678 bp, Homo sapiens
  SITE (626): n equals a,t,g, or c
  SITE (659): n equals a,t,g, or c
ggcagagccctgctggagtggaacctctgcttggaggacttcagaaagaatggtgcccatgaccctgccaggcagtgatggtgctccctgatgagaaccacagagaggatgcgttgatgaggctcaacaaagcagccctggagctgtgccagaagccaaggccattgcagtccaacctcctgcaccagatgtgtttgcagctgtggcgagatgtgattgacagcctggtgggccattccatgtggctgaggtctgtgctgggcctgcctgagaaggagaccatctatttgaatgtgcctgaagagcaagatcaaaaatcacctcctatcatggaagtgaaggtacctgtggggaaagctgggaargaggagcggaaaggagcagcccaggaaaagaagcaactggggatcaaagacaaagaagacaagaaaggagccaagctgctcgggaaagaggaccgtcccaacagcaagaagcacaaggcaaaggatgacaagaaagtcataaaatctgcaagtcaggacaggttttctttggaagaccctacccctgacatcatcctctcttctcaagaacccatagaccccctggtcatggggaaatacacccagaggcttgacagtgangtccgtggcttgttggacaccctggtgaccganctgatggtccttggcttaa

SEQ ID NO: 1106 - DNA, 443 bp, Homo sapiens
ggcagagcctcaagtcctggtgaaccaactcctctccccaagacagacacatactagtgaaataaattggatttaaatcatcacctgaggcaatcctgaaagagaaaagcagtcctagaaaagagtggaggaaaagaggacagccccattctctttgtgaccacgargactgccgccatgtggttgggagccacgtaacttcttttagtgccagctgagattcttctgccctggaactagttcctccgagttattgccaggcctggagattgaattcctgcagctggaaatggggaaagttgccagagcgaaggaagtaaaagcatccaytatgrgattcaccagaggggtttgaccagytttagaaggagaatctggacaacaacacatgcagytgtgaaggsgacaatgtgacaytgacagccaytgaatggaggtttgag

SEQ ID NO: 1107 - DNA, 393 bp, Homo sapiens
ggcacgaggtgaaatgaagcgtgaataactgcctaattagtggacatgaaaactggacagtctccaaagtcatcagagatgaccacgcttgccaggcaacttactagactaagggtgacgtgcccatcatgcaggaagcttctccaaggctggcgagagcaacttgtctgctttgagaaatgcagatctatcaggatccagaatcggactctgaaaaagctgtcatttcatgtctctaaaacagcctttgatttaatgtacaagatgtcaagaagtaaaggacaataaaataaaaaccaaaaaaggagaactatttcaattaagaagcattcctatatcaattcttggaaatcacataaaataaaagctgtcagaatcaaaacggcacgagcg

SEQ ID NO: 1108 - DNA, 233 bp, Homo sapiens
  SITE (121): n equals a,t,g, or c
ctctgacccagggcctgtccacggagagtggagggcgaggaggacaggaggagccgcataaaactctgccctgcctggagtctatgtaggacagtgttgtcttttacagacaagtctcgangaatttgaaggaaaatagcctactagctgtaatgtacctagttcagcaaaataattaataaaaatactggttgcaaatctgaaaaaaaaaaaaaaaaaaaattcgggggggg

SEQ ID NO: 1109 - DNA, 453 bp, Homo sapiens
  SITE (334): n equals a,t,g, or c
  SITE (344): n equals a,t,g, or c
  SITE (374): n equals a,t,g, or c
  SITE (452): n equals a,t,g, or c
aatcagtcagcggcaatgtgctgatattaacgaccagggaggagagcagcaaaaatccctacagagcacaaagcaatgagagcagaaaagagatagtaaaatgccatgaactgacttggtgcccattcagttgggaattcctttagagatgccaaaggaatcccattttgtagccagtttcacgggcactcaggatgacagccacatgaggggtttcactggagtgttttaggaagccgtttgcgggtgaaggtatcagagagtttcagagctattgggatgggtcccccagggtgttcctttcagcaatcccaggttgggacaagagtcttgntgaggaagcngcaggttcaaggtttcaaccaaccttcaanccacgggggcattttggttaccaagttgacccattggttttttgtttgaacccacgtttttgaccattacccaggggng

SEQ ID NO: 1110 - DNA, 439 bp, Homo sapiens
ggcacgagcaggattctagatttgtgcagtaggattgtgggactgtgttttaggagagaaggatgtcttggatgtccagtttctgtggttaatcccttacttgcttatccagtgacagcaagaaactttctgatttaaagtctttcaattgaccaaaactttcttattggattctgtttcagttctcctattaagcactgcagaaacgaaaggaaagcctaggaatatgaaactaattaaaaaggcacttggtgatatgacatagtactatgstagccgttgtggrtgtaacagttcatttcttatactgcattgtgccttcccaatgatgtcaaacccyagaaatattacagagatctacttttctggaaaagggtgagctctgtattgatctgcagtgactctgtttagatattaaagtaggttctgaaaagcgaaa

SEQ ID NO: 1111 - DNA, 368 bp, Homo sapiens
ggcacgagggaaaatctgttgacagcaaggtcccctctctgcaggacacgtttgatagggagagacataaagatcccagtcctcgggatcgggatatgcaacagttagactctaatttgaactcaacccggagtcaatgcaaccaggttcaagacgatctggttgaaactgaaaagaatcttgaagaaagcaagaacagatcggccatatcccttttggctgcagaggaggaaataaatcagctgaaaaagcagcttaaatctcttcaagctcaggaggatgcccgccacaggaaacacagatcagaggagctcagagrataggcggtycagagccttggagctttggaggagcggaactttgaacca

SEQ ID NO: 1112 - DNA, 274 bp, Homo sapiens
  SITE (211): n equals a,t,g, or c
  SITE (230): n equals a,t,g, or c
aacccaggccttcaggaatgctgtgcacttctagaacttggcagagggcatatgtcctgtgctccactagtcctagctggatcgtggacatattaccatcattacaaatatcaatagtttgtgattacttcaaacaatctgaagttgaaggaccccagatatccttcaaaccaggatctcaggcagatctgaaaccatgattacagggggncaactatccaatctaatgnctaaatacagattagaaaatgtgcttctaattacttaaaagatg

SEQ ID NO: 1113 - DNA, 338 bp, Homo sapiens
ggcacgagggtgatcaaagccctgctcattcttacacccatctttggcctcacctgggggctgggcctggccactctgttagaggaagtctccacggtccctcattacatcttcaccattctcaacaccctccaggtaggtgataggggggtggctgtgttttttgcttttttagatggtctaagtgcactgccgatctcttctctaggaaggtaccaaggtggagcagargaaacataggttccagggaattttgggaaggcttaggtgtggatcccagttccctccactgaagttagctgggataaactttgggacaaattaaccatgaacctttt

SEQ ID NO: 1114 - DNA, 359 bp, Homo sapiens
  SITE (308): n equals a,t,g, or c
  SITE (334): n equals a,t,g, or c
ggcacgagctctgcccttgcccgctgaggtcccaagctgaggagatgagccgagcagtaaaaagagaggaggtttggaaaagcaatgtcctctcagtctttaataggtkgcccccctgggaacctgctggaagtggaagttaataagctgaaggtggtcacaaccaatctctgccacactcgcaccctaccccaccccaaatcattccttttaattaatagtggaagacctttttaaaaatgtaacatggaattggstatttcttgagggcaaacaaaaggtggctctggaagcgwtatatttgtkantcgtattaattcattaaataggaagnttattaacccaaaaaaaacggcacg

SEQ ID NO: 1115 - DNA, 376 bp, Homo sapiens
ggcacgagcgccattttgcctcttagtgctcatgcttgagcccacgggcacagtttgtgagatgtaatcgagaagatgctgatcaccagttttcagcagagtttgtgaaaggcagcagaatcccgctccccatgcttgccttcgggaccctcactggagcagaaccattgcttagagcgtgagaaggagaagcgagtgtccgtcaacatgctggctctgggtgaracctcgatgttcctggktcgccggacagcagytcgaagcagytggtgctctgtgtccaytttccttctctgaacgaaagytcggccgaggtgctcgaatacaccattaaggaagaaaagtcgacattccccttttcagcctccaacactgg

SEQ ID NO: 1116 - DNA, 391 bp, Homo sapiens
  SITE (320): n equals a,t,g, or c
  SITE (338): n equals a,t,g, or c
  SITE (385): n equals a,t,g, or c
ggcagagtgagcctcacttttttcatctgcaaaatggtaacaacgacactttccctagaggggccatgaagatgaaatgaaataataagcatgacggatggtcctggtgctagcctcacagtggagtgmtcaagaaatggcagcaatttgcagaaaaagggatgttcacatttttgtcagaattgccccaaaccccatcctctccctcttcctcttttttcttcaatatttcttatgaactgtctgtctgcaaacagcttccttcaatttgtactatgatttgaaaaggatcttgaatccctgagtttggggcaaacacnttggggggttaaatcagnccagtgccaaggactttgggatgctggaaaattaaaggggggggggntttcat

SEQ ID NO: 1117 - DNA, 370 bp, Homo sapiens
  SITE (292): n equals a,t,g, or c
  SITE (311): n equals a,t,g, or c
ggccaagagaccatggccacgttagcccggctgcaagctaggtcgtcgactgtaggaaatcagtactactttaggaacagtgttgtagatccatttagaaaaaaggagaatgatgcagcagttaaaatccaaagctggtttcgaggatgtcaagttcgggcatatatcaggcatttaaacaggattgtaacaattattcaaaaatggtggagaagtttcttaggcagaaagcaatatcaactaactgtgcaggtagcatattatgactatgatgatggaatctctacaatgncaatggctgtccaggrttncagaggacgrtgggcgaggctattagggttccggaagtaccctctttaattattattat

SEQ ID NO: 1118 - DNA, 468 bp, Homo sapiens
ggcacgagaactccagtggcagggctgcgacctgaccccactggtgggccagctgtccctgggtcagctgcaggaggtcagcaaggccttgcaggacaccctggcctcagccggtcagattcccttccatgcagagccaccggaaaccataaggagcctccaggaaagaataaaatccctcaacttgtcacttaaagaaatcactactaaggtgtgtatgagtgagaaattctgcagcaccctgaggaagaaagttaacgatattgaaacccaactaccagccttgyttgaagccaaaatgcatgccatwtcaggaaaccatttctggacggytaaagacctcaccgaggagrttagrtcattaacatcagagagagaagggctggagggactcctcagcaagctgttggtgttgagttccaggaatgtcaaaaagcttggaagtgttaaagaagattacaacagact

SEQ ID NO: 1119 - DNA, 453 bp, Homo sapiens
  SITE (211): n equals a,t,g, or c
  SITE (373): n equals a,t,g, or c
  SITE (403): n equals a,t,g, or c
ggcagaggaaaggctgcccctttgaccaggcccatcttctccacctcacatcagacagccaatcggctcgccagacctcgaaacctcagtaacctagaaggaaatgggaccttggcaaacgtgtgtcaggagaggatgacttgggaggtgtccaccgtgtttcttactgaagatgtctaaaagtcaattggggtcaaggtacaagcctctnacttcacatgcatgtggggcaaatggaagtcacaggaacaaattaaccttaccctggcatccagggcacggagttccaggggacaacccctggcttgctgccttaagaggaaagtgggccccaaggaaggcactgggcccggtgcctgcttgatggccaggngcctttggttattggctgacaaaagcatcngggtttcccttccaggcttccgaaggttgggcacagttaccattcccttt

SEQ ID NO: 1120 - DNA, 300 bp, Homo sapiens
  SITE (222): n equals a,t,g, or c
  SITE (283): n equals a,t,g, or c
  SITE (300): n equals a,t,g, or c
ggcagaggcacatgctactgtgcctggcttcagtttttgtaaacaaagttttattagaacacagccatgctcattcttttacttattgtctgtgactactacaaaggcaacttgggcactcaagccaaaaatattactatctggtcctttaaaaaaagtttgctgaccgctattctatatattgaagcttttctctaggcttattctttattgcacctgctnacttttgtcccttcattggtgtcttcataaagagatgcaaaataaacattttttttgtatnatggataaagtattttn

SEQ ID NO: 1121 - DNA, 516 bp, Homo sapiens
aggcctcacgataggaaattggacctcgaggacaagaatacggcacgagggtaaaattccccacctcgccccaccgccacagtttagagatgggtagaccgaggcggggagcacctcgtaactccgcaagaccacgggctagacagtggcagagcagacgtctcctgtacgctcttcacccccacgcctctagagggagtttattttataacaatctaaaagttcccccctccgcccccaacctaccacccacccccagatccgccggaaaagtaaactgtggctggagaggaatctggggtgtgtggggagcggggaggcagggagcgggaaggatggatgtaatcagtgggcctgaacttcattcctgcccacgggccaagagacccttccctgcagaagttccaaactaggggttcttagaactagcttccccactcccacctcaaccttcccttaaaaaaataaaaaggctggtttcttccgggccagatcttggccacttaaaaaaaaaaa

SEQ ID NO: 1122 - DNA, 454 bp, Homo sapiens
gggcacgtagcgtaccttcccctgcaacctgcgtacacctgccattttcccatcttaggctccagaagcagaatcaagtgggatgtcttggaagaaaaacaaacaaaaggcccactaggtggagtgaaatggatcaggagcaattatgttcaatttcacctttaagttttctcaaaaggaggagcattaaggaatcagccaccttagtacatacttaaagatttactgaaacctgatcctgtccccgctgatgaaacatcagaggaatggggatcctgtaggtgaagatcatcagcttataaaatcctgttgccatcaatgggggtagcaggaaaatgatgaagattggttaaggggccagtggactcagcattgaaatgaaatcatggcttgargccaaaagacttagtttgtgtcccagcttttttaagcaaagcccccaagtcccagtttc

SEQ ID NO: 1123 - DNA, 214 bp, Homo sapiens
ggacagagctcgtgccgttaacaataagccaggtgagagtgaagtctgaactcaaagagtggcagctagaatggaaaggatgagatgttatttcgagcgctggtaatttctgctggtgcaatatcagtagcaaagtggaggcaggaggcagactgcagcaggtggagggatgcctgggaagtcaggcagtgatgatgatcaagactgtggcaac

SEQ ID NO: 1124 - DNA, 491 bp, Homo sapiens
  SITE (22): n equals a,t,g, or c
  SITE (466): n equals a,t,g, or c
ggtcacgtgggtatgatcgtgncctcccccaaccccagtgcaattgtctgaacaattcagttcagatttcctacctctctgggctcaatccgaagcgttacctcaggatctactgaaggaacttttgccaggtggaaagcaaaccatgctctgtccagagatgaagataaaattggccatgatgaaaaagaatcttcccttggaaaagaaccgacctgacagtgtgatttcttctaagatgtttctatctatacaccgcctcaccctgggaaagaccagcactgcgatatcctgaacgtttgaagaaattacataacctgaagacagaaggttacaggraacagcagcagcggcacagcagcagcagcagcmacagaagaaggtgaaaacacctatttaggaaacaggaggctaaaaagaaagccaagagttgttccaggggttccagagcactttcacataaacntccatttaccacctttctggaccgt

SEQ ID NO: 1125 - DNA, 456 bp, Homo sapiens
  SITE (41): n equals a,t,g, or c
  SITE (375): n equals a,t,g, or c
  SITE (391): n equals a,t,g, or c
  SITE (450): n equals a,t,g, or c
gggcacgagctccagtggggctcggcggctcccagtgccgnagcggggccaggaatggatgtcgctttttcggctaagacccgcgtctactccaccacagctagatgagaccctgtcggagagactatggggcctgacggaratstttccggaragggtccggtccgcggccggagccacttttgatctttccctctttgtkgctcaraaaatgtwcaggttttccagggcagccttgtggattgggaccacttcctttatgatcctggttcttcccgttgtctttgagacggagaagttgcaaatggagcacagcagcaactgcagcagcggcagatacttctaggacctaacacagggctctcaggaggaatncaggggctctaccctnacttcctggaaagattagattgtattctgtttagctgtctagtgggataagtttaaatnaagtgt

SEQ ID NO: 1126 - DNA, 279 bp, Homo sapiens
  SITE (5): n equals a,t,g, or c
  SITE (29): n equals a,t,g, or c
cacgngtaaagtaagagacacagacatgncagagaaaacacagggaagaaggccacatgggwtgaaggcagagatgggaatgatgcagctacaagccagctacaagccaaggawtgccatggactgctggcaaccactagaaagaagctggaagaggcaaggaaggattcttccgtgatgccttcagaggaaaatggccctgcaaacaccttgatctcggacttctgacctccagaactaagagaatacatttctgttgttttaagttaaaaaaaaaaa

SEQ ID NO: 1127 - DNA, 714 bp, Homo sapiens
  SITE (547): n equals a,t,g, or c
  SITE (557): n equals a,t,g, or c
  SITE (634): n equals a,t,g, or c
  SITE (670): n equals a,t,g, or c
  SITE (704): n equals a,t,g, or c
ggcagagttgcggcagacactttaccaaatcctacaatttgctcatccatgagaggacccacacggacgagaggccktacacgtgtgacatctgccacaaggccttccggaggcaagatcacctgcgggatcacagatacatccattccaaagaaaaacccttcaaatgtcaggagtgtgggaaaggattttgtcagtctagaactctagcagttcacaaaactttacacatgcagacatcaagccctacagctgcgagcagtgcggcaaagtgttcaggcgaaactgtgatctgcggcggcacagcctgactcacaccccgcggcaggacttctagagaagcccaggatctgtcccgtgccgccgctgctcccctccccagacacctytccacgtytcctacccagggggtcgcatccctagcccttcactgaccccagctcttcccttgctgcagccgcacctgcagctccagggagttaactcttcttctgggggactgagaactgtagaaagccacacactactacatcccttcacaaagagnatatgctagnttcttggtagatattcacagctcattttagagctctgtacataatggtggggggcctttggtttggtggtttggttngctttgggatcttggtggatgcactttagatatggnaaatggaaggcaaaatttatcttttaaggactgnattttcaaaa

SEQ ID NO: 1128 - DNA, 592 bp, Homo sapiens
ggcacagcagaccaccatccgggtactctaagtcctccctcccccttctccttcacccccaagtgtctcccacgactgccctccccgacctctagctgaccatggcatcaraggcagaaaaaacattccatcggtttgctgcgtttggagaatcatcaagcagtggcactgaaatgaacaacaagaacttctccaagctgtgcaaagactgtggcatcatggatggcaagacagtcacctccacggacgtggacatcgtgttcagcaaagtcaagtgaggagccaaaaatatggaggtgggggtgagaagaacctgcgaggtagttggccacggaagggttcacgtggtggaacatttgcagtgggcctaccaagcaccacagggtacctggcgctgtgctatcctttgtcttcaagacactcactgattgacaggacaaaagaggccaaatctgagtgaggcaagagttggaccttggaggtaatgcattcatgctycaaagtttctggawttctgtctaactgaccagggccaagaacgcccgaaccatccgtttcaacagtcaaagaggaatgaaggaactggccagaa

SEQ ID NO: 1129 - DNA, 277 bp, Homo sapiens
ttgttattaaaaacactgtacgkttatttaaaccattacttttcataattcattgagtcttattagaggtcaacatcttcattctgttaccttactggtacattcactgatgttacataaaacttcatgtaaaattaaataagaattaaaagtacagctaagaacagtgatgatctgtatgagaggatttaccattgtgtaccctrgtccctaatatggtcattttttgtttcatgggcctctcaaccttgaaattccattttaatttagagaggat

SEQ ID NO: 1130 - DNA, 327 bp, Homo sapiens
ggcacgagcacacgctgatttctcaacctggaatcatttccctacacctttcctcaaaggactgttaatgagttttcagagcaggtacttcactgaaatgtaactaccacaatgcatcctttccatgtgactaacttcgctcatggaccagaatcactgtggctctgccctggagtggtgcaaagagctcgcattctgtttggaaagcaaattatttaaatccagtagaggactctcaaatgtggttggaaaatctaagaagacttcccagaggcagcagcactagtgttagggaaagagctcacaaattccattgctgtagaaccc

SEQ ID NO: 1131 - DNA, 200 bp, Homo sapiens
  SITE (123): n equals a,t,g, or c
atcttaactcccccccatccacaaaaccctgtttctggttaaggtcatgttcactaggagtggaggattggagtgaacgaacgtattggggagggcataattcggtccacagccggagggagnaagaggctggctgatacggcacttaaaaggctcccaaaatgtgactctcatgtacgactggccttgatgtgatgtat

SEQ ID NO: 1132 - DNA, 439 bp, Homo sapiens
  SITE (433): n equals a,t,g, or c
ggcacgaggaagctcttaagagcgcggccggaaagcagttgagttacagacatcctgccaaaatgatttcttcaaagcccagacttgtcgtaccctatggcctcaagactctgctcgagggaattagcagagctgttctcaaaaccaacccatcaaacatcaaccagtttgcagcagcttattttcaagaacttactatgtatagagggaatactactatggatataaaagatctggttaaacaatttcatcagattaaagtagagaaatggttcagaaggaacgacaccacagargaaattaggatgttttaaaagaaccaggaaaaacatctgtwggattttaaagttacctacccmgatgggaaaattttacaggacacagacgggggacattttaaccmgaacmggattttagtggacaaaaccacccnttttcc

SEQ ID NO: 1133 - DNA, 361 bp, Homo sapiens
  SITE (321): n equals a,t,g, or c
  SITE (327): n equals a,t,g, or c
  SITE (343): n equals a,t,g, or c
ggcactttaacaccgttatctgactcttcaaagaaaatagattttcatttgcatgtcctacggagaaaaggagaacatcgtatgagtggtggttctatgtataattcagatacagatgaggatgaagaaactgagccttcttcttctgggcaacagataattgaaaattcaataactatgataagatgaagctgctgaaggctaagatgaagaacatgaatctcagcaaaaagccttaaggaaagcttgtcaaggttaaaaccttcacccacctgttagctcctcgaccttcttagtggttcccactggcaccatcttcgncaccgnttgtttaaggggtccntccccaacatttggtcca

SEQ ID NO: 1134 - DNA, 336 bp, Homo sapiens
  SITE (312): n equals a,t,g, or c
  SITE (336): n equals a,t,g, or c
ggcacagctgcagagaagctctggggcttcagtcaatgactcagggtagccaccgaacatgatgctcgggcagtgggtgccacctggactccactctcccctctctctgggatcatagagtccaaggtgttctgtggcctctcggccaatcccagcagctcagcgtgcagaagaccgaggagccattggaattcaacacaacacgaaataatcaacaattcggggaatgttaatctgaccatcaccagttacaaatgatgttcatgctacctctattcctgccttcataaatcaaggaaaggaaagggacantatcccctacctttgattccacan

SEQ ID NO: 1135 - DNA, 69 bp, Homo sapiens
ggcacgagctctctctctctctctctctctctctctctctctctggcagggcctgtcgactgcacatgg

SEQ ID NO: 1136 - DNA, 479 bp, Homo sapiens
ggcagagcccaggggctgtcataacccgtgctccagtgttattccaaagcccccgtggttttgaagctggatttgagaatgaagataattcaaaacgggatatttctgaggaagtacaactgcataggacattacttgcaagatctgaaagaaaattccccggtatcttcatcagggtaaaggcaatgagagtgactgtagatcaggaagacagtgggcaaagacctcaggggagaaaagaggaaaactgacactcccggrgaagagcttaagtgaagtcctaagtcaacagagaccttgcttgggagagagaccctataaatatctcaaatacagcaaaagctttggtccaaactcccttctcatgcatcaggtatcccaccaggtggaaaatccatataaatgtgcttgattgtgggaaaagcttcagtccggagtgcacgacttcattagacaccggagaattccacactggagag

SEQ ID NO: 1137 - DNA, 121 bp, Homo sapiens
  SITE (121): n equals a,t,g, or c
ggcagagggagagattagcatgaggataagaaaatgccttttactagtagataatagctctatggtttgtacaaaggagagattctcctgtgaccagagggaaaagagtaatctcactccn

SEQ ID NO: 1138 - DNA, 397 bp, Homo sapiens
  SITE (336): n equals a,t,g, or c
ggcagaggggcaatgtcaccttttacacaaatgccattttccaaatgcaaatggctcatgctctttagactactctttgaataacaagtaagatgcaatctagcaaaagtcagtcagggtgaaagagaattggttgcaaatgaggacttccctccccaaatggacagtcttctctgttgatcacagagggagcctgagtacaggyttggagaaatggcttaggacaggggaacaggggaagcacttacaattattccttgatttattcaaaagaactggggaaagatggttgtagttgtctttagcttcggtttcaactgagttttcgttttgttnaaacagtttcatggaaggagaaagcacccgtgatatatgggcagtgttcccctggcccaaa

SEQ ID NO: 1139 - DNA, 459 bp, Homo sapiens
  SITE (416): n equals a,t,g, or c
  SITE (450): n equals a,t,g, or c
  SITE (455): n equals a,t,g, or c
ggcagaggttttttgttccaagagagaagtgaagaatgtagttttcaaccaaagggatgacagctgatgagtgggctgagaaaatgcccaaaggcccgccgcctacctctcccaaggccacagccracagagacatcctggctcgcctccacaaagcagtgacttcccattaccatgccatcacccaggagtttgagaattttgacaccatgaaaacgaacaccatctccagagaggagtttagggccatttgtaatcgccgygtccaaatcctgacggacgaacaktttgacagaytctggaacgrgatgccakcaatgccaaggggargcttgaatacccggayttctgacaaggtcagttccagacagagcacaccaatggcactgggactcggcgggccaaaaggacagtgnctgcgctcgaagacaattgcttatgcatagactnacagnaagc

SEQ ID NO: 1140 - DNA, 316 bp, Homo sapiens
  SITE (229): n equals a,t,g, or c
  SITE (259): n equals a,t,g, or c
aggaaaggatcaggaagacaagacacakcaaaaaggggagggaatctacaatggaggacacaagaaagatcagctkgattaagtagtcatgattatscaaagccatatccagagaccaaggtgtaaagcaggtcggagaaaatkgaaatctcaagrttggctcagtcaaaaagraacattattcagtttgaacatggaccttgaaagggrtacgcagaggataggatgnagcaaatcaggaactttttttcaaaatccnaggggagggagataaggtttcagaggcttggaagtgagatcattcagacgcggggcc

SEQ ID NO: 1141 - DNA, 529 bp, Homo sapiens
  SITE (345): n equals a,t,g, or c
  SITE (367): n equals a,t,g, or c
  SITE (380): n equals a,t,g, or c
  SITE (475): n equals a,t,g, or c
  SITE (480): n equals a,t,g, or c
ggcacgagtgaagaacaccctggcctcctccatcatgtcggccaagagggcagaattgaagaaaacacatctgagcaagaactacaaggcagtttgcctggaattgaagccagagccgaccaaaacatttgattacaaagcagttaaacaagaagggcggtttaccaaagcaggagtgacacaggacctaaagaatgaactcagggaagtgagagaagagctcaaggagaaaatggaggagataaaacagataaaggwtctaatggacaaggattttgataaacttcacggaatttgtggaaattatgaaggaaatgcagaaagatatggatgaggaggtggacntttattaattacacagaagaantttaagcttcccntaggagagcaccaaggagcagcaggactcaggttgtgggaagattcacagggaccacagttcaggcccaggaattgttgggccatgggtcattgngcacnctgtttttcacaggagacgttgcaccccaaaaccaaacaggttcagggt

SEQ ID NO: 1142 - DNA, 432 bp, Homo sapiens
  SITE (338): n equals a,t,g, or c
  SITE (367): n equals a,t,g, or c
  SITE (372): n equals a,t,g, or c
  SITE (387): n equals a,t,g, or c
ggcacgaggacaggtggaggttgcagtgtggcgagattgcaccattgcactccagtctgggcgacaagagggaaactccatctgaaaaaaaagagaaattcttttattttctacttctcttcagatttgtcttatgcattttccaactatgtatgcatcacagctattctttttctgagttatagctacagttttcttactgttgtcttcatgccatttcatttcacatggtactttgtaggattttgatgaggaagttggtatttttagtgcacacaaaaattggtttaacttagagtttgcttatcagaaccagttaaaaggcagccagtgtgggntcacggcctttaatccccagcactgaggntaggnccaaggagggtgggntcacttgaggttcaggggttttgaggacccagcctgacccaacat

SEQ ID NO: 1143 - DNA, 347 bp, Homo sapiens
  SITE (246): n equals a,t,g, or c
atgcagaacgtgttgtcatttttcaagactggaaacagaagtctgaactagaactgagagccaaaaacgctgaggtcgggaaaacccagggatctatcctgtagtccccaggaaaacccctcccgctgagctggcatctgctgctgatctgaggaagaggcagtgccacactcaggaacaggaagaacacccactgtsttctgcgtgcaaacttccagccaccattctcaatgggaaaaggtctgnaagcttgccggggaacatttctacttacagggcattcacctgggagctggggttcaggacacttgccttttcttttgctttgttttcgttcttcatcccgg

SEQ ID NO: 1144 - DNA, 616 bp, Homo sapiens
  SITE (432): n equals a,t,g, or c
  SITE (496): n equals a,t,g, or c
  SITE (596): n equals a,t,g, or c
ggcagagtgacggggccgcctggacgacggttgacggaggtctagtgggacaatgtcatattataaatttggaatgctgaatagaaaattatagattttgatattgaaggaaatgaagcgagctaaatgaaaattcagctcgaagtacagcagtataaagacagacggcaaggatgatgagaaccaggggaatgatgatgcataatgaagataatagctgtttgcctgttccgttgttcaatcagaaaaagaggaacasmcagccattaacttctaatccacttaaagatgattcaggtatcagtaccccttctgacaattatgattttcctcctctacctacagattgggcctgggaagctgtgaatccagagttggctcctgtaatgaaaacagtggacaccgggcaaataccacattcagtttctcgtnctctgagaagtcaagattctgtctttaactctattcaatcaaatactggaagaagccaggtggntggagctacagagatggtacaaaaataccacttgaaacttggaataaaatgattttaagcctaatgtaacgaacaaacttagggcaaatgatggaaaaantcttggcaatgagttcggag

SEQ ID NO: 1145 - DNA, 379 bp, Homo sapiens
  SITE (377): n equals a,t,g, or c
  SITE (378): n equals a,t,g, or c
  SITE (379): n equals a,t,g, or c
ggcacgagcggcatccaagcctcaggcctgcccggacggggatcggcaggcatttcaaattgtggcttggactcacgcacaggccccctcctggttcccaggtgttctatgattttsgttggcatcgatggaaaggtcacctgtgccccccttcctccggaacatgcctggacaccattgtttgtttcgccatcgccccgtatgccctctgtgacacacattcacagcatctgctcttgaatacaccagtgccacgtgtggtcacactggctctactttggatttgccctttccctgtttgcacgtgtcctgcacttttaccagaaggtggtaaaagtaagagaagataaattttggacatgtaaaaaaaaaaaaannn

SEQ ID NO: 1146 - DNA, 336 bp, Homo sapiens
  SITE (110): n equals a,t,g, or c
ggcacgagccctgtcttcagaacagtgctgaaaaaratgcattgtccatactaatgacaacccactgtgtacctcctcccatgctctccagcggtgcagcttgtggtggntcagttgcctkwttttcctcgctgtgaacgcttttaattaaaaggaaggtggacaactcactgagggccctcarcccttcctcagctcacaagcggggacctcaggtcttatgaaacagtttcaggagggaaagggaagcaggatgagggaaacggaggsttccaatggccaagcattgggggagccccgggaaggaccacattttccarggattttccagggccc

SEQ ID NO: 1147 - DNA, 358 bp, Homo sapiens
  SITE (313): n equals a,t,g, or c
  SITE (332): n equals a,t,g, or c
  SITE (343): n equals a,t,g, or c
ggcacgagaataaattacccgcaattactcaaagttagtaattgaatttattttggtggtagagagaaaatttatccattttgctagtaatttgtagtcatttttagtaattgatagtaattttcgagtaaatactaattaactgtttcactaagtaaaagaagtatagagtaatgtattcactaggcattagtagtcccaatttatctttataccagcaagcggtttcggtggagctgataagatccagtggcattactctcgcggtgttaagctctgaaaaagtgatcaagactgtgtggcttgtccagantcagctgcacaatcaccgncaggaaggggntccccaggcttcaga

SEQ ID NO: 1148 - DNA, 267 bp, Homo sapiens
aatgccatgcccaccatctgcttcggatttcagtgccacgtcagcagtgtgcccgtcttcaacagcatgcagcagcctgaagtgaagacctggggtggagtggtgacagctgccatggtcatagccctcgctgtctacatggggwcaggcatctgtggcttcctgacctttggagctgctgtggatcctgacgtgctcctgtcctatccctcggaggacatggccgtggcgttgcccgagccttcatcatcctgagcgtgctcacct

SEQ ID NO: 1149 - DNA, 370 bp, Homo sapiens
  SITE (361): n equals a,t,g, or c
agacagcatgaaggctttaaacctctctgaacctgatcagcattggcaatgatcttctgcagatccaacaacagcacagaagratgtatcatcaggaacacatttgggatattgacacaacttcatctgcagttggcttgtcatcctgagctccgttcccaggcagcgtagatattgcacaggattttgctgaccagggagttgggttataagtggtaactccaacctcttaatactaacgacattgacagtaccatataatccatctrttacaccacacaggaaaatcaagcccagtggtacaggacagaagaactggstccagccaggattcaagcattgctttggcattgttccccantacctgggc

SEQ ID NO: 1150 - DNA, 590 bp, Homo sapiens
  SITE (551): n equals a,t,g, or c
  SITE (562): n equals a,t,g, or c
ggcacgaggggatattgagtgatgaagtggtgtctattttagataaggtggccaaaaaaggcctgttgataagaaaagtgaaaatgaaatgagaaagtgaatgacatggaagagtgtcccaagcagtgggagcagcacgtgcacagccctacattggaagttagttggtgatgttcaggaaccgctggtcagtgtagttctagcagacagagtaggaggaaagggtggtagaaaatgaagtccagaggtgattggcattgggtcagattatgcagagccttggaagccatggtgaggactttgaattatattaagragaaaaagcgggaagctgtggaggattttgaacaggaaagtcatgatctaatttatatcttaagatataaacacataaaataccgttttaaaatccataagtttctaataataataacaagctatttgatcacaattagaggatgctagtgaacaattcatttttctgaaagctagtaaagggcaagaataaaccatgtggcctggctttccacatgaactgtctattgggtaanccaaagagtgnaggaagagaaaatcttccttacagaaat

SEQ ID NO: 1151 - DNA, 518 bp, Homo sapiens
  SITE (505): n equals a,t,g, or c
  SITE (518): n equals a,t,g, or c
agttggccagcacaccactacgcatgtgtgtcaactctagggttgggtgctggggttgcggctttcggttaacaccgcaggcaccacacctgttggtgttcagatggagcggcacactagtcatcctaacagaaaagttccagccaaagaggaagctaatgctgtgcctctctgtagagcaaaaccctcccccagctatattaatcttcaagcaagttccccaccagccacttttctgaacatccagacaacaaagctgccctcggtcaagcccaaggaatgcctaggactcctggaatgtatgtatgcaaacctccagcttcagacccagctcgcccaacaacagatggctgttttggaacatttacaggcatctgtgacacaactggctcctgggaggggaagcaataactcttctctcccagccttatctcctaatccattgktaaatcacctgccccaattcagtaaatgaattgtggaacaaaaaaaaaaaaaaaaactngggggggcccggn

SEQ ID NO: 1152 - DNA, 458 bp, Homo sapiens
  SITE (388): n equals a,t,g, or c
  SITE (391): n equals a,t,g, or c
  SITE (457): n equals a,t,g, or c
ggcacgaggtaaatgggacatcgcagattgatatcagctggttctcttcattgcctcctccagaatctccagttccctgatgagttagagataaacaactcatgtgatgtcaactaaaatttgctatcgttttctgggctctgttgagtaaccagcctcactttttgatgagaaccaagaaacctgagcattgtataaaaataaaatataaattccactgaaatacaagcaagttatccttcattcacaggctaaatttgctttggacaagtgaatgggttaaagtcaagactgaatgacctggrgtgcatctttttgaaggaaatggagctgtgcatgtagaggaggatggaaataaggggaagttacaagacaaggaatccaagantantgacagttcaagaggttcacatttcagatccttccgcttcagcaatgcattaatttccagggtggnc

SEQ ID NO: 1153 - DNA, 549 bp, Homo sapiens
  SITE (407): n equals a,t,g, or c
  SITE (527): n equals a,t,g, or c
ggcagaggttccttgtcccactgccatgaaaattcaggcttgcagacaatttgaatgtcattgacagaagtgaagtttccaccaagattcagctgagaccttgccgctgcaggctaagatcctcaactctctagtgtggacgtcacatctggaatcttgtgtcttctgattgaggccccctggcacacagtgaggaggtaagtttatactgaattgagctccactattttgwtgaagttcttcgcactgaattttattttgttttcttaggaattaggtgccctggcatccttccattatctgatcagacttgtatcgttccttggtgaaactgttgtctagtcttcagctgttccttttatggtctgtctgcttaccaagttgtcaattagagaaaaagctacaanaagataccaggcagaggctctataattctatccttgtgctggccctgggggcttggaaggtcaagtcttctcaaaccactctctttgaaccaactctttggcttgagctccattacaaantatgcaaagacatcctccttaa

SEQ ID NO: 1154 - DNA, 404 bp, Homo sapiens
  SITE (306): n equals a,t,g, or c
  SITE (324): n equals a,t,g, or c
  SITE (326): n equals a,t,g, or c
  SITE (368): n equals a,t,g, or c
aaacttcacagcgacttggagagacaccctaccccccgattgccgtttgttgacgtggcaacagggtccctaggtcagggattaggtactgcatgtggaatggcttatactggcaagtaccttgayaaggccagctaccgggtgttctgccttatgggagatggcgaatcctcagaaggctctgtgtgggaggcttttgcttttgccctcccactacaacttgggacaatctcgtggcggtcttcgacgtggaaccgcttggggacaaagtgggccctggcaccccttgagcatgggcgcagaatnttaccagaattgctgtgnancctttgggtgggataattacttagtggatgggccatgatgtnggagggcttgtgccaagcattttggcaagcaagtca

SEQ ID NO: 1155 - DNA, 873 bp, Homo sapiens
ggcagagtggcggcgctggtgctggcgttggccctggaggacggccccgagtgatggctggcgcctgcctcccgggtgtctcccgggtacagatggagtcgtcccgcggccgccggcggcaaggtcggcagctgcgaggccaagagagaccccaggacacacacagctgcctcccggtgcgagaagaagaccccggcttgagagtgagatggcgtttaatgattgcttcagtttgaactaccctggcaacccctgcccaggggacttgatcgaagtgttccgtcctggctatcagcactgggccctgtacttgggtgatggttacgttatcaacatagcacctgtagatggcattcctgcgtcctttacaagcgccaagtctgtattcagcagtaaggccctggtgaaaatgcagctcttgaaggatgttgtgggaaatgacacatacagaataaacaataaatacgatgaaacgtacccccctctccctgtggaagaaatcataaagcggtcagagtttgtaattggacaggaggtggcctataacttacttgtcaacaactgtgaacattttgtgacattgcktcgctatggagaaggagtttcagagcaggccaaccgagcgataagtaccgttgagtttgtgacagctgctgttggtgtcttctcattcctgggcttgtttccaaaaggacaaagagcaaaatactattaacaatttaccaaagagatattgatattgaaggaatttgggaggaggaaaagaaacctggggtgaatacttattttcagtgcatcattactgttccagattcctatgatggatggcagactctttaataaattgcttactgatattatcttaaaaaaaaa

SEQ ID NO: 1156 - DNA, 490 bp, Homo sapiens
ggcagagggcaggtgaactacaactcccagagggtagcccgcctccgcgacgaccacagatccgcatcaaaagaactggtccagaactgcacatctaaacctaggttttctgctctccactatttaattcagctccgtgaagtaaaccttaggactcggggtagggatcgccttaccttctccgggaggcaaagcgcgtccacgcgcgccaccgccatatttgctgcttgctaataataccaggcaaccgtcctcccgcggctctgtggagcttgtagtctgaaggagggagccggaaactataactcccaggatgcacggytcccagacggcccaattggctgcttacgcctaatgatgtgaagctggagttagaatcttgagggtagtgagctcagggaccctggcccactcgcttatttgacagatgaagtcaaactgcgttattagatgatcatttcacttcttgtccagcgtttgcgaaaattga

SEQ ID NO: 1157 - DNA, 804 bp, Homo sapiens
  SITE (86): n equals a,t,g, or c
  SITE (190): n equals a,t,g, or c
ggcagagcgaccctcagctcatcgctatcatcgtggggcagctcaagagcaggggcctttttgacagcttccgccgggactgcaangctgacrtggacaccaagccagcttaccaaaacctgagccagaaagcrgataattttktktcgacacatctggacaagcaggaatggaatcctccagcaaacgnacaaccaactgcacgatggtctgaggcagagtgtggttcagtcagggaggtcagaagctggagtggacaggattagttctcaggtggtggatccaaaactaaaccacatcttcaggccacaaatagaacaaataattcatgaattcctggtggcccagaaagaagcagctgtgccagcactccctccagagccagaaggccaggaccctccagctccgtctcaggacacttcctaagaatatgcctgacagcttttgaaagcgctatttaatttttggygaggaaatggattcggttacataagrgtgcagtttcagattgaagrtaagccaagttcatcactgagctcaagatttccacctcgaccatgagcagtgaccagattgaaagggaagcaagttcgccagagagaaagttgaccgtggcaccctcctggcattgcgctgccatttggccagccttttcaagggcatgacaccaaacacacactacagagagggaaacactaccgcgacccaggattgtcctgaaacagacatctatacttgaacatggagactgcacatggattttagggtttgtgctctgagataaacgaaagctacagcgagaga

SEQ ID NO: 1158 - DNA, 354 bp, Homo sapiens
catgcttgagcccacttgcccaactcctgagatcatatcgggaagctgatcaccaatttcaggctgagaagcagactgcatggaacgcttgcagctgcaaaggagactgggttgtcggacattccactggtttctggctaatgtctacccgagctgtacccatctgaacccaggcccagtttctctgggaaagctccacaacactggacttgggstctgtgcagactgccaggcaggaagggggacatcctggggttgttccccatggtgttggttccttgcartgacagccggcagcaacagtacctkcagcacaacagcaggagggagatttcattttggcagcccacagca

SEQ ID NO: 1159 - DNA, 739 bp, Homo sapiens
  SITE (634): n equals a,t,g, or c
  SITE (648): n equals a,t,g, or c
caacagcaacacaggtttattacyagcaaaaccctgcggagggggaaaccagcttagtgtcagtgcccactgccgctcacaggctggggtaatcatagcgctgggagggagggctctggacagtatagcttgctgctcagtagaagatgataaggatgttcctgaagtcaggctgttgggcctttgccagcaggatgtgataaggatgtttctgcagtcaggtggttaggacatttctcacagcccgagttcccatggaatgttttactccaaccaggatcaaaacacaggtcatgaagcatacccagcccctgaaggcacgtccagggcyagaccagctggctggctgccagcawcctagtagagatcccagaagatcagataagcttgctcggcacaagtgcatcaatgaagtccawagtcttgaatgtggccttggcttgaggacgtcaacaccctggctagtgagggtgcagtgccgctccaggatgatggtgtctaragttgagcaccaggtcgcaggcccgcagaagcatctcccctcargagkgaggtagtacaggargtctgtgcacakgcagatctgctggtgccattacactatgagggcatggagctccaagatggtggcaanatagtcactagaantcctacagggtaaggctggggagaggaagtagctgcataaaacatatgataccctggaagcacttcccagccagagtctcaggaccacatt

SEQ ID NO: 1160 - DNA, 378 bp, Homo sapiens
  SITE (5): n equals a,t,g, or c
  SITE (164): n equals a,t,g, or c
  SITE (351): n equals a,t,g, or c
tgcanccggcacttcacgagctccgtggggcagagcaccagtgcagcaaaggcagaggcgaggaaccggcggctgcattctgcagatcactgaaggcacacaagcagacagttacccctcagtttcttcattcctttggcactcaccacacagacagcactttngtgataaagcaggccactttccgcaccacctgctggcagaagccgtagcacatgaagaggactgagttctcagcgatgttggcgattagtgctggactggtacccttgtagaagccacggaagcccacctgggagtaagtcttcaggcagcagtcggtgaggccccggtacaggtcagggacgtctncatcttcactttattgtgtaaagggtt

SEQ ID NO: 1161 - DNA, 379 bp, Homo sapiens
  SITE (342): n equals a,t,g, or c
  SITE (352): n equals a,t,g, or c
  SITE (367): n equals a,t,g, or c
ggcacgagctcgtgcgttttgcagacatgggcactgaagcttagaaagcccaagtgatttccttgggaacacccagcatacccacatctctggtgtgttctctttcgagggcttgattctctgggtatctttctgagacatgaagtatggtttaggatcagaggagaacattttgctgtgcctggacaacccaaaactagcatagcagaatttatatgatagagcctattttaatctgcagatgtcgagggaggtgttttaatgttttccttttttaaaaaggaaactctcttggatcaagcagaagcccaaaaatgagatgacggaggcattgtaattggnttgggtctgnttgtgttaggtctcngtgggggagccc

SEQ ID NO: 1162 - DNA, 356 bp, Homo sapiens
  SITE (310): n equals a,t,g, or c
  SITE (354): n equals a,t,g, or c
ggcacgaggaaacatctgccccacgtgcaggaagccgggtggtggccacgacagcgcgccactccgcagcgtaacctcgcagatcccctgcgtgtgtcctcgcaagactagctcaccgaaatggccgcgtccagtcaaggaaactttgagggagatattragtcagtggaccttgcagaatttsctaagcagcagccgtggtggcgtaagttgtttgggccagaatctggactctmagccgaaaagtatagcgtggcaacccacctgttcattggaggtgtcaytggatggtgcacgggtttttttattnccagaaggttgggaaagtttggttgcaacagctgttgggaggtngg

SEQ ID NO: 1163 - DNA, 654 bp, Homo sapiens
  SITE (407): n equals a,t,g, or c
ggcacgagccagcctggagaaggctgcgggtctccatccgtggcgcctcgcagctgcaggacgacgcgggctcttraggggcagagcagcgcatcatgcaggatcccaatgaagatacagaatggaatgacattttaagagatttcggcattcttcctcctaaagaagagtcaaaagatgaaattgaagaaatggttttacgtttacagaaagaagcaatggtgaaccwtttgaaaagatgactcttgcacagctaaaggaagctgaagatgaatttgatgaagaagatatgcaggctgttgaaacatatagaaagaagcggttacaggaatggaaagctcttaagaaaaaacaaaaatttggagaattaagagaaatttctggaaatcagtatgtgaatgaagtcncaaatgcagaagaagatgtgtgggttataattcatctatacagatcaagaacttgaatggaagctagcagaagttggagcaatacagactgatttggaagaaaaccccagaaaagacatggtagatatgatggtatcttcaattagaaacacttctattcatgatgacagtgatagctccaacagtgataatgataccaaatagagagaaatattcaaaaaatagcttttagtaaaaaaaaaaaaaa

SEQ ID NO: 1164 - DNA, 387 bp, Homo sapiens
  SITE (357): n equals a,t,g, or c
  SITE (367): n equals a,t,g, or c
  SITE (381): n equals a,t,g, or c
ggcagagctttcttaaagtaacaaatccaaagcacagagagcatgacgtctggaagttcagagtcagatataccacaagaaaacaaagtatcgaaagcgtccctggatactggacagatggcgtttaccttggcccaacttgagtccttggagatttgcctgaaagaagcagaagaaaaggctwaaagctttatctgaacagctttcagtctctgaaggaacaaaatcaaaactgcttgaacaagtatcccggctggagggaaaaactggaggctgtgggaccacaaggaagccatgggggaccatatkgaaaaatggttctttktgaaagaccatggcatccrgaattgcaagttnaagttaaagntttcccagggcaanttttgg

SEQ ID NO: 1165 - DNA, 350 bp, Homo sapiens
  SITE (143): n equals a,t,g, or c
  SITE (318): n equals a,t,g, or c
  SITE (323): n equals a,t,g, or c
aaggtttggtagtatccacagtttcaggcatccactggaggtmtatcccgaggtaagggagcctactatacattaacatgtgtcttggtaactcacagatatgctgcatgatagaactctgtgccctcacagataggtcccanctctagccttcccctgctgccatctgacatcctaaactccagctctgaatgtctgtctcctgctctggaatcttcagtggacttcggaaacttcaagtcagggacacctcttcagtttggcctcactggttcaagatttgagctggaatttcatgaccataatttcaaggcattncaganttcaaggggctgttttgtggggttttg

SEQ ID NO: 1166 - DNA, 378 bp, Homo sapiens
  SITE (361): n equals a,t,g, or c
ggcagagggsaaaatgcatgccgcctcccgacctcagcattccggaaaggtgcagtggacgaatcggactatcaaaaatagtactattgtcttccccgctggatatgtaaaacaacaccagaaggggcgtcaaaccaactgctaaatttgagggaatgttctcctctccccacctaccctggccccggatattagagacaataacactggggtgatgtacacccactgctttattgggagtaatatcatcctctcccttcctggrtattagggaacawtatcacactgtgcgtgttacgccggtcggggaatttcatgggatkttcatcckgttcctctgtggatatggacggaacaattntcaagggggatgtacaa

SEQ ID NO: 1167 - DNA, 340 bp, Homo sapiens
ggcagagcaatatgggtatgaatggcatctggaagaagacactcaagaggttcatctgtgacttcaaaggatttgccaaggatgaagagattgcaaaaatcaacatggctgtggttgggatggcaagcaactttaaccatggtgtggacaaggatgacattgatgagcacctagaggtggttcctgaggaactgtacttaatgagggsttgttgggaactgggaacagaacacatagctgaagaacaggccagagaaagggsaaacagctagagaaggaaaaagragkaaaccccaagaaaatttcacagtggargggttttagccagaagcttttggcc

SEQ ID NO: 1168 - DNA, 306 bp, Homo sapiens
  SITE (277): n equals a,t,g, or c
  SITE (296): n equals a,t,g, or c
ggcacagtggcagcagcaatggggcagaataaagccatgcaaggtggtacaacgtaatgctgggtggctgtctgcttcccctcatcgcggggtgtcagtggagggaccaataggggctgaacttttaccttaatgcaacaataatgaagtaaaatgagcagagtgaggctgtgagagtcagcactttgcttccatccacctccactggtgttggcgaaaaaagagggaaatggagcttttccccacacttgggcagcaaaggagcagaatgagacancaagaggaggtggtgctantcacagctca

SEQ ID NO: 1169 - DNA, 426 bp, Homo sapiens
  SITE (312): n equals a,t,g, or c
  SITE (318): n equals a,t,g, or c
  SITE (396): n equals a,t,g, or c
  SITE (400): n equals a,t,g, or c
  SITE (407): n equals a,t,g, or c
ggcagaggggaaatccaaataaaatctgaagtttagttaataattcacaatgatgttagcttcttagtggtgataaacatgctacggcaacataagatgctttcatttcaggaaaccggtaagaacagactgaattacctctgaagaaaaaatgaaaagacactgcgcaagwttttaataaagagaggaaagcatccaaaaagggctttctctggcctaaagagtccattttgcctactgtcataggacttgaaaatgatcattccccactccccagcaagacacaagcagggcagcagcaagatttattgngaagangcaaaargaacaaaagcttccgcaaccgtggaaggggacccagagcggggttggcctcttgatagcaatttttatttnctgnaacgcancccctcctcaataattctg

SEQ ID NO: 1170 - DNA, 591 bp, Homo sapiens
ttctaccattgatgaatatgttcatcgamttgggcgtactggtcgttgtgggaatactggcagagcaatttccttttttgatcttgaatcggataaccatttagcacagcctctagtaaaagtattgacagatgctcaacaggatgttcctgcatggttggaagaaattgcctttagtacatacattcctggcttcagtggtagtacaagaggaaacgtgtttgcatcagttgataccagaaagggcaagagcactttgaacacagctgggttttcttcttcacaagctcccaatccagtagatgatgagtcatgggattaaagccaaaacatccttcaagtctgtggttttgatgcagagaagaaaatagttttgatttttgagtttttaacagaagtataaaacttaacattctcatagctcctgtccttgtattctcactcctacacttaaaaaaaaaatccttactgactagttatgtgagatgctaaaacttacaacattgcagttactgatacaaatggtgttaactgggaatattaaagcattctaaatgtcaaaaaaaaaaaaaaaaaaaaaaaaaaaaaaaa

SEQ ID NO: 1171 - DNA, 424 bp, Homo sapiens
  SITE (413): n equals a,t,g, or c
cctggcctcctccatcatgtcggccaagagggcagaattgaagaaaacacatctgagcaagaactacaaggcagtttgcctggaattgaagccagagccgaccaaagtaagmagcccttttgaggccatgcaggcagccaggcctgagatccatggggaagtgaccaggagtcaggggtcatttgctgatcctagtggccaagatttgtcccagacatttgattacaaagcagttaaacaagaagggcggtttaccaaagcaggagtgacacaggacctaaagattgaactcaggggaagtgagagaagagctcaaggagraaatgggaggagrttaaaacagttaaaggttttattggacaaggwttttgttaacttcacgrttttttggaattttggaggaagttttggtngggagttggcc

SEQ ID NO: 1172 - DNA, 718 bp, Homo sapiens
  SITE (629): n equals a,t,g, or c
  SITE (666): n equals a,t,g, or c
  SITE (695): n equals a,t,g, or c
  SITE (716): n equals a,t,g, or c
  SITE (718): n equals a,t,g, or c
ggcacgagctggctcagggctacctccttccgcctaggacccccccttcgggggcagatggcctgtcggagccagagggcatctctctgaagcgggtcgctgtggtggaagatttctttgacatcatctactcgatgcatgtggagagctcagcggagccaggcaaagcccccaagcacgctgggcagaagaaaacctaccgagcgatcgcagagacctatgccttcctcccgagagaggccgtgacccggttcctgatgagctgkacsgartgtcagaagaggatgcactttactccaatggcctggaacccaaagaaaacgagcctccatctccactggtctctgggattattgattacaacatgcccctcacctccacctacctgaagcagatgaagcttcgagtgatgaattcccaggagcaggatgagacttctgtgagcagcgaggattttgatatgagcgactccacatggatgtcagctgacccgcacctggccttcagcctgagcccagccaggacgagaggatgcggagcccgcagaacttcacagtcaagaggacgatgctgcgtagaagtggaatcactgagtatccttgtccgctggctgttccacaagctcgggntttatcatccacaatgagcgcttatccaacttattanttatggtggtctatcatcgataatagacncattggaccaaaaaaaaaaanan

SEQ ID NO: 1173 - DNA, 446 bp, Homo sapiens
  SITE (381): n equals a,t,g, or c
  SITE (382): n equals a,t,g, or c
  SITE (420): n equals a,t,g, or c
  SITE (445): n equals a,t,g, or c
ggcacgagcttcagagtacgcctctctgcctcagccaagctctctgttctggaacctctgcaggttatttctaattgagaaggtgcagcaaagcagttagggacctggactctcaaatccwgtacagtcacatgttctcagccacacgacctggggaaggcacccagccactcgcagctggaaggaggttacagaggtcaccgaggcacagccctcacaggagatgtgggtggcatgggcactcaggaagttagctgttatcagtcattaattccttgacacccactctgcctgtttgttccctcaaacttcttgcaagagaactatgaagaggttggggttcttgctggtttatggtcattactgatgatgtcacgattnnccattcaggggcccagggcaccaggcaattagcagctncacaggattccaggagttttatttna

SEQ ID NO: 1174 - DNA, 519 bp, Homo sapiens
  SITE (516): n equals a,t,g, or c
ggcacgaggaaatcatcactcagttcaacatttattgaacaccacaatgctagaatctaggaattcaactgtgaataaggaagttatggtgtactctctgtaaacttctcataaataatgtctaaaatacaacaacattcctattgatgtatattgcttgcttccaaagactatgacgcctgtatcctcacacgtacatcacctttatttttcctattcaggagtggccacaggtaccaaaggatggcacatcattaccaggaatttgttgatctagtgcagtggractgcaaggcagagttcagcggtatcgggatcaaaggrttaggaagccgcagctttaagggaggcaagcagcatgagaagactttgtggaggcagctctgagcattttataagaataaattgaggccctgcaaggattaaggaatctgtacaaagtcacacgcaggctgaactatgaaaagcaactagaggacattcttccccttgaagataatcacttttattggttgncgg

SEQ ID NO: 1175 - DNA, 474 bp, Homo sapiens
ttttttttttttttttttttttttttttttaaaagttttatatgatttaatttattagtttcattgtagaacgatttttaaccagtcttgtccgagactcagaattttggttgacttttgtacttaaatttaccacggaattttctttccacttgtaagatttaagtgtttaacaagtacttgctggtaaaggcgctaacaaaagcgttgctgagtaacaccagaactgttcacacactaaaaggctgagacgggggaagagcagacgagggggatcttctctggggaaaagatagaggctaggatgtgccacccctcggaagagcagatggacagcacgactgctgccgtcccagccaccacggtcccagcaccagacaccggcttcgagtggtttcttatcttcacttcttcctcattctggcmkcccaatcttgtgtatgccacctgccaacagcaacgccagccaactgc

SEQ ID NO: 1176 - DNA, 406 bp, Homo sapiens
  SITE (389): n equals a,t,g, or c
  SITE (392): n equals a,t,g, or c
  SITE (393): n equals a,t,g, or c
  SITE (400): n equals a,t,g, or c
ggcagagcagcccctgagacctcagcccctgtcaacagtggggaccccaccaccaccatcctggagtgattccaactcaactcaaaggacacccagagctgccatctgggttgaaggaagggagccatccttactgttcagagacagcaactccctcccgtaactcaggctgagaaggaaccagccagctcttacctcctcctggttgcttttcttgcccccaccccaagtttatttttgttttcccccggccccctacctctgaagccattttatgatctgtcatgtgccacctgagcctccagtaaaaacaaaaacaggcaaaaaaaaaaaaaaaaaaaaaaaaaaaaaaaaaaaaaaaaaaaaaaaaaaaaaaaaaaaaaaaaaanttnnggggggncccccc

SEQ ID NO: 1177 - DNA, 426 bp, Homo sapiens
ccagctcccgcggaggaggctgcgggcggcgccggtgakagggaccctgcagctccaggtagacgcaggagcgcgggactcgcccctggcagggtgaggtagagccggaccgtttgctctctgctgctccccgggactccagccgcgcccgtgagaagaggcagcacggcagcaaaggccaaggagcggagggagttgaacttgtcaaattaatgtctacagtgatatgtatgaaacaaagggacgargaattcttgctaaccatcagaccttttgcaaacaggatgcasaaatccccttgctatattcccattgtgagcagtgccaccctgtgggatagaagcacacccatgcaaagatcaagctattgaagcttagggaggtgaagtaattttcctgggatcacatagccagtaaatggtagag

SEQ ID NO: 1178 - DNA, 258 bp, Homo sapiens
  SITE (105): n equals a,t,g, or c
  SITE (151): n equals a,t,g, or c
ggcagaggtcaaagtctgtctggactccaaagtctacattcacttctcctaatccacgacctctccaagctgcagatatgtcaagggagcaccaagcggtcagtntgwaytagaacgctggaactctgaatgccaggctggggaaacgtgnaattccattctggcttgaagggacacacagaagctcctgagcaggaaaagccatgatgggwttttcacttcaggaactggcatttcaaaaacatgcaagaggccagg

SEQ ID NO: 1179 - DNA, 355 bp, Homo sapiens
  SITE (286): n equals a,t,g, or c
  SITE (329): n equals a,t,g, or c
ggcagaggcagccaccataaagcctgctagctaaaaaaaattttacatctctcagttcattcggcacagacccctgcctcattcacctgtgactctgcttgggaaaattcatcagttacaargcagccaatgcaattatctcaaggcattgaattctgcatcttttagtggaggaaaataactgaacatggttttcttctgaggacacaaagtccaaaggccaatcacacacctcttacatcgatctcttgggaaattggaaaatggacctttggaaatgctgggnttacatggggaaatgccataatttcaaggtttattctatgggnccctggacaatttgggtttttggcca

SEQ ID NO: 1180 - DNA, 420 bp, Homo sapiens
  SITE (69): n equals a,t,g, or c
  SITE (399): n equals a,t,g, or c
ccaccaggtggagagccactgctggaaactgagtggaatcccccgggactggcagggaattcgggcagnggtgcctgtggaaagtggggttccgcagccgccggatcccccagtccagcgcgacgaggaagaggaaaaagaagtcgaaaatgaggatgaagacgatgatgacagtgacaaggaaaaggatgaagaggacgaggtcattgacgagctttttctaaaggctcctgtgaacactgcagaactaacagatctcttaattcaacagaaccatattgggagtgtgattaagggtacccagtgtgttgaacaaattcaagagttggttctacgcttctgtgagaagaactgtgaaaagagcatggttgaacagctggacaagtttttaaatgacancaccaagcctgtgggccttct

SEQ ID NO: 1181 - DNA, 711 bp, Homo sapiens
  SITE (425): n equals a,t,g, or c
  SITE (641): n equals a,t,g, or c
  SITE (661): n equals a,t,g, or c
  SITE (678): n equals a,t,g, or c
  SITE (691): n equals a,t,g, or c
agctttcctgtaccttctctgcaggtagatgggacaaatgagtgtccggatcagcgggagtgggaaattgaaatactacaaagatctgtttaatcctgataccaactaatctccctttcaagggagagtctgggaagctgtacagctcatttatttttaaactttttctgtttacagagatctgttggtaatctgaggatttttattctacgtcgtcttgacagatggaaaacctgaagtaacttcgggctaaccttgtgtttttggaaaattagtagacttggtggtgaagaaactgggaggagtaggatattagctaactttgcatagccacatatagagcgtcgcagctgcattccaccaaagaggaaccaaaaggcctgtggtgttcccagggtacatattcatgccagaagtgaagtgcnttggtgaattcgkttcctgaaagtttatcgcatacttgtactgggttaggtttttagaacttcagccataaaaatgggcagaattttccttgatcatatcggtggtacccgtctgttttcttgtgcaaactgtgatacgatcctgaccaaccgctcagaactcatctccactcgtttcacaggcgccactggcagagcatttctttttaacaaggnaaggtaacctgcagtacagnggaggtcaagatcgggncatgctcactggncggcacatggttcgaggatg

SEQ ID NO: 1182 - DNA, 630 bp, Homo sapiens
  SITE (62): n equals a,t,g, or c
  SITE (518): n equals a,t,g, or c
  SITE (572): n equals a,t,g, or c
  SITE (575): n equals a,t,g, or c
  SITE (580): n equals a,t,g, or c
  SITE (595): n equals a,t,g, or c
ctgtgtccctcctcccccgcggtcctcgattttcaaaagaaacagccagacgatgattccgntccaagtacaagtaacagccaatcagatttgttttccgaagagaccaccagtgacaacaacaatacctcgataaccacggcaactcttagtcccagccagcagccgcttccgacagaaytgaatgtaacttcaccragtaaagaggagtgtgggccatgcacagacacagctcatgtctcrttaatcacaccaacmaaaagatcctgtggtacagattcacagtctgagaatgaggcttcrccagtraaasggcacgactactkgagaatacsgaacgwcctgaggaaaccagycgatctaaacagaagagtcgacgtcggtgcttccagtgccaaaccaaactggagctggtgcagcaggaattgggatcctgccgctgcggttatgtgttctgtatgttacatcgccttccccgagcagcatgactgttacgtttcgaccacatgggccgcggncgagaggaagccatcatgaaaatggtggaaattgggaccggaaatgggggggtnctntccancgcattggggagggnggtccctaaaggccaggcacggcggccacattacg

SEQ ID NO: 1183 - DNA, 353 bp, Homo sapiens
  SITE (167): n equals a,t,g, or c
  SITE (194): n equals a,t,g, or c
  SITE (247): n equals a,t,g, or c
ggcacgagcagccgctcttccgggagcgcccgcttaggactcactcccgcccattccttacctcgatggaatccttagcccttagagagagggctaaaaaacaaataaacaaacaacagacaaacaaaaaaaaaaccaaattccaaatggcccccggaccctcccgnagatgcagggcgcacactggccagttntaaccatagacttgactgcatgttgacaagggtttccaacctagcttccccgnggtactgcatgaatcagtccttgctcagatggtggttgctgtaaatagctgcaatttccctccttccgtctcaaagcacggatgggatgggtttgcagcagggact

SEQ ID NO: 1184 - DNA, 452 bp, Homo sapiens
  SITE (437): n equals a,t,g, or c
  SITE (440): n equals a,t,g, or c
ggcacgagccgcgctccgcagctcctgagggctttcgagcccagatggtcatctgagacgagaggtggcggcgaaggagagtctcgcctgtcackctcccggagcaggggcttcatgaggtggccatggaaacagcctggcagactcccatctctcctggtgccatctccggagcggaaagtggagcgccccgctggcgaccaaggccgcactgwgagccctggtttggtcaacagttgggctccaaggagccctggtattcttgaacatgcatacctttcccagcgtgagggacatggaccgtgccgtgcgagggaccccatyttctkcagcaggagggagcagagaagagaacacagccaccctcatcagccagagttcaaaccctggacagtgcccatkgagagwtytkgtccaaggmaccaactttttccttnttngcctttggaaag

SEQ ID NO: 1185 - DNA, 318 bp, Homo sapiens
  SITE (268): n equals a,t,g, or c
  SITE (308): n equals a,t,g, or c
aaaaatgtaagggggtcactgcacaaatcagtcctcatcaccgatgggaagacatgcccattagaagagcacagaacccacagcagctgtctctgcctggagggtgcggcctggtcctgcttaaagccgcctatgtcttgcagcggtggacagaatagggcttcaagggggctgagtctcagtccacaccaagtcccygattccctgggcagcttggagtgagtgctacaaagggcgcctgtgctccacggcaggggagcccagcctnggattccagagcttgagggtcttgaagggaaggtgggttntgcagccaca

SEQ ID NO: 1186 - DNA, 339 bp, Homo sapiens
  SITE (134): n equals a,t,g, or c
  SITE (326): n equals a,t,g, or c
ggcagagtttcctttcttctaggatggcttgatcaggaggctcttcaggtgtggctgccagcagtaccaaacttttccttacaacttagcaactctattccagcaaagtcccaggytagtcacatgccatgctnaatttctggaatctgtcaccatggactctgtccaagtctggcttctgtcgagctctgargccagaacgtggaaattgggccccatggaaaccacatgggcccgaggtaggggaaagggaccgrtttttccaaaaaggaagaggccttttttttggaaaccaaaggggaccatggtattaggggcaaacatgncttttcagggaag

SEQ ID NO: 1187 - DNA, 425 bp, Homo sapiens
  SITE (355): n equals a,t,g, or c
  SITE (367): n equals a,t,g, or c
  SITE (392): n equals a,t,g, or c
  SITE (425): n equals a,t,g, or c
ggcagaggctccccagagccatcggccaggtaccaaagctcagctgtatggattcccaacaggaggacctgcgcttccctgggacccattgttgtactggattaacaagcgacggcgctacggcatgaatgcagccatcaacacgggccctgcccctgctgtcaccaagactgagactgaggtccagaatccagatgttctgtgggatttggacatccccgaaggcaggagccatgctgaccaagacagcaaccccaaggcggaagcccctgctcccctgcaacctgcactgcagctggctccacagcagccccaggccagatccccattcccacttcccatctttcaggaggtncctttgccccanccttgtgaactacccccctgctganccactctgtctctattcgtttggcaactgtccn

SEQ ID NO: 1188 - DNA, 440 bp, Homo sapiens
aggatcttctcattccagtcctttcgcccacgcaggaacgatgcctctggaggtggtggtggagctgcagatccgggcgatttcttgcccaggagtgttcctgcctggcaaacaagatgtgtacctcggggtctacctcatggaatcagtacctggagaccaacagctttccctctgcgttccccattatgattcaggagagcatgagatttgaaaaggtatttgaaagtgcagtagatcctggagctgtagtagaccttttggaaagcttcctagccaggtttgaattaatacagytagttcctccatgtgggatgagttggcctacttacggaggaaaacacamgagattttcttttcccagagcccaagctkgacamcttcgsaccytaggaggtgtwagggaggtgttcatgaagacggttctgggttttccaggg

SEQ ID NO: 1189 - DNA, 253 bp, Homo sapiens
  SITE (110): n equals a,t,g, or c
  SITE (244): n equals a,t,g, or c
ggcacgaggagcatcaactcccagagggcagggatcccggccctgtgcaggactctgtggctcctggtagaagacaaccacccttacagatggaagatgctggaatacgngttctcgctgcaagtgtgtttgagccttggagccaggcagtgtttgcktgtccccctgggaccctggaccaccatgaggagagyttgcagtcctcacaagtgcagcttttcaaaggttaagggtcaagagggtnaaggacaac

SEQ ID NO: 1190 - DNA, 276 bp, Homo sapiens
  SITE (268): n equals a,t,g, or c
ggcagagggcccccgcactcccgccgctggattccaccgagattcaagctcccgggatcccccttcccgggcggtcctgagccggctagtctccagtgagtgcaatctacggatcagtcwctgatggtgggtcgttaacctcagtggggactccaagatttccatgaagaaaatcagttgtctttcattcaagaattggggtctggctcagaattcctgcagctggtgaaaatctgttttctagaagaggtttaattaatgcctgcantctgccct

SEQ ID NO: 1191 - DNA, 403 bp, Homo sapiens
  SITE (376): n equals a,t,g, or c
  SITE (379): n equals a,t,g, or c
  SITE (381): n equals a,t,g, or c
  SITE (396): n equals a,t,g, or c
ggcacgaggtccacggggccagcaaaacaccttcatcccaatttcatcgcattccttctaagtatccgaatttraagaaaaagcaaaactgttgagtggtcagatggcccccacctggcgttgccggtgagcggaacccagtgctggttatttytggctagaggcgcaccgaggccggccctgggtctggccctggggtggcgccaccaggttacttgcccaccggtgaaggwtggcagctttacagctccccgacgcatcaractaaagaacgttggccagggtctgcaccggtggttytyaaagtwcagtccccagatccgcagcatcagcaccgtcttgagaattattaggaaatgcacattcttgggccctnggntnaggcagttttggcanttggggc

SEQ ID NO: 1192 - DNA, 359 bp, Homo sapiens
  SITE (115): n equals a,t,g, or c
  SITE (272): n equals a,t,g, or c
ggcacgaggaaaccttggagagcgctctcatcgccctcractcggaaaaacccaagaagcttcgcttscacccaaagcagctgtacttctccgccaggcaaggggagcttcaganggtgctcctcatgctggtggacggaattgaccccaacttcaaaatggagcaccagaataagcgctctccactgcacgccgcggcagaggctggacacgtggacatctgccacatgctggttcagttctgcaggctgggaagcccaaggtcgaggggntgcctttggtgacttatggtgaggacctcgtgctgttcccgaacacagccaggaaccacgccaagagggaagatgttccagcacagc

SEQ ID NO: 1193 - DNA, 432 bp, Homo sapiens
  SITE (399): n equals a,t,g, or c
  SITE (420): n equals a,t,g, or c
  SITE (423): n equals a,t,g, or c
ggcagagtgccagttaaggttgtggaatcaaagagcaaaggctgttgtgaagtggaatatcaggctcaaatggaggtccctcccgaatgagcactgacacctgtgtgcccggacatccacgagggccccaacacctgtgctcctgacagctccatgcactaagcagggcacagtctggatccaggggactgactgtctctggcattgagcggttggtaatcaataccccaccctccctgttctcagtcacttggggacaaaaaagaaagcctgcagaacacgactgctggcccacctgccagagtagccaaggaaacaggatgcccgctaaagcatgttaaggaaggtgtggagcagctgctgggaactgtcttgatttaaaggaagacatggaggctnctgtatgctaccgtattacanggnccaaagcag

SEQ ID NO: 1194 - DNA, 749 bp, Homo sapiens
  SITE (742): n equals a,t,g, or c
ggcagagacgctcaagtctctaatctgggaaaataggagacctctcaccctatttgtgtcccatctcttagggacaaccgttcttcattatcttatgtctagtgtcttaagaaccattgcttcatgcatttgtatgctagtttgttgtttcaggcagttgggtgtacccttccctgttatgccagggaaactattaataaatcagggagtaaaataaatttaatggtcatcactggaaaaatagaatgttcaagtaacccacaggaaagtagaaaaaagagaatgagcagaatgagaaacaggaaacagaagacataataaaattgcacattagacttaagccctagtcccccaatatttaccttaaatgtaaatggtctaaatgcaccaattataggacagagataactgcccaatttacagattcaacgctattcctatcaagctaccgacatttttcacagaactacaaaaagccattctaaaattcgtatggaaccaaaaagagctcaaatagctaaagcaattctaagcaaaatgaacaaagctggaagtatcatattaaccaacttcaaactatactataacattacagtaaccaaaacagcatggkactgktagagaaacagacacatagaccaatgaaacagaatagagaacccagaaataaagctgacacctacagccacctgatctttgacaaagcaacaaagtaagcaacagggaaaggactgctattagnaatgggc

SEQ ID NO: 1195 - DNA, 1126 bp, Homo sapiens
ggcagagggaaaattaaggggctgattaaagtgaggctgaccctgaaaaatgaacagtattccatccacataagacagaaagctcaggagacgttattagtcatggtccccacccaatgacagtgacttgtccaccatggagatgctgactgcggtgatggagtggaaatgagccccaggccaggcacccacccagctccaccctgagcagctgcatgtggttgagcaggtcctttaacttctttgggccagcctctttaaattgtcagtaaaattgtcatgaggrttaaatgagcctcacttttttcatctgcaaaatggtaacaacgacactttccctagaggggccatgaagatgaaatgaaataataagcatgacggatggtcctggtgctagcctcacagctcacctgttcctagagcaatgtcttcccagcagcagcagcggcagcagcagcagtgcccaccccagagggcccagcagcagcaagtgaagcagccttgtcagccaccccctgttaaatgtcaagagacatgtgcacccaaaaccaaggatccatgtgctccccaggtcaagaagcaatgcccaccgaaaggcaccatcattccagcccagcagaagtgtccctcagcccagcaagcctccaagagyaaacagaagtaaggatggactggatattaccatcatccaccatcctggctaccagatggaaccttctcttcttccttctcctcttccctccagctcttgagcctaccctcctctcacatctcctcctgcccaagatgtaaggaagcattgtaaggatttcttcccatcgtacccttccccacacataccaccttggcttcttctatatcccaccccgatgctctcccaggtgggtgtgagagagacctcattctctgcaggctccagcgtggccacagctaaggcccatccatttcccaaagtgaggaaagtgtctgggcttcttctgggttccaccctgacaagtagggtcacagaggctggtgcacagtttctgcctcattcctctccatgatgccccctgctctgggcttctctcctgttttccccaataaatatgtgcctcatgtaataaatgtgtctgcttcctgggct

SEQ ID NO: 1196 - DNA, 537 bp, Homo sapiens
  SITE (348): n equals a,t,g, or c
ggcacgaggtgaacttgggtgggaaaaaatacatttttgtttttactaacctctatgtgaaatgaaacattttcttcaataacaactatgcttctgcatgtaaattgcttaatggctgcttccccttaggtcctgccttatcagggggatcttcagggcattgccagcaacaccatcagtcaggaagaactgaaaagattgcagaatcctctagaacaagttaatgatggaaaatattcatttgaaaatcaccagctggccatggatgcagagaataatattgaaaagtatcccctcaatctacagcccttggaatcaaaggtgraaatcattcagcgagcatggcgngagttacctgcagcggcaaggcccctgggggaagargagcccgtccccaccctytgtctyctcagagaarctgarcagcttctktcarcatgaacaccttcttccgacagcagcacacccgtgagtgtccatgtttctttttctatgtcctgacttgacattccaactgaaagcctagactttggttct

SEQ ID NO: 1197 - DNA, 746 bp, Homo sapiens
  SITE (644): n equals a,t,g, or c
  SITE (676): n equals a,t,g, or c
  SITE (677): n equals a,t,g, or c
  SITE (702): n equals a,t,g, or c
  SITE (714): n equals a,t,g, or c
ttcccaccgcatcgtccgcctcagccagaaccttctggtccccgcccccggatagggacccaggaggcccaagccccttcttccggcggggagtgggagcctctcggatctccgtttacagttcaggacctcagctgcactttggcgctaacgccctgtttcccaggactgtcaatggcaggataccagctctggtcaccatggaccccactggatgagagtttccaatggctgcggcacacgacacctacaccttcctccaagcacccattcaaggcctccccctgcttcccacacacaccgtccgaccttgaagtgcagctgtgctttcaagaggtcactctagtcctagacagcccattcctggaatctggagtgagtcccaagttaccctgccacacatcagagttgcgcacgatgaacaacaaaggactggtcaggaagccccagcccatccgcctcagtggagtagattctgtctttggcagggttatcacagctcagccaccaaagtggaccgggactttcagaagtttcagacaagtcaagccttttgcaaaatcattagcagggagcaccagtggcccattggactgaaggagcctcagattcagatgacagtcactatgtgcaaacagatctgngctctatctcttgtgatgcaacttacaaaagnnaccttgcttgagactcaagaaaggnctattgatccantactacacatgccttggatgactaagtaagaa

SEQ ID NO: 1198 - DNA, 426 bp, Homo sapiens
  SITE (273): n equals a,t,g, or c
  SITE (354): n equals a,t,g, or c
  SITE (386): n equals a,t,g, or c
  SITE (421): n equals a,t,g, or c
cacggaggaggtggtctccacagtgattttaaatttaatatttctctcataacctttgtgagataaaagaatcttcatccttttaactttgacgagggatgaaatgaagttttccacaacatttgggaagatttacaaggtatactccatttaggcaaaaataactgtcagggaatagtcattgtcaagagcagtttgtattgcaacccacaaattatacctctatgtcggtccaggaaatccttcaatttaccaagagattatgtttgaaantcttaggaaaaattaaacaatcctgaaaaacttagttggccgggcagggcctggacatacagttttcagtacattgggggncacaaccaaaccagttttgggaagtctggcancaccattacattacagggccaggttacagggcccnggttt

SEQ ID NO: 1199 - DNA, 267 bp, Homo sapiens
ggcagagccctggcctgcctctttgaatagtttactctgtctacattctcagctggagctggcacatggtcagctgtgaatcggaggctccacccttgccctggcttcctaggccttattctggggctgatagaatggagaacgcgaatgaaccaagaaactcaggcacagagaagttaagcaacttgctcaagatcacacagtcattragtggcaaaactgggaatggaacctaggcattttggctcgtctttctcctaaccaaca

SEQ ID NO: 1200 - DNA, 581 bp, Homo sapiens
ggcagagctgaacttgtggtctcctcagttgatgaggtgaagaaagaaagcctggagaattatgcacgagcttctcactgtctcagcccacaagtaacacacctctttccctcacagcccacactggctggaaccaatcacatagccctgcctaactgcaagggaggccagaaagtgcaacactttctcatggtcacgggtgagcacgaaacatctytccaaatatgggttgggaagrttaagagactagtccagaagaaaacagtctccagggagaaatatatctgggaataggaatcgagaaagcaaccaagagagcagaactgagtggatgagaggaattgtcagaccacatctgcagctctgattagtcaaatccgaaatgtgcccgttgatctattattccgtggaaatactggaatcaccagctcaataataagaggaaagtaaataatacaatacttgcgtggataattcccctctgctcataccttcattcaggtcaacatagatctatcatactcctacagtgtataagggacgtgctaagcttgaagtacattcattctaaaaatcaaaat

SEQ ID NO: 1201 - DNA, 430 bp, Homo sapiens
  SITE (4): n equals a,t,g, or c
  SITE (389): n equals a,t,g, or c
  SITE (415): n equals a,t,g, or c
gggnggccgcccgtgcgccggccaggtccccggcttgggcctccactcaggccagtactccgggcgcggccctggcggtccagcgcgaatctccagaatctggtctccagaaacattattctaatctgtgtatggaaaaatcccagaaaattaatccttttatattgcatatactccaagaagtggatgaagaaattaaaaaggggctagcagcaggaatcacattaaacattgctggtaacaatcgsttagtgccagtagaaagwgttacaggtgaagatttttggattctttccaaaattttaaagaattgtctgtatattaatggttttggatgttggatataaccttctatgtgatgttgtgcatcctatgctgcgaacttcttnagaaccacttaatttaattccttaancccaaggttaaaggt

SEQ ID NO: 1202 - DNA, 700 bp, Homo sapiens
  SITE (689): n equals a,t,g, or c
caggacactccagaggttgacgggtgcagaaagaaggcgggcgctttcctggaagagaagtgggtcaggcccaactgaaaagcaagcctggcaccagaagggggacattccggaactagatatgaagagacttttctccctgaagttcccggacccaattagatgttgtacccaggctggttaccctggtaacaggcgtcgcggtttgtcaaggaactgagagaagaggcttaagaaaattattcaccactcataagtcatggagacatcctcaaaaggtctgcttacccaagttactcagttttggaacctcctagatgatctagctcagagtgaccctgagggctatgagaagtttattcagcagcagctgaaagaagggaaacagctctgtgctgccccagaaccacagctttgtctacagaccaggattctgaaaccaaaagaaaaaatactttttatcaacctgtgtcagtggacaaggrtcccagctccccaatcaaccactcatccagtacctctaactgttggcaaaccagaagatacaactgagatatcagatgcttacacagtcattgatgttgcctacaatcctgatgttcttcatgyagcagaaaaggmccaagtgaaaaaaaatcagttaattcagatggccatgaaatgcattgggggaaattccagttaacccnttaaaattttt

SEQ ID NO: 1203 - DNA, 249 bp, Homo sapiens
tcgtgccgatgcatatcttcccccaaatagaggagacacccagagccaaatgtacaggccttcaacacaaagaacaaaagaagacaactgtcctggttgtccaagctgcaatcaccatggccagacgggtacagaattcagaactgtgaggttctacctagccaggtttacaaggcacttttcaacagataatttatcaacccrggcctgtatgtccaggtgctggaggaggaaagcgcctatgctcaa

SEQ ID NO: 1204 - DNA, 326 bp, Homo sapiens
cactcctcatgttctcagtttgttcttctctgtgatacaaccagcatcacgagaacagccagcagcagctccagcgtgataaaattttcactcctwgacaagtgtaagaagccggaaaactgtgcccagccagaagttttgtgtcgcccctttgagatgctgtctaacctccacgagctgcttccgaatcacctgatggagacgctttattcccscaagagtgaagaggacaagaaaaaatgtgagaatctgaactctctggsttagaaagaatcttagcaagacatcagttgccaaaagagrttaatctgaccccaaagcccggt

SEQ ID NO: 1205 - DNA, 397 bp, Homo sapiens
  SITE (130): n equals a,t,g, or c
  SITE (146): n equals a,t,g, or c
  SITE (151): n equals a,t,g, or c
ggactgtgctgtgcctctctcgcccacattttccccaaggcactctcaggaacctggcaacaggtaacgtggcaaccttttcctgtgcagctgtttttcttcttcattcttttcactcctcgttactctnttttttttcactctcnccccnacacaaaactaggaactttgktattctacttattttyctgtacyctgtctgtttgcacacagatggatatctgagagccagcgaactttctttacctccctagtatcatttcatgaaaattagtagcacctgcacaatggggccttggagacaggaataaaaggaaaaatctggaatggaatcacatgacgcaacaggctatgaagactccctgcccggctgctatatgtctggtaaacagaataa

SEQ ID NO: 1206 - DNA, 328 bp, Homo sapiens
  SITE (125): n equals a,t,g, or c
tgggctctgtggtggttctactgcctttaagagccttatgtcccttggttatcagaggctgagcctttctccagagcatcaggaatgccaggactcttcattggggtgttagctttgtgggaggngctggaggatatgggaagtaggattgggaaaaagaggaattgaagcctgtgattgaaactattttgtctctctccttgttttagaaaattaaaggatgggagtggtggggtccacacttgattgttcaatgggggatggggtccttggcccaccctgctttccatagtccctyccataaccmagggcaactattttgagatgg

SEQ ID NO: 1207 - DNA, 569 bp, Homo sapiens
  SITE (377): n equals a,t,g, or c
  SITE (518): n equals a,t,g, or c
  SITE (536): n equals a,t,g, or c
  SITE (552): n equals a,t,g, or c
ggcacgagggagccgcgactaagggtgacgctgtttctcggcccagggggcaaaagagcccgaccggaagctgctcttggaagacagaagcccatgtgcagggaacgtgccagtgcccagcagaaacaatgaagtcatttccacccttgaacttgggaatgaagagaggcaaaagtcacaggctgggaaccgcagcctgaattggatgaacttatcttgtggttgacttgtgcatgtatgagtttcacacctgagaacaggwtaggaacttttgaaatgcagcccacgccctytggccctcgtgtktacagagccgccttcgttgggtgactcagggtaatgactgagcaacaactgttggcttgagtggtgccggngatgccctgggaggctctccctgccatgctgcctgccttgcaccaacaggcccctgctccatggctgcagcctccagcctgtctggccatctaccggcagatgctgttcccaaggtctggcttccacagcgcgcgcctctnattcagcctttcaagctnacaaaacaaagtttgngtaacggaaaaaaaaaa

SEQ ID NO: 1208 - DNA, 426 bp, Homo sapiens
  SITE (374): n equals a,t,g, or c
  SITE (382): n equals a,t,g, or c
  SITE (426): n equals a,t,g, or c
ggcagagtgacaggcgtgtgccactgcatccaacctgaacacagtggaaagaaacagagcagaaatgacccggaatgctgactctggaatctcctgagggtgttctggtggtgcatgttttccttccttttattttaacattcatttgtaactcttagatacacatatcagctaacaatagacaaaagggccctaaatcagacttggatacaaatcagactgggattaaaaatctgcaaagcatggrataatctactcatgagtaaccaggggctgactgtttctgaatggctttctctggccctcacaacgsccccttgaccaagytcaggatagcgattgktgtaacatttyccmtcggtaatgcggtaacnaaacaggncaaagcttcctttactaaatacttatttctgctagcttttaacn

SEQ ID NO: 1209 - DNA, 428 bp, Homo sapiens
  SITE (339): n equals a,t,g, or c
  SITE (392): n equals a,t,g, or c
  SITE (403): n equals a,t,g, or c
  SITE (404): n equals a,t,g, or c
ggcacgagggaaccaactccggacacagagggactagataatactggctgaatgaaggaatatgaacaaggccacttgaatccctattctttgggcttctccagtaaagtggattcactagtataagaatgagaggcatctatgttctctaatttctaaaggtgatttctatcttaaaaatrataattagattgaagcacccggataccttctcaaccatcatcttacatgtaaagttcctggtatagagctcagcacattgtcattctcacaaatggcaggcaactaaaatgatataagatgcccttcttgcatggccgtatatcttgagcttatggntgatttattgcaactggctgttacttctctccctgagctcatggagggtgtcntggtcccgatnntatttcaagtgctgctgttaatgt

SEQ ID NO: 1210 - DNA, 1077 bp, Homo sapiens
ggcagagccctgctcccctctccgaccctttgagccgtggccgttgccagatgtccacaatgggaaacgaggccagttacccggcggagatgtgctcccactttgacaatgatgaaattaaaaggctgggcaggaggtttaagaagttggacttggacaaatcagggtctctgagcgtggaggagttcatgtccctgccggagctgcgccacaacccgttggtgcggcgagtgatcgacgtcttcgacaccgacggtgatggagaagtggacttcaaggaattcatcctggggacctcccagttcagcgtcaagggcgacgaggagcagaagttgaggtttgcgttcagcatttacgacatggataaagatggctacatttccaacggggagctcttccaggtgctgaagatgatggtgggcaacaacctgacggactggcagctccagcagctggtcgacaaaaccatcatcatcctggacaaggatggcgatgggaagatatcctttgaggaattcagtgctgtggtcagagacctggagatccacaagaagctggtcctcatcgtatgagcctttttcttacaagcaccacccaacaacttctgctttcttccctatctctttcaagatttgctcaagacgtccaactgtctctctgacttatctggaagtatttctttttgtgaagccatatgtcctaacaggagcttcatcaccaactcagtgctattaattctccttctctgaatgactcagggtaccctatagggggaagagcaagtcaaatgagcatagtggggaaagaaaaggaaatggcttttataaacatcttttactttgttttgattcaaagaccaaactagaactttaaaagttcaaaaataagaaagtatacatttttgctgttatttctcatcattttgtatatgggaggaaatttataatttgcatgggtgttaggtgaactgttttcatttgcttgtgttcagatatcttgccagattgttaacttcctattgtagcaacagggacaaatatatttgtytttgcyggrmaaaaaaaaaaaaaaaaaaaa

SEQ ID NO: 1211 - DNA, 347 bp, Homo sapiens
  SITE (340): n equals a,t,g, or c
tggagttcaaccccaaagattcccacgtactcctgggtggctgctacaatggacagatagcctgctgggacacccgaaaggcagcctggtggcggactgatgccaccattgagtccagccaccgagaccctgtgtatggcaccatctggctgcagtcgaagggggcaccgagtgcttctcagcttccacggatgggcaggtcatgtggtgggacatccgaaagatgagcgagcccactgaagttgtgatcttggacatcaccaagaaggaacagttggaaaatgccttgggggccatctycctgggagttcgaatytatttgsccaccaagttcatggtnggggacc

SEQ ID NO: 1212 - DNA, 509 bp, Homo sapiens
  SITE (422): n equals a,t,g, or c
  SITE (472): n equals a,t,g, or c
ggcagagtctctctctctctctctctctcctggaatgtggtggaactcatggtgaatgaagaagtcatcttccactgcaacattaaggacttggagttcggaggcgatggtaaactagacccactgtgtgaaaaggccaggatagccgtgctgaatgcctactgatctcctcatggaacaggcatctcaagtcggcacaacagcagctgccccagccattctatgatgcaggcagaagtggctgtgccacgktgtggacactgggctctgctagtcagaacagggcaactcgggcctgacctccagcttacgcagcctcaggattgtcacctggctgcacaggagcccacagaaataataaaaaccacatcatttataacatgtctcaatctcaacccatagggagagccctccaatatcangtacacattgagcttgaaggaaacaataaaatgcaatcaaataacaaggngccattccttgactaataacacataagttgccaaaag

SEQ ID NO: 1213 - DNA, 440 bp, Homo sapiens
  SITE (438): n equals a,t,g, or c
gggcacgagcgaaaatcattaaaattctgaagcccagagtcctgattctgctcagctgggcaaataggtatcatctcctcatttaacagtgctggcatctctccctcctcccgtgcttatgccgtgtgcctccacccagactcccaccaagcctgcacattttgctaaaaatcacccagagtattgtgagtccttggagctgctatagttgtttcctcaagggacatgaggaaggagagaaggaaaacagaagagcagagctatagggagatttcaaacttttcactccacctttaccagtatattggcatcttgatttggtctatgcattggaatttctagcatatgttggtatgttctgctaaataaatrtttgaaaaccaaaatcacagcttaagcaacaattaaagaaaacatcaagtagtatttacctagcgngt

SEQ ID NO: 1214 - DNA, 504 bp, Homo sapiens
tacttgggaggcaccatcccagagagctccaagcgtccttttttttttttttttcctttgagtgctgtctctggacatcttcagcccagaatcttctcaggagcaaaggcttcctgatgcctcattcatgtcaagaaaggaggccaggagccatcctgtgttcagatggttgagacagtgactacgatggcaggacaatgccgtgagaagcacttcatggtgacagagcccaacccagccgggaacagctgcgatggggaagctctggagcattttgtgagcaccgtctcggtggatgggaaagccaaagtctctgcccgtctcttactggaggcactaaaccccctccctgggttgacctcacagacattgaagtgagtctgcccacaaaggaaaagaggccagagactgtcgtgaagacatccactaggtaccagaaggaaagctgagggggcagcaaagacaataaaaggtgtctagagaggtaaaaaaaaaaaaaaaaaa

SEQ ID NO: 1215 - DNA, 300 bp, Homo sapiens
ccaaactctctcaccggagacgggtggactctgcgggctccctgggtggcttgatttcgacaccctgtgggctrccttccactctggtactttcctctgcctgctgatgcttgaaattccttgaaccggccacacacacctsctttctggaatcagaacactggaaaggcttcctgggacgggagaagagtgatttacattcctsccgaggtgtaaagctgcggatggcaggttctctcctgagaaccggcttcaactaggaggaggaggttggaagcaggaccccgagctgacctgttg

SEQ ID NO: 1216 - DNA, 318 bp, Homo sapiens
  SITE (286): n equals a,t,g, or c
  SITE (311): n equals a,t,g, or c
gggcacgaggccttactgctgctcctagctacatgggttaggaggttgatatgaaaggccatagtaaagttctttaatwggcacacctggggagaaactgagctgtgaccatctgaatcttgcwctrtattcttttcccaggtgtatctgtcttgtgagtcccttcatctggcctttcttcctctgcagatttagttatggtgtcagtgcagaagtatacccatgcccagctccctgmatgctattaggattgtattcttgatggatatctaggtgcttgtggggntatcttgtggcccacagcaaatggnctgttca

SEQ ID NO: 1217 - DNA, 318 bp, Homo sapiens
  SITE (214): n equals a,t,g, or c
  SITE (255): n equals a,t,g, or c
  SITE (270): n equals a,t,g, or c
ggcacgagggaaaacctccccaagaatgatggatacaaacaagtccagacagtgaagactgcaaaaaatacttaactcttcaatgcccagaaactgaagagcatttactagcatcaacaccatccgtgaaaacacgacctcaccaaatgaactaaataaggcaccagggaccaatcctggagatacagagatatgtgaactttcagtcagaggnttgaaaatagttgttttgaggaaattcatagaaattcaagntaacatagagaaggnattcatcagataaatttaacagatattgaaatcatgaaaaagatcaga

SEQ ID NO: 1218 - DNA, 511 bp, Homo sapiens
gcttaaatctctgacacttgctcccacatcctcacactcagctgatgacttcactttctccttaattataaaattagaagaaatcaaaagagcatttctataaatgctcaccaacatagtggctcacttactagcatctgtatcatatgttctacattccctcctgttatcagagatccactctgtccaacagagtaaccactaaccacataggggtattaaacatttgtaatataactagtgcaactggggaatgtaattctttattttaattaaaattcaaaaccaaagcattgtaaacattaaacaactttattattttggtagaactatatttcccattttaatgatgggaaatttagcacccaaactgagatatgctttaagtgtttgaaaatctagtatgaaaaaaaagaatgtaactatttcataagtcattgktatattgattctatgttaaaaccacagtattttggatatacctggttaaataaaatattatattaaactt

SEQ ID NO: 1219 - DNA, 1019 bp, Homo sapiens
  SITE (974): n equals a,t,g, or c
  SITE (978): n equals a,t,g, or c
  SITE (1017): n equals a,t,g, or c
  SITE (1018): n equals a,t,g, or c
  SITE (1019): n equals a,t,g, or c
tcgacaccagtatcccagggtcagggatgctggtcctccattcgctcataggatgacaccaggccacagatagcgtgggatgagggatgggatcaaattagagatatgacagtagaccagctgtgtcagcccagagctggcccacaggctggcaccagcactgaactggggctcctggctgccctgctggcactggactggggatgcctgcctgcccactcaaaggctgtgtccaatggcccatactcacgacccaagcaatttctgttgttcattcacagtgcttggtgacaccaccctctgggacaaatgccattcttggaaactccagtagtatgaagsgtcacaagccagggtggttgctgagcaggggggctggtgggggtgcacgccagcaggcaaagggtgcctgctgtactcccagcttgcatgggcacacagagtcctgctcacagttactggggctgggcagccccatccctgggggccaactgggactggctgcagagagttttagccattcaatgggaccaggttgatattgctacatgacaaacttcaatccatgtgcccccctcatgctctgctggtagggggcacatccctcaagaaggctttctggctgtacctgctaactgtgaccctgtgacccaggggtactacttatagaattttccaggggaaatagagatgtgcagaaaaatactcttcgctgccctatttataacaatgaaaacaaaaacagccgtaacacccaggaacagggagccagctaagtcaatgatgacacatatcatggaccagtaggcagttgtaaaatctcgtggaaaattatttactgacacaggtaggagacagttcacaacagaagcaagcaaaaaccagtgtggacacggtgaggccagcttttggttttggaaacaaagctttttaaaataagctggatcatcaccataagtggtttcagaaaaacnaatnaataaataaataacattttaaaaagctggaaaaaaaaannn

SEQ ID NO: 1220 - DNA, 524 bp, Homo sapiens
  SITE (428): n equals a,t,g, or c
  SITE (461): n equals a,t,g, or c
  SITE (515): n equals a,t,g, or c
gccactttgataacggggtttctcccacagcagagatttaaaagggacaggaaaatctggaatagcatcttcaactaaagatgtcaaagcacaagctcacttcccacggaaggtagcaattactattatctacttgacagctacaagaacctargcacagaggttaagtgctctgcaaatactaccagccagtggtggttttcctgccagaaccaagttcttgccttccagtggacaccattgatctctcaagatgattctttaagttaaaaagaaatgtgaaatctcttaggccaagaagaacaacctgaggactctctttctggaggtaattgaactcctttagtaaatccagaggagaaatctgagatcagtacatcttttgtatctatgatagctaaggatacatcacttgaaagattcactgnactaactactttcttcagcatttgactcttggnccttgggttgtgagctccttggtcctgcaaagctggctggggcaccataggggncaaaaaaaa

SEQ ID NO: 1221 - DNA, 509 bp, Homo sapiens
  SITE (483): n equals a,t,g, or c
  SITE (484): n equals a,t,g, or c
  SITE (486): n equals a,t,g, or c
  SITE (499): n equals a,t,g, or c
  SITE (500): n equals a,t,g, or c
ggaaacgttcaagtacattttgtcgagtagatgtaatgaaactataaattagtttttactaaatgaagaaagcaggcaagttggtgttcgagaacgtccttgcacgtttccagtaaatgtggcaccccgagccattctgaaagctgccctccctaaatgggcggwctgtgymtttctccttttctccccttgcaagatccttgcaggacaggagggagtccaggtcaaggcataatactcacatacacagctgggcttgttgccagaccactgattgttctgctgacaggtgataactctctcccccaccagctcaaaggccgccgggcattcaaaggaacatcacttttcaaatcaattaatggaaaaggaagctggagactgtccacctgctctttccctcaattgcctcctctcctccttcaatgtcatcttaagtgacttctccttattaaacaccaggacagatgaaaaaaaaaaaannanaaaaaaaaaaacnncgggggggg

SEQ ID NO: 1222 - DNA, 615 bp, Homo sapiens
  SITE (424): n equals a,t,g, or c
  SITE (444): n equals a,t,g, or c
  SITE (505): n equals a,t,g, or c
  SITE (602): n equals a,t,g, or c
  SITE (614): n equals a,t,g, or c
  SITE (615): n equals a,t,g, or c
gctgccatgcaaaggcctgttcctttaagttctgtttactgtagtgatacacctttaagtcttgaagaatgaagatgaaatattccaaactatgctgcacaagaggatgtgaacagaaacatctggacggagaagatcttttttatattcagccatgccaattgacctactaccctctccatagccaaaggaatgcccaaatttccacagaaaggcatttttatatgaagaagctcatccctgtggacctttctcttgaatgcctactatgagtcactcagcaagagaggcacccagctycctcaaggtctgcagtgsctcggaggtattcacactgagctttcatccccmaggcccacttcccttcatgaaacagtctctgaacatattattcctcacggatgatcaccttcttaacttcatncagatgtgtgcctctgtctnactatttagcgtcgtcctagaaaatactgagtaattggttcatgcgtatacatcatgtttnctcaagtagatctacctttatacaatcaaaagtgtcagattgatggatgaagtagaagtaaatttctgataaagagaataaattaagggtaattganaaattagggatnn

SEQ ID NO: 1223 - DNA, 456 bp, Homo sapiens
  SITE (430): n equals a,t,g, or c
gcgcagtcggcctgcaccgcggggatacacaaacacaccgggttgcgggagggggcatcggactgactttgggaggttccgaatcccattgtaaagctggggaacgccctccagaactcagatggccaaatgggattcatggaccaccctagatgcggtgcatgggggtcctgcttcccagttcctctcatttaatctcatctaaatcagcttttagtcccttctttctggaccaactgatctactagtctgagtgtaagaaaacctggtccctctaggcccccccaggacaacaggatctgagcttcatgagagtgatgggactttcagtcctgtcctccctaattctttcaggattgatggatgatggccataggaatgtttctgaaggcatggactgctttacctgggaagtgcccctgatcatggncatgatgaaatctctgtggcctggac

SEQ ID NO: 1224 - DNA, 455 bp, Homo sapiens
ggtgagacaggccttatatttacagctcccttcccttcctgcaatccagtgttgaggcagaagagggtgcctgtgtcacacatcaatttttctcctgacttttgctcgggtgaaaggcctctgtacaatgcccgatactctcatgcttccatggcagctcctggctcctatctgggacacctcactacccagccccctcatggaatagtccatctcctagcctggccttcatccagttcaccctgcccagccaccctgcctctcaggggtctgtgctgggaaccttggcagttgaacagagtgctctgttcaacagtctgaggcctctgaaacagaattcacacacaaaccttcagccaagttctgctgctgtgtatctttttagcaggaagcagctcaagacagggaagacaaagtagcctcaggtgccaattactttaaagscactctgggtc

SEQ ID NO: 1225 - DNA, 265 bp, Homo sapiens
  SITE (262): n equals a,t,g, or c
  SITE (263): n equals a,t,g, or c
gtgtggacccaaaggcgcagccaggtgacaactctactagaatcactatcctgacagaactctacatacaagctgtcatttttgaccacatttccagaaggaagacttaagtaccaacatgttaatttcctaataatttgctaaatttaaataaattccgtagacagagcaaattagaataataaatgagccctgtagctggaaggcaaattagaacaataaagttaataaagaagttagaaagaaaaaaaaaaaaaaaaanntc

SEQ ID NO: 1226 - DNA, 672 bp, Homo sapiens
  SITE (597): n equals a,t,g, or c
aagtagaaaccaccggatatacaattgcattagtcaggattactgttactagttgctgcaactaaatagccttaaatcaccactggtttacacaacacaggcttattccttgctcatgctgcatctccagtgagagccaacaggagtgtctctctgctccatatagtcactcagggccccaggctagaggagacattacagaagacatgttgtctttgagatctctatggaaggaagagaggaatggatgaggcatgctggccttaactgccttgacctggaggtaacacatgtcatttttgtcacagtctctgagagaggagaaagaaaccggacaggcaggcagttagagtgggtcctcagttgaattctttcaaacaaaagaacagcctgaaaaatcaagctgcaggcacaratawgggamcttgcacaggggggcttgcctgagacatgcgcacagctccacagataaaaaagcctacacaggtgacttgcctagacatgcccacaatggaaaagtacatctcctgacaaatgtgcagtaaggggaacaaagcaatatagagaactcaagctaaggggctgcatgtgcattangagaatggggtggggagctaccagaagtttgtgcctttatgcaaatgagatacccagccctcatcagtttcttat

SEQ ID NO: 1227 - DNA, 589 bp, Homo sapiens
  SITE (524): n equals a,t,g, or c
gtttgagtccaggagagagaatcatgaatttttattgggtatgtctagaatatttctctgagaaggtatatcagttatctatttctgtataacaaacccacaaactataattgcttacaactacagtgatttattgtttcttatgattatgattccatgaaccggcaatctgggcagttctgctggtctcagccatgaggccatagtcatctgatggctcaactgaggctggagggtctacagtggcctcactcatttgtttggccttggtgcttactcttaaactcttaactggggtctcagttcttctccatgtcaccttgtatctgccaataggttagattgggcttcttcacagcctcttggtcttagggttccaagcaggacaggataaaaactgcaagacctcttagggcctaggctccagaactcatacaatgtcaagtgtgccacgtcacgttcttcaaggcaaattacaaggcaaagtctgggattgaagaggatggagaaaccaactccacctnctggtgtaggagtggcaacatcatggtgacattgggagacacgattcattggagggcattaccaa

SEQ ID NO: 1228 - DNA, 668 bp, Homo sapiens
  SITE (585): n equals a,t,g, or c
  SITE (623): n equals a,t,g, or c
  SITE (639): n equals a,t,g, or c
  SITE (658): n equals a,t,g, or c
  SITE (665): n equals a,t,g, or c
gccacctgtgtgattggcacaatgtgaaagaggggaaaagggtggaggaggaagagacaggagagctgatatgaaactcttgttatttatgaggatcacaatcaagagtttaaagacaaccggtctctgctccagccacacaggacttcttctagtacctttactacatcatgcctcccctgcctcaggcttctgctgggatggatcgagcacattcaccctaaaattctgattcagaagatctgagccttctgaaaaaaaagcattgagagcataaaccactcagaagatttatagcttaaagcagatcaccttaaggtactggaatcagtcagtgcttagatggaacattttttgaggcctacatcttcactgagtgcccttcttctctatttcctatacttccttgtttctttctgttcccactgcatcccttatggatttgtacaaataatgctgggttcttttcttcacccacatgcagcagttgctgctggatcataaccattccttctattggktttaaaatctgkttttctcagattccttacacttgaaggaaaaaaaaaaaggggcatttagccngtttttcttttaagcataaaaatcttccccactgtaanaaaaaaaaaaaaaaantccgggggggggccgggtncaaattnccc

SEQ ID NO: 1229 - DNA, 390 bp, Homo sapiens
gggcaccaagtgaaggatcctgctgtgtactcaggggctggtgttgctgtcagggatgttagcctagagcctcagcttcctgtaaaatgaggatgatgatatccaacagcttatgggaccttgcagaagtcccagcatttttcatctttcaatctcacctccttttcctgataatagagaggcaacaagaactcagggcatgcaatggggctcaacttctactctctgccacaatttcatcatgattcccccaaagagcagagccccaggagccagcagggggcagggtgggcatttctggactggattcattcataataagatcaaaatttccaatccgtatgtctcgggtgccatctgctgatagatcggaccagagtggtactaaaa

SEQ ID NO: 1230 - DNA, 467 bp, Homo sapiens
  SITE (421): n equals a,t,g, or c
gcagaaatggaggtgccattgaatttgcccagttgatggtgaaagctgcctctgctgctgcccgaggatttccacttagaaccttaaatgactggttcagctctatgggaatttatgtaattactggggaagggaatatgtgcactccacagatgccttgttcagttattgtctatggagccccacctgcaggatatggagccccacctcccggatacggagccccacctgcaggatatggagcccaacccgtaggaaatgaaggcccgcctgtgggatacagagcctcacctgtgcgatatggagccccacctcttggatacggagccccacctgcaggatatggagccccacctctaggatatggagccccaacctyttggatatggaaccccacctctcggatatggagccccacctntcggatatggagccccacctgcaggaaatgaaggcccgccttcggg

SEQ ID NO: 1231 - DNA, 241 bp, Homo sapiens
  SITE (192): n equals a,t,g, or c
gtatctaggctcgcctcactggggttggtggaggtgatggaggttgcagcttggccagcatggtagaaaggtggcagggcacgtctggcttttaccacccagttgcttcgagccaggagatggaggagtcatctgttgcacgctggaggctggacctgcagatggcatggttctgggctcacctcgctgcanttggtggcagaaacagagactgcagcttgaccagagtggtggaaccttg

SEQ ID NO: 1232 - DNA, 660 bp, Homo sapiens
  SITE (483): n equals a,t,g, or c
  SITE (561): n equals a,t,g, or c
  SITE (636): n equals a,t,g, or c
  SITE (646): n equals a,t,g, or c
gcgcactggtatttcacagaaagctgggtgtggccctgctgactgaggactgcgggcctgtcagtccagcctgtgagcttgctggcagtctcttccagctccctaaagatcactccacctcttcgttttactctgtgttgggattgaaagatactcgttcttagaggaagtaataagcctatttgctttttttcccccaagctatgaggaagctggttgtgctctatttttttcttttattgttatccttaccggttcaacttatttaatgaaacaaagactgaaaaaactaggacttaggacatcagtccaggcttgcctgttctctggagagttgccggtgcctttataaagtttggtagagccactggctgtcttggtgaaatgccctgacctgtgaccttgcctgttcgtgatagctgacattgagattaatttgtgttcagtgtggaagcactgccttcgttgtgtgctatttaaggnttccaatttttgtaaattactcattctaaacacatatctcattttcatcatttccataaatgaaaactgtagctatgncatttaaaagatctggcttttaactatgtcttggtttggaaatggtatagatcacatggagacttcaccttttgngaatttaagnggtccttcattttt

SEQ ID NO: 1233 - DNA, 529 bp, Homo sapiens
  SITE (448): n equals a,t,g, or c
  SITE (459): n equals a,t,g, or c
  SITE (488): n equals a,t,g, or c
  SITE (519): n equals a,t,g, or c
  SITE (522): n equals a,t,g, or c
gtaaacctttaccagcacacctccaaatccagcattcctgtctggatctttatgttctacccagcaaccgagaatagatgtgctgcattttgataagaaacaaaaattttagttagtaaaaatcaaaaataaaccaaaatagaaattgtgtctcttcatgagtaacaacacctaaaatagcaatttttctcaatatttaccatttcctgttgtgtagcarawactggttcctttgattctttaagttgktatttggagtattcagctactttagggatgatttttaacattacatgagccaggcaagtaaatgtctaaaacattacttttaaatgtttaaacttttaaatgtttttaattatttaaaattaaagcccaagtataaaataaggagaaaacagaagaagctacagaaactactgcttgagtagcaactgatctgatgcantgtctcggctncctctagtctatttctggctaggaagggnatttgaaaggcaatgtaaacaaatgctgaantcncaagctt

SEQ ID NO: 1234 - DNA, 649 bp, Homo sapiens
  SITE (488): n equals a,t,g, or c
  SITE (508): n equals a,t,g, or c
  SITE (553): n equals a,t,g, or c
  SITE (567): n equals a,t,g, or c
  SITE (570): n equals a,t,g, or c
  SITE (573): n equals a,t,g, or c
gaacacatcagctctccatccagattacagaaagcagaaaacatcctgaagtgaataacataggaatcgctctttttcccccctgagatagcaggttacttatgagaaacaagcttgaaatctctgcacctggaccagcttccagaggcttttgtcctgaccagctggctttggggaagtaaaggaaaccagagaagaagaggctgaaagaattggtttccaccgtgacctttgaaccctcgggcgagttgtcagcctcactgaggatgagtgtactccatatcaagtgaggtcactttactcgcaagcttgttgtgaggactgaatgaaaccttttcttttttcttggagtttcagagcaacgtccctgagcccagccccacactggcttgagccctgtcgtcggtcaagacacggtgctttctcccctcccctctgcactccagcttactctgcagtcaggaggtggcaccacgatcccctttaanactttgccacttgggccagntgcgcccctgtgaaattcctggttctattgcaggccacaaggacnagctgagaaatggnttncantcaccatctagattagaaagcctatatttcaaatatagatatatcaattatgctgtaaaagacattaaatcccaca

SEQ ID NO: 1235 - DNA, 954 bp, Homo sapiens
  SITE (825): n equals a,t,g, or c
  SITE (878): n equals a,t,g, or c
  SITE (880): n equals a,t,g, or c
  SITE (888): n equals a,t,g, or c
  SITE (889): n equals a,t,g, or c
tttccagggtaatttttttttaaatacccggacaacaggaaaattgggccccagggaattaaatggggagcacctgttcaaaggtagctttcggacagaggaacaccaatctcccaatggcatgtaattcttcttctgaagagacagaaaaagtctgtttttggaaaagtcaaggtatttggccacggaaccagacctttctttgcaacagcctctgttagtgtttccagcttcatgtgacaaagagatgggtcgatcaaagtatttttaatgtgagtcaattaggcggcattgttgaagaaatccattcagaaactgcaggtgtatctctccgcatttgaagtgggccgttctgagtggcctggggaaatctcctgcgctcctgctccacctcgccttggatacaaatccttcttttgtccagcatatccacactttctacccacccatctgttagtaacttcatagccggctcaattaccaggtggactgctgtggtattgcagtgcttatgttcaagtaacccttcttttacttcatcatggcctcaaagcacaagagtagtgatgctgacaatttggatataccaaagagaagctgtaaaatgcttcctttcagtgaaaaagtgaaagttctacatttaataagagatggtaatattgkgaagcaacagtgkattgaaattatgaaataagagtttttcatgcaaatgtgaggaatttgctgaggacaagtaagaagaaggccaatttctattgkgcaaaatcctctggkcactgggcttcaactaataaggacaagcaaaaagcataaggaaggcatttncctcctacaaaggatcattggcaatgaaatggggaactggggctttctggggntnacgcccanngggtctgaagggaaaataggaatcaataaaactttaaacatagaaaggggctaaatgaaccactt

SEQ ID NO: 1236 - DNA, 302 bp, Homo sapiens
  SITE (291): n equals a,t,g, or c
  SITE (300): n equals a,t,g, or c
gctcgtgccgctatttggccgtccttttctaccstctggaattaagaccacgagttataargcaaaacccataagagcatgtgaatacttacatttttgttctgtgtaacacgcttaatttatttctggatggcaacagggggaagcgagtagcattatctgrtgatgagacaaaggaaactgaaaacatgaggaaaaagaggagaagaatcaaacttcctgaatctgatagcagtgaagatgaagtctttccagactctcctggggcttatgaagctgagtcaccatccncacctcctnct

SEQ ID NO: 1237 - DNA, 434 bp, Homo sapiens
gttttttttcataccagaagaccttagctgttattattacttcacctaaatgggtgagagacagacgcagagggtgccacgtgggccgtcctcgtctgctggatgcagagggttaggagctagcccagttcactggttttagagccagccttctggacatgttcttgcctcctgccctggaaagggacatgggctgtccctcctgcatggcctccagccctgtggccagatgtggcatgaagtccccagccttgtcacctgcaccctgtgagtggagccgggcagcggggcacttcgtgtctttcgttcctcactggacgcatcatgacatcttggagaaggactcacttgagctgacagcagggtctcccccagcaccgctggcactgctgatgttcagggcctctgtgacgggacatcctgagcactgctgg

SEQ ID NO: 1238 - DNA, 392 bp, Homo sapiens
  SITE (368): n equals a,t,g, or c
  SITE (383): n equals a,t,g, or c
  SITE (389): n equals a,t,g, or c
gagaccaggaagtatctctgctcctaacctctctttatgtatgcatgaagctaattgttcaagtccaggggaaactggtgagtgctcctttccagatttgaggttgcattggattcaggctggggaagctgctgaagaaaaaagaaatgctgacttgctgctgtcctaagaggaaccaagggaggaagtgttcaaccctggaccagtgctttaaagcatcagcagaatgtcccttacatcagagtaatgtggcattgggcaaaccctaaagagcatggggcaaaccctaaagaatgtggataatcagaagaataaaatgtaggctatttgggcaaccaaaaaaaaaaaaaaaaaaaaaaaaaaaaaanttgggggggggcccngccccnatt

SEQ ID NO: 1239 - DNA, 528 bp, Homo sapiens
  SITE (409): n equals a,t,g, or c
  SITE (481): n equals a,t,g, or c
  SITE (487): n equals a,t,g, or c
  SITE (513): n equals a,t,g, or c
  SITE (520): n equals a,t,g, or c
gaagtctccccccgctacccaggtcatcatgtgccgagcgctggaagtactctgaaaaacgtgtccttactcatgtgacactttccttttaattgggacgaaagccaggaaacatgaggcttcgaatattgaagaaggcacatctgggagcagagacccagggacagcctggcccgggcctgggcaccccaccagcactgaattcttaaagagaacttggaaaactctaaggtaggcacaccccaaagccagccttgcctgccgagatctgagggttgaacaggcctagarcctcctgacagcccagagagtgaggaagccatcaaagactcaggagccaactcgaagggaccccactggcccgatgattgatgtgatttatgccccaaccaggatgaggactgcagtngattgaaacccatcatgtctgcttgaatcattcaaattcatggcattagaacaaaatgcacagagcacctgntggatncagaaaaagattcatatcttaaaaanttagatnccttaagg

SEQ ID NO: 1240 - DNA, 263 bp, Homo sapiens
  SITE (258): n equals a,t,g, or c
gcgagactccatctcaataataataatatacatagygatttatgttgcaggcatcacgttcgagttactattgacctccaaataacaggtcatttaaaacccttaaaaatgtgtgtgtttacatatatatatacaaatatatacatagagataaaggacagacttttaaaaaatgaattggaagaatatgtgccaaactcaggataatggctgtctctagggatagaaagtaggggaacaggaccaaggtgtgggggntggag

SEQ ID NO: 1241 - DNA, 578 bp, Homo sapiens
  SITE (422): n equals a,t,g, or c
gacctgatggcccccttcctggctcagacaataaccaagaaaagaaagtaagattatctccagccaaaatgtcaaccaagaattctacagatctagttgaatatgttgacaagagtcatgcttttctccccatcattccaaacacccagagaggtcagctagaagacagactgaacaaccaggcgcgtaccatagctttccttcttgaacaagccttccgcatcaaggaggacatctctgcttgcctgcaggggacccatggctttcgaaaagaggaatcgctcgccaggaagttactggaaagccacatccagaccatcaccagcatcgtcaaaaaactcagccaaaatattgagattttagaagaccaaataagagctcgagatcaggcggccacaggaactaactttgcagtacacgangwtaaacatcaaacacctacaaggagttgggagatcttcgaggaagagtagcccaggttgttgatttccaaggctttgttggaaggttttttgggaggacttttcatttattttcagggccaaggggcaccgggcaatttggaggaaaggcctttt

SEQ ID NO: 1242 - DNA, 463 bp, Homo sapiens
ggagagagagagagagagagagagagagtcttcccctactccctctcggctccttgtggcccaaaggcctaaccggggtccggcggtctggcctagggatcttccccgttgcccctttggggcgggatggctgcggaagaagaagacgaggtggagtgggtagtggagagcatcgcggggttcctgcgaggcccakactggtccatccccatcttggactttgtggaacagaaatgtgaagtttttgatgatgaaraagaaagcawattgacctatacagagattcatcaggaatacaaagaactagttgaaaagctgttagaaggttacctcaaagaaattggaattaatgaagatcaatttcaagaagcatgcacttctcctcttgcaaagacccatacatcacaggccattttgcaacctgtgttggcagcaaaagattttactatctttaaagcaatgg

SEQ ID NO: 1243 - DNA, 463 bp, Homo sapiens
  SITE (428): n equals a,t,g, or c
gtgcaatattaagtgtcacagtgtccagctggtgatattttcagcatagaaacctgttagacacggcagcattaaggagatggaatgaattgatttatttctcttctgaattgcttggcagtgcttcaagattgacgcatcagatttgcacaatgtgccactttaggagattatttcttccttccttcagccagacagaagactgcagtagggatatggttcctgtttgcctatttccatccacaactctgccagagacgaaagcagtgtttgaaacaattcaccaagatttccatctggaatcatcaagaatggaattgatcaaattccttaagaaatttacttaaagtcatgattttgacagcctagtgctacctggaaaagggacagcagcagcctggagcagtttctagctacaagaattttgntaagctatgtggcccctagtggctctttccatgga

SEQ ID NO: 1244 - DNA, 451 bp, Homo sapiens
  SITE (447): n equals a,t,g, or c
gattggtgtatcatttgaagaagcaaaaagcataattaccagagccaagttgaggttagaatctgcttgggagatagcattcataagacaaaaatccgacaacattcagccagaaaatctgtcatgtacatcacttatagaagcttcaggagaatatggacctcaagcctcaacattaagtcttttttcttctcctcctgaaatactaatcccaaagacctcatccactcccaaaacaaataatgacattttatcttcttgtgagataaaaactggatacaacaaaacagtacagattccaattacttcagaaaacagtactgtgggtttgtctaatacagatgttgcttctgcctggactgaaaattatgggctacaagaaaagatctccctaaatccctctgttcgctttaaggcagagaaactggaaatggctctaaattatcnttgg

SEQ ID NO: 1245 - DNA, 461 bp, Homo sapiens
  SITE (461): n equals a,t,g, or c
ggtggaattacctactttcactgaatctaaagagaacatggtggatcttgcacctcaactgaagggaactaaggatgaagactttatacagccgccaccagttacatcatcacccataacaccatcaacacctatttcattacctaaaggacccatcacttcttctgaagaacctacactccaggccaaatcacaaatgacggcccagaacagcaaggctagttcaaaaggagcataaaggactacttgaggatggagctcactctcttcagcttccggccctcaacagtggcatctgtaaaggacctcccagataagactgtctggcttcagagagcggatcarctgtttarccccgtggggcaagtcctttgaggcctggtaccattccaggtgatgtgggtagtgagaccaagttagaccacttagaaaaatataattgcaaagkcccatttctytgn

SEQ ID NO: 1246 - DNA, 713 bp, Homo sapiens
  SITE (395): n equals a,t,g, or c
  SITE (589): n equals a,t,g, or c
  SITE (600): n equals a,t,g, or c
  SITE (656): n equals a,t,g, or c
  SITE (686): n equals a,t,g, or c
ggagagagagagagagagagatgataattacgacatggattgtgtatattcttgctcggaaaggtgtagggcttcccttcctaccaataaccagttcggacattgacgttgtggaaagtgaggctgtgtctgtactacatcattggttgaaaaaaacagaagaagaggyttctcggggcataaaggaaaagctgtccatcaaccacccttcccagggtgtaagggagaagatgtccactgactcccctcccacccatggccaggacatccacgtgaccagagatgtggtgaagcaccacctctctaagtctgatttgttggcaaaccagagccaagaggtcctagaggagagaacacgaatccagttcataagatggagccacactcgtatcttncaagtgccaagtgagatgacagaggacatcatgcgagatcgaatagarcaggtgagacgaagcatatcccgtcttacagatgtctcagctcargacttcagtatgagaccytcctcctmagactgctgagagcaacaggtggaagtccttcagggccaagcagcaacctgtatcagaagaacatccttctctgnttgacctgaanaagggccagacctgggcagaaagacttcagcagagacagggaaacaggatgtgcangaatggtaaagcaggaagggatttacacgnggagacaaggcttgggccaaaggacgg

SEQ ID NO: 1247 - DNA, 381 bp, Homo sapiens
gcaaagagacctggcccgggagacggaaggtgtgggttctaacgcagagcctttccccagcacctgaaacagctcatgcaccgcgtttcctgaagcccaaatkaatctgctgcctcgaaagttctgtggtctttgctcctgtccaatttccartgactcaatgcacatcagcttaaattagctaacttctccttgcttctgtgccacacacaaaaattaatcatggcatcaggtatcttgatgcactgaaagagtattacatttaaacagacgggcagcgaatccatgaatcatcctgagcttcacatacccaccctccatttcacatgtgtcgttttcatatagtgcagcccgctctgccactgggagagaggaccgttt

SEQ ID NO: 1248 - DNA, 471 bp, Homo sapiens
gcgggttctcagagcctaaattcaatgattcagtgattgccccctataaccccctctgcggccctctatcatactcccctggatgggccactcatatttatcaggcatttactatgtgccagacacggctctaagccctttacatgcctcaacctactttatccacgcaaggtagacgttctcattattgccagttggctgacgaagagactgagacccaaaggccttagggaaattgtctaaattcacaccactgatgcgtggcagagctgcgactgagtcccgggagtctggctccagagtggtcataacttcaactaccacctacacctgctgccccacccatggcctcggcactccttgagggccaggaccaggaccacctctgtgtccctggagacagcacagagtctagcatgcagctgagcttaataactatttgcaaagtgaatacatgaaaaaagaacaaaa

SEQ ID NO: 1249 - DNA, 270 bp, Homo sapiens
gcttcatagtaaatttgctgctgctcactctttcggtcttcaccactcttaagagctgtaacactcaccacgagggtccgcggcttcattcttgtaagtcagtgagaccatgaacccactggaaggaacaaactttggacacaatattatcatgtttcatctattctaagatgcgtaatttttcacattttagcagatctggaaccacagcatgtcacacaatcaacagttttagatttaataaaaaatagtataaaaaaaaaaaaaaaa

SEQ ID NO: 1250 - DNA, 449 bp, Homo sapiens
  SITE (431): n equals a,t,g, or c
  SITE (439): n equals a,t,g, or c
gtttttcttttttgttgttgcagttgaaagataagccatttattgaccatccacttttcaaataaaacacaaatgtgagcataacataaacacacccaagactcactagcccctgcaagacaggaagcattcttggacagagagtctgcaaatgagtttccttatacctaatgtctgaacttctcactcattctagggtttcatgctttgttatctcttacaaaggaaaggaaactggctagaagattcatgtacaagaaggtcacaacttcaaagctatctgacactaatgttgtgtacatctagtttgcaactctgagagacawtatcaataagtactgtcaatattcctcccgttaaccttactgtcatgttcttgaattgtcttggggttggttaagttccctggttgtagttttcggtttatctcngggacaancccaaaatcc

SEQ ID NO: 1251 - DNA, 448 bp, Homo sapiens
gcatggtggcctgagagaagaagagctggagaaaatgaaagaagagcgtgaaaggattggagcaaaacatcaggagctaagggaaaagcaggcaagaggtcttcttgattatgctactggtgcaattggatcagtgtatgatatggatgatgatgaaatggaccccaattatgccagagtgaaccactttcgggaaccatgcacatcagcaaatgtctttagatctccatctccccctcgagctggaccatttggttaccctcgggatggccatccactgtytccagaaagagaccacttagagggtctctatgccaaggtcaacaagccataccatccaytggttccagctgacagkttcagtgtccacaagctggatttatccyaatggacaagcagtggaaagaacaktcgtcaattagytatytcttttagccagattacaagt

SEQ ID NO: 1252 - DNA, 1100 bp, Homo sapiens
  SITE (938): n equals a,t,g, or c
  SITE (1080): n equals a,t,g, or c
atcatcaacgttactaaatcagacgctgggagttatacctgtatagccactaaccattttggaactgctagcagtactggaaacttggtagtgaaagatccaacaagggtaatggtacccccttccagtatggatgtcactgttggagagagtattgttttaccgtgccaggtaacgcatgatcactcgctagacatcgtgtttacttggtcatttaatggacacctgatagactttgacagagatggggaccactttgaaagagttggagggcaggattcagctggtgatttgatgatccgaaacatccaactgaagcatgctgggaaatatgtctgcatggtccaaacaagtgtggacaggctatctgctgctgcagacctgattgtaagaggtcctccaggtcccccagaggctgtgacaatagacgaaatcacagataccactgctcagctctcctggagacccgggcctgacaaccacagccccatcaccatgtatgtcattcaagccaggactccattctccgtgggctggcaagcagtcagtacagtcccagaactcattgatgggaagacattcacagcgaccgtggtgggtttgaacccttgggttgaatatgaattccgcacagttgcagccaacgtgattgggattggggagcccagccgcccctcagagaaacggagaacagaagaagctctccccgaagtcacaccagcgaatgtcagtggtggcggaggcagcaaatctgaactggktataacctgggagacggtccctgaggaattacagaatggtcgaggctttggttatgtggtggccttccggccctacggtaaaatgatctggatgctgacagtgctggcctcarytgacgcctctagatacgtgttcaggaatgagagcgtgcacccttctctcctttgaggttaaantaggtgtcttcaacaacaaaggagaaggcctttcagtcccaccaggtggtgtattctgcagaagaagaacccaccaaaccaccagccatatctttgccagaagtctttctgccacagtattgaagttttctgggcctcccantggagaaggttagaggacgg

SEQ ID NO: 1253 - DNA, 782 bp, Homo sapiens
  SITE (782): n equals a,t,g, or c
gctctggaggggcggggccggcgcagccgcttccgggaggtgcagaagttgtccgatcactcgcctctcgccggacgtgggcaacccgaatgcggtgggactgcatttctcctcatccttccattggctccccacggaccccccagaaactcctgacctctaccgtgcaattcacgggagctgcccgggcacggaaagcaaaatcagcttggagaaacacttctcaagcctgcaagacccggtggcacgttcattcttgcattgattggttcgtaccctgtgtactgagcgcttagccctgtactccggctccttttgaggccctgtacttaagctcaatagtaccaacaacagctgagagtttgcggtctagtggggaaggaaaatgcagaaccaaccaactaggtgtgatactatgtggttaagtgacatgcagaagacgtccccagaacagcataaaaggaacatttggttaggcctggggtcagcttcacagaggtaacaacggacggtgaacagctcaagcaaaggtccaacagcatgatccaagcctttgtcaatgttttgtaatctcgtttacttgcctgtaattcaagagggaaccatgtcttcttaaaccctgaagccacaattggcaggcctcaaggatatttgcagaatgatggtgtcttagggttcttcagagaaaccaaccaataggatatatagagatatataaatttattattattacaagggactggccacgagattatggatgcttgagaagtcccacgatctgn

SEQ ID NO: 1254 - DNA, 500 bp, Homo sapiens
gctttgtagtccttcagccactgtgggccctgcctctgcctgttcttctggaatgtcttgggggttttgatcctgtcactgtgaaaaccctacagagatgccttggtcactccagataagagtttctgtggctgagaggccccactgtatgactcctgtttctgcctgctggacttcactttctggggcttggcatctgatgacctctgtatacatgctgtgcctcctgttctttatgtggccacttcactttgtcctttgggtttcagcttaaaagtagagtcaactagaaatcttcattaccatgctgagactagttaggatgcccctggctcatcagctgtaatgcctctgtcaaagctccactcaaacatgctagaaccatcgccttcccctcctcaactgtaaaccacagaaatgcagaggccctgtctgttttgttcatcagatctccggarcatagcttactgcccaacagatgctgggtggtaaataaatgt

SEQ ID NO: 1255 - DNA, 359 bp, Homo sapiens
  SITE (334): n equals a,t,g, or c
  SITE (342): n equals a,t,g, or c
  SITE (356): n equals a,t,g, or c
gccaactacagcctttggaaacaagactgagaaaaatacagtasaagagttacagttacagaaaggcttctgaattgggtgtctacgctgctcaragaggaggagatggagatattttagtcagaggctgccagttactgtctccaagacaagctactgcagttggtttccactgggatttgtatcaagcacttgtccaagaggccagactccaactaacagttagcaagtcagcgatcttccatacactctccacgggggttgtttgtggtaacaaggaaaaacgtgaacttggccagtcttaacgtcctatttcctactgaccatatacttnaaaagcanaattcaagaatagncca

SEQ ID NO: 1256 - DNA, 230 bp, Homo sapiens
  SITE (208): n equals a,t,g, or c
gaaaaagtctgcctatctgaataatcatggcagtggtgtttttttcttgctctatttctttatatattgattaaatataaatcacatgttcactacccaaaaaaccccaattgtccttaaactctagcaaccagaaataactaatgtaaccagaaatatatcctacaatatttccttataggttacataaaatgggatcatccttccngtgtttgttttgatatcaggct

SEQ ID NO: 1257 - DNA, 451 bp, Homo sapiens
  SITE (313): n equals a,t,g, or c
  SITE (335): n equals a,t,g, or c
  SITE (446): n equals a,t,g, or c
gaaaaaaacaacctgttaacctagatttctatggccagcagaaatagccttcaaaaataatggcaaaataaagacttttgggacatatcaagaagggaaagaatttgtttccagcagacctggactcaaaaaacattaaaacatacacattaacaagatgtgggttttacagcatatatgtgattatacaaccatgaaagaacaaaaaggaggagatggaattatactgtcatatatttcttactctgtgaaaggaractgtagtaacttctggatgcatatgtaatctctagaacaagcactaaaaacacanacagggataccataaagtcagnacatctgcctaagagggattaactgctaccagaatcattctcctacagtaaacagctagaaaacaggacaaaaatccatgaaacaactggttttaagacattggacaacanggcag

SEQ ID NO: 1258 - DNA, 549 bp, Homo sapiens
  SITE (449): n equals a,t,g, or c
  SITE (457): n equals a,t,g, or c
  SITE (490): n equals a,t,g, or c
  SITE (523): n equals a,t,g, or c
  SITE (536): n equals a,t,g, or c
ggtttttgctgagttgctcgcttcgcggagctaataaccttttcaggtatatttaaacatggagagaacaagtgacgcataacaactctatgaggtgcaacctatccagtcactttccttttgagagctgaagtacctgaagctttggagatggtaaaggaattattgagggtcatactggctaagaagagtgctaaaagtggagacctttatcacaaaggtatcttgtttatttgcttatctatcaagccccaatattttcttcctgcatggcakyaacaactgtcaccttacccatattttatcttcttctaaaacttgagtagagatttctcccttttctacaagaacaagtggtaaatgatcaaggattaaaccaaaatacctgtttgcacacccatacaatcaaaactgaaatgaagagcttgtgaccagtaacaccaaggggncaaaatgncacctatttccagaaatagcagggttccatacnaaccccagacattttgcaaaatgccttttcaanaactgaaaaaaangctgggaatatac

SEQ ID NO: 1259 - DNA, 465 bp, Homo sapiens
  SITE (361): n equals a,t,g, or c
gtacaaagagattttcgaggatcctgaaatcagggcacaggtgcagctgccagccctgcctcctgttcatgctggctcttgagtgtccctggtttgtacttccactgtctgcattaaacttctggggaccattaaggctgatatttctccaaggagctcctcttccctaacttgggtggctaaatggcacctttatatttagtttggtttttatcctctccttcatggtcctctcccctacaaattatagatggaagatgtttaaggccagtgctatgaagaaattaataagttcaaatacagtatctgagggggattggtccagaacctyctgcagatacccaaatccagaatagtgcanaaaggtgtatactaaacaacatttggaagaagaaaaacctggcatcattctkagaaagkattttctctaactctgacatgcagttaattctatggataaactga

SEQ ID NO: 1260 - DNA, 1498 bp, Homo sapiens
  SITE (172): n equals a,t,g, or c
  SITE (1164): n equals a,t,g, or c
gcttgaatccagtgggattgagaactttctaagagtggtgcggctcttgacaacatgtgggctccaccagcagcaatcatgggggatgggcccaccaagaaggtgggcaaccaggcccccctgcagacacaggccctccagactgcctctttaagggatggcccggcgaagngggccgtgtgggtccgccatacgagttcagagccacaagaacctactgaatcaaaggcagccaaggagaggcccaagcaggaggtgaccaaagcagtggtcgtggacctgggcactggctactgtaaatgtggctttgcsggcctgccaagacccacccacaagatctcaacaacggtgggcaagccctacatggagaccgccaagactggggataatcgcaaggagacattcgtggggcaggaactcaacaacacaaacgttcatctcaagctggttaaccctctgcgacatggcatcatcgtggactgggatacagtgcaggatatctgggaatatctcttccgacaagagatgaagatcgccccggaggagcatgcggtcttggtttcagacccgccactgagcccacacaccaacagagagaaatatgctgaaatgctgtttgaagccttcaacacccctgcaatgcacatcgcctaccagtcgcgcctgtccatgtactcctatggaaggacctccggcctggtggtggaggtgggccatggcgtgtcctacgtggtccccatctacgagggttatcctttgcccagcatcaccggaaggctggactacgcgggctctgacctgacagcctacctgctgggcctgctgaacagtgcggggaacgaattcacccaggaccagatgggcatcgtggaggacatcaagaagaaatgctgctttgtggccctggatcccattgaggagaagaaagtccctctcagtgagcatacgatccgctacgtgctgccggatgggaaggagattcagctgtgccaggaacggttcctctgctcggagatgttcttcaagccatctctcatcaagtccatgcagctgggcctycacacccaaaccgtgtcctgccttaacaagtgtgacatcgccctcaaacgggacctcatggggaacatcctgctctgcgggggcagcacgatgctcagtggcttnccctaaccgtctgcagaaggagctaagcagcatgtgtcccaatgacaccccgcaggtaaacgtgctgcctgaaagagacagtgccgtgtggaccggtggctccatcctggcctcacttcagggtttccaaccattgtgggtccaccgctttgagtacsaggaacacgggcctttcttyctctacagaaggtgcttctgaacggcracgaggatggacactgcactggcagtgcctaccctcgacagggtgagcgcactcctacacacagggggtggagccggcgcttattcctgtagcattaaacacccctcatatgcccctcaaaaaaaaaaa

SEQ ID NO: 1261 - DNA, 144 bp, Homo sapiens
  SITE (144): n equals a,t,g, or c
gattttattattcacactctggaatgaatattcagattttgctattcagtatttataattctggttggtagtagtatcactatataaaaacctccatgaaaaaaatgtctaaaaaaaaaaaaaaaaaaaaaaaaaaaaaaaaan

SEQ ID NO: 1262 - DNA, 416 bp, Homo sapiens
  SITE (272): n equals a,t,g, or c
  SITE (361): n equals a,t,g, or c
  SITE (387): n equals a,t,g, or c
  SITE (396): n equals a,t,g, or c
gatttattgggttttatatgatcagattttattgtaaaataccctgttgaatgagaactcatacaaagctcattgtcattgcatctaaaaaggccttactgacctttgaaatatctcagccagaaaaatggttattaccacaccattacgtcagttgaagctacagacaaggctcctgaagagtcagggctttaccttttgagatggttcctgcacatgctcagacacacggtcccttctaaccttccccaaagattctgccgtaaggttantgcactgtgggggtttccttctcttgtcctgactgcgttcacagggaagacaccattaaactctgctttctgaccacagcttctgggtncaatttggttaggggaatttaaaaantgaaactgnttacacataccaatcttggc

SEQ ID NO: 1263 - DNA, 547 bp, Homo sapiens
gcctggatgtatggggatgtatctggactcggatttcactgtatttttttttcagttctgaggaaagtatgaatgccagtgttatttattcactgttcagtttctcaagtttgttttagtagttcttgctttgagaataaatatcggaactctgtgaggaaggcattccagaaataaagctggctattcatggcatggtttttggcaaataccttccctccactacggagggaaactctgtttacctttttgaagagtcggcagaaacccaggttcacagttctgccaccaaaagaagaaagcagttcagttcagtgagaggacagactcagcatgatggacaaaaggctgagctgtgctggctaagcgtttgatttcaggagtaaaaaaacgctctttctatgttaaagctgcaattaacgttcttggatagctctcacagtaacttaaataggtaatctarattttctcttacctaaaaggacacttaaatctyawtttcttcaataattagaatggtctataaagtgagaataatacccggcca

SEQ ID NO: 1264 - DNA, 308 bp, Homo sapiens
  SITE (276): n equals a,t,g, or c
  SITE (298): n equals a,t,g, or c
ggtcatttgctgcttaaatccaaaatagttctctttttaattgggtctgaggcttcaggaccccaacttctgccagtgagagcactaaatgaagtcttcattggggagagtctgtcatccagggcttcctactatgagatttcakttgatgatggtccatgggaaaaacaraagarttccagggctcaatttgttgttactggaacaggatcaaargcctggtcmwtcmatwttaacaggtttgccactccagtgttaaaaaaattttttttaatntttgccaaacaacagaattttnatttcttccc

SEQ ID NO: 1265 - DNA, 384 bp, Homo sapiens
  SITE (359): n equals a,t,g, or c
  SITE (376): n equals a,t,g, or c
  SITE (379): n equals a,t,g, or c
gatcacactctacaaactttacaagaagggctcacatatttttgaggctttgctagccaacccagaaggaagtggtctccgaattcaagacaataataatcttttcctgtccttgggtctgcaagagaaaattttgaaaaaacttaagacagtggaaaacaaaatgaagaacctaraagggatwatcgttgctcaaaaacctgccacgaagagggattgctcctctgagccctactgcagctgctctgactgccagagtcccttgtccacatcagggtttacttcccccatttgaaatgtgatggactccaatcttttccaggaaagcactgtttcccctcatgtgtgcagtgggtgtntcaataaagttggggancgntattg

SEQ ID NO: 1266 - DNA, 461 bp, Homo sapiens
  SITE (404): n equals a,t,g, or c
  SITE (441): n equals a,t,g, or c
ggctgcccacctggcctacacacacgctgcctgatagccccaggccagcagctgcagagctgccagggccggcccagcggcgtgtgctccgacagtgccattgtgcaccagcagatcgtgggcaaggaccagctcttccagggtgccttcctgggcagcgagacccgcaatatggagttcaagcggggtagcggcgagtacctcagcctggccttcaagcaccacgtgcggcgctacgtgtgcgccttcctcaacagcgagggcggcagcctgctcgtgggagtagaggacagcggcctggtgcagggcatccgctgcagccaccgtgacgaggaccgcgcacgcctgctggtggactccatcctgcagggcttaaagctcagatctttcccgatgctacactntaacttaatccctgtgatcagtacctcggagaccagngtccccttaaggtgatcgct

SEQ ID NO: 1267 - DNA, 310 bp, Homo sapiens
  SITE (290): n equals a,t,g, or c
ggagaaactcacaagaaaaggctccatcctctttttctcgaactaagaatagactaaagtatccaatcaagtcatctggaagatccagctttgcagctacagcctggggatagggatagargtacagctcatcatactggctggttccaatcattctccaagcccaggaccccaggwtgtaggggaagaaggggcagtgctgaacaagcgcctyamctccaggacatcctyaakytgatctgaaagttagcacgttgaccagaactttttgcccgttgctgagcaagaanttccaaggcacttcctctgg

SEQ ID NO: 1268 - DNA, 687 bp, Homo sapiens
ggtttcaagaaaagtgcgaaggagcatatttctttgagattcaatgaatgtgcatccaacaggagcacctgggctgccaccttcagaccagaagagactgcggcgaatttactgattctattacgtgactgcccccagacacttggcaacacattgcctgcaaaggagctgctaactcatgtgctgaagctacatggaaaaaaatcaatgcccaaaatgttgctgcaattaattaagccttcacgagaaaacagggctgtacgttatcagtagttgagccttcccggcctgtttcataaggaactggcttctgtgacccaagtctgatgagcctgagacaagcttggctttacagcatcgagctgcaaaaggcaggtcgaagtcactgtgtggaaaccctgggctcctgcagacctatggttgtgcttatttccgaatgccttagccccttggcagggctgagaaagcgagagctcagtaggtcacatgaccacttgtgagccaatcactgttgcactgggatggcacacactgattggccagccctgggcagcgctcccaccctgcaggtgtttgaagtctgtgtatgagggatgtggtctggctatgggaaagcagggagctgtttcaataccaagggggcaggatttcaaagaagaaaaataaatcatttcaattacctagaaa

SEQ ID NO: 1269 - DNA, 444 bp, Homo sapiens
gttgggacacccagtatacggggaagaggcctggaagagcgccactcctgtttgcgaggcccccaggcagcaccagctgtaccactgccagagggatgagtacccaccccccgcccgccgccagcaggagacgctagatgtgggcagcttccagcggctgccgcagctggaccaccctaacctaatccaacgcaaggccatctcaggctatgctggcttcattccccgtttcacctgggtaatggggttgawttaccgagacggcgtcatgcaagccatggacgaattcgacaagagccagttcctgttttagaaacccccaytgtgacctgggcgagaagctgcctggaacacactggcccagcaaccacatctacagcagccaaggcctgatccccttytacatggggttcatccccgscatgcaggacaaytasgccctga

SEQ ID NO: 1270 - DNA, 508 bp, Homo sapiens
  SITE (423): n equals a,t,g, or c
  SITE (437): n equals a,t,g, or c
  SITE (457): n equals a,t,g, or c
  SITE (460): n equals a,t,g, or c
  SITE (494): n equals a,t,g, or c
ggagaaagagaatcagctmgcaatmagagaaaatgggaacatggctgcacaaatctgattatttatctgatgtatttttctgtttgatcaaactgagagatttaaaagagcctaactrattrgttttagttactttccttgattttttaaaatgcatattcaagtatagagcagaaattgagccacagtatatccmatatattctttttcagatagttctaactttaggatcttgattgtcgaaatgaagaacttctttgtactgtgataccaaattatgataaatgttagagtaaaatttcaatcttagttaaataaaacacatggaatctattctgttagtatggcaaaaaggcagattttttctttatcctgttaagtcctttccttaatgacttaatggactgaatatgaccctctgcntgttatttaattantaagtgaactggccctttcntcnttccctaaaatttgttgtttttattaagcaaacnccttgagggaaatc

SEQ ID NO: 1271 - DNA, 564 bp, Homo sapiens
  SITE (504): n equals a,t,g, or c
  SITE (544): n equals a,t,g, or c
  SITE (555): n equals a,t,g, or c
gaagtcacgcaaggttttgaatagaaacgcaatagggtctgataggctttagaaggtggctctggccgccctttggagaacagactctaggggaacagagaggaaggaagcccttctctttcttactccccgttaggtgcatcctggcagatgcgttccttgggagaacaccatgcagggtgcattcccatcaactgtaagagtttgaaggactagagagacttcatcctaatccgttcttaagtagcaggtccttagaaattcacccaggttttccgttttgtttgttactgttgktgtttgttttggaggggaggtccacaaagccattttcaatatgtcagtatgtctattggcgacgtcttgccttcctctaatgtggatagctggggagctgggattacatcatgkattgtgggcacactctggatctcawttgatcaaaagtycatttgccatggtgacatcactaagatatcaaawggktgawggggcctaraaagnaattaaagggctytkaagaccccatgggggcacggtcaancctttcatggntctttgata

SEQ ID NO: 1272 - DNA, 572 bp, Homo sapiens
  SITE (489): n equals a,t,g, or c
  SITE (505): n equals a,t,g, or c
  SITE (557): n equals a,t,g, or c
  SITE (562): n equals a,t,g, or c
gatttatctatgccaacggagaaaatcgtcagtgttcttagaaatagcttattaaattattgtgttatttttcatgggctttgttactgagttaacaaaaaggagtagggcatttaaattttgggatagttgctttagattgcatgtgtaaattaatatcttaagtattttttggtaaagagttaagcaaagattgaattatttttagatatttttaaaattacagaaacactacatttaagttagaaaattaggaaaacagtcatcatatggagagaacaaagaaataaaaatactgaagtctgaaagagttttagatgttttatgtgtaaatgaaattggtaccatacagtttttctaattttctaattaaatgtagtattgtgaatattttctcttgggaatgattacttttctttggagtttgatagtggtataaactgkttatattttgkattctatcarggaaagtattacagtaatgggatnaattataatttcattngagtgcgtctcctctttttaatatggattttgagccagtttttaggattccnttctnatggagtgtc

SEQ ID NO: 1273 - DNA, 361 bp, Homo sapiens
  SITE (329): n equals a,t,g, or c
  SITE (334): n equals a,t,g, or c
  SITE (354): n equals a,t,g, or c
gccagccccggccggagagggcgggggaaacctggcgggggtgacgaggcgggagtgactgggccgtacagttccccgagaactggaggcgaagccgggcggtgggaagggacttcggacgcttcgcgggccctgggttttcactgcgcgtgcgcgaggttcttccgctcgcgggagactgggccgctggcgcctctcagtgcccactgatggggcccagggcttgggcttgcttccccaaggatcaacagcttagctgcaagcctctgcttctgcctgctggggccggctggctcgcctttccattccgcttgcactctgattcttgnggtgnccaagaaggccgcggatctnaattaac

SEQ ID NO: 1274 - DNA, 883 bp, Homo sapiens
  SITE (845): n equals a,t,g, or c
  SITE (866): n equals a,t,g, or c
  SITE (877): n equals a,t,g, or c
gctcacccttaaatgagggatgggtctccccttttctttttctcattttcctagaggttacaagattcctgtttttctcaccaggaggagaggtcagcctcagtgagctcatagcagtcatacattgccagtktttttcctcaagtggaaggagaaaggccttcagaaaaaaaatcgtatgcaaacctagtgctaccaccagcagtagctctgaatcgagatttttgggagaattaggcttactaaagrtaaactacaataagtctcaaggaagcaaataattctgattctaatgaggaatccaagaataaaggcagctcttaaggtacggaagtgaactgtctgtgggtgacttgcctggatgccggctatagctgcagcccccaaagtcgaagctaccagaacaggttggatgaggatggcccaaagattatggagttgctggccccaaagcaagtcagacactatgggaagtttgcatgaatcatgcccttggatagacaacctaaatcatacctcatcgagcatggatcctggtcagcataccaagtcaaggcaagtaaagactgaagaaatatcacctggtctgcagctccccccagaacgaagtctgctactgatggcagaagcatagatagaccaagggtatcactatgtaatgatggaagaaggaaaaaccccatgcattcactcatgtcttgaatcacctagagaararagggaatctgccaaagtggacacaataraaattcagttctaaatttggaggaaatgagacccactctcagataagatgaaaagtaaaagccctaggatccaatggggtattaaacaaatatttaawngtaaaaaaaaaaaaaaacttnggggggccggnccaatc

SEQ ID NO: 1275 - DNA, 246 bp, Homo sapiens
  SITE (217): n equals a,t,g, or c
  SITE (229): n equals a,t,g, or c
gctttttagattttttttattttatattattattaccatgttcaaaatgtgacatatccccaaagatattttggtggtaattcatccaacatactgtaaatgttaaagtgcttctatatcattcatcccctwaatggaaacagatggcctaggagcttttgttaaactttaattatttatgaagctttgcttttcttcttaatattttatgaaatgnttttggatatgnaactggaagcaagaatg

SEQ ID NO: 1276 - DNA, 325 bp, Homo sapiens
gaagctggccactcagagacagcagtagctatgtctgtctcagtatgtggtagaccatgctgttgggcccatatatatatagcctccatgcctgccactgggctacttcattcagtacccactgtgtcagttctgggatgactaaaatcaactgggcaccatccaccctccccatgcattttaaatgcctgcatcatcatatttgctacagcattttacttcaccaggatatttttccaggtcatcatgagtgaagtcttgagccactgagccactaccaccttgtgccaaatactatctgtgccctgcctgccaaccaggatga

SEQ ID NO: 1277 - DNA, 421 bp, Homo sapiens
  SITE (383): n equals a,t,g, or c
  SITE (410): n equals a,t,g, or c
gcttagcgataaccaagtggcagacgtggcagaagaaaaatttgaaaccagggccacattgagcctgcaggcatgtctggcctgttctgaggacagacatttcaagcacagagaggcacaggagcactgtttgagcctggagcttaaatcgcgaatccagagagccctctctgagcatgcgttgtgcccagagttggtttcatgtggatcaactcaggcttctatggcagggccacagacaggggctattgtctggstcgtcttcagcagatggagcacagytggtytcctgcacacgtggctactgatcttgccattgtgagagacaactttcaattatcataagcatctgcatctgcccaaattcaacctcagtgatctgnctcagtagtggtttaaacagaatttangacttgagccc

SEQ ID NO: 1278 - DNA, 499 bp, Homo sapiens
  SITE (390): n equals a,t,g, or c
  SITE (495): n equals a,t,g, or c
  SITE (497): n equals a,t,g, or c
  SITE (499): n equals a,t,g, or c
gctcgtgccggatttaaataacttgtcatcattttattattgttacaggataattctcataaaatgtgtctgtttatatagtgcatgattctctatttttaaaataatctatattattgaattatttttacaaatgataaaacctataatatgacacaaatttaaattaatacttttggtagttttaaaacagagcgggaacatattctattaatagctatagacagtttacataagaaatcaggatatacaggcgtgagccgggggccggcatggtgaaactctatctctactaaaaatacaaagttggccgggaatggtggtgtgcgccttgtagtcccagctgctcgggaggctgaggcatgagaatcgcttgggcctgggaggaanaagtgcagtgagctgaaatggcgccactgcagtccacctgggggacagtgagacttcatctcagaaaaaaaaaaaccaaaaaagaattgaataactcttggttangngn

SEQ ID NO: 1279 - DNA, 362 bp, Homo sapiens
gttaggatcttcaaaatagttatgttttctttgccagcactgtcaggatgtcagtggtccagtgccacaggatgctgcattgagcaggcctctgataaaggcattggattgaatggccctttattcaaattaacttacaggagtctgatggaggggttatagctagaggattcctacaaaatgaatgtagattctagtagaagggttacagttgaggcaaaaatcaaaatttaccttgcttctttaagtgaaaaacctctctccaagagaaagaaattgaagtagaaaatgcatgctttaagactgatgtgcaggctgggcacggtggctcatatctgtaatcccagaactttaggaggatc

SEQ ID NO: 1280 - DNA, 788 bp, Homo sapiens
gtggcgtctgggtccgttggggcagaaccatggaggaaaagccttcgaaagtgtcgctcaagtcttccgaccgccaaggctcggacgaggagagcgtgcatagcgacactcgggacctgtggaccacgaccacgctgtcccaggcacagctgaacatgccgctgtccgaggtctgcgagggcttcgacgaggagggccgcaacattagcaagacccgcgggtggcacagcccggggcggggytcgttggacgaggggtacaaggccagccacaagccggaggaactggacgagcacgcgctggtggagctggagttgcaccgcggcagytccatggaaatcaatctgggggagaaggacactgcatcccagatcgaggccgaaaagtcttcctcaatgtcatcactcaatattgcgaagcacatgccccatcgagcctactgggcagagcagcagagcaggctgccactgcccctgatggaactcatggagaatgaagctctggaaatcctcaccaaagccctccggagctaccagttagggatcggcagggaccacttcctgactaaggagctgcagcgatacatcgaagggctcaagaagcgccggagcaagaggctgtacgtgaattaaaaacgccaccttgggctcgagcagcgacccgaaccagccccgtgccagcccggtccccagacccaagcctgaccccatccgagtggaatttgagtcctaaagaaataaaagagtcgatgcatggaaaaaaaaaaaaaaaawraaaaaaaaaaaaaa

SEQ ID NO: 1281 - DNA, 1126 bp, Homo sapiens
gcggcaccagagaattcacagtgaggagaaaccctttgactgtgtagattgtggaaaagccttcagtgctcaggaacaattaaaaaggcatctgagaattcatactcaggagtcttcctatgtatgtgatgagtgtggaaaagccttgactagcaaaagaaatcttcatcagcatcaaagaatccatactggagagaaaccctatgagtgtagcaagtatgagaaggcctttgggacttcttcccagctaggtcaccttgagcatgtctactctggagagaagcctgtgctggacatttgtcgttttggcctcccagaattttttacccccttttactggtaatagtacactccagtgaaatgtactgagtggattccgtcttctactcaggaatggaatgtgtgacacaggcctgactcagcctctgatccatccctcaagccacagttaatgattcagatgtcagtagatgaccaaagatggttcaattagagtcccaggattgcaagagctaataggaacaaatactctccccccgcccacccccattggttttaatgctgagaagaagaactagactcttacagaggtgagaatgaagtccacacagcaaaaatgcatctgagaattggagagcagtaaaagactgaagataatgtttgaacagccacatacaccatgcctgaagctaaaaatatatacgggtttttgaattgcagcagccaataaattccatttttgtttggttggttttggctttggcacacctgaattaggttttcttgccttggaacagaattttgacttaaacagtgttgtcattgtagcagttgtttgaagttttcagggataacatacctgatggagaaatgttttgtgtgtatgatataagggaaagtctttagttatagtcatggcagctcctcaaccccatgattgtgatgagattgggaagcccactgtaacactggagagcccaggttatatcagacaccactagtagatagaagttctaacaacttgagctctgtaacaaaaatctcattgtactacaaaattatgtctgcaccagtgaatccattctcaagmaaagtcttaactaggaaactaaaagcwttcactctt

SEQ ID NO: 1282 - DNA, 400 bp, Homo sapiens
gccgcagcgcgccctgtcccgccatatacattccgtgcttttcaaacacccgccgtgggctaagcatgggacccacgtggggcggggacacacggsgataaagagccaggccctcgctgccaaggagctttcccgtaacaccgatgcatcaaacaaaagttgataggccactgagctatgggcagccacatgtgttcctgatggaagggactgagtatctcccagagatcctggacacgaggagacatgctgtgagtggatgtctggaagccagtcctgagagagaagactctaaatccagaatttcttcaggcatttcaaacatttctatgttgtgtgcattatataaacaacacctatataacttgtcttaagaaaataaaagcaacaagattaactg

SEQ ID NO: 1283 - DNA, 355 bp, Homo sapiens
  SITE (315): n equals a,t,g, or c
ggcaaaacgtgttgaaaaaataaaaccctgccagatggagctaacacccattatggagattaaccacttttcatcaggtttttaacttaagtcgtgaggaatacaacggtgaacacaagattcattttattttcatcaccatgggacgtatcctgttgttgagttctctgggtcagamctctgaagacttctcaratggatcctartctctgggcttgccctgaaattactcgctgctcagggagagagttgaaatggttagtcttgttcaaagtcaacttcatctaagacacttcgcaggcccttgctatcagncttcaacacagtggttaaaggacaatttactctggcattt

SEQ ID NO: 1284 - DNA, 650 bp, Homo sapiens
tctagacatgtttttctgggtgaacgagataagcggagaaatcacctaccccccgcagaaggcagatgcacctgctgtttctcctgagagcccacaaaagaagcccccatttcagcccaggagtgtgcaggaggctccttgcagtccccagggcccgcctgcacagaggcctgcccttgcacctccatctaagccttctctgaaagactcaggctcaagaaacccctgcccatctgcacccacctgggccaggccaaagccggaggagtgaggagcccccaccgttctcagcaatccctgtcaccatctcatcaccaggagtgactctgcccatactcggacccctgggaccagcccttcagccaccggtctcgacctctcctctcagcccttytgcaccctgggccttcacctgcaagctgaacaatgtccttactgggaataactggttttccttttgaatcttaagaaaatttgtctggctacactctttaagcaccttcctgagccacccgtggccaggctytgctggccgcatctgcctggccccatctaccttccctggaagcacaggactcaccccaggggtctcacaggaacatgcccagtgctttcaaacccagtaaaattttacttagattttgaaaaaa

SEQ ID NO: 1285 - DNA, 644 bp, Homo sapiens
  SITE (636): n equals a,t,g, or c
  SITE (638): n equals a,t,g, or c
  SITE (641): n equals a,t,g, or c
  SITE (642): n equals a,t,g, or c
gtctccctccacttgctgctgctggagggtaagggagaagtgctgtatacagggcaggcctgcctttcctaaccccatcggtgcctctttccttgatatgatgtcagaatcaggagaaaaacaaggagagaaaaatctaaacccagcagaagagaaagtttaagaaagcggtcgtcgccaataccaaaattagctatgatattcaggaagaaaaaaatggaaacacgataaccacagtcaataaagaccaaggccacattccattgaccagagctcagccacgcgccacacctggctaaagagactctggctgaagaattccctgaatattttaatgtagctctaggttataacacagaacaaccacaaggtggcagaagaactccattcttgtaaatctcttagttgcttctttatttcatcttccctattccatctaatgttccctgaattttactattttgttggtttgaaaatatgtgtgacttacgtcctttaaaggatttggttcgtaaggttttgaatagactggaatataaaacatttatagaaaagaaaaatacctacagtatgatgttagtgaactattaataatccaattaaataaaatatatttgctttggattaatacaaaananganncc

SEQ ID NO: 1286 - DNA, 349 bp, Homo sapiens
  SITE (235): n equals a,t,g, or c
gatcactttaaacttggtgatgagtttaaatccagtagctaatcccttcctgagactcaaagatcgtgacgctggttggaatttctgactgtgccctttagggcctcctgagtttcaaaaggaggaagtgttcgtgcttgtgtccctgaagttccctgttgcatgagcctgcgacaggacctcacccccaccaccaggcttctatttgggattcacatcagtattagtatcgtanctacaccaagttcaggcttctctttttgtttttttacctagaaattgggctcagtggtcttcaacttgaggacgagggtgattttcctaagaaatcagccaaagagggaaggca

SEQ ID NO: 1287 - DNA, 450 bp, Homo sapiens
  SITE (311): n equals a,t,g, or c
ggttgaagtgaagttcagaccacatgaagaagccacacataggtgttccatccaacagccaacatcagctggtgtacatgttgtcttacaagtagaatgacaccaaggtataaaatttggctgagcacagaccaaagaccgattgaaactctaaatcaaaaatccaagtttctcctagatcgtgtttcctgagaagcaaattttgagatggttttgagtgatggatgtctacttaagagtgctcctgggaataacatctatwaaatcctggtggaggcagaraggaggaractttggactgggarggaagntaatatacaagtttcactgatcctgtgagactggaatgacccctcaaatttgctcaatttgaggcaacttggtcaagcattakttatcctacaattgataggttattgggtgcccccagagagagagaragagagagaa

SEQ ID NO: 1288 - DNA, 539 bp, Homo sapiens
  SITE (478): n equals a,t,g, or c
  SITE (490): n equals a,t,g, or c
  SITE (531): n equals a,t,g, or c
gcaaccctccccgacaccctaggaaagcagcctctctccgctgtcccagggtgccatggagatggagagcgcggcggcctccacacgtttccaccagcctcacatggagaggaagatgagtgcgatggcctgtgagatcttcaacgagcttagactagagggcaagctctgcgacgtggtcatcaaggtcaatggctttgagttcagtgcccataagaacatcctctgtagctgcagttcctactttagagctttgtttacaagtggctggaacaacactgaaaagaargtatacaacatccctggcatttctcctgacatgatgaactwatcattgagtatgcatacacccggaccgtgcctatcacaccggacaatgtggagaaactgcttgctgctgcagamcaatttaacatcatgggtwtcgcaggggttgctgcgaagttcctcaagtcagagcttgtgcttggataattgnatcggcatctgnaagtcacggctactactactggcctgactgaggcagaaggnctacatgg

SEQ ID NO: 1289 - DNA, 233 bp, Homo sapiens
  SITE (207): n equals a,t,g, or c
  SITE (225): n equals a,t,g, or c
ggaagattcttcccttaccctgcaatagtagaccagaaaaattaggaatatcttgaatttgaaagggacctaatgcctggcacatggctcacgcatgtaatctcagaactttgggaggccgaggcaggcggcttcacgaggtcaggagatcgaggactatcctgggccaacatggtggaaacctgtctcttaaaaaaaaaaaaaaanttagccaggggtgatggnatgcactt

SEQ ID NO: 1290 - DNA, 377 bp, Homo sapiens
  SITE (246): n equals a,t,g, or c
  SITE (284): n equals a,t,g, or c
  SITE (294): n equals a,t,g, or c
ggcggcatggctttacacccaaaccatcttggtgcttcatgacagccagatccctcacctcactgcccgagatggcagccacatgagacaggccctggaaataacagaggactgtctcaaagccagggtggaaagagccggattggacactcagcaaatgacaccatgaggacatggctggtggtgcaggcatcttcgcaccagacaacgttwcatgtgagactgcgcccaggagccgagtgaggnttctaggactctcaggagggagcagaaggaagcaactncccatgactncatggctggctggggcacaagctcacattcgggaagccacagaggggagcgtcttggcactttgtgccttagcactgcggtgc

SEQ ID NO: 1291 - DNA, 734 bp, Homo sapiens
  SITE (387): n equals a,t,g, or c
  SITE (395): n equals a,t,g, or c
  SITE (603): n equals a,t,g, or c
  SITE (625): n equals a,t,g, or c
  SITE (654): n equals a,t,g, or c
  SITE (686): n equals a,t,g, or c
  SITE (696): n equals a,t,g, or c
gaaactgtgtccctgattttgctgtgcaaatataaagtgacattacttaacacagtgccttggaagaggggaaagagttcacggcagcccccagctcaggccactgcaggtcccacctggccttacagcatagctagagggtcaaagccagtcaaagccccgtgtccacgcatgatcctctcagggcagcgtgatggcccgtccctggtggggctcattaccctgatttcaagtttccttctgctgcagggaagcctggtcccgcctacaaagagactgtctaccttgctagattgaactataggactatgttttcttcatctctgtaaccccagaagctctccagagacccttatacactagggacatggtcattgcttgtcttgntttcttgntgactctactctgacttagggcacatcgctttcccctctagatctccatattcagatctgtgaatgacagtaagtgggtgaaggcccctctagctttaaaacccctccaatacagagagtacactgaaaccggaagcagaagctgagtgtggtgaagtggagcattttcctggcatgatggaagggacctatggatcttggctatganggtgggcatctgggccacttgnaatggctcttgcaaaagctggacccctangtttttcaaatcaagacttcaaagaaatgganccttttaaanggggggggtggggtttttgggggggggcaataataaat

SEQ ID NO: 1292 - DNA, 490 bp, Homo sapiens
gctcggacatggctaattcatgaagcctctggtttgtattagacacccaacatgcctttcagaaagaaatgacacaacaattaatgtgtcaaataataatgtgccactcggagaaagataattgtacccatcgtcaggtakttattaggtcgaacgaatgctcatcctttcaaaggcaacagcgtctattcattctggcatcctactgtaagtacagtattgtgttcataatcacacagactgaagccaggaacactgggttttatctgatttttctccatttggaattgtactccgatgattccctraacagcaaactcagtcatgtgaaacacaaatgagtgtgatgaaagacagattgttatactgcaggagargctttctgtgcttttcacatratatagagcatgaggactgttcccaagaaggtttaagcatatgtaacaaaaactaccagacctgaatttgctcatgtgtaaatgatagtctt

SEQ ID NO: 1293 - DNA, 574 bp, Homo sapiens
  SITE (517): n equals a,t,g, or c
  SITE (540): n equals a,t,g, or c
  SITE (556): n equals a,t,g, or c
  SITE (564): n equals a,t,g, or c
  SITE (571): n equals a,t,g, or c
gcgcaccataagactctgccagaactgagaagccaacatttctacatagactcaacctcaccctctcctagttttccaacaagacactccaaagccaactggatttctcccctgtgctccaaatgactttgtacaagtgctggagttagcacctccctctgcccttaactggctggaactggttcattctccattactgcaagagaatggaagtcttaatagaaggaagcaggagtgattagttcgggttaaagcaaaagtgtgtcatgaacttggattccctgaagtcagttttgtcaggttcatggcccactttgctacagcatcagagtgaagcacgcctgtctaggttctccagtgacagaaagatcctgaagcatggactaacatgctctctggagcttagtactccagagctagatcctgatgggtctctaaggtcccttcaagaagacaaggacaggagacttgggaaggaccatggscaagctgacccttaaagccagcaatgctctgngctttcctccctgcgtcaacggnttggcaagaagcttgncctctggntgagcantgg

SEQ ID NO: 1294 - DNA, 757 bp, Homo sapiens
  SITE (422): n equals a,t,g, or c
  SITE (457): n equals a,t,g, or c
  SITE (527): n equals a,t,g, or c
  SITE (662): n equals a,t,g, or c
  SITE (669): n equals a,t,g, or c
gtatgtttccactttagtgagtggaaacctaatcattcataggtatcctgtacacacagaacaactatgacgaagagtgaggcctaaatcagaggagacgaggacaataatagtagtagtggtcatgatgataataataactaccagacatgaagattaaccatgcctaacattgtgttaaacgtctcacttctttcatttaatccttacaataatccaatgatgtagctgctattatttttattatacagatgaagaaactgagggcttgaggggtatactgctttgccaaagtcgtacaaatggtaagtgcagaaccaggatctgaattccgtcagtctgactgcagagcccacgctgacaccgtggaagctggtgatgcccattaggccctgctgggcatgaagaggatgcccttcctnatgagctggaacacagcatcccctgttgtgggtgnggctctcttaaagaccatctggtgaattttgcttgggctgggttcttattaaacaaccttcagaattggnttacgtgcaactcacatagagggaaaggagaccatgatccgccaacatgacagctgkatttttcattagtaaattarcaaactggctgsctgggtcamcatggcatacctgttaggtggaggcccgccccagagntaaaggntaccatgtgccaatttaactgaggattctgagtgtgcaagggttaacccccgtcatgggccccgggtgcccagggaaatcccttttag

SEQ ID NO: 1295 - DNA, 347 bp, Homo sapiens
ggttctgtccatgtgaatgtgctgtgtggaagagttaaaggcccaactaaatgttccagtgattccaatagctatttagctggtacctactgctatatcacctagtgtgacatttcggaattaatggaacaatgaaggaagctgtacactggaggttccaggtggtcatggaaggtttccagtttatgcaaacttctgtgaaaatgagctttgttattggtgaagacattggaaattttaccagccaaaacagagtttctctcttattcaggattgttcattgctgctgctgccgttgtgttttctttcaggtcgagaaacaacagcaaataagtacaagaaagttg

SEQ ID NO: 1296 - DNA, 309 bp, Homo sapiens
ggtggaactcactcaagcagaatgcagaccagcaggacacagaagccatgcccgattataagaaacagctccgaaacctgaaggaggagatagctgttctgtctgctgagaaaagtgcactccaaggaaggtcctccaggagccggtctcccagccctgcccctcgcagccgtagctcagccgcacagatctgccagcccctccaccgctgtcaagtcaggagaccgtccccaaaccgctccaagctgtccaatgtggcgcgcaaggytgccctcttgtcccggtcagcgattcctattcccaggcccg

SEQ ID NO: 1297 - DNA, 105 bp, Homo sapiens
ttaaaactgcaagctagtcacaggaaaaaagactccactttgactattttactagcaacacagtacctagtaagtgctctaaatatagagggcatgcatatttaa

SEQ ID NO: 1298 - DNA, 615 bp, Homo sapiens
  SITE (547): n equals a,t,g, or c
  SITE (555): n equals a,t,g, or c
  SITE (601): n equals a,t,g, or c
  SITE (615): n equals a,t,g, or c
gaaacaatcctgtaaagagaatggaggtcagaataaagaagccttgagggtttaaatcgcttcttgaaaagaaatgcccgtgtgtcaaggagctaagggagaccagcccaggaggagctgaatcctgccaacaatcacttgagtgaacttgagagtgaatcctctccatgttaagccttgaggtgattgtagctccatcaaataccttcattgtagccttgtgagagatctgagtcagaggatggagttaagccaagcccagattccagaccctcagaaacttgaaagcggaatacctggttatccggaggtcactgtctccacacagagtggtgtccttgatgctagcttggggcaaagaagccaggcaatcaaggctttaaatgcgtggatttatcatcacctcaaatcgcctgtcactgtgatggaacaaaaatagaaagttggctaatatcttcctgctarcatggttccatctgggagtttgatcaaagcaactttatcttgcgaaaattttgaaraatcaacttyatctcacttggcaagnatgggggnaaatgaaaggaatttctggaaatcccattttttccaaaatttaagntagggatccaaaan

SEQ ID NO: 1299 - DNA, 650 bp, Homo sapiens
gctcgtgccgaaaattcgctgcaagtacagcactttctagattgcycctggagtgtgggaacaacagtctctcctgtccacgttactgaatccagaaaaaagaaacaaattcaaggagcagcagccaaatacctacgttggctttaaagagttctctagaaagtgttcggaaaaatggagatccatctcaaagcatgaaaaggccaaatatgaagccctggccaaactcgacaaagcccgataccaggaagaaatgatgaattatgttggcaagaggaagaaacggagaaagcgggatccccaggcacccagacggcctccatcatccttcctactcttctgccaagaccactatgctcagctgaagagggagaacccgaactggtcggtggtgcaggtggccaaggccacagggaagatgtggtcaacagcgacagacctggagaagcacccttatgagcaaagagtggctctcctgagagctaagtacttcgaggaacttgaactctaccgtaaacaatgtaatgccaggaagaagtaccgaatgtcagctagaaaccggtgcagagggaaaagagtcaggcagagctgatggatccagtttgaaaaaacaaaatgccattcaaccgtaaaaaaaaaaaataataaaa

SEQ ID NO: 1300 - DNA, 1028 bp, Homo sapiens
  SITE (54): n equals a,t,g, or c
  SITE (936): n equals a,t,g, or c
  SITE (945): n equals a,t,g, or c
  SITE (1019): n equals a,t,g, or c
gccgtggccggggtcactccccgccgcccctccccgcacggatgccgaaggtgnaaggcgctgcagtgcgccctggcgctggagatcagctcagtaacttgcccaggagtcgtgcttaaagacaaagaggacatctatcttagcatctgtgtgtttggccaatacaaaaagacacaatgtgtcccagccacttttcccctggtcttcaatgccagaatggtgtttgaaaaggtgttcccggacgcagtagatcctggagatgtggttacacagcttgaatatgatacagcagtgttcgagttgatacagctagttccaccagtgggtgaaacactgtctacgtatgacgaaaatacacgagatttcatgtttccgggtccaaaccaaatgtctggacaccatgattcaaaccgccaggttaccatgaggaggatttctggccttcgaggaaatgctccaaggctggaattttctacgacttcagtgattactgaatgtctgataagttcaaggaaatgccacactcaggataaatttatttaccatttggctccagttgaaaaatcacatggcagactgcaaaacagaacatcaagatcacaaaagaaaaaatccaagtcacctgagagaagtaaatactgtataaatgcaaaaaactacgaacagcctacaatttcttcaaaatcacactctccatctccctacacaaaaagacgcatgtktgagctatctgaagacaccaggcggcggctggcccatttaaatctgggaccctatgagttcaaaaaagaaacagataaacctccatttgtgattagacatgttgatcccccaagtcccagggctgatactttattgggatcttctggaagagactgtgaaagagatggatggtcaagggtgcacaatgatcattctcatcttggctgctgccgnacccaaggnttataaggttatccaggacaccccatgggagagacttcgatgactctttaggaaaaatgtggaggggtatttgngccccaggt

SEQ ID NO: 1301 - DNA, 445 bp, Homo sapiens
  SITE (431): n equals a,t,g, or c
  SITE (438): n equals a,t,g, or c
gcccgggcgtccgcatgatcccagttgaaatcaaggaagcaggtggtactactacaagtaataatccggaagaagcaactttgcagaatcttcttgctcaggaatcctgttgcaagttcccatcgtcccaggaactagaggatgcctcctgctgttctcttaagaaagattccaacccaatggtgatatgccaattgaaagggggcacacaaatgctatgtatagacaattctagaacragagaactaaaagcactccatttggttcctcagtatcaagatcaaaataattatctacagtcagatgtccctaaaccaatgactgctttagtagggagatttttgccagcatcaacaaaattaaatctcattacacaacaacttgagggagccttaccatcggtagtcaacgggtctgctttcccctcgggntcaactnttccagg

SEQ ID NO: 1302 - DNA, 566 bp, Homo sapiens
  SITE (529): n equals a,t,g, or c
ggagagagagagagagagagagagaggtcacttctaagtaggatattggaggaatgaagaggtctaaatgacacgttaaggtccaagctcacccgtgaatcasaacttaccggaggccacggaggctgttaccgcgaggaaactctagtcctggcggaagaccaacttctagcagatccccttaccctggctctagtccactagctccttcctagtcacaaccgaactcacggggcggaggcccttaaggagcactcgcatccttcaatcgccgactagaagctcgcccggtgggcggagccgtgccagctcagggcagagcgaggaggcagaagtctccgcctttctcaagcttggttgaraagtccacctgcagttgcaaagtacggctgtttgaaagcggcgccagargtggcgggaagctccccctgtgcgcccattggtggattcgagagccaattacsaggaagtcaccccggartgggcggctgatcggtgctagaacccgagcgcttcaccgtacttcggncagggtgcagcagtcttacggggaccccttgcccgtt

SEQ ID NO: 1303 - DNA, 913 bp, Homo sapiens
  SITE (579): n equals a,t,g, or c
gggcacgatgtcctccctgacgccgccaggacagcgcctggcccaggcctgggcctggtgaacgcgggtttcttcctctgaggttcaacactccgcacttgggttggctcctttcatcctgattggtttattcgccacgtgccaagcactgaagagggcgtgcaggatggatacttttggagcaaaaatagccctgcttctttcctggggagggatcgcactttctagaggggcggttctcaaagtatggtctcaggactagcagcgtcgaaaatgctgggaactcgttagaaaagcaagttttcaatcctcgccccagaatcagaaactcggggtggagcccagcaatgtgtgtcctgacaagtccacgcgcgaccccagtgctggctagggttgcaaagccactgctctacggagcgagcgagatccatcatagtgggacaagcgagaggatgaggccatacagaccagggagagaggctycttacactgacattcaaagtcctcaatgacccggscccagcctacctctgcagccttatctycctacaaaccatcaaagcagaacaaaaacctgtncctycsatttaggttttagcaaaccacaagaagcacttcataaactggtgactcaagtagaaaagtactgttccacgcacttgacaccaatccacccatttcacctgcatgatcaccctgcctttgcatgagttgccggtgtggacagagcagggacacagtgagacagcggattccagctttgctcttacctagaacacactgcctctcaccaggaatcgtccttccattttatgcagttatcccagacaatgatgcacaagctttgggaaaaaaaccccacaagtccaaaggtgtacttcataataaaggcaagttatctgtcaaaaaaaaa

SEQ ID NO: 1304 - DNA, 1468 bp, Homo sapiens
  SITE (1271): n equals a,t,g, or c
  SITE (1468): n equals a,t,g, or c
gcactggtccctcatctgccaccgaggccaaggaagacccagagacctgcctcaccagtgctgccgttgtgctgaaagacaaccatgaatgctgattttctgctgccgtattatacggcccagagtggctccagcatgagcatgttcaacaccaccatggggaaactgcagcgacaactgtacaagggggagtacgatatattcaagtatgcaccgatatttgagagcgactttatccagatcaccaaaaggggagaagtgattgatgtgcacaaccgtgtccgtatggtgaccatgggcattgcacgtaccagccccatcctcccactcccagatgtcatgctactggcacgaccggccaccggctgcgaagagtatgctggacatggccaggccaccaagagaaaaaaacgcaaggcagcaaagaacttagagctcaccaggcttctgcccctgaggtttgtamggatctctgttcaagaccatgagaaacaacagctgcgcctgaagttcgccactggcagatcttgctatctgcaattgtgtcccgctcttgacacacgggatgacctctttgcctattgggaaaaactaatttacctcttgcggccacccatggagagtaacagcagtacctgtggcattccagctgaagacatgatgtggatgcctgtgtttcaggaagacaggaggagcctgggagccgtgaaccttcaaggaaagggggatcaggaccaggtcagcatccaaagcctccacatggtctctgaggtgtgtggggccacctctgctgcttatgctggaggggagggactccaaaatgactttaacaaacccactaatgtgctcaatgcatccatccccaaaacatctacagaacttgctgaggagccagcaacaggggggattaaagaggcagcagcagcaggggcagctgcaggggcagcaacaggcaccgtagcaggtgccttgagtgtggcagcagccaattctgcccctggacrggtgagcgcagccatagctggggcggccaccatcggtgcaggaggaaacaaaggcaacatggcccttgcaggcactgccagcatggctccaaacagcacgaaggtggctgtggcaggggctgcaggcaagtcctcagagcatgtttccagcgcatccatgagcctttcccgagagggcagtgtgagcctggccattgcaggagtagtactgaccagcaggacagctgcagaagcagacatggatgcagcagcgggacctyccgtctncacccggcagagcaagagcagcctgagtggacagcatggaagggagcgaacccaggccagcgctgaaggctgcaaggaggggagggaaagaagggaaaaggacagggctctcggaaggagttccatcggcgcaggacaggtgaaagccgcacaaaaccaaggggagacaagaattgcccaaaagtccttcagcaggn

SEQ ID NO: 1305 - DNA, 649 bp, Homo sapiens
  SITE (115): n equals a,t,g, or c
ggccgaccgagtgccggtcataagccccccccggtggggggcagctggtgtgcggatcgcggcgggagagaggcgcgggccgctggaccccgttgctaaggacccttgagatcgngagcgcttggagtgtacccctcctttcctggggtagagggtcagtcgagagtagccttcgttaaccttaattgaaactggagtgaaagggaagcaatgcagaaatcagagggctctggaggtacacagttgaaaaacagagcaacaggtaactatgatcaaaggacatcatcaagcacacagttaaaacacaggaatgcagttsagggaagcaaatcctcattgtcaaccagttctccagagtctgcaagaaaacttcatcctagaccaagtgataaactgaaccctaaaacaattaatccgtttggtgaacagtcacgrgtgccttytgcatttgcagctatttactctaaaggaggtattccttgcagattggtacatggttcagtaaaacacagattacagtgggaatgtcctcctgaaagtctttcatttgatccacttcttattactttagctgaggtaaatatgccatctcttgaatatttatcagaaaataaacattaaaaattgcattaaatgctaaaaaaaaaaa

SEQ ID NO: 1306 - DNA, 508 bp, Homo sapiens
cgcaacatcacactgagacagatatgagccctgcatttctgaatgccttgaaagaaaaaccagcaagttgggagggccgtgtctccttatcatcttccaggaattcaaaaccgtgatttccagtttccaaatgcaactcaagctccatcaccctgtacatcttgcacggtttctccagcatatcctgatcgccacctccagacccttctgatagattcattacctgaatctatttgattcataattattttcaaattggaaatggaaaagtattttctactccagaatcaaaattaccccacatggatgaagctgtactacagaaagaaataataatgttggcacccagagagaaaggatagtcagagatgcagaaagcaagactgctaatggagtttcaaacttggattccaattactctcccggacttcctgtaattcaaatatcagcttctcctttgattatgtgaccttactagatgtcctgccaataaattcacttcttatct

SEQ ID NO: 1307 - DNA, 496 bp, Homo sapiens
  SITE (398): n equals a,t,g, or c
  SITE (448): n equals a,t,g, or c
  SITE (487): n equals a,t,g, or c
gctcgtgccgatttcctgccttgaacgccagctgaacattgctagagatatgaaagaccgagccctggagagtgacgcagcctgtggcctggggggcgtttaccagcagatgggggagtatgacacagccctgcagtaccaccagcttgatctacagatagcagaggaaaccaacaaccccacgtgccagggccgagcctatgggaacctgggcctgacttatgaatccctgggcacyttcgagagggctgtggtctatcaagaacagcacttgagcattgctgcacagatgaatgacttggcggccaagacggtgtcatatagtagccttggaaggrcccwtcakgccttgcagaactattcccaagcagtcatgtacttacaggaaggtttaaggntagctgagcaactgggccgaagagaagatgaggcaaaaattcgccatggncttgggctcttcctttgggctagtggaaacttggaggangcccaacac

SEQ ID NO: 1308 - DNA, 655 bp, Homo sapiens
  SITE (407): n equals a,t,g, or c
ggggtgacctcctcggtaccctgcctgcccctccccaacatcctactcatggccagtgtcaaatggcaccaggggcagaaccagacatggaacagaccatccatagcccccaacatcttcctgaagaggattctcccattgaggtttgtggagctccaggtatgtgaccactatcaacgcatcctgcagttgaggacagtcactgagaagatttattacctaaagctccatcctgaccatcctgagactgtcttccacttctggatccgactggttcaaattctgcaaaaggggctgtccatcaccaccaaagaccctaggrttcttgtcacgsactgcctggtacccaagaactgcagcagcccctcaggagatttgaagttagtacagaagaaactccaagcctnccagcccagcgagagtctcattcagctaatgaccaagggggagagtgaarccctgtctcagatttttgccgacttacaccagcagaaccagttgaggagcagcagaaaggtggagaccaacaagaacagctcagggaaagattcttcccgtgaagacagcatcccttgcacctgtgacctacgttggagggcttcatycacgtacggagagtgggaaagagagaacccctccggcctgcagccccttt

SEQ ID NO: 1309 - DNA, 589 bp, Homo sapiens
  SITE (492): n equals a,t,g, or c
  SITE (514): n equals a,t,g, or c
  SITE (579): n equals a,t,g, or c
  SITE (588): n equals a,t,g, or c
gttctcttctgctgggcctttgaacaagaagagagacctaccttcaccaagctcatggacatgctggagaaactgccaaagcgaaaccgtcgcctgtctcaccctggacatttctggaagtctgcagagctgtgacctttggacatcgggacggcgcccagctgcctgggctcccgtcacctctccctccctactctgtcctctgccagctcaggaggccagagactcagcatcagagggtaccaaccccgaccgacctgggagcactggacaactgytcggcggcctccctgcacctcarayttgagcccttttcctcgggcagggttggggacccccgagytaggaytgaaccggaccaagccagggtgatgcgttattgatcaagtgcggcccargggacaagcactaatgagagcactgaagctgcatgtggtgcctttgggctatgggaagtaggacaggagaccccacgtgggggggctacagacngggctatgtgtgtgtgtgctgngggttgacgttgttactcttggtccccttgcaagcaaaagcagctggccaatgacgggcactctnaaaaaaaang

SEQ ID NO: 1310 - DNA, 458 bp, Homo sapiens
  SITE (307): n equals a,t,g, or c
  SITE (370): n equals a,t,g, or c
  SITE (415): n equals a,t,g, or c
  SITE (429): n equals a,t,g, or c
gggcgagacggctactcaggcccaccgcgccgggagccgctgcccccgcsccgcgacccctacctgggcccgcgggatgagggctactcgtccagagacggctactcgagccgagactaccgcgaaccccggggttttgccccctcgcccggagagtacacccaccgykattacggccactycagtgtccgggacgactgtcccttgagaggctacagcgaccgagacggctacggaggtcgcgaccgtgactacggggatcatctgagcagaggctcccatcgagagccctttgagagctacgganagctgcgcggcgccgccccaggacgggggacaccgccatcttacggaggaggaggccgctacnaggagtaccggggctactcacccgatgcctacagcggcggccgcnacagttacagcagnagttatggcccggagcgaccgctactcga

SEQ ID NO: 1311 - DNA, 889 bp, Homo sapiens
  SITE (830): n equals a,t,g, or c
  SITE (842): n equals a,t,g, or c
  SITE (888): n equals a,t,g, or c
gggaacagcgcggagcaggttttttaaaatatattctttctttaaaaagagaccaaaacctgtcaaaaaaatactaccgtggaaagctcataaatactacagtgtgaagaaccctgtgcttatcttcagtttatcatcagacatcttagggaagtttaataaagaacaccaggagaattgagaattaaatgaaaaggtaaatccttttaaagacctcagaagatggatctgtttgtttcaatctgcttttgaggttttacttttcttttattaggttgtttgctatgtctttggctgatctaacaaaaacaaatatagatgagcatttcttcggcgtggcattagaaaacaataggaggtctgcagcatgcaagagaagcccaggcacaggcgatttttcacggaacagtaatgcttccaataagagtgttgattatagcagatctcagtgctcctgtggaagtttaagttctcagtatgattattcagaagactttctctgtgattggtcagaaaaggctattaatagaaattatttaaagcagcctgtggtaaaagaaaaggagaagaaaaagtataatgkttctaaaatctyccaatctaaaggccagaaggaaatatcagttgaaaaaaagcacacctgggaatgcatcactctttraattctcaaatccatatgattgcccaaagaararawgctwtggctcatcgaatactctcagcaaggcttcataaaattaaaggactaaaaaatgaattagctgatatgcatcataaattggaagccatccttacagaaaaccatttttgaaacaacttcagcttaggcnttgaaagctatngggaatatgagattcacaaataatctacctcaattatggctaaacnc

SEQ ID NO: 1312 - DNA, 546 bp, Homo sapiens
gaaccatgccatctaagtctacatcatcccatgtcaaacagtcttctaatctgacagctaatgacctgccccctcaaggcatactatcccaagacacatcatctcaagatatgctgtttcatgacatgacatcccaagatatgcaatccctagatatgctatctcaagacacaccatcccacgccatgccacctcaagacataccttcccaagatatgctatcccaagctctatcagcgcatgccatattacctgaagcctcaacatcccatattgtgcagttccctgaaatacaacacctacttcagcagcccccagatcttcaaccagaaaacactgaacctcaaaaccagcaaattttacaaatgtcatatcaagatattagatcagaagttatggaagagaccaaaggaatgggaaatctgaggagggaacttccataggaaggaaaatcctcaagacgggcatttcctttaaaccagcaaaccaaaggcyttgcaatactttwrggggacmttctttagacgtgcaagccaaaggccagaa

SEQ ID NO: 1313 - DNA, 1093 bp, Homo sapiens
  SITE (52): n equals a,t,g, or c
  SITE (935): n equals a,t,g, or c
  SITE (1052): n equals a,t,g, or c
  SITE (1068): n equals a,t,g, or c
tgtcctgccgggaggacaggatcaagtggtggcccgtcagcacagggtcctncgacagccgggtagaaaggccggtgcagcaccacattgtccacccgcggggtcttaatcagctccgcaaactccatgctccccccgcggccggagccagggaaccgagcccggcccaaggaccgccgctgccgttgggctccgggtcccgcgttggcaagcggagggcagtaggagaaagccgcctcagaatccgcttccacgccctggccgctagggactcctagcrgaagtggctactcgctgctggagcccacaacaactccgggcggaagcagcaggtctcgaaactcggaagacgcggaagtcgcagccggaagttggtcctcgctaggtcctctggaaatgcctccggaaacacagccagaccagaagatgtgtgttcctacgagaaaaaaagcttgtctttgccttcacgccctcccgctgcctttcttaaccacctacaaatattccttatcagaagaggtccgggaagagggaggaggtccctgtcttgccttcctccgcttgagtagtatcccctccagaagctcttcagagcgtggggctgctgtaaattgtgataattgttatgcattagccctgaagacatggcaagtaggggatggaggcggtgactgtgaccttacggaatcctccaggggtcagggagggacacagggccactccacaggctctccgagagcgccgcgccacgaggtgtaacctggagcaagaaagaggaaaaacaggaatacctgtgagaggaacccaagtacatgcagtgcacagaagagcaagtcacttgacttgctggcggcaccccgttaatctgcagcagarcctggacttcagtctgcatctgtgaaacccagcgcatgggtgccgttggtcaccaccgnacaagctcccgtcaagacacccacgtttcgccmaaaatttattcaaataattactcctttgcttggtcctttccaccggccacttttkacaatttattcaaaagtaggaaatagaanaagaaatatgtttgantggcttgggcctgcttgggacttca

SEQ ID NO: 1314 - DNA, 734 bp, Homo sapiens
  SITE (537): n equals a,t,g, or c
  SITE (654): n equals a,t,g, or c
  SITE (681): n equals a,t,g, or c
  SITE (684): n equals a,t,g, or c
  SITE (691): n equals a,t,g, or c
  SITE (702): n equals a,t,g, or c
gggcaggtgaaagatagttwtattcagcggcagctctcattaacagctttcttacactagctctcttattagcagcttactcttccactgttcgcctgtctcagcagcttgagccagctgcccctacacatagctgcgcagccagctctctcttgccttcagggtcagcagcttaactccttctctctctgggcatgagcaagcccagmtgtgtcctggctccctcccatctgcctgcaagatggacagctttggctctctctttctctgggtgccagtgtgctcatcatgtcaagccatgttaagccaaactgagccaagccccgaagagccatgtctcttatgcacggcatcaacagggcagttataccttttacagacaatagtggcataaagccaggaatgaacttacacaaacaggttatattacaagtggagctgtgtgcttgcacgccaaactcgtgagtcacacaggcctagatatccacctyggcctattccttgaccaaagcacatctatgtaccttactatgtggnttgtgtatgttggccaggctggtctcaaactcctgaactcaagtgatctgcccgcttcagcccccaagtgctgggattacaggtgtgagccactgcatctgacccgggaaaggatgnatttttgctcatttagcaacacttctnggnctttaangctttctatgntattgaaattccttatagagaattaatgccgg

SEQ ID NO: 1315 - DNA, 619 bp, Homo sapiens
  SITE (541): n equals a,t,g, or c
  SITE (583): n equals a,t,g, or c
gaaatttagaaactgtatgtatagcttcatgtttttcataaaataggaatgaggacaaatgttgctcttcatcctaccagctgtttgttctttggtaggggatcatgagtggaaaaacaaaggcaagaagggctgccatgttttttagacgttgctctgaagacgccagcggtagcgccagtggcaatgctttgttatcagaggacgaaaatcctgatgcgaatggggtaactcgatcatggaagattattctaagtacaatgcttacactgacttttcttcttgtaggactcctaaatcatcagtggcttaaagaaacagatgttcctcagaaatccagacaattatatgccataattgcagaatatggttcaaggctttataaatatcaggccagacttcgtatgcctaaagagcaactggaacttttaaagaaggaaagccagaatctggaaaacaattttcgtcaaattctatttttgatcgaacaaatagatgtcctgaaggcattgctaagagatatgaaggatggtatggacantatcacaactggaacacccatggagacctgtggaggacccgnaccacacagaggaagtgtcaaacttggtcaattatg

SEQ ID NO: 1316 - DNA, 820 bp, Homo sapiens
  SITE (750): n equals a,t,g, or c
  SITE (789): n equals a,t,g, or c
  SITE (801): n equals a,t,g, or c
  SITE (819): n equals a,t,g, or c
gctgccgtcagcctgcgccccaggagagaacgtggggatctcgaagctgtcgtcaaagatgccgaragcaaactgtccgtagccctgcggcagcgtgaacaggtgctggtccgcgttctccaacggcggccggctctggtccgtgggggcagtggaaggggcagagctgttttctgtgctcctggtctcttcaggaagctcctcgataaaatcagacgcacatcttgggcagatataatccgataggcgcgggacggtgtccagggagcagcagtggcagaagaaccgtcctagctgctgcgacgcctcggccctggccaccgcccctactctgcgccgccgcccccgcgagcgccaaccgccggccatttgctgstcctcgctgatcgacgcccaaaccttttatatactatgtttttcctacctacatatctatgatcgagtttaatttacaaaataggcgcttactaaggaagcgattaacaacaataacgaataataaacacaacaattgagtcaaataagggttacttgaacacaagcactgcaataccatggattggtctgataactaacagctactaagagactaatgggcaagtagcatctacagttcagatacactgaacagccggaggattcacaggccgggaggggtgaagcaagacggtgtgagatttcatcacggcactcagatggcaagcaacttgaaacatgattatttctggattttcagtttatatttttggnctacagttgaccgagggaacagccctgtttttttggggngctttaggtttncaggttgcagaggagctng

SEQ ID NO: 1317 - DNA, 535 bp, Homo sapiens
caatgggacagagactctctagaaagtttcagggctcacattcacttgtttgtccaaaaaatatttttgagtgtctcccaagtgccaaaccctggctactcccacctttgcctgarcccatgarcggtagtctgggggctggatktgaggagttctgagttggctaggaagacacaaggcacaatggacatggggcaaagtccacttgctggacattggtcccttccacttccaagctgtccatcaggctgagagatctggaatgcataccccacactttgaagatgaggaagggcgagtttctcaaagtgtgtgtgtgtgtttctcttttaatctgtartggtttctgcattttgaggtagaaacagaaatctcttttttgagtgggaccactcgggtgcggcttcttagtcttgttgatataataaagcacatgcccactcctcatggagtggagaggagaaaattctaagggaacgtactctgaatgcaaatgtttctgagattaaacactagtcacttgttaaaaaaaaaa

SEQ ID NO: 1318 - DNA, 719 bp, Homo sapiens
  SITE (650): n equals a,t,g, or c
  SITE (657): n equals a,t,g, or c
  SITE (681): n equals a,t,g, or c
  SITE (706): n equals a,t,g, or c
  SITE (716): n equals a,t,g, or c
ggttttatttaaggtagaggtcaagctagcgcttcgagaatcatacataatcagccctaacagtatctctattgtagcccccttctgggttgctcataggtatcttacgtgtcataggaaggaagtgaacagttattggaggaaatagcactcttctgttagtgttgcaggtttagggagtggacagtaactcatactgttttttggtgttgttcctatttgagtttggaatcaaaggagcactagacatagtaggcagatcaaatttaaaaataaaaacgrtcttcattactgatgaaagtcagattagrgactatatcctttttcagcaatcctagaggataggaggctcttgttctctccagtttacagttgtggctgatatacctctctgcccattttaccagcatccaggtggccaatagcagaagctgatggaaggatgtcaaccgaacaagttcttctgtgtatttggctgttcagtgcctcctctgagagagatgctcttctcatttcttgtttgtctgattcatttaatatgatgctatcgatataaagaatactgtcaaggtggcatttatagtttgtcttaaattgggtgattaatcaccctcaagatttcctttgtctttcttcagtgcaattattgngaacaanaaggatccatgcattgtccttaanaattcctagtttcccccaaaagtantccttgtaantta

SEQ ID NO: 1319 - DNA, 1025 bp, Homo sapiens
  SITE (941): n equals a,t,g, or c
  SITE (1009): n equals a,t,g, or c
  SITE (1025): n equals a,t,g, or c
gcagagattgagaaaatctgccaagactaggagggtaacccagaggaaaccgtcttcagggcctgtttgctggctatgccttcgagaacctggggatcccgaaaaattaggggaatttcttcagaaagacaatatcagcgtgcattatttctgtcttatcttatctagtaagctgcctcagaggggccagtccaacagaggtttccatggatttctgcctgaagacatcaaaaaggaggcagcccgggcttctaggaagatctgctttgtgtgcaagaaaaagggagctgctatcaactgccagaaggatcagtgcctcagaaacttccatctgccttgtggccaagaaaggggttgcctttcacaattttttggagagtacaaatcattttgtgacaaacatcgcccaacacagaacatccaacatgggcatgtgggggaggaaagctgcatcttatgttgtgaagacttatcccaacagagtgttgagaacatccagagcccgtgttgtagtcaagccatctaccaccgcaagtgcatacagaaatatgcccacacatcagcaaagcatttcttcaaatgtccacagtgtaacaatcgaaaagagtttcctcaagaaatgctgagaatgggaattcatattccagacaggaggtggtgcctcattctgtgtgctacatgcggatcccacggaacccacagggactgctcctctcttagatctaacagtaagaaatgggagtgtgaggagtgttcacctgctgcagccacagactacatacctgaaaactcaggggacatcccttgctgcagcagcaccttccaccctgaggaacatttctgcagagacaacaccttggaagagaatccgggcctttcttggactgattggccagaacctttcttattagaaaaagccagaagtcctctcgtggcaagangagctactcctggaggtccaagggtgcaagaatcactaacaggttgcaaaaaatccaagtacaccttntgagaactgttgtccn

SEQ ID NO: 1320 - DNA, 976 bp, Homo sapiens
  SITE (836): n equals a,t,g, or c
  SITE (938): n equals a,t,g, or c
gcgccgcgcccgccgccgcgatgtccggggccggcctagccgcggtggtgagctgcctgcgcccgcagcccggcgaggagccgcagacccatgaggaccttctcctggcagctgcctatgttttggatgcccagtacaacagaaatgttccatttgaaactcacctcaggccatcagacgttactatttttataaccactagacaacgcaggttgccgcatacttctttatttgtgtagacctcgctcttgccctgtttgaagagtctgagttgcttcccctgcctttcttggccacctcaatagcagaagtactctgcctgactgcatactttggcagactggtacattttgcaaaagtcactcctcaaatggttttctggaaggatacaaaagacatctgcaccatggtaaccacagtggcgagtgttcattgtagtacctgtaagagtttatgaccgaaggcaggagccatgaagaaaaaagactcaatagatttgcttttgatgaaacaacaacacttccatacagtgaacgccataagcacaactgcaagcaaaccscaaactgaagaacaaatagggcaaaatgtggcagtgcagacatttcagcatatcaagagcacttccaaattacaggaaaaaaaagatatctcaatagataattttgctgaagataagtgaaggcaactcataaggaaaaaatatgtaaaatggccgataggaaagatgtttaacgtcactaattaaaaattatagaataaaacgacaataaaataccatgtgtttgcctataaaaaatcttaggcaagattgaaaacaaactttttgtaatttncaatttttagtttaggattcaggtgggtacatgtggcaggtttgttacctggggtatattttcgtggtgggtgaggtttgggggtacaactgatcccctcantcggtagtgagcctggattccagcggtagttttttcac

SEQ ID NO: 1321 - DNA, 630 bp, Homo sapiens
  SITE (455): n equals a,t,g, or c
  SITE (460): n equals a,t,g, or c
  SITE (597): n equals a,t,g, or c
  SITE (605): n equals a,t,g, or c
  SITE (609): n equals a,t,g, or c
  SITE (612): n equals a,t,g, or c
gctggcctgttggcgtccctggcagttgttgggttctggcggttgttgggtccctggcagttgttggcggttgttgggttccttcattgaaactgcactaactgggcttccagtcagcgtcagtcagcggatccttgggccgtggggcagccgcaggtcggttaggccaccagggcggctctcgtgccagtgaggcccctgagagccctttggtcagacagaggctaaatctgaacagtcaggcggtgagattaagcatagtcagggagttcgccaggagccagcgttcctcarcctccaccacgtcagtcacctggtcagccagagggcarctggggcgacatccatctaccaagaaggtgaacaggccttcacgatgaccagagacagaagcccctgacttggctaaagatacttctgctctccctatcccacatcctcttttcagtaccatnacctnaattcttcttgaaccatatgggtctgaatgtcaaagccaggtgtaataaaaaacttctgctggtcctgaaaaactggtgcttctggaaagtgatgctttcactgggtacagcttgggaaagaagttctttggcttgnccaaggcnttcntgnaaagggcttaatccaggg

SEQ ID NO: 1322 - DNA, 578 bp, Homo sapiens
  SITE (478): n equals a,t,g, or c
  SITE (537): n equals a,t,g, or c
gccggtagcgacacggagccggctcccccttttccagccttcctccccatctcccattctccatcccccacgacctataccagaggtccttaggcctccacgtctctccttttgccgagtagcccaaggtttccacccatctgccagggggatggcgtccactccgatggggaatgagggggagaagaagagcagctggccatctcaagctgcaccctccttgagaggaggtccggcttcgttatctcgttctgaggaatacctgtcccagatcagtgcagaactcatggaggaggctttgtgcactgcttgctgccacttgaaccctgtgcccatcaaaaaaaagcagtcacaagaccaagcgactcaratatccaaacgcgcattcttcaccaagacctgaggcacagacacctggtgagtgaggcttcaagggagatgctctttgtcctgggagagagccctctcccctctyttncaccatctcctgctcggacagaaaccgtacctgsagcaaggcatacctcctgccaactnctggtgaaaagaacatgcctcaaaactactcttttgccact

SEQ ID NO: 1323 - DNA, 503 bp, Homo sapiens
  SITE (423): n equals a,t,g, or c
  SITE (473): n equals a,t,g, or c
  SITE (501): n equals a,t,g, or c
ggtcccagggcccagcagcataaacatgcgggctctctgatcccgacctcccgacatacccatttgtcctggccgctcctcggacacatgaatgcctgtctcaaaccccacccttcaccgccagcagtctccggggaagtgacaaacaccggatagagccaatgggcccccggagtccggatgcccacyakccggggctgtttatgtttgagcccatcttggaagaaaaatgtgagaacgcctgttcagaacatggtggccaagccgggtccatccggtgccagggagccaaacacaatgggaaaggaggcgcagacgcggcggaaggatagggccgggcatggcccgccgagggagaccgctgggccaggttgggtccttcctgcgccttcttgtcctacgctgtgaaaaggcacctggggntcttcttccttcacccgggaattttctgatcactcatacttcctcttggnccaccgagtcctgtgaaccacaatcttnaa

SEQ ID NO: 1324 - DNA, 566 bp, Homo sapiens
  SITE (492): n equals a,t,g, or c
  SITE (517): n equals a,t,g, or c
  SITE (543): n equals a,t,g, or c
  SITE (553): n equals a,t,g, or c
  SITE (560): n equals a,t,g, or c
gcaaaaagccagcgttaacaggctcagagaaatgaagttgaaaggaatagatgtagctcctgaatagaagcaaaagtccaacgtggttccattaaaatgacttctcagccgtctctccctgcagatgacttcgatatctaccacgtcctgactgtctccaatgtttttttcaacaagacgcactgacctggaacaacgaaattcactgctccttttgtgaaaccaagcaagaaactgctgtgagggccagtatttccaaagcaccaaaaataattattttccacctaaaaaggtttgacattcagggtacaacaaaaaggaagctgagaacggatattcattacccactyactaacttggacytmaytccttawatttgctcaattttccggaaatatcctaaatacaacctctgtgcagtggtggactagatcttttccatcaattggaaaaatctggatgaaattatttctgcacttaatgatctactgnaaccagataatcgccctttgtatgngcccatggcaggcagtaccaccaggnataaattacncagaacntaaaaa

SEQ ID NO: 1325 - DNA, 562 bp, Homo sapiens
  SITE (324): n equals a,t,g, or c
ggtttctataggtagaggataatgtgtcctaaaatgtaggtagagataagtctgacagtggtttagacaaaaagggcctctgctaatggtggagagatcaaggaagaaaagagcaacgttaaagtgaggctgtacccacagatcatgctcaagcaaattcgaacctgtaagatgaaagaggacctgccctccattctatctactccctctctgcaaaggccattttgaagatctcagttttactgaaaggggtctgccacacataacttccctggtgtaccagcamcaagtgttcagtggaccatggcaacacaaagaatgacnggaggagagaaaatgccatgcagaagtgatagtcaagatgaagatgtggragaggagcagcccccagtatatattcagtgkgtcctctgaagtaacaaccwtcccatctggctgagaagtgatggacacggctccttaaccacactgtaccctctgttcttggcacctctctaccagaaagatatcaacaaattggatggaattcagagaacatgacttctattatccttctcaaagt

SEQ ID NO: 1326 - DNA, 633 bp, Homo sapiens
  SITE (243): n equals a,t,g, or c
  SITE (519): n equals a,t,g, or c
  SITE (537): n equals a,t,g, or c
  SITE (573): n equals a,t,g, or c
  SITE (616): n equals a,t,g, or c
  SITE (633): n equals a,t,g, or c
ggacacgggtttgaagaagagatcatggaatataaggagcaaatcaaacagcacgcccagacaattgtgagcctcgaaggaaactccagaaagtcactcagcaccataaaaaaatagaaggcgagattgcaacattgaaggacaatgacccagagatgacttattggctgctcagaaggaaattctgtctcagcaggaagtcatcatgaagttaaggaaagaccttaccgaagcccacagcanaatgtcggatttgagaaggggagctaaacgagaagcagaagatggaactggagcagaacgtggtgctggtccagcagcagagcaaggagctgagtgtgctcaaggagaagatggcccagatgagcagcctggtagaaaagaaagatcgggagctgaagcccttgaggaggcactcagggcttccaagagaaacacagactccagctgaacacagagaaggaacagaaccccggaagaagacccagacgtgtgacacctctttgcagatagaacccntccacactggaggccttnttcagcagccaagagcagaattccttcacgatctangggtcaagtgcaaagggtcccggcaccaagaggtcattaacgntcagaaaaaggcctttn

SEQ ID NO: 1327 - DNA, 520 bp, Homo sapiens
  SITE (448): n equals a,t,g, or c
  SITE (483): n equals a,t,g, or c
  SITE (503): n equals a,t,g, or c
gattccattgaaagctacatgcgaacctggatgtaagtttggtgagtgcgtgggaccaaacaaatgcagatgctttccaggatacaccgggaaaacctgcagtcaaggatacttgacaatgactggggacaattttggttgtcataactggatgtgggaggtactcccggcatctagtgaatggagcccagggatgccgctaaacatcctgcagtgcacaggacagtccccacaacaaataatgatttgtgtcaacggaagttaagaaaccctggcatgaagaaatcttcaataattcaaaaagggtccccagtcctataaggaagttgaacaaagagcagtaaatccaattcagctgcccttggagaatggagtttcagagaagactggacacccactycactctaccactyccagcccttgctgccaagcccagagccttccttgnccttgtggcaagcctgatcaaagtccacgtacatncattaatggtgacaggcctnagccttaactcatgtct

SEQ ID NO: 1328 - DNA, 508 bp, Homo sapiens
  SITE (248): n equals a,t,g, or c
  SITE (253): n equals a,t,g, or c
  SITE (348): n equals a,t,g, or c
  SITE (495): n equals a,t,g, or c
  SITE (504): n equals a,t,g, or c
gaggacccggaccacacagaggagcctccatcattgaagctgggacctcagaaagttataaaaataataaagcaaaattgtactggcatgggataggtttcctaaatcatgaaagcctccagatattattcttcagccggrtgtctaccctggaaagtgctgggcttttccaggttcccagggtcataccctaatcaagcttgctacaaagatcataccaactgctgttaccatggagcacatctcanagaangtgtctccgtcaggaaacatcttccagtgcacccaaggaattttctgtctatgtaagaagctatctaaatttgcattcagattggctgatagaangtggttggctaggaattaggggctgtcctctgaactaggacagataactagttgtgtcacttatttcctggacttctgctttctcacctaccaagagagagagttggaccaaatgatttatattattatttttacttttatcaaagntatacatgnataa

SEQ ID NO: 1329 - DNA, 251 bp, Homo sapiens
  SITE (232): n equals a,t,g, or c
  SITE (239): n equals a,t,g, or c
gctcagctctgtgtgtgatcccttaggttttgtgccgtgggcatctcactcgcctcaccctagtcccagctctactgtgtggtctgggagttagaatcaagtccagtgaactgctgagaggggacagggaggctgatttcagctcatccttgagaatggctttctgaaggatcaaagtggaaacaatggaatgagcttcccccaacacatggagtatgcaagcagggcttancgcttgntaagaaggaaaa

SEQ ID NO: 1330 - DNA, 530 bp, Homo sapiens
  SITE (477): n equals a,t,g, or c
  SITE (483): n equals a,t,g, or c
  SITE (511): n equals a,t,g, or c
gccggtgctttgttctgtctgaggccaggaagtttgaccgcgctgccatgccgaaccgtaaggcsagccggaatgcttactatttcttcgtgcaggagaagatccccgaactacggcgacgaggcctgcctgtggctcgcgttgctgatgccatcccttactgctcctcagactgggcgcttctgagggaggaagaaaaggagaaatacgcagaaatggctcgagaatggagggccgctcagggaaaggaccctgggccctcagagaagcagaaacctgttttcacaccactgaggaggccaggcatgcttgtaccaaagcagaatgtttcacctccagatatgtcagctttgtctttaaaaggtgatcaagctctccttggaggcattttttattttttggaacatttttagccatggcgagctacctcctcattgtggaacagcgcttcctcccttgtggaaattggctgtgttnaagtantctcttccaagaaggtattatgggcagntttccacagttttataaaa

SEQ ID NO: 1331 - DNA, 436 bp, Homo sapiens
  SITE (429): n equals a,t,g, or c
  SITE (433): n equals a,t,g, or c
ggcctaatgaagatgtggacgaacagaccccatcaacctcaagtaccaaagggaggaagaaggggaagacaccccgtcaacgaggtccagaagcggcgttaagggcctaaagaccaccaggaaggcgaaaagaccccttcgagggagctcgagccaaaaagccggtgaaactaacacccctgcaggaaaacctaagaaagctagaggaccaatactgcgtggtcgttatcaccggctgaaagaaaaaatgaagaaagaagaggccgacaaagagcaaagcgagacctcagttctgtgatgtctctagaggtccgccactgaaaagtcatcaatcatacagtcagtgaattctacaccaacaggttaaaaccatgaaaataaaatcaacctgaatcgaaaaaaaaaaaaaaaaaattcgagggggggccnggtncca

SEQ ID NO: 1332 - DNA, 409 bp, Homo sapiens
  SITE (178): n equals a,t,g, or c
  SITE (367): n equals a,t,g, or c
  SITE (403): n equals a,t,g, or c
ttggctacataacttttgggggttgtscaaaatgaaaactggaggcatctatttcaaaaactatgaagaatttcaagatggtaacagtakagcattataccaagcatggggcccgtctaggcatggggccttgtgctcaggtggcacacctgtgaggtaagtctaaggcagagatggnttcccagtgagccagagctcacccagcctaacctcaggcctcctgagtcccgtcactcctctttctatcagtgcaccccytcacccttgccctccgagcttgtctgcctccagggatctagccgcagccaggcagggaggggctggggcaaggagggagtccaagacttggcaggctccttccacccangcttaagagggctgacctcctggctgccttcccagncccaca

SEQ ID NO: 1333 - DNA, 992 bp, Homo sapiens
gctggaagagtaccaggccctgaccttcctgaccagaaatgaaattctgtgcatccatgacaccttcctgaagctctgccctcctgggaagtactacaaggaggcaacgctcaccatggaccaggtcagctccctgccagctctgcgggtcaaccctttcagagaccgtatctgcagagtgttctcccacaaaggcatgttctcctttgaggatgtgctgggcatggcatctgtgttcagcgagcaggcctgcccaagcctgaagattgagtatgcctttcgcatctatgattttaatgagaatggcttcattgatgaggaggatctgcagaggatcatcctgcgactgctgaacagtgatgacatgtctgaggacctcctgatggacctcacgaaccacgtcctgagtkagtcggatctggacaatgacaacatgctgtccttctcagagtttgaacatgcaatggccaagtctccagatttcatgactcctttcggattcrcttctggggatctgatgtagcggcaaatacctgacatggcagcctcgagggagaccacaggaatcgaaccccctccagcactggagggagctggtttgaagtgtgactttgtactgggcccacmctcacctctagaatattgtttattagataaaagaaaaagcttttccttagcccatcagatcatcgctttttaaatgcagggtcatacatggtactttttattaagaactgccctttccagggcttcagtgtgccagcgatgtcaagcaggctggggtggcaatctttctgagggaatagttcaaatctcaacccatgtcatagcagggggccaagccaaatgggatgaaggtccctagcaagatacatgtccttccctcccttcatcaaaacccccgacccccagcacctcacagttcacagctgcacagagacgtgcacatagcagccattccagccggtgcccggtccccactccccttctga

SEQ ID NO: 1334 - DNA, 349 bp, Homo sapiens
  SITE (1): n equals a,t,g, or c
ngtcttttcatatgctctgtccaattacaaaccctctttcttgccataagtaaccattatcttgacttttatagcaatcactttcttgtggtttctactkttatgatscacatatgcatccccaggcactgtaattttttattgccaattttttcttaatttgacatatcttttaagtctgccttttatgtacaggtttcttctgcatctcttttctttccctatattttatgtgattaaaaacccaagtcatttgacatataatccgatctgaattgtgctgatcacatactcatgatacagctcaatgtgttcttctgtccattgcagttagtttagtatcatcatg

SEQ ID NO: 1335 - DNA, 653 bp, Homo sapiens
  SITE (514): n equals a,t,g, or c
  SITE (536): n equals a,t,g, or c
  SITE (579): n equals a,t,g, or c
  SITE (581): n equals a,t,g, or c
  SITE (646): n equals a,t,g, or c
gattttttgaaactgctaagaaatctttccacccacaggttgtcagttgaggtagaagccctatctcctcagtgaatattctttaggatttttagtgtgctgtatttgattcattgctcttccactcttgctctgggccaaggttgccttctggtggctttcaggggtttctccttttcatataagctgcatttgaattgggctcctatgtttaattgggcaggcattactctcaaacatactggttttcaaagtagccacacccaggactcataaataagtatcctgatcacttcaccaaataagtgagcttctataaccagaatatcttgkgtattttatttttttcttttctctccctcttctttattctattttctatttgaataatgacatgcagataggatgccattatctgggatatttttcacattatctgtgtaggaatttaaatggatacttgcaggatagagtatctaaatcactcaatctctctggtataaaaataatgcanaaaggcttcagtgattagctgnctcacaactactattggtgggtcttctgaagwatgaatttkgngngkgaattccaaactaaggcttctcttttggacaaatcattacccaaaccaaaaccattaccaccnaaaaaag

SEQ ID NO: 1336 - DNA, 439 bp, Homo sapiens
  SITE (423): n equals a,t,g, or c
  SITE (437): n equals a,t,g, or c
  SITE (438): n equals a,t,g, or c
tttttttttttttttttttaaaactgcgtttcttatttattcgtaaacatctgggcaaacccagcgaaaccttccaaatcacaattgtttgagaaaccggctgtttttcaactttgtgaaacccaacttttgctgcagccacgaacctacgtgatcccagcggggtcggctttcatttgtctcctctgcccgaaatggatggcccccactttaactcggctgctgcccctcgcttgttctgctgctgccctccagccgtctgttgcttccctcccccgctcccatttttcagcttttcttgaaatctggcaagcgccagaaagggaaataacttccatccaccttaatttaaaaaaaaaaaaaaaaaaaaaaaaaaaaaaaaaaaaaaaaaaaaaaaaaaaaaaaaaaaaaaaaaaaaaaaanaaaaaaaaaaaaannc

SEQ ID NO: 1337 - DNA, 610 bp, Homo sapiens
  SITE (370): n equals a,t,g, or c
  SITE (406): n equals a,t,g, or c
  SITE (463): n equals a,t,g, or c
  SITE (543): n equals a,t,g, or c
  SITE (604): n equals a,t,g, or c
  SITE (608): n equals a,t,g, or c
gtttcgatggaacacccacatttttcagtggagtgaatatcaagaagtttttcctgctgaaacgtggtaacatagttttgatgtctggtagctcttcaaagagaaaccatctaaatgcaagggtgtgtactgcagcagagtggttttgtgtgcaacttctcagagggcatggacacaggtgtctgcatttgggccaggtggctccacccttccagagacagctgattaccaaggtttgcacacacacaaatttttctctgtcaagctaagtggcaaacaagaatggatcagatggggttgagccctggagttttaagataaggcagggtcactgtcatggcagctcaagacacatctgagcaaatgctgnggaaagcaagagtgaagaaccctggggagaagctgngagccagagagggaaaataaagaaagatgccgtggaacattccgtggaaaaccgtgncattctggagaaaaggtggaagttacgcaaaaggaagtgccgttccctgggaatcttctgaaggtacccgtaagcttggnttccttttccttaaccctgaaattatgctaagtttgagttgggaccctaatttttttgganaaangg

SEQ ID NO: 1338 - DNA, 502 bp, Homo sapiens
  SITE (240): n equals a,t,g, or c
ggcctggggcactgtggtagtgaccttggccacgctgatggttgtcactgtggatgccaagatctatgaacgctgcgagctggcggcaagactggagagagcagggctgaacggctacaagggctacggcgttggagactggctgtgcatggctcattatgagagtggctttgacaccgscttcgtggaccacaatcctgatggcagcagtgaatatggcattttccaactgaattctgnctggtggtgtgacaatggcattacacccaccaagaacctctgccacatggattgtcatgtgcaccagaccaccatgtccctctcttcccctcagacctgctcaatcgccatattctggatgacatcaaggtgtgccaagcakattgkgtcctcacagaatggggctttctgsctggacttcttggaggctacactggtctggccatgawtwatctkaatggcttaaggggtgtgaaatgcatgcgaaaaattgatccaaaaa

SEQ ID NO: 1339 - DNA, 663 bp, Homo sapiens
  SITE (468): n equals a,t,g, or c
  SITE (563): n equals a,t,g, or c
  SITE (613): n equals a,t,g, or c
  SITE (631): n equals a,t,g, or c
  SITE (640): n equals a,t,g, or c
gcggacccgccgagttcccacaaagcccaagaaatctgcctcctttcctgtcactgggacatccatccgaaggctgacctggccctctttgcagatatcccctgcaaatattaagaagaaggtgtaccacatggacatggaggcccagaggaagaacctgcagctcctgagtgaggagtctgagttgaggctgccccactacctgcgcagcaaagcactggagctcaccaccaccaccatggagctgggcgcgctcaggctgcagtacctgtgccataagtacatcttctatagacgcctccagagcctccggcaagaagcgatcaaccatgtacaaatcatgaaagaaacggaggcttcctacaaggcccagaacctctacatcttcctggaaaacattgaccgcctgcagagtctcaggctgcargcctggacggacaagcagaaggggctggaggagaagcaccngagagtgcctgaacaagcatggtgaccatgttccccaagcttcagctggagtggaacsgtcacctgaacattcctgaggtcaacttggccaaagnccaaagaaaatgcaargttgsctgcaagccttaaccccgggacaatccgncccaaaggggccccaacnttacaaggnaggcccctttcttggctaaggca

SEQ ID NO: 1340 - DNA, 1068 bp, Homo sapiens
gtcaactcaactgtcaaggtgtccattgtaccagctgggccatggatccctcccgcctgaaatctgactccacctgccaagagtctgagcctgcaggcctagatttcgactctgctggccaagattatttctctgcagcccaataattcgactctttctaccaagaattggacctggactctcttaacgargatcttctttcccagtccatgccacatgccaggacagagacctctgtgggcacatatgaatcccactcgacttctgaactggaggrtctgacagagcccgagcaaagagagctcaaaaccaaaytcactaaattggrggctgaaattgtaaccctacgccacgtactagcagccaaagagagacgctgtggggamctcaagaggaagttaggcctcaccgccttggtagggytgagacagaatctgtccaagagctggcttgatgtcaggttctcaacaccctatgtgaaacagaagacatcagctgctctgtccaccatgggcactctcatctgcaggaagcttggaggcgtgaagaagtcggccacactcagatcttttgaaggaaaccctaaaggagaaggaagcagaatataaccctctggagagctcaagacagtaggaacctggacggtgcttgtttgaattttctgatatctgattttcacacgaatatactttttgtttgttttccttttccattttcaaaatgccaagatctgggagcctctttcactcctctagacacactgcctgagatagaagtttgcatcttattggctgtgggcagagactaggacccttatgggtacatttcagtaatctctcactgcctaaaatggtaatccctccagcctaagaggatgattctgttttgttgactcttgaatgctcccccaacattcctttggttttcctataagcaaaaccaaataccactataaatacaaaagcatctggtaaactgtaaagttactcatgtatcccaaccctccacagatttctgaagacaaagttttgcttggattaaaacaagatgttttactattaaaaaaaa

SEQ ID NO: 1341 - DNA, 603 bp, Homo sapiens
gcttttttgttattcaccctgcagtttcttttctgattctgagatgcttgtgagagcttcagccatctaggaacgcatacgctgctgcttgaccacgctgtagcagtatggtttgaagtggtgaacatggatttttctcggcttcacatgtacagtcctccccagtgtgtgccggagaacacgggctacacgtatgcgctcagttccagctattcttcagatgctctggattttgagacggagcacaaattggaccctgtatttgattctccacggatgtcccgccgtagtttgcgcctggccacgacagcatgcaccctgggggatggtgaggctgtgggtgccgacagcggcaccagcagcgctgtctccctgaagaaccgagcggccaggtgagcaccgctgcacttcctctccatctgatctctaacaccagttaaaaccaagcttccatactttttggtctgtaaagccgcaccctgtctcgagcttaaggatatgtgtgtgtatgtgcgtgtacagacacacaaacctgycatataaagtggtagtttgctgcaaataaagactgaaaggaactctggaaaaaaaaaaataaaaaaa

SEQ ID NO: 1342 - DNA, 624 bp, Homo sapiens
  SITE (501): n equals a,t,g, or c
  SITE (533): n equals a,t,g, or c
  SITE (540): n equals a,t,g, or c
  SITE (571): n equals a,t,g, or c
  SITE (603): n equals a,t,g, or c
  SITE (610): n equals a,t,g, or c
gaatggatggaagtcctgaatggagcaactgctgacttcatctgcttggaaaaatagtccagaggaactcatatttggctactcagagcagtggagggggtgtccatgacgtggcagggggaaaatagacaactgaaacctcccgtgtgaactgcaaactgtgaccaagcaaggggaaaatgatctttctgtatatattttaatttcgtgcaaaggttttcaagcatctgtatcctaaacttacttctatgtcttgttcagcagaaaccagaggagtcctgtctgggggtcccatcattattcgggatacccgccgcagcggcctgccttcggttacccacatccccctggaacggatatctgtttggggcactacaatctatcctgtagaactatggccaaatctccatcaatgctttgctaatttctgggacttaactcgtagaatctacatacagggcttggaatttattcaaaaatgcatcttgaagaaaatgacanttttaaaccggttttaaaaaatatctttgatnaaaaaantcttgtaaaaacagaaatttggatagggttnaaaaaccttgacagcaaggcttcccgttgggnccggaancttggattcccttt

SEQ ID NO: 1343 - DNA, 594 bp, Homo sapiens
  SITE (544): n equals a,t,g, or c
gaaggctcgtttcctaagtgagagagagcctggctgaagctgtattaccattcattctccagcctccgaagtctcaaagcatcacttccaccatactctaactgwcaagacamacacaaaggcccagaaactgccagactgtcttctgaagtggctataatatttacactcccatcagcagtgtagaaggggtctcactatgttgtctggagtgctgtggtggagtggagtggctattcacaggattcttggaatggactgtaaaagtctggaatcaagactttgtgtttcctctctamcatgtaaagagcttagaagttgtcgctattgcccttacaacaaaatgaagctggacaaactgaaaatcaatgacttttcttggactcactatacagctgagttttgcagagtaaaccactaccctgaaatctggaaaggcaggtgcacccacagatcctcagctgagatccaattacctgaaatagaagctggcattaggaacactttaaaagagcctggtctgctgggacacagaatcacttgntccatctcatacattgatgatgattaatttggatggggacccttcaaaaa

SEQ ID NO: 1344 - DNA, 540 bp, Homo sapiens
  SITE (457): n equals a,t,g, or c
  SITE (485): n equals a,t,g, or c
  SITE (491): n equals a,t,g, or c
  SITE (526): n equals a,t,g, or c
  SITE (536): n equals a,t,g, or c
gcttgctctccaatgagaagccccggaaaagtgtcgcgcggaggcggagccacgcggtacagccacctctgcgcctgctcaaaggccctggacacttggagtctaggtcaggccagaaatgttgcttctgaagtcctgagtccacctcctagcactgccaagcagtccacctggaggtgatgagaacttccaggctttggtaatggacaactctgtatccctggagccttcattccttttggcattacagaaccacaagaagtcatctagaatcattgagattctcaactccattgggcaaactggaaccagcaaaatctcagatatctagaattgccactgcttccttgactctgtgatcaagtctacagccacagaatcctgattccctttggacattctagaatggcactttaaaaaaaaacaacccacccagtggatcctttcaaagcactgnttattctcttggctgggtgctctacagncagaanttggaggtatctaatatcaagaactcttaatctgncactttaagncttt

SEQ ID NO: 1345 - DNA, 528 bp, Homo sapiens
  SITE (230): n equals a,t,g, or c
  SITE (379): n equals a,t,g, or c
  SITE (386): n equals a,t,g, or c
  SITE (496): n equals a,t,g, or c
  SITE (507): n equals a,t,g, or c
gagacgcgctcggtgtgcagcagccgcagcagcagcagtggcggcggcgaccagcgcgctgggcaccagcaccagcaccaccagcccatctgcaagatctgcttccagggcgcggagcagggtgagttgttgaaccctgccgatgtgatgggtcagttcggtatacacatcagctgtgcctgctaaaatggatcagtgagagaggttcctggacctgtgaactttgctgntatagataccatgttatagccattaaaatgaaacaaccttgccagtggcagagcatttctataacactggttgagaaagttcagatgattgctgtaatcctaggatccctgttcttaatagccagtgtgacttggctcctctggtcagncttcagnccctatgcagtgtggcagaggaaggacatcctttttcagatctgctatggaatggatgggtttatggatctagggggcataggtctcattggtcatgaaggaactggagnttaacagaagnggttaaacgctggcgaagctg

SEQ ID NO: 1346 - DNA, 355 bp, Homo sapiens
  SITE (355): n equals a,t,g, or c
ggaacaaaagctggagctccaccgcggtggcggccgctctagaactagtggatcccccgggctgcaggaattcggcacgagtcgacgccttggagatggaaacgatttaaacatggaaaagagttctcctgctgcacttttggattttcctcttgagcaatgcttatgcaactacagccgagaattactgccatgaagccagtcatcaatgttatggaagcttccctcaacatttgaggagtagtacttcccctgcattataaacttacacaataaaaacttacaaaagtaagttaagaaactcttctgtaattaaaagataaaaaaaaaaaaaaaactcggggggggccccggn

SEQ ID NO: 1347 - DNA, 708 bp, Homo sapiens
  SITE (675): n equals a,t,g, or c
ggttttggatgttgctgccggcatgattaaaccaggtgtaactactgaagaaatagatcacgctgtacacttagcatgtattgcaagaaattgctacccttctcccctgaattattataatttcccaaagtcttgttgtacctcagtgaatgaagtcatttgccatggaataccagacagaaggcccttacaagaaggtgacattgttaatgtggatatcactctttatcgcaatggttatcatggggacctgaatgagacattttttgktggagaagtggatgatggagcacggaaacttgttcagaccacatatgagtgcctgatgcaagccattgatgcagtgaagcctggtgttcggtacagagaattgggaaacattatccagaagcatgcccaagcaaatgggttttcagttgttcgaagctattgtgggcatgggaatccacaagctttttcatacagctcccaatgtaccccactatgcttaaaaataaagcagttgggagtgatggaagtcgggccatgtatttacaattggagccaatggtttgtggaaggcggatggcaggatggaaacctgggccagatggttgggactgcggtggacaagagacgggaaagcggtctgcttcaattttgagccaccaacccttcctggttcaacaggacaantggttgtggaaaatccttaaccccggcggcttt

SEQ ID NO: 1348 - DNA, 547 bp, Homo sapiens
  SITE (479): n equals a,t,g, or c
  SITE (507): n equals a,t,g, or c
  SITE (519): n equals a,t,g, or c
  SITE (523): n equals a,t,g, or c
  SITE (526): n equals a,t,g, or c
tccaggatccgaaccagcaagctcacaacatttgtgaacttccccctaagagacctggacttaagagaatttgcctcagaaaacaccaaccatgctgtttacaacctgtacgctgtgtccaatcactccggaaccaccatgggtggccactatacagcctactgtcgcagtccagggacaggagaatggcacactttcaacgactccagcgtcactcccatgtcctccagccaagtgcgcaccagcgacgcctacctgctcttctacgaactggccagcccgccctcccgaatgtagcgccaggagccacgtcccttctcccttccccgtggtggccccgctccctaaattttttaaaaagacaaaaacaaaacaacaacaacaacacacaaacctgacaagagaaaaacaaacctgaagctgccgagcaggagtggatgcagcctgatcagggtctggagcaaggagcccgggctttnctgagctgtggccggcagggaagatcgnctgacgtggagncagnatngcccggccctcgcgttgattg

SEQ ID NO: 1349 - DNA, 632 bp, Homo sapiens
  SITE (502): n equals a,t,g, or c
  SITE (542): n equals a,t,g, or c
  SITE (563): n equals a,t,g, or c
  SITE (601): n equals a,t,g, or c
  SITE (607): n equals a,t,g, or c
ggtgaagacaagaggcataggtgatggacactaaaacaaagaccgcccaacatgtgtagcaccagtgggtgtgacctggaagaaatccccctagatgatgatgacctaaacaccatagaattcaaaatcctcgcctactacaccagacatcatgtcttcaagagcacccctgctctcttctcaccaaagctgctgagaacaagaagtttgtcccagaggggcctggggaattgttcagcaaatgagtcatggacagaggtgtcatggccttgcagaaattcccaatccagtgagaaggccataaaccttggcaagaaaaagtcttcttggaaagcattctttggagtagtggagaaggaagattcgcagagcacgcctgccaaggtctctgctcagggtcaaaggacgttggaataccaagattcgcacagcagcagtggccaggtgctttctaacgtggagcaagtgcttggagcatgaactgtggaccccaaagcatttncattggcaaccgagtagctgaaaatggtactcctgggcancaccacaaggggaacccaggnaggaaggtttaagggccaaagaagattttggaactgangggctnttcctttcaagtttcaaagggcacg

SEQ ID NO: 1350 - DNA, 1216 bp, Homo sapiens
  SITE (1001): n equals a,t,g, or c
  SITE (1077): n equals a,t,g, or c
  SITE (1079): n equals a,t,g, or c
  SITE (1190): n equals a,t,g, or c
  SITE (1209): n equals a,t,g, or c
  SITE (1216): n equals a,t,g, or c
aaccagggagccacacaggctcttggagtaagagtgtgagaaactggatgaagacagctgtattcttttggaagcgttcgagattggtctgtctctaccaactaaaaacttctagcttaagtgcagagatttaaggagatcaacaaaaactcagtctagacatattatgaggctgggagggtatcaacagacttgagttcttgtcagcaagatcacctgcttttaatattgtcctcagggtctgagcacatctggaagtgaggtcaatcaagktagaccccmaaaacttttgtgacaacagtgaagaggggaaaataaacacaccacaaacatgaacctcaaccccccgacatctgctcttcagatcgagggcaaaggcagccatattatggctagaaatgtaagctgctttctagtcaggcacacccctcatcccagaagagtctgccacatcaaaggcttgaataacattccaatctgtactgtgaatgatgatgagaatgcatttggaacattgtgggragttggccagtctaactacttagagaagaacaggataccatttgccaattgcagttacccctccagcactgcagtccaggagagccctgtaagaggaatgtcgccagccccaaacggtgccaaagtgcctccacggcctcattctgagcccagtagaaaaattaaagagtgcttcaaaacttccagtgagaatcccttagtaattaaaaaggaagaaattaaggccaaaagaccaccatcacctccaaaggcatgctctactcctggctcctgttcttcagggatgacaagtaccaagaatgatgtgaaagcaaacaccatttgcataccaaactatctggatcaggaaataaaaatcctggcaaagctctgtagcattttgcatactgattctctggcagaagttttacagtggctgcttcatgcaacttcaaaagaaaaagagtgggtctcagctttgattcattctgagcttgccnagataaacctggtaactcatcacagaagaaacacctcaatggaaccagcagcagaaactgggaagccacccacagntnaatcaccacccacaggtaaattgccccccaaattttactgcaaaattcaaaaagtgctttaccaagaagattcccgaaaggggatcaacccaacccaagtggcaagtcaanggatcttaaagaaaacccnggaagtn

(The sequence listing continues in the following parts.)
